United States Patent Application Publication US 2011/0214205 A1 - sequence listing, part 23

SEQ ID NO: 102500 - protein, 128 aa, Setaria italica
  misc_feature (75)..(75): Xaa can be any naturally occurring amino acid
  Transcript Sequence Number=SeqID_36526
  Gene Ontology: Mol. function=metal ion binding; Cellular component =integral to membrane
  Homolog annotation: Hit_ID=B6TA04; Match level="QueryCoverage=100%, HitCoverage=47%, E-value=9e-52, Identity=75%"; Hit description =Palmitoyltransferase PFA4
  Pfam annotation: Domain name=zf-DHHC; Domain location=15-79; Score =113.9; E_value=5.2e-31; Accession=PF01529.12; Description=DHHC zinc finger domain
GFVPDVEDAESTVHEIKRKGGDLRYCQKCCHYKPPRAHHCRVCKRCVLKMDHHCIWINNCVGHENYKIFLVFVLXLIIGSVLHSVPKDEQSGSDSSRSSIIICGVILSPLALALAVLLGWHIYLILQN

SEQ ID NO: 102501 - protein, 143 aa, Setaria italica
  misc_feature (117)..(117): Xaa can be any naturally occurring amino acid
  Transcript Sequence Number=SeqID_36527
  Gene Ontology: Mol. function=metal ion binding; Cellular component =integral to membrane
  Homolog annotation: Hit_ID=B6TA04; Match level="QueryCoverage=96%, HitCoverage=47%, E-value=4e-60, Identity=83%"; Hit description =Palmitoyltransferase PFA4
  Pfam annotation: Domain name=zf-DHHC; Domain location=1-40; Score =40.9; E_value=4.9e-09; Accession=PF01529.12; Description=DHHC zinc finger domain
CRVCKRCVLKMDHHCIWINNCVGHENYKIFLVFVLYAVVASFYALILIIGSVLHSVPKDEQSGSDSSRSSIIICGVILSPLALALAVLLGWHIYLILQNKTTIEYHEGVRAMWLAEXGGDLYHHPYDLGVYENLISVLPTTSL

SEQ ID NO: 102502 - protein, 295 aa, Setaria italica
  misc_feature (8)..(8): Xaa can be any naturally occurring amino acid
  misc_feature (10)..(10): Xaa can be any naturally occurring amino acid
  Transcript Sequence Number=SeqID_36528
  Gene Ontology: Mol. function=catalytic activity; Cellular component =chloroplast; Biological process=folic acid and derivative biosynthetic process
  Homolog annotation: Hit_ID=B6TJF9; Match level="QueryCoverage=97%, HitCoverage=73%, E-value=1e-151, Identity=92%"; Hit description=FolD bifunctional protein
  Pfam annotation: Domain name=THF_DHG_CYH; Domain location=5-122; Score=217.0; E_value=5e-62; Accession=PF00763.15; Description =Tetrahydrofolate dehydrogenasecyclohydrolase, catalytic domain
  Pfam annotation: Domain name=THF_DHG_CYH_C; Domain location=125-292; Score=329.3; E_value=7.9e-96; Accession=PF02882.11; Description =Tetrahydrofolate dehydrogenasecyclohydrolase, NAD(P)-binding domain
  Pfam module annotation: Pfam domain module=THF_DHG_CYH::THF_DHG_CYH _C; Domain location=5-122::125-292
DCTATIIXGXSIAEDIRLHIAEEVRQMKSVVGHVPGLAVVLVGNRRDSESYVRYKTKGCEEVGIKSLLAKLPGNCTEDEVMDSVSRFNEDPSVHGILVQLPLPQHMDEERILSAISLEKDVDGFHPLNVGNLALRSRKPLFLPCAAKACIELLLQSGIEIMGKHVTVIGRSKVVGLPTSLLLQRHHATVSVIHAFTTNPEAITRESDIVISAAGVANLVRGSWLKQGAVVIDVGTNPIEDPTSDYGYRLTGDVCFEEAVKVASAITPVPGGVGPVTIAMLLSNTLDSAKTGLWPK

SEQ ID NO: 102503 - protein, 222 aa, Setaria italica
  Transcript Sequence Number=SeqID_36529
  Gene Ontology: Mol. function=metal ion binding; Cellular component =endoplasmic reticulum membrane
  Homolog annotation: Hit_ID=B6TA04; Match level="QueryCoverage=99%, HitCoverage=75%, E-value=1e-109, Identity=86%"; Hit description =Palmitoyltransferase PFA4
  Pfam annotation: Domain name=zf-DHHC; Domain location=26-90; Score =114.7; E_value=3e-31; Accession=PF01529.12; Description=DHHC zinc finger domain
AVRRDPGRVPPGFVPDVEDAESTVHEIKRKGGDLRYCQKCCHYKPPRAHHCRVCKRCVLKMDHHCIWINNCVGHENYKIFLVFVLYAVVASFYALILIIGSVLHSVPKDEQSGSDSSRSSIIICGVILSPLALALAVLLGWHIYLILQNKTTIEYHEGVRAMWLAEKGGDLYHHPYDLGVYENLISVLGSNIFCWLCPVSNTVGNGLRYRTSYDIPISTQPL

SEQ ID NO: 102504 - protein, 183 aa, Setaria italica
  Transcript Sequence Number=SeqID_36530
  Gene Ontology: Mol. function=protein serine/threonine kinase activity; Cellular component=plasma membrane; Biological process =protein amino acid phosphorylation
  Homolog annotation: Hit_ID=B9RKH6; Match level="QueryCoverage=100%, HitCoverage=22%, E-value=2e-27, Identity=39%"; Hit description =Serine-threonine protein kinase, plant-type, putative
  Subcellular localization annotation: CTP_CleavageSite=32; ConfidenceScore=5.22e-01
LSSNQLSGEVPAALANPANDQSFLGNPGLCAAASLVGSLKGVRSCGAQPTDHVSPSLRAGLLAAGVALVALIAALAVFVVCDIRRRKRRLAQAEEPWKLTPFQPLDFGEAAVARGLADENLIGKGGSGRVYRVAYTSRSSGGAGGTVAVKRIWTGGKVDKGQERAFAAEVDVLGHIRHSNIVK

SEQ ID NO: 102505 - protein, 222 aa, Setaria italica
  misc_feature (74)..(74): Xaa can be any naturally occurring amino acid
  Transcript Sequence Number=SeqID_36531
  Gene Ontology: Mol. function=6-phosphofructokinase activity; Cellular component=6-phosphofructokinase complex; Biological process=glycolysis
  Homolog annotation: Hit_ID=Q01IL1; Match level="QueryCoverage=98%, HitCoverage=45%, E-value=1e-123, Identity=94%"; Hit description =OSIGBa0124N08.2 protein
EIAQQAIDAAHVEAVSAVNGVGLVKLMGRSTGHIALHATLSSRDVDCCLIPEVDFYLEGKGGLFEFLYERIKKXGHAVIVVAEGAGQELIPRTDDQKREQDESGNIVFLDVGPWLKSELGRWWKKEHPDELFTVKYIDPTYMIRAVPANATDNLYCTLLAHSAIHGVMAGFTGFVPGPINGTYSYIPLEDVAVAKNPVDVNDHKWAWVRSVTNQPDFLISQA

SEQ ID NO: 102506 - protein, 120 aa, Setaria italica
  misc_feature (115)..(115): Xaa can be any naturally occurring amino acid
  Transcript Sequence Number=SeqID_36532
  Gene Ontology: Mol. function=nucleotide binding; Biological process =defense response
  Homolog annotation: Hit_ID=B9GWC9; Match level="QueryCoverage=100%, HitCoverage=11%, E-value=3e-43, Identity=68%"; Hit description=NBS resistance protein
RVVLIVGLSGIGKSCLARQIASDPPSNFVDGAIEVSFGRWCSRTACNGSRSEYHKRLVRKICKFLVQIGSMTVNEEVGKDLDDVCYLLQTALVGRSMLILLDDVWEQDIVDRFNXLYDND

SEQ ID NO: 102507 - protein, 163 aa, Setaria italica
  misc_feature (127)..(127): Xaa can be any naturally occurring amino acid
  Transcript Sequence Number=SeqID_36533
  Gene Ontology: Mol. function=protein serine/threonine kinase activity; Biological process=protein amino acid phosphorylation
  Homolog annotation: Hit_ID=Q2R2M7; Match level="QueryCoverage=95%, HitCoverage=77%, E-value=4e-25, Identity=39%"; Hit description =Protein kinase domain containing protein
  Pfam annotation: Domain name=Pkinase; Domain location=1-160; Score= -100.1; E_value=0.016; Accession=PF00069.17; Description=Protein kinase domain
  Pfam annotation: Domain name=Pkinase_Tyr; Domain location=4-160; Score=-136.5; E_value=0.00012; Accession=PF07714.9; Description =Protein tyrosine kinase
  Pfam module annotation: Pfam domain module=Pkinase::Pkinase_Tyr; Domain location=1-160::4-160
KETAQAERACTRKYLMNEGMILSQIAHENVMKLLGYCLEGDTPIFIYEYPTKGSLSDILDRQEDFPLYLRVKIAVKIAEALEYLHSSTTGIIGLGNVALSNILLDDNFMPKLSDFSGACKLIQGERXNACGSVLSSCSLFVGFNKIRNDVYRFGVVLLALINS

SEQ ID NO: 102508 - protein, 66 aa, Setaria italica
  Transcript Sequence Number=SeqID_36534
  Subcellular localization annotation: CTP_CleavageSite=16; ConfidenceScore=5.15e-01
STTAKPPKCRGPGRVKLQNKAEVTRLGTFRVVRQFWVIFALASCYFLPFPASSKVRWMLKPFSSAS

SEQ ID NO: 102509 - protein, 77 aa, Setaria italica
  Transcript Sequence Number=SeqID_36535
  Subcellular localization annotation: CTP_CleavageSite=58; ConfidenceScore=5.16e-01
GASPNEVTFFPFRAHSSRTMQLPHTPAHGTGPIQKTSYTVFTPALTWHCQTCNCFSIEASSLRAMDSAINLQMSHRT

SEQ ID NO: 102510 - protein, 147 aa, Setaria italica
  misc_feature (61)..(61): Xaa can be any naturally occurring amino acid
  misc_feature (113)..(113): Xaa can be any naturally occurring amino acid
  Transcript Sequence Number=SeqID_36536
  Gene Ontology: Mol. function=glycerophosphodiester phosphodiesterase activity; Biological process=glycerol metabolic process
  Homolog annotation: Hit_ID=Q8GXJ8; Match level="QueryCoverage=58%, HitCoverage=23%, E-value=4e-17, Identity=44%"; Hit description=GPI -anchored protein
MTRFTDTVGSLQAANLTVFIGVLKNEFMNLGFDYFADPTVEIVTYSSAVMADGLITDYPAXCTAASYFRSPCSDMSLNLSYSILPAQPGALVHLAAPGALAPAAGPAPLLEPXDVVDPPLPSVKAVIAADALAPTGTADNTSSAASY

SEQ ID NO: 102511 - protein, 93 aa, Setaria italica
  Transcript Sequence Number=SeqID_36537
  Gene Ontology: Mol. function=hydrolase activity, acting on acid anhydrides, in phosphorus-containing anhydrides; Cellular component =nucleus; Biological process=nucleobase, nucleoside, nucleotide and nucleic acid metabolic process
  Homolog annotation: Hit_ID=Q8W4M7; Match level="QueryCoverage=83%, HitCoverage=9%, E-value=2e-15, Identity=52%"; Hit description=DNA repair helicase UVH6
  Pfam annotation: Domain name=DEAD_2; Domain location=2-92; Score= -60.3; E_value=0.094; Accession=PF06733.7; Description=DEAD_2
  Subcellular localization annotation: CTP_CleavageSite=25; ConfidenceScore=5.19e-01
PAASRSLLALGLSSRKNLCVHPQASAAAARDSVDTACRRLTASWVREKAASDPESTPLCEFYETFDRAAAAGDLASLMPPGVYTLADLRALGR

SEQ ID NO: 102512 - protein, 81 aa, Setaria italica
  Transcript Sequence Number=SeqID_36538
TSGWLAWAMVILCTVLAIGVIVAGVAVFAVYIFFKPKMPCLVVSDAHLVLLQYDQGGTVQNLQMSITVRAENNNSKADAAF

SEQ ID NO: 102513 - protein, 116 aa, Setaria italica
  misc_feature (69)..(69): Xaa can be any naturally occurring amino acid
  Transcript Sequence Number=SeqID_36539
  Gene Ontology: Mol. function=transposase activity; Biological process= transposition, DNA-mediated
  Homolog annotation: Hit_ID=Q3EBY6; Match level="QueryCoverage=78%, HitCoverage=22%, E-value=8e-33, Identity=69%"; Hit description=Mca2
  Pfam annotation: Domain name=PLAC8; Domain location=2-98; Score=49.4; E_value=1.4e-11; Accession=PF04749.9; Description=PLAC8 family
VYVSLVFTRYDNIGLKTLFFPCGTFSRIASVAKDRPMSSGEACNDIMAYSLILSCCCYTCCVRRKLRQXLDIAGGCCDDFLSHLLCCCCALVQEWREVEIRGAYGEFPTQMLLAIS

SEQ ID NO: 102514 - protein, 418 aa, Setaria italica
  Transcript Sequence Number=SeqID_36540
  Gene Ontology: Mol. function=transposase activity; Biological process= transposition, DNA-mediated
  Homolog annotation: Hit_ID=Q3EBY6; Match level="QueryCoverage=99%, HitCoverage=99%, E-value=1e-133, Identity=58%"; Hit description=Mca2
  Pfam annotation: Domain name=PLAC8; Domain location=298-396; Score =97.1; E_value=6.3e-26; Accession=PF04749.9; Description=PLAC8 family
MASWDNLGELSNIAQLTGLDAVKLISLIVKAASTARMHKSNCRRFARHLKLIGGLLEQLRVSELRKYPETREPLEQLEDALRRGYLLVNSCQDRSYLYLLAMGWNIVYQFRKAQSEIDNYLRLVPLITLVDNARIRDRLEYIERDQCEYSFDEEDKKVQDALLNPDPCTNPTIVLKKTLSCSYPNLPFNEALKKESEKLQVELQRSQSHMDLGSCEVIQHLLGVTKTVACTIPEEETNAKVSEKDSNYKESKGDVAKSYDDDDYPKKQKDACSTQRCSSPVSYGHDLVSRRGSYSDEWHADLLGCCSEPALCLKTLFFPCGTFSRIASVAKDRPMSSGEACNDIMAYSLILSCCCYTCCVRRKLRQKLDIAGGCCDDFLSHLLCCCCALVQEWREVEIRGAYGEKTKTTPPPCQYMEH

SEQ ID NO: 102515 - protein, 113 aa, Setaria italica
  misc_feature (73)..(73): Xaa can be any naturally occurring amino acid
  Transcript Sequence Number=SeqID_36541
  Gene Ontology: Mol. function=binding; Cellular component=cytoplasm; Biological process=regulation of phosphoprotein phosphatase activity
  Homolog annotation: Hit_ID=Q7XTT5; Match level="QueryCoverage=96%, HitCoverage=14%, E-value=2e-40, Identity=76%"; Hit description =OSJNBa0058K23.19 protein
MFWHVPGLSAASPVDTILDKENFKLEDLLDEDEIIQECKALNTRLINFLRDKVQVEQLLRYIVEEAPEDAEKXRIFRFPFIACEIFTCEVDVIMKTLVEDEDSYVILLSPSSI

SEQ ID NO: 102516 - protein, 138 aa, Setaria italica
  misc_feature (117)..(117): Xaa can be any naturally occurring amino acid
  Transcript Sequence Number=SeqID_36542
  Gene Ontology: Mol. function=2 iron, 2 sulfur cluster binding; Cellular component=chloroplast envelope; Biological process =oxidation reduction
  Homolog annotation: Hit_ID=B6ST74; Match level="QueryCoverage=77%, HitCoverage=20%, E-value=5e-49, Identity=87%"; Hit description =Pheophorbide a oxygenase
  Pfam annotation: Domain name=Rieske; Domain location=56-138; Score =56.9; E_value=7.6e-14; Accession=PF00355.18; Description=Rieske [2Fe- 2S] domain
  Subcellular localization annotation: CTP_CleavageSite=38; ConfidenceScore=5.01e-01
APLSSRRPIGASAAVLAPGRRRRGARLSVYAVASETPRAEEAHAPSWEGAFDWLDQWYPFAPVCDLDPRAPHGKTVLGLSVVAWYDRGAGEWRVFDDACPHRLAPLSEGRIDDKGRXLQCVYHGWCFDGAGACKFTPH

SEQ ID NO: 102517 - protein, 57 aa, Setaria italica
  Transcript Sequence Number=SeqID_36543
  Subcellular localization annotation: CTP_CleavageSite=21; ConfidenceScore=5.07e-01
MLAVCRSPGVGAADGGAQSLGQQNKKSGWSPFATKRRPPSPPPQESIFDSNPDAAVL

SEQ ID NO: 102518 - protein, 207 aa, Setaria italica
  Transcript Sequence Number=SeqID_36544
  Homolog annotation: Hit_ID=Q2QXG0; Match level="QueryCoverage=76%, HitCoverage=99%, E-value=8e-60, Identity=65%"; Hit description=HVA22- like protein j, putative, expressed
  Pfam annotation: Domain name=TB2_DP1_HVA22; Domain location=2-94; Score=65.2; E_value=2.5e-16; Accession=PF03134.11; Description =TB2DP1, HVA22 family
MLGELLSKILLLLFGYAMPAFECFKTVETRPNDAHMLRFWCQYWIIVAMVIAFESVISWMPMYSEMKLAFFVYLWYPKTKGSDVVYDTFLRPIVMQYEPNIEQRLLHLRAKSGQLISFYVKNFADKGTAFFMDVLRYVVSEKPEGSSAEQKNKKSGWSPFATKRRPPSPPPQESIFDSNPDAAVLAEALRATIGGANPRRPTNGKHY

SEQ ID NO: 102519 - protein, 59 aa, Setaria italica
  Transcript Sequence Number=SeqID_36545
QQAHQGSRTMSLNYHLIEQHEFMKSHNDNHERANNTQQNHMFLSPLVLLSHIIMNLLSY

SEQ ID NO: 102520 - protein, 246 aa, Setaria italica
  Transcript Sequence Number=SeqID_36546
  Gene Ontology: Mol. function=catalytic activity; Cellular component =endoplasmic reticulum membrane; Biological process=metabolic process
  Homolog annotation: Hit_ID=B6TCB9; Match level="QueryCoverage=100%, HitCoverage=93%, E-value=1e-130, Identity=91%"; Hit description =Protein SUR2
  Pfam annotation: Domain name=FA_hydroxylase; Domain location=97-211; Score=128.0; E_value=3e-35; Accession=PF04116.5; Description=Fatty acid hydroxylase
MAFAVSDEILGTFVPIAVYWLYSGLYVVLDGLGMDDYRLHPKGEEVRNIVSKWTVVRGVLVQQAFQIAVSQFHSHHLGDESGTVRKQPSALVIALQFIIAMFVMDTWQYFMHRYMHINKFLYKHVHSKHHTLVVPYAFGALYNHPLEGLILDTIGGALSFLISGMTPRTGIFFFSFATIKTVDDHCGLWLPGNILHLFFSNNSAYHDIHHQLYGNKYNFSQPFFVMWDKILGTYMPYTLETRKGGG

SEQ ID NO: 102521 - protein, 149 aa, Setaria italica
  misc_feature (6)..(6): Xaa can be any naturally occurring amino acid
  Transcript Sequence Number=SeqID_36547
  Gene Ontology: Mol. function=nucleic acid binding
  Homolog annotation: Hit_ID=Q8S634; Match level="QueryCoverage=97%, HitCoverage=30%, E-value=3e-39, Identity=47%"; Hit description =Putative DNA binding protein
MKCLDXFNIRTACTTLPALQEGHVIGYRKMLPSECCLDKFMELCLFKHGLDTNYDYHVAVKLTYGASLETKWWPSSLVLQGPGLQPALKSVRVSKAMSALQSFVELLKAWSFFGHNKLIIKEQVLLNCSSTLPTWDKAASNLTLHSSKN

SEQ ID NO: 102522 - protein, 93 aa, Setaria italica
  Transcript Sequence Number=SeqID_36548
LEGGSSRSSTVHKMALHVKLLTLTAVYLYLSCQKKDTHSSPIILPFETQSLEKSSAVTSVLLSMAPEIVSSMNEALPNTEMEQLEPSYGYTDD

SEQ ID NO: 102523 - protein, 31 aa, Setaria italica
  Transcript Sequence Number=SeqID_36549
VHQLYRNYTTWMLKKKFFVAKLNLRYSKRLS

SEQ ID NO: 102524 - protein, 808 aa, Setaria italica
  Transcript Sequence Number=SeqID_36550
  Gene Ontology: Mol. function=nucleic acid binding; Cellular component= chloroplast; Biological process=photosynthesis
  Homolog annotation: Hit_ID=Q8H902; Match level="QueryCoverage=98%, HitCoverage=88%, E-value=0.0, Identity=81%"; Hit description =Putative DNA binding domain containing protein
  Pfam annotation: Domain name=SAP; Domain location=457-491; Score =46.5; E_value=1e-10; Accession=PF02037.19; Description=SAP domain
AERARAADAAGVADTIYDMVAAGRSRRLPSFHGLVAAHVLAGDAEGAMQSLRRELSSGVRPLQETFVALVRIFAKKGLSTRGMEILAAMERYKYDIRKAWLILVEELVKNRYLEDANTVFLKGAKGGLRGTDEIYDLLIEEDCKAGDHSNALTVAYQMEAFGRMATTFHFNCLLSVQATCGIPEVAFATFENMEYGGEDYMKPDTESYNWVIQAFTRASSYDRAGDVAELLGMMVEDHKRIQPNARTYALLVECFTKYCMVNESIRHFRALRRIPGGTKVLYNEGNCGDPLSLYLRSLCLDGRPVELLEALEAMANDNQSIAPRAMILNRKYRTLVSSWIEPLQEEADVGFEIDYVARYIEEGGLTGERKRWVPRRGKTPLDPDEFGFAYSNPIETSFKQRCFEELKLYHRRLLITFRNEGPGILGDVSEDDVRRVVERLKKLVVGPKKNVAKPKAASKMVVSELKTELEAQGLPTDGTRQVLYQRVQKARRINRSRGIPLWVPPVEDEEEVDEGLDELISRIKLEDGNTEFWKRRFLGETRNYLCEEDSNEDDQDLDDELDDDDDDEDDDESTKEAEEDEIDDEEAVEQTENQAGDETKDKQAKGPNQHLQMIGVQLLKDLEKTSVSSKKSKRMPEIDDDEDWFPEDPIEAFKVMQDERMFDVSDMYTTADAWGWTWEREIKNKMPRKWSQEWEVELAIKIMHKVIELGGTPTIGDCAIILRAAMRAPLPSAFIPILQTTHSLGYKFGSPLYDEVVLLCLDLEEIDAAIAVVAEMETNGIKVPDETLDKVLASKQSGNSALPPPTEE

SEQ ID NO: 102525 - protein, 120 aa, Setaria italica
  misc_feature (111)..(111): Xaa can be any naturally occurring amino acid
  Transcript Sequence Number=SeqID_36551
MRAALFGAERSGAADLVGGGKVLFWPEGKARALVEPRSVLDCTLSHSPNNSKSTLSSSLGGGAADSTGVAAVSDSSASAATEATKWGSPGEHGGGGKEDWAGGCELPPIPXGLDMGLVGG

SEQ ID NO: 102526 - protein, 611 aa, Setaria italica
  Transcript Sequence Number=SeqID_36552
  Gene Ontology: Mol. function=protein binding; Cellular component =nucleus; Biological process=regulation of transcription, DNA -dependent
  Homolog annotation: Hit_ID=Q6H6L3; Match level="QueryCoverage=98%, HitCoverage=85%, E-value=0.0, Identity=63%"; Hit description=Scl1 protein
  Pfam annotation: Domain name=GRAS; Domain location=251-610; Score =369.7; E_value=5.4e-108; Accession=PF03514.6; Description=GRAS family transcription factor
EDWAGGCELPPIPAGLDMGLVGGDNWDAVLGNAAAAGQDQTFLNWIIGAAGDLDQPGPPLPVHQQPLLDNAGFGFPAADPPGFSLDPHLGGVASDMSSPGAVSHTTNSGGGSKASSAFGLFSTESASLQPPPPPVLFHEGIDTKPPLLGAQPPGPLLHQFQHQPPPTTTFFMPLPSFPNHNQQSPLLQPPPKRHQSMGDDLYLARNRAAAAAQGLPFPPLHGPAPFQLQPSPPPPHGAMKTTAAEAAQQQLLDELAAAAKAAEAGNSVGAREILARLNHQLPPLGKPFLRSASYLKEALLLALAEGHHGACRLTSPLDVALKLAAYKSFSDLSPVLQFTNFTATQALLDEIAGSTAACIHVIDFDLGVGGQWASFLQELAHRRGAGGAALPFVKLTAFVSTASHHPLELRLTRDNIAQFAADLGIPFEFNAVSADTINPAELISTTGDEVVAVVLPVGCSARAPPLPAILRLVKQLGPKIVIAIDHGGDRADLPFSQHFLNCFQSCVFLLDSLDAAGIDPDSAFKIEKFLIQPRIEDMVLGRGKADKPMAWRSAFAAGGFAPVPPSNLADAQADCLLKRVQVRGFHVEKCGVGLTLYWQRGELVTVSAWRC

SEQ ID NO: 102527 - protein, 95 aa, Setaria italica
  Transcript Sequence Number=SeqID_36553
RDEESPPTPTLRIDQIEPSGWDSDPAPQQHPPVEPTGWDSDPPPPPPAQQQPAPAPAEKPRMSWADMAQEDELAAAAEEDAAATAADDGEEGGEV

SEQ ID NO: 102528 - protein, 279 aa, Setaria italica
  Transcript Sequence Number=SeqID_36554
  Homolog annotation: Hit_ID=Q9LP79; Match level="QueryCoverage=88%, HitCoverage=74%, E-value=3e-35, Identity=33%"; Hit description =T1N15.7
LGHPGLQESASGNEVAPASESSSYFTGRGAGKPGFISFQGNSFQKTAVEGVPHPGKEASRLVWFIGPTILVSFLVLPSLYLRKVLSAMFEDSLLTDFLILFFTEALFYGGVAIFVFLIDKVWRPLQQVAPKSYIWSKSRFFRISSVTTMVLSLIIPLLTMGMVWPWTGPAASATLAPYLVGLVVQFAFEQYARHRKSPSWPVIPIIFKVYRLHQLNRAAQLVTALTFSVRGTETTNQTLAIMNSLGALLTVLQILGVICVWSLSSFLMRFLPSSDIPDP

SEQ ID NO: 102529 - protein, 84 aa, Setaria italica
  Transcript Sequence Number=SeqID_36555
  Gene Ontology: Mol. function=transferase activity, transferring glycosyl groups; Biological process=metabolic process
  Homolog annotation: Hit_ID=Q2QNK9; Match level="QueryCoverage=89%, HitCoverage=15%, E-value=2e-24, Identity=72%"; Hit description=UDP -glucoronosyl and UDP-glucosyl transferase family protein, expressed
MAAGPPQRPLRVVLFPWLAFGHLLPHLELAERLASRGHRATLVSTPGNVARLPPALGVDFVALPLPRVDGLPDGAESTNSIPQT

SEQ ID NO: 102530 - protein, 74 aa, Setaria italica
  Transcript Sequence Number=SeqID_36556
FAWLIIKTLTSTGTGRKASRDLLGDRLRGTQWSTSRSGSREHHWHEHDHHRWQWQHYSIAFSSSSSSAYVRSLG

SEQ ID NO: 102531 - protein, 77 aa, Setaria italica
  Transcript Sequence Number=SeqID_36557
NSQELKHRNTDRCPYAITHEKFIARSSGVATITKPKQDELKGKPGCLRHLQARDNHHHQKTRLPLVRNLLHRHQLLH

SEQ ID NO: 102532 - protein, 270 aa, Setaria italica
  misc_feature (203)..(203): Xaa can be any naturally occurring amino acid
  Transcript Sequence Number=SeqID_36558
  Gene Ontology: Mol. function=protein dimerization activity; Biological process=regulation of RNA metabolic process
  Homolog annotation: Hit_ID=Q7XE06; Match level="QueryCoverage=100%, HitCoverage=38%, E-value=2e-84, Identity=55%"; Hit description=HAT family dimerisation domain containing protein
  Pfam annotation: Domain name=hATC; Domain location=181-263; Score =119.0; E_value=1.6e-32; Accession=PF05699.6; Description=hAT family dimerisation domain
KRIALDCKIRWNSTYIILSTALLYQDVFERLAAHAPCVPIQEDWQFAKDLCDRLKMFYDITELLSGTSYDKFNKYWLDVHGLIAVVAVLDPRYKLHLLNVFFIKIHESESIATDAVHKVKDLLYNLVLEYQDSMESVATTDGAQTRQTSVPVDSVVEDWMEVFDDYMSKKPHVCTTYVRTELDLYLEEEVLPRTQELDVIQWXKVGGLKYPILRKIARDILAIPVTTVASKLVFSTSDRIISPHRSRLAPSMVEALMCMQAWSRADMLGE

SEQ ID NO: 102533 - protein, 121 aa, Setaria italica
  Transcript Sequence Number=SeqID_36559
  Subcellular localization annotation: CTP_CleavageSite=74; ConfidenceScore=5.66e-01
RGDTKAAARRAQPPPQLPRPPPPPPLPPPSLPMSLPACLLPAPRSNGNRNLGPTAEPRSHLNLSPVVLVRPPTRCTREHGGVGRVGGGGAAAEREEGKDSGRRLDPVNTDGSAGRAGEAEH

SEQ ID NO: 102534 - protein, 136 aa, Setaria italica
  Transcript Sequence Number=SeqID_36560
  Gene Ontology: Mol. function=receptor activity
  Homolog annotation: Hit_ID=Q6Z027; Match level="QueryCoverage=87%, HitCoverage=4%, E-value=4e-30, Identity=58%"; Hit description =Putative death receptor interacting protein
VKTRVKQVHLIFDLLLDIESCIPLEDYEHNNKLFLSNIANDLLRLGPRCKGRYVPLASLTKRLGAKSLLRLKPNLLSETAYAYIEDDVCCAATTFLKSFLETLRDECWNDDGVDQGYDAFRVLNFRIQVPASKEAS

SEQ ID NO: 102535 - protein, 64 aa, Setaria italica
  Transcript Sequence Number=SeqID_36561
IIIDWFMPSCSIPLKEVPLYGKASNHAVQAKDQGRPSCVCMIEAFPAPLSPLIIIDWFMPSCSI

SEQ ID NO: 102536 - protein, 109 aa, Setaria italica
  Transcript Sequence Number=SeqID_36562
  Gene Ontology: Mol. function=nucleotide binding; Cellular component =myosin complex
  Homolog annotation: Hit_ID=Q70AI6; Match level="QueryCoverage=41%, HitCoverage=25%, E-value=3e-13, Identity=80%"; Hit description =Putative myosin heavy chain class VIII A1 protein (Fragment)
TLQSFIRGERARIHFDNLVNRWRAAVLIQKYTRRRLAATMFNDQLKHIVLLQSGNPCDKRGSIIIILPQISVSISSIFSYVSAVMRGCLARRKYKCLQNERESKASRNK

SEQ ID NO: 102537 - protein, 109 aa, Setaria italica
  Transcript Sequence Number=SeqID_36563
RVCSSRFFIVSSKTSRELFCVAAAGAITAAAESITTRKSASHQPKPVTYTKVQIPKHRIQQPNCTGARNFPIPHQNSDNFRGKSPLTHQGLKSGNPPKPKSHTQTQNSS

SEQ ID NO: 102538 - protein, 169 aa, Setaria italica
  misc_feature (6)..(6): Xaa can be any naturally occurring amino acid
  Transcript Sequence Number=SeqID_36564
  Gene Ontology: Mol. function=protein serine/threonine kinase activity; Biological process=protein amino acid phosphorylation
  Homolog annotation: Hit_ID=C4P7U3; Match level="QueryCoverage=100%, HitCoverage=37%, E-value=4e-80, Identity=85%"; Hit description=CBL -interacting protein kinase 11
  Pfam annotation: Domain name=Pkinase; Domain location=1-135; Score= -22.9; E_value=4e-07; Accession=PF00069.17; Description=Protein kinase domain
DVKPEXNLLLDERGDLKLTDFGLCAFADRQLGADGLTATACGSPAYVAPEILLKRRYDPGKADVWSCGVVLFSLTAGYLPFNDGNIMGMYRKICSGRFRCPKWFSLELRSLIGRMLDREPNTRIKIGEILDHPWLRKDGMSFVITATTSSSHPTPEVVKWEAESELARE

SEQ ID NO: 102539 - protein, 58 aa, Setaria italica
  Transcript Sequence Number=SeqID_36565
RRWFMESASDADGGGGTVAPAPGGQGQLAVGFTVVPGFKVGRTVIQCRVYLSRSDPRP

SEQ ID NO: 102540 - protein, 76 aa, Setaria italica
  Transcript Sequence Number=SeqID_36566
SGFVGLYFAYLADRSILQYFLAFYNFMLKLTTLDFTSSNALSCTEKKSIYSLVVIGLVVLRRIWMPSSKYAFGCIL

SEQ ID NO: 102541 - protein, 464 aa, Setaria italica
  Transcript Sequence Number=SeqID_36567
  Gene Ontology: Cellular component=anchored to membrane
MAPAGRLLAVAALSVLCLQGLLRDSGTAFAQSHLPLHRIVHAGENDGGLMPELPPSGLMPMPELSPSGSPKPFVPFLAPAPLAPFFNNSTPKLSGKCTLNFTAVDKLMTTTAVDCFTSFAPFLANVICCPQLQATLTILIGQSSKQTGSLALDPTVANYCLSDVQELLLSQGASDNLHSLCSVHLSNVTEGSCPVSTVDAFESVIDSSKLLEACRKIDPVNECCSQTCQSAINEAAQKISSKDGGLTSYTGSLKIDSCRNVVLRWLSSRLDPPSAKQMLRQISNCNVNGVCPLSFPDTSKVAKECGGIIKNGTTCCKAMLSYVAHLQKQSFITNLQALNCASFLGAKLQKMNVSTNVYSSCQITLKDFSLQVGSQESGCLLPSMPSDASFDRISGISFTCDLNDNIAAPWPSSMQAPSSSCNKSVNIPERPAATSAQNGVNHKNLKLSLLVSLVSLVLVLVVQV

SEQ ID NO: 102542 - protein, 169 aa, Setaria italica
  misc_feature (118)..(118): Xaa can be any naturally occurring amino acid
  Transcript Sequence Number=SeqID_36568
  Gene Ontology: Mol. function=nucleic acid binding; Cellular component= nucleus
  Homolog annotation: Hit_ID=B6TK84; Match level="QueryCoverage=98%, HitCoverage=82%, E-value=1e-90, Identity=71%"; Hit description=Zinc finger CCCH type domain-containing protein ZFN-like 2
  Pfam annotation: Domain name=zf-CCCH; Domain location=129-155; Score =39.4; E_value=1.4e-08; Accession=PF00642.16; Description=Zinc finger C-x8-C-x5-C-x3-H type (and similar)
  Pfam annotation: Domain name=zf-CCCH; Domain location=38-64; Score =42.6; E_value=1.5e-09; Accession=PF00642.16; Description=Zinc finger C-x8-C-x5-C-x3-H type (and similar)
  Pfam annotation: Domain name=zf-CCCH; Domain location=83-109; Score =42.2; E_value=2e-09; Accession=PF00642.16; Description=Zinc finger C- x8-C-x5-C-x3-H type (and similar)
  Pfam module annotation: Pfam domain module=zf-CCCH::zf-CCCH::zf-CCCH; Domain location=129-155::38-64::83-109
AADTSSPDPSALYGEGMWQQMAMNSGATMQPGPYPERPGEPDCTYYLRTGLCRFGMSCRFNHPPDRNLAIASARMKGEYPERVGQPECQYYLKTGTCKFGPTCKFHHPREKAGIAGRXQLNTLGYPLRPNEKECAYYLKTGQCKYANTCKFHHPELFNAVPSSRGSPIY

SEQ ID NO: 102543 - protein, 47 aa, Setaria italica
  Transcript Sequence Number=SeqID_36569
  Gene Ontology: Mol. function=nucleic acid binding; Cellular component= nucleus
  Homolog annotation: Hit_ID=Q5JLB5-2; Match level="QueryCoverage=100%, HitCoverage=14%, E-value=2e-20, Identity=97%"; Hit description =Isoform 2 of Zinc finger CCCH domain-containing protein 12
  Pfam annotation: Domain name=zf-CCCH; Domain location=1-20; Score =23.1; E_value=0.0011; Accession=PF00642.16; Description=Zinc finger C-x8-C-x5-C-x3-H type (and similar)
YYLKTGTCKFGPTCKFHHPREKAGIAGRVQLNTLGYPLRPNEKECAY

SEQ ID NO: 102544 - protein, 314 aa, Setaria italica
  Transcript Sequence Number=SeqID_36570
  Gene Ontology: Mol. function=nucleic acid binding; Cellular component= nucleus
  Homolog annotation: Hit_ID=B6TK84; Match level="QueryCoverage=97%, HitCoverage=86%, E-value=1e-160, Identity=75%"; Hit description=Zinc finger CCCH type domain-containing protein ZFN-like 2
  Pfam annotation: Domain name=zf-CCCH; Domain location=201-227; Score =46.3; E_value=1.2e-10; Accession=PF00642.16; Description=Zinc finger C-x8-C-x5-C-x3-H type (and similar)
  Pfam annotation: Domain name=zf-CCCH; Domain location=247-273; Score =49.9; E_value=9.9e-12; Accession=PF00642.16; Description=Zinc finger C-x8-C-x5-C-x3-H type (and similar)
  Pfam annotation: Domain name=zf-CCCH; Domain location=3-29; Score =30.9; E_value=5.1e-06; Accession=PF00642.16; Description=Zinc finger C-x8-C-x5-C-x3-H type (and similar)
  Pfam annotation: Domain name=zf-CCCH; Domain location=49-75; Score =39.4; E_value=1.4e-08; Accession=PF00642.16; Description=Zinc finger C-x8-C-x5-C-x3-H type (and similar)
  Pfam module annotation: Pfam domain module=zf-CCCH::zf-CCCH::zf -CCCH::zf-CCCH; Domain location=201-227::247-273::3-29::49-75
MREEGEIWVYYLKTGTCKFGPTCKFHHPREKAGIAGRVQLNTLGYPLRPNEKECAYYLKTGQCKYANTCKFHHPELFNAVPSSRGSPIYPSVHSSASAGPQSYTGTMASWAFPRASYIPSPRWQSPSNYAPMIVPQGLVQVPSWNSYPGQLQSPGAQQTYGTSQQGEPSAGNQGMLSPYRSSSFPVPQYALQRENVFPERPDQPECQYYMKTGDCKFGAVCKFHHPRVRSLPPPDCVLSPMGLPIRPGEELCKFYSRYGICKFGANCKFDHPMTAPMGVYAYGFSASASPASASTNVPMARRLLGSPSGSGYAS

SEQ ID NO: 102545 - protein, 154 aa, Setaria italica
  Transcript Sequence Number=SeqID_36571
  Gene Ontology: Mol. function=protein dimerization activity; Biological process=regulation of RNA metabolic process
  Homolog annotation: Hit_ID=Q8LNK9; Match level="QueryCoverage=79%, HitCoverage=16%, E-value=2e-37, Identity=58%"; Hit description=HAT family dimerisation domain containing protein
  Pfam annotation: Domain name=hATC; Domain location=28-121; Score =108.3; E_value=2.5e-29; Accession=PF05699.6; Description=hAT family dimerisation domain
SWPVTRSDFLDPDQLRPRALIQSTGACTLRKLKLSPRSPAAVFFTLSVDIHTKDFDILDWWKVAGTLYPTLRLIARDIFAIPITTVASESAFTTSGRVLSEHRSRLTSPMLEALMCSQDWIRNKYKGLVTDEGQPSSFWSALQEVQEGLQDLAI

SEQ ID NO: 102546 - protein, 134 aa, Setaria italica
  misc_feature (77)..(77): Xaa can be any naturally occurring amino acid
  Transcript Sequence Number=SeqID_36572
  Gene Ontology: Mol. function=protein dimerization activity; Biological process=regulation of RNA metabolic process
  Homolog annotation: Hit_ID=Q8LNK9; Match level="QueryCoverage=100%, HitCoverage=16%, E-value=3e-48, Identity=67%"; Hit description=HAT family dimerisation domain containing protein
  Pfam annotation: Domain name=hATC; Domain location=18-101; Score =139.9; E_value=7.8e-39; Accession=PF05699.6; Description=hAT family dimerisation domain
FSARVASTKPAAIRFRSELDRYLEDEMVDILTKDFDILDWWKVAGTRYPTLRLIARDIFAIPITTVASESAFSTSGXVLSEHRSRLTSQMLEALMCSQDWIRNKYKGLVTHEGQPASFWSVLQEVQEGLQDLAI

SEQ ID NO: 102547 - protein, 115 aa, Setaria italica
  Transcript Sequence Number=SeqID_36573
  Gene Ontology: Mol. function=protein dimerization activity
  Homolog annotation: Hit_ID=Q7XD60; Match level="QueryCoverage=76%, HitCoverage=10%, E-value=4e-19, Identity=56%"; Hit description=HAT family dimerisation domain containing protein
  Pfam annotation: Domain name=hATC; Domain location=5-82; Score=17.4; E_value=0.00049; Accession=PF05699.6; Description=hAT family dimerisation domain
  Subcellular localization annotation: CTP_CleavageSite=60; ConfidenceScore=5.56e-01
SWPVTRSDFLDPDQLRPRALIQSTGACTLRKLKLSPRSPAAVFFTLSASESAFTTSGRVLSEHRSRLTSPMLEALMCSQDWIRNKYKGLVTDEGQPSSFWSALQEVQEGLQDLAI

SEQ ID NO: 102548 - protein, 94 aa, Setaria italica
  Transcript Sequence Number=SeqID_36574
  Gene Ontology: Mol. function=serine-type carboxypeptidase activity; Cellular component=extracellular region; Biological process =proteolysis
  Homolog annotation: Hit_ID=B6U5K7; Match level="QueryCoverage=100%, HitCoverage=19%, E-value=7e-45, Identity=92%"; Hit description =Serine carboxypeptidase F13S12.6
SGDQDSVVPLLGSRTLVRELAHTMGLPVTVPYSTWFRKGQVGGWVTDYGNFLTFATVRGASHMVPFAQPDRALGLFRSIILGQRLPNTTNPPID

SEQ ID NO: 102549 - protein, 473 aa, Setaria italica
  misc_feature (165)..(165): Xaa can be any naturally occurring amino acid
  Transcript Sequence Number=SeqID_36575
  Gene Ontology: Mol. function=serine-type carboxypeptidase activity; Cellular component=extracellular region; Biological process =proteolysis
  Homolog annotation: Hit_ID=B6U5K7; Match level="QueryCoverage=99%, HitCoverage=99%, E-value=0.0, Identity=89%"; Hit description=Serine carboxypeptidase F13S12.6
  Pfam annotation: Domain name=Peptidase_S10; Domain location=38-461; Score=644.7; E_value=8.7e-191; Accession=PF00450.14; Description =Serine carboxypeptidase
MAAASWRDLALAMAAVGWVLGGCLVWAFPAEDLVARLPGQPPVTFRQFAGYVDVDVKAGRSLFYYFAEAQEDAAAKPLTLWLNGGPGCSSIGGGAFTELGPFYPRGDGRGLRLNKKSWNKASNLLFVESPAGVGWSYSNTSSDYNTGDVRTADDMYRFLLGWYKXFPEYRSRALFLTGESYAGHYIPQLTDVLLTHNEKSKGFKFNIKGVAIGNPLLKLDRDVPATYEYFWSHGMISDEIFLAISHSCDFEDYTFNDPHNESKSCNDAISEANTIVGQYVNNYDVILDVCYPSIVMQELRLRKYATKISVGVDVCMTYERFFYFNLPEVQQALHANRTHLKYQWGMCSDVLNYSNTDGNINILPILQRIVEHKIPLWVFSGDQDSVVPLLGSRTLVRELAHTMGLPVTVPYSTWFRKGQVGGWVTEYGNFLTFATVRGASHMVPFAQPDRALGLFRSIILGQRLPNTTNPPID

SEQ ID NO: 102550 - protein, 50 aa, Setaria italica
  Transcript Sequence Number=SeqID_36576
MSKSGTLDLASGLGGKIDKEEVKSAVDEYEKYHGYYGGKEEARKSNYTDI

SEQ ID NO: 102551 - protein, 76 aa, Setaria italica
  Transcript Sequence Number=SeqID_36577
  Gene Ontology: Mol. function=sterol 24-C-methyltransferase activity; Cellular component=vacuole; Biological process=metabolic process
  Homolog annotation: Hit_ID=O49215; Match level="QueryCoverage=100%, HitCoverage=22%, E-value=5e-23, Identity=72%"; Hit description=(S) -adenosyl-L-methionine:delta 24-sterol methyltransferase
MSKSGTLDLASGLGGKIDKEAETAAVDEYEKYHGYYGGKEEARKSNYTDMVNKYYDLATSFYEYGWGESFHFAHRW

SEQ ID NO: 102552 - protein, 342 aa, Setaria italica
  Transcript Sequence Number=SeqID_36578
  Gene Ontology: Mol. function=sterol 24-C-methyltransferase activity; Cellular component=vacuole; Biological process=metabolic process
  Homolog annotation: Hit_ID=O49215; Match level="QueryCoverage=99%, HitCoverage=99%, E-value=1e-177, Identity=87%"; Hit description=(S) -adenosyl-L-methionine:delta 24-sterol methyltransferase
  Pfam annotation: Domain name=CMAS; Domain location=42-295; Score= -152.2; E_value=0.0002; Accession=PF02353.12; Description =Cyclopropane-fatty-acyl-phospholipid synthase
  Pfam annotation: Domain name=Methyltransf_11; Domain location=105 -203; Score=104.2; E_value=4.5e-28; Accession=PF08241.4; Description =Methyltransferase domain
  Pfam annotation: Domain name=Methyltransf_12; Domain location=105 -201; Score=50.3; E_value=7.3e-12; Accession=PF08242.4; Description =Methyltransferase domain
  Pfam annotation: Domain name=Sterol_MT_C; Domain location=212-341; Score=300.8; E_value=2.9e-87; Accession=PF08498.2; Description =Sterol methyltransferase C-terminal
  Pfam annotation: Domain name=Ubie_methyltran; Domain location=40-256; Score=-110.7; E_value=0.00029; Accession=PF01209.10; Description =ubiECOQ5 methyltransferase family
  Pfam module annotation: Pfam domain module=CMAS::Methyltransf _11::Methyltransf_12::Sterol_MT_C::Ubie_methyltran; Domain location =42-295::105-203::105-201::212-341::40-256
MSKSGTLDLASGLGGKIDKEEVKSAVDEYEKYHGYYGGKEEARKSNYTDMVNKYYDLATSFYEYGWGESFHFAHRWNGESLRESIKRHEHFLALQLGLKPGMKVLDVGCGIGGPLREIARFSSTSVTGLNNNEYQITRGKELNRLAGVSGTCDFVKADFMKMPFVDNTFDAVYAIEATCHAPDPVGCYKEIYRVLKPGQCFAVYEWCITDHYDPNNATHKRIKDEIELGNGLPDIRSTRQCLQAVKDAGFEVVWDKDLAEDSPLPWYLPLDPSRFSLSSFRLTSVGRMVTRTMVKALEYVGLAPQGSQRVSNFLEKAAEGLVEGGKKEIFTPMYFFLARKPE

SEQ ID NO: 102553 - protein, 82 aa, Setaria italica
  misc_feature (75)..(75): Xaa can be any naturally occurring amino acid
  Transcript Sequence Number=SeqID_36579
  Gene Ontology: Mol. function=mannose-6-phosphate isomerase activity; Biological process=carbohydrate metabolic process
  Homolog annotation: Hit_ID=B6U796; Match level="QueryCoverage=100%, HitCoverage=18%, E-value=9e-36, Identity=91%"; Hit description =Mannose-6-phosphate isomerase
AITEFRALCGFAGIEELKDVLRTVPEVEGLVGHEDTGKLMSMKEYDGGSEVKSSLQSAFAKLMTASKDMVSEAIXKLISRLN

SEQ ID NO: 102554 - protein, 164 aa, Setaria italica
  Transcript Sequence Number=SeqID_36580
  Gene Ontology: Mol. function=mannose-6-phosphate isomerase activity; Cellular component=cytoplasm; Biological process=carbohydrate metabolic process
  Homolog annotation: Hit_ID=B6U796; Match level="QueryCoverage=100%, HitCoverage=37%, E-value=3e-83, Identity=88%"; Hit description =Mannose-6-phosphate isomerase
KIRTLTDKEQLVLSLEKQYQEDVGVLAALFFNYVKLSPGEALYIGANEPHAYLSGECIECMATSDNVVRAGLTPKYRDVQTLCSMLTYKQAFPEILRGVPVQPHVRRYTPPFDEFEVDCCLVPPGELVVIAPVPGPSMFLIMMGEGELQIDSLSAGEKAKDGDV

SEQ ID NO: 102555 - protein, 72 aa, Setaria italica
  Transcript Sequence Number=SeqID_36581
MRSNRYIKFNKGPTIVYTTESRPTRTKNFDHYKPRPEGVMMADAGSKSGRGALVILEGLDRSGKSSQCARLL

SEQ ID NO: 102556 - protein, 69 aa, Setaria italica
  Transcript Sequence Number=SeqID_36582
  Homolog annotation: Hit_ID=B6TN98; Match level="QueryCoverage=53%, HitCoverage=14%, E-value=2e-10, Identity=78%"; Hit description =Thymidylate kinase
LFILTVLRATIYAIFVNQFSNGSQYHFTFVFLKVVDGSLPMETVEEQLRELATNCIQKCQEKPLTNLTW

SEQ ID NO: 102557 - protein, 84 aa, Setaria italica
  misc_feature (29)..(29): Xaa can be any naturally occurring amino acid
  Transcript Sequence Number=SeqID_36583
  Gene Ontology: Mol. function=thymidylate kinase activity; Cellular component=cytosol; Biological process=dTTP biosynthetic process
  Homolog annotation: Hit_ID=B6TN98; Match level="QueryCoverage=79%, HitCoverage=25%, E-value=4e-28, Identity=92%"; Hit description =Thymidylate kinase
FSANRWEKRALMESKLLGGTTLIVDRYSXYSGVAFSAAKGLDIQWCKAPDVGLIAPDLVIYLDVQPEVFCLYSLGLWCSIMKVF

SEQ ID NO: 102558 - protein, 238 aa, Setaria italica
  Transcript Sequence Number=SeqID_36584
  Gene Ontology: Mol. function=thymidylate kinase activity; Cellular component=cytosol; Biological process=dTTP biosynthetic process
  Homolog annotation: Hit_ID=B6TN98; Match level="QueryCoverage=95%, HitCoverage=89%, E-value=1e-99, Identity=78%"; Hit description =Thymidylate kinase
  Pfam annotation: Domain name=Thymidylate_kin; Domain location=41-217; Score=185.8; E_value=1.2e-52; Accession=PF02223.9; Description =Thymidylate kinase
  Subcellular localization annotation: CTP_CleavageSite=25; ConfidenceScore=5.14e-01
RSGKAAAPSGLGLFATRRRAFQGVRMADAGSKSGRGALVVLEGLDRSGKSSQCARLLSYLEGQGCRAEGWRFPDRGTCVGQMISAYLANESQLDDRTIHLLFSANRWEKRALMESKLLGGTTLIVDRYSYSGVAFSAAKGLDIQWCKAPDVGLIAPDLVIYLDVQPEKAAERGGYGGERYEKIEFQKRVADHYHSLRDSTWKVVDGSLPMETVEEHLRELATNCIQECQEKPLTNLTW

SEQ ID NO: 102559 - protein, 182 aa, Setaria italica
  Transcript Sequence Number=SeqID_36585
  Gene Ontology: Mol. function=ubiquitin-protein ligase activity; Cellular component=ubiquitin ligase complex; Biological process =protein amino acid phosphorylation
  Homolog annotation: Hit_ID=Q2HTK4; Match level="QueryCoverage=34%, HitCoverage=7%, E-value=2e-19, Identity=68%"; Hit description =Protein kinase; U box
  Pfam annotation: Domain name=U-box; Domain location=106-175; Score =38.6; E_value=2.5e-08; Accession=PF04564.7; Description=U-box domain
RGSARANWEIAQLKQANHLPMDEQNTFPDELQEAMSEELTFEWRILGMDDVLGTAGQDTEPQKEHVRIQTDLDAGGRELQALLSQSKLTAFSPSSVIQSPYDEECVPSYFLCPILQEPMRDPHVAADGFTYEAGAIRGWLDGRNDASPVTAHRELAPNFALGAVIQDYTMRRTDGQEQTEIN

SEQ ID NO: 102560 - protein, 50 aa, Setaria italica
  Transcript Sequence Number=SeqID_36586
  Gene Ontology: Mol. function=transferase activity, transferring glycosyl groups; Cellular component=plasma membrane; Biological process=sucrose metabolic process
  Homolog annotation: Hit_ID=Q7DMV5; Match level="QueryCoverage=90%, HitCoverage=19%, E-value=3e-21, Identity=97%"; Hit description =Sucrose synthase type 2 (Fragment)
TVSATPAFYEAFGLTVVEAMTCGLPTFATAYGGPAEIIVHGVSGYHIDPY

SEQ ID NO: 102561 - protein, 89 aa, Setaria italica
  Transcript Sequence Number=SeqID_36587
  Gene Ontology: Mol. function=transferase activity, transferring glycosyl groups; Cellular component=plasma membrane; Biological process=sucrose metabolic process
  Homolog annotation: Hit_ID=P31924; Match level="QueryCoverage=95%, HitCoverage=10%, E-value=1e-47, Identity=100%"; Hit description =Sucrose synthase 1
VSRYGNLVACLLAHKMGVTHCTIAHALEKTKYPNSDLYWKKFEDHYHFSCQFTTDLIAMNHADFIITSTFQEIAGNKDTVGQYESHMAF

SEQ ID NO: 102562 - protein, 43 aa, Setaria italica
  Transcript Sequence Number=SeqID_36588
  Gene Ontology: Mol. function=transferase activity, transferring glycosyl groups; Biological process=sucrose metabolic process
  Homolog annotation: Hit_ID=P31924; Match level="QueryCoverage=100%, HitCoverage=5%, E-value=6e-17, Identity=97%"; Hit description =Sucrose synthase 1
FWKYVSNLERRETRRYLEMLYALKYRTMASTVPLAVEGEPSSK

SEQ ID NO: 102563 - protein, 93 aa, Setaria italica
  misc_feature (14)..(14): Xaa can be any naturally occurring amino acid
  Transcript Sequence Number=SeqID_36589
  Gene Ontology: Mol. function=transferase activity, transferring glycosyl groups; Cellular component=plasma membrane; Biological process=sucrose metabolic process
  Homolog annotation: Hit_ID=B2ZG28; Match level="QueryCoverage=88%, HitCoverage=9%, E-value=8e-39, Identity=97%"; Hit description =Trehalose-6-phosphate synthase
IIAEYNSAIPEAEXREKLKDGAFEDVLRAAQEAIVIPPWVALAIRPRPGVWEYVRVNVSELAVEELRVPEYLQFKEQLVEEGYKFALKLGICI

SEQ ID NO: 102564 - protein, 182 aa, Setaria italica
  Transcript Sequence Number=SeqID_36590
  Gene Ontology: Mol. function=electron carrier activity; Biological process=response to oxidative stress
  Homolog annotation: Hit_ID=Q9FEQ8; Match level="QueryCoverage=93%, HitCoverage=50%, E-value=9e-52, Identity=60%"; Hit description =Peroxidase 2
  Pfam annotation: Domain name=peroxidase; Domain location=1-181; Score= 157.4; E_value=4.2e-44; Accession=PF00141.15; Description=Peroxidase
GFAGVGSSSTEPANPRPEKLGPPNFPSLRGFEVIDAAKAALERYCPGVVSCADVVQYAARDAAFFLSGFKVDYRLPAGRFDGSVSLESESLAFLPPPFFNLSQLITSFQVKGMNIDDLVVLSGSHTIGRSHCSSFSDRISTPPSDMDPGLATALKQQCPANPNFTNDPTVVQDVVTADKLDN

SEQ ID NO: 102565 - protein, 158 aa, Setaria italica
  Transcript Sequence Number=SeqID_36591
  Gene Ontology: Mol. function=electron carrier activity; Biological process=response to oxidative stress
  Homolog annotation: Hit_ID=Q9FEQ8; Match level="QueryCoverage=85%, HitCoverage=40%, E-value=2e-40, Identity=58%"; Hit description =Peroxidase 2
  Pfam annotation: Domain name=peroxidase; Domain location=40-158; Score=66.6; E_value=9e-17; Accession=PF00141.15; Description =Peroxidase
MAASFRLAVAVTCALLLATACQGLHVGYYKKTCPRVEHIVRDEVKKFVYKNAGIGAGLIRMLFHDCFVEGCDGSVLLDPTPANPQPEKLSPPNFPSLRGFEVIDAAKDAVEKACPGVVSCADIVAFAARDAAYFLSGFNMKIDMPAGRLDGRVSSSSD

SEQ ID NO: 102566 - protein, 215 aa, Setaria italica
  Transcript Sequence Number=SeqID_36592
  Gene Ontology: Mol. function=transferase activity, transferring glycosyl groups; Cellular component=plasma membrane; Biological process=sucrose metabolic process
  Homolog annotation: Hit_ID=P31924; Match level="QueryCoverage=95%, HitCoverage=25%, E-value=1e-115, Identity=94%"; Hit description =Sucrose synthase 1
  Pfam annotation: Domain name=Glycos_transf_1; Domain location=1-147; Score=31.6; E_value=2.9e-06; Accession=PF00534.12; Description =Glycosyl transferases group 1
VVWFNLCWFVLVGDHGNPSKDKEEQAEFKKMFDLIEQYNLNGHIRWISAQMNRVRNGELYRYICDTQGAFVQPAFYEAFGLTVVEAMTCGLPTFATAYGGPAEIIVHGVSGYHIDPYQGDKASALLVDFFEKCKEDSSHWSKISQGGLQRIEEKYTWKLYSERLMTLTGVYGFWKYVSNLERRETRRYLEMLYALKYRTMASTVPLAVEGEPSSK

SEQ ID NO: 102567 - protein, 190 aa, Setaria italica
  misc_feature (14)..(14): Xaa can be any naturally occurring amino acid
  Transcript Sequence Number=SeqID_36593
  Gene Ontology: Mol. function=transferase activity, transferring glycosyl groups; Cellular component=plasma membrane; Biological process=sucrose metabolic process
  Homolog annotation: Hit_ID=P31924; Match level="QueryCoverage=98%, HitCoverage=22%, E-value=1e-106, Identity=96%"; Hit description =Sucrose synthase 1
  Pfam annotation: Domain name=Sucrose_synth; Domain location=1-189; Score=11.0; E_value=5e-11; Accession=PF00862.11; Description=Sucrose synthase
PKILIVTRLLPDAXTGTTCGQRLDKVLGTEHCHILRVPFRTENGIVRKWISRFEVWPYLETYTDDVAHEIAGELQANPDLIIGNYSDGNLVACLLAHKMGVTHCTIAHALEKTKYPNSDLYWKKFEDHYHFSCQFTTDLIAMNHADFIITSTFQEIAGNKDTVGQYESHMAFTMPGLYRVVHGIDVCDSV

SEQ ID NO: 102568 - protein, 375 aa, Setaria italica
  Transcript Sequence Number=SeqID_36594
  Gene Ontology: Mol. function=electron carrier activity; Biological process=response to oxidative stress
  Homolog annotation: Hit_ID=Q9FEQ8; Match level="QueryCoverage=79%, HitCoverage=89%, E-value=1e-101, Identity=58%"; Hit description =Peroxidase 2
  Pfam annotation: Domain name=peroxidase; Domain location=93-339; Score=383.5; E_value=3.6e-112; Accession=PF00141.15; Description =Peroxidase
MASSWLGVGVLILAALLGSATAQAGGYGYGGYPAKVAAAPSTAPEGAPAPPAVPAVPAYAPVPPMQTPPPPAAGTPLRFGFYRRSCPPAEHLVKLVVGKAIRNNPGVGAGLIRMAFHDCFVQGCDGSVLLDPTPANTRPEKLGPPNFPSLRGFEVIDAAKALLERYCPGVVSCADVVQFAARDAAFFLSGYKVNYRLPAGRFDGSISLENETLAFLPPSSFNLSELVQSFVAKGLDVDDLVVLSGSHSIGRSHCSSFSDRISTPPSDMDPGLATILKGQCPANPNITNDPTVVQDIVTPNRLDNQYYRNVLRRKVLFNSDATLLTSRETARKVVENAVVRGSWERKFARAMVKMSLIEIKNAANGEIRKNCRVVN

SEQ ID NO: 102569 - protein, 565 aa, Setaria italica
  misc_feature (216)..(216): Xaa can be any naturally occurring amino acid
  misc_feature (338)..(338): Xaa can be any naturally occurring amino acid
  misc_feature (449)..(449): Xaa can be any naturally occurring amino acid
  misc_feature (495)..(495): Xaa can be any naturally occurring amino acid
  Transcript Sequence Number=SeqID_36595
  Gene Ontology: Mol. function=transferase activity, transferring glycosyl groups; Cellular component=plasma membrane; Biological process=sucrose metabolic process
  Homolog annotation: Hit_ID=P31924; Match level="QueryCoverage=98%, HitCoverage=67%, E-value=0.0, Identity=94%"; Hit description=Sucrose synthase 1
  Pfam annotation: Domain name=Sucrose_synth; Domain location=11-561; Score=1331.7; E_value=0; Accession=PF00862.11; Description=Sucrose synthase
MGEAAGDRVLSRLHSVRERIGDSLSAHPNELVAVFTRLKNLGKGMLQPHQIIAEYNSAIPEAEREKLKDGAFEDVLRAAQEAIVIPPWVALAIRPRPGVWEYVRVNVSELAVEELRVPEYLQFKEQLVEEGPNNNFVLELDFEPFNASFPRPSLSKSIGNGVQFLNRHLSSKLFHDKESMYPLLNFLRAHNYKGMTMMLNDRIRSLSALQGALRKXAEEHLSSLPADTPYSDFHHRFQELGLEKGWGDCAKRAQETIHLLLDLLEAPDPSTLEKFLGTIPMVFNVVILSPHGYFAQANVLGYPDTGGQVVYILDQVRAMENEMLLRIKQCGLDITPKXTLIVTRLLPDATGTTCGQRLEKVLGTEHCHILRVPFRTENGIVRKWISRFEVWPYLETYTDDVAHEIAGELQANPDLIIGNYSDGNLVACLLAHKMGVTHCTIAHALEKTXYPNSDLYWKKFEDHYHFSCQFTTDLIAMNHADFIITSTFQEIAGNXDTVGQYESHMAFTMPGLYRVVHGIDVFDPKFNIVSPGADMSIYFPYTESHKRLTSLNLRVEGGLVRLESE

SEQ ID NO: 102570 - protein, 746 aa, Setaria italica
  misc_feature (734)..(734): Xaa can be any naturally occurring amino acid
  Transcript Sequence Number=SeqID_36596
  Gene Ontology: Mol. function=D-alanine-D-alanine ligase activity; Cellular component=cell wall; Biological process=cell wall organization and biogenesis
  Homolog annotation: Hit_ID=B9T6C3; Match level="QueryCoverage=99%, HitCoverage=73%, E-value=0.0, Identity=65%"; Hit description=D -alanine-D-alanine ligase, putative
  Pfam annotation: Domain name=Dala_Dala_lig_C; Domain location=24-249; Score=-51.0; E_value=2.3e-06; Accession=PF07478.5; Description=D-ala D-ala ligase C-terminus
  Pfam annotation: Domain name=Dala_Dala_lig_N; Domain location=288 -468; Score=25.7; E_value=7.2e-10; Accession=PF01820.13; Description =D-ala D-ala ligase N-terminus
  Pfam module annotation: Pfam domain module=Dala_Dala_lig_C::Dala_Dala_ lig_N; Domain location=24-249::288-468
KHSASLELDVQGFLTVPNFLVEKDKLAKRELEAWFQTTNLSKENGKVIVKPTRAGSSIGVVVAYGVNDAAQKAEEIISEGIDDRVIVEVFLEGGTEFTAIVVDVGAANNSEPVVLLPTEVELQHSSSSDSKEDTIFNYRRKYLPTQQVVYHTPPRFPAEVIDCIRQGLSVLFRRLGLHDFARIDGWFLPSPVTSLPSAENSGKFGNTKYGTILFTDINLVSGMEQTSFLFQQASAVGFSHSQILRTVVQHACSRFPSLVPFNNARTALSRKLQPSKQAESIQKGTSRQKVFVIFGGDTSERQVSLMSGTNVWLNLQGFDDLDVTPCFLAPANGYFSSHDQDFSDISREVWMLPYSLVLRHTTEEVHAACVEATEPERVEITSRLREQVMNELGPALSKHDWFAGFDIAYEQPIKYSLQQWINHAKEAGAVVFIAVHGGIGEDGTIQTLLESAGVPYTGPGPLASRTCMNKVATSLAVDHLTSYGVHTIPKDVRATEEVLKSSLVDIWNELKAKLQTETVCVKPARDGCSTGVARLCCPKDLEVYTNALREKFQRLPANCLSRAHGVIEMPVTPPESLIFEPFIETDEIIISNKLENGSARHLVWKGENDWLEITVGVVGKRGEMHSLNPSITVKESGDILSLEEKFQGGTGINLTPPPATIMSEDALQRCKRSIEMMANSLGLEGFSRIDAFVNVRSGEVLLIEVNTVPGMTPSTVLIHQALAEEPPVYPHKFXRTLLDLAFERAK

SEQ ID NO: 102571 - protein, 84 aa, Setaria italica
  Transcript Sequence Number=SeqID_36597
GEGAGAAEKENLLPAGADAHDELVALNLAAVARAAGTPAAGPLFVRGRLYDLYSARRNERLKRKHGFPYSYEDSASARRPTPPG

SEQ ID NO: 102572 - protein, 136 aa, Setaria italica
  Transcript Sequence Number=SeqID_36598
  Homolog annotation: Hit_ID=B6TR29; Match level="QueryCoverage=36%, HitCoverage=25%, E-value=4e-11, Identity=66%"; Hit description=GATA zinc finger family protein
ALSLDAAQQQDQQPSKKAAADPQQDDQQPQPKKKPAADSQEDQQPQPKKKPAADSQEDQQLQPKKPAAAASSTTTNKKDKKKKKDRQVTVELRLVGFGKEVMLKQRRQMRRKKCMSEEERAAVLLMAMSSGVIYAS

SEQ ID NO: 102573 - protein, 265 aa, Setaria italica
  misc_feature (47)..(47): Xaa can be any naturally occurring amino acid
  Transcript Sequence Number=SeqID_36599
  Gene Ontology: Mol. function=electron carrier activity; Cellular component=integral to membrane; Biological process=oxidation reduction
  Homolog annotation: Hit_ID=C4PJN6; Match level="QueryCoverage=100%, HitCoverage=47%, E-value=1e-103, Identity=70%"; Hit description =Cytochrome P450 monooxygenase
  Pfam annotation: Domain name=p450; Domain location=2-265; Score= -170.3; E_value=0.0019; Accession=PF00067.14; Description=Cytochrome P450
SEFIKMHLQATTSLKMDLSGSLSIIVGQLMPFLHQPFRQVLTRIPGXADREIDRVNNELSRQMDGMVADRIAAREHSPASEQHKDFLSVVLAAKERGASAQELLTPDYLSGLTYEHLLAGSATTSFTLSCTVYLIAKHPEVEEKLLREIDAFGAHDRVPTADDLQTKFPYLDQARMRMSLAFDNESVLKESMRFYMVSPLVARETSERVEIGAYVLPKGTWVWLALGVLAKDPNNFPDPELFRPERFEPTCDEERRRHPYAFIPF

SEQ ID NO: 102574 - protein, 174 aa, Setaria italica
  misc_feature (84)..(84): Xaa can be any naturally occurring amino acid
  Transcript Sequence Number=SeqID_36600
  Gene Ontology: Cellular component=chloroplast
  Homolog annotation: Hit_ID=B9SWD4; Match level="QueryCoverage=77%, HitCoverage=55%, E-value=9e-18, Identity=37%"; Hit description=ATP binding protein, putative
  Pfam annotation: Domain name=PPR; Domain location=61-95; Score=26.1; E_value=0.00015; Accession=PF01535.12; Description=PPR repeat
  Pfam annotation: Domain name=PPR; Domain location=96-130; Score=14.6; E_value=0.17; Accession=PF01535.12; Description=PPR repeat
  Pfam module annotation: Pfam domain module=PPR::PPR; Domain location =61-95::96-130
LKRFKGDEEKQADFVRRHVARLLKADKLAVLGELERQEEVDLAVKMFRIIQKEDWYKPDIYIYKDLIIALAKCKKMEEAMVIWXNMRDENLFPDSQTYAEVIRGFLRYGSPSDAMNIYEDMKKSPDPPEELPFRVLLKGLLPHPLLRTRVKQDFEELFPERHIYDPPEEIFGMR

SEQ ID NO: 102575 - protein, 108 aa, Setaria italica
  Transcript Sequence Number=SeqID_36601
  Gene Ontology: Mol. function=protein kinase activity
  Homolog annotation: Hit_ID=Q10PA0; Match level="QueryCoverage=100%, HitCoverage=13%, E-value=8e-51, Identity=84%"; Hit description =Pentatricopeptide, putative, expressed
  Pfam annotation: Domain name=PPR; Domain location=2-36; Score=50.0; E_ value=9.2e-12; Accession=PF01535.12; Description=PPR repeat
  Pfam annotation: Domain name=PPR; Domain location=37-71; Score=5.9; E_ value=1.8; Accession=PF01535.12; Description=PPR repeat
  Pfam annotation: Domain name=PPR; Domain location=73-107; Score=7.9; E_value=1; Accession=PF01535.12; Description=PPR repeat
  Pfam module annotation: Pfam domain module=PPR::PPR::PPR; Domain location=2-36::37-71::73-107
VISWTSIISAYGKHGHGREAVDLFEKMLGQGLEPDSIAFVAVLAACSHAGLLDVGKRYFGSMTSRYHITPKAEHYTCMVDLLGRAGCISEAYDFITTMPIEPNERVWG

SEQ ID NO: 102576 - protein, 110 aa, Setaria italica
  Transcript Sequence Number=SeqID_36602
LLSRGESRAVYDPVSGREPLWLPQNSPLEGTFISECLLQGHSDDATSFRVVSLQHRGRDQMVRAAEYDSCTRQWHRHQWVKNIKRPQHDQAMHSDRLIFWRYEDAFIALA

SEQ ID NO: 102577 - protein, 81 aa, Setaria italica
  Transcript Sequence Number=SeqID_36603
  Gene Ontology: Mol. function=phosphatidylinositol phosphate kinase activity; Cellular component=plasma membrane; Biological process =phosphatidylinositol metabolic process
  Homolog annotation: Hit_ID=Q8SA90; Match level="QueryCoverage=67%, HitCoverage=7%, E-value=2e-23, Identity=92%"; Hit description =Putative phosphatidylinositol-4-phosphate-5-kinase
  Pfam annotation: Domain name=MORN; Domain location=35-57; Score=36.0; E_value=1.5e-07; Accession=PF02493.12; Description=MORN repeat
  Pfam annotation: Domain name=MORN; Domain location=58-80; Score=36.8; E_value=8.9e-08; Accession=PF02493.12; Description=MORN repeat
  Pfam module annotation: Pfam domain module=MORN::MORN; Domain location=35-57::58-80
MRRVAPAMIAVGGAGGEETAEGAVVEKTLQNGDVYRGGFSQGAPHGKGKYVWADGCMYEGEWRKGKASGKGRFSWPSGATF

SEQ ID NO: 102578 - protein, 59 aa, Setaria italica
  Transcript Sequence Number=SeqID_36604
LVRHIISQKHMLFAKVTMAECCDIGKHATLLQKRSRTATSQNSMVHLQQIRTMFANKNK

SEQ ID NO: 102579 - protein, 82 aa, Setaria italica
  Transcript Sequence Number=SeqID_36605
  Gene Ontology: Cellular component=chloroplast
  Homolog annotation: Hit_ID=Q2QN60; Match level="QueryCoverage=98%, HitCoverage=16%, E-value=2e-38, Identity=93%"; Hit description =Pentatricopeptide, putative, expressed
GGLIKEAVDMIKSMPWEPNEVIWGSLLSACRLLKNVEYAELAVDELSKLQPSNAGNYAVLSNIYAEAGQWSDMAKARVQMKE

SEQ ID NO: 102580 - protein, 172 aa, Setaria italica
  misc_feature (81)..(81): Xaa can be any naturally occurring amino acid
  Transcript Sequence Number=SeqID_36606
  Gene Ontology: Mol. function=protein binding
  Homolog annotation: Hit_ID=B6T940; Match level="QueryCoverage=93%, HitCoverage=45%, E-value=1e-74, Identity=85%"; Hit description=VTC2
LSTFQAYYLKVQYPVEKATTEKLTTLVNGVSIAQLVGYPVSGFVFEGGASLEDLSCMVSKVCIFLQENNRPFNVLISESGXRVFLLPQCYAEKQLLGKASQEFLEMRINPAIWELSGHLVLKRKKDYDEASELYICRFLVEAAVSETEFQQLKQCVLDFLTASAACNSDIDS

SEQ ID NO: 102581 - protein, 115 aa, Setaria italica
  Transcript Sequence Number=SeqID_36607
  Gene Ontology: Biological process=response to stress
  Homolog annotation: Hit_ID=B6SNQ1; Match level="QueryCoverage=55%, HitCoverage=38%, E-value=3e-21, Identity=71%"; Hit description =Universal stress protein
LRVETCVEKGDPRDVICGAAEKAGADMLVMGSHGYRFLQRALMGSVTNHRVQNCKCPVVVVKRPGTNLRPRARSSTSRLDDDDGPCIYFVSFGAYKILYRVSCNEHLCKYILKKK

SEQ ID NO: 102582 - protein, 92 aa, Setaria italica
  Transcript Sequence Number=SeqID_36608
  Gene Ontology: Mol. function=aspartic-type endopeptidase activity
  Homolog annotation: Hit_ID=Q94D20; Match level="QueryCoverage=77%, HitCoverage=14%, E-value=1e-13, Identity=59%"; Hit description =Nucleoid DNA-binding protein cnd41-like
MAPHAALLLLLLAASNAAALAKTVEYHSFVATPLSPHPYTAPAVTGADDEDVFGGSLAAAEDAAAVRFRVVHRDAFAVNATAAELLKHRLRR

SEQ ID NO: 102583 - protein, 61 aa, Setaria italica
  Transcript Sequence Number=SeqID_36609
  Pfam annotation: Domain name=LRR_1; Domain location=13-35; Score =13.6; E_value=0.76; Accession=PF00560.25; Description=Leucine Rich Repeat
  Pfam annotation: Domain name=LRR_1; Domain location=36-58; Score=8.6; E_value=6.9; Accession=PF00560.25; Description=Leucine Rich Repeat
  Pfam module annotation: Pfam domain module=LRR_1::LRR_1; Domain location=13-35::36-58
LQSLPSTFCKMSELKHLNLSYCARLKKLPMSFGELRLQTLDISCCVTLHDLPEGINKMTSL

SEQ ID NO: 102584 - protein, 170 aa, Setaria italica
  Transcript Sequence Number=SeqID_36610
  Gene Ontology: Cellular component=mitochondrion
  Homolog annotation: Hit_ID=B9SX89; Match level="QueryCoverage=89%, HitCoverage=46%, E-value=4e-43, Identity=36%"; Hit description =Pentatricopeptide repeat-containing protein, putative
  Pfam annotation: Domain name=PPR; Domain location=108-142; Score =37.0; E_value=7.3e-08; Accession=PF01535.12; Description=PPR repeat
  Pfam annotation: Domain name=PPR; Domain location=3-37; Score=30.7; E_ value=6e-06; Accession=PF01535.12; Description=PPR repeat
  Pfam annotation: Domain name=PPR; Domain location=38-72; Score=40.8; E_value=5.3e-09; Accession=PF01535.12; Description=PPR repeat
  Pfam annotation: Domain name=PPR; Domain location=73-107; Score=50.8; E_value=5.2e-12; Accession=PF01535.12; Description=PPR repeat
  Pfam module annotation: Pfam domain module=PPR::PPR::PPR::PPR; Domain location=108-142::3-37::38-72::73-107
SLRHYTALLYGWCRQGKLDEAKHVLARMKAADVALDVVAFNTLLAGFVADGRFEDAFELAREMERRGCPPNAVSYTTLMQGLGARGRVDEAMRVFVEMRRKGCAPDAVTYGTLVSAFCRAGKISQGYEFLDAMSREGLRVDAAVYHGFFVVHEKKEQLEEVVELMERMRE

SEQ ID NO: 102585 - protein, 104 aa, Setaria italica
  Transcript Sequence Number=SeqID_36611
  Gene Ontology: Mol. function=phosphatase activity; Biological process= metabolic process
  Homolog annotation: Hit_ID=B6TXH8; Match level="QueryCoverage=100%, HitCoverage=37%, E-value=3e-40, Identity=82%"; Hit description =Phosphatase phospho1
RVIYLGDGRGDYCPSLRLAREDFVMPRRGFPVWDLICEDPARVQAEVHPWADGAEMEATLLGLVRRVLVEDAAALLPLDCKLESSIPVTAAQDGMPIMPLGVKN

SEQ ID NO: 102586 - protein, 92 aa, Setaria italica
  Transcript Sequence Number=SeqID_36612
LPIQLQIFNYPGNHWVSCPYLCKLFWSANLINIGPCIHLNKCNSCVAAMQDLLGSNRKDLVFFGSTCMIRLFVQCAAHIHVVHSLTTCDTYF

SEQ ID NO: 102587 - protein, 117 aa, Setaria italica
  Transcript Sequence Number=SeqID_36613
  Subcellular localization annotation: CTP_CleavageSite=40; ConfidenceScore=5.56e-01
LFRSNPAHGLTTPHGTGRNPAATTAAAHDAKKRAPRSRCRSSHTSSSRSQLEAAATHTLTSRHQEPHGEVEVRVKMRPDRLTWVCLDGEDGRAVGVVEEQAKRQTEGSGQPATDREL

SEQ ID NO: 102588 - protein, 152 aa, Setaria italica
  Transcript Sequence Number=SeqID_36614
  Gene Ontology: Mol. function=sequence-specific DNA binding; Cellular component=nucleus; Biological process=regulation of transcription, DNA-dependent
VAAECAGGARVKKEADLFLVDDLLDLPCDEEEEVQEAVVEEGEGEGGKAGVCGSGAGGEEGAAGNASNDSSTVTVLDSCSNSLSGLADGDFSGGLVEPYDQLAELEWLSNYMGEDNFPTEDLKKLQLITGIPPASSSAAATASVPAPAAAAA

SEQ ID NO: 102589 - protein, 40 aa, Setaria italica
  Transcript Sequence Number=SeqID_36615
MEGGVNVADKAEFKECLRLTWTQPYILQLVLSAGIGGLLF

SEQ ID NO: 102590 - protein, 586 aa, Setaria italica
  misc_feature (321)..(321): Xaa can be any naturally occurring amino acid
  misc_feature (574)..(574): Xaa can be any naturally occurring amino acid
  Transcript Sequence Number=SeqID_36616
  Gene Ontology: Mol. function=alpha-amylase activity; Cellular component=chloroplast; Biological process=carbohydrate metabolic process
  Homolog annotation: Hit_ID=Q5BLY3; Match level="QueryCoverage=97%, HitCoverage=65%, E-value=1e-167, Identity=52%"; Hit description =Plastid alpha-amylase
VKLVSNPNLGGRVVARASAAETPVAGAGEDAGAAFSEKFPLRRCQTVEGKAWVRVDAEPDGDGKCKVVVGCDVAGKWVLHWGVSYDGEHGSEWDQPPSEMRPPGSVPIKDYAIETPLEILPNSEGRYEVQIKFDKDTPIAAINFVLKEEETGAWFQHKGRDFRIPLSGSFDGGVPLGTNQDIGVWPGDLGHLKKHEGSNAQPQETIPGGTGLSGKHISGFYQEFQIIKSEYTQNFVTVTVKRDNETHKRLVEFDTDIPGEVVIHWGVCKDNSMTWEIPPEPHPPTTKIFRQKALQTLLQQKADGRGNSLSFLLDAEYSGLXFVLKLDEYTWLRNLENGSDFFISLTRAEQRGSTQDVDKVEPQKVDDKSSQADGIISDIRNLVVGLSSRRGQRAKNKVLQEDILQEIERLAAEAYSIFRSPTIDSVEASVDLDDPSIAKPACSGTGSGYEILCQGFNWESHKSGKWYVELGTKAKELASLGFTIVWSPPPTDSVSPEGYMPRDLYNLNSRYGTMDELKELVKIFHEAGIKVLGDAVLNHRCAQFQNSNGIWNIFGGRMNWDDRAVVADDPHFQXKRKQSSGDSFHA

SEQ ID NO: 102591 - protein, 315 aa, Setaria italica
  Transcript Sequence Number=SeqID_36617
  Gene Ontology: Mol. function=alpha-amylase activity; Cellular component=chloroplast; Biological process=carbohydrate metabolic process
  Homolog annotation: Hit_ID=Q5BLY3; Match level="QueryCoverage=99%, HitCoverage=34%, E-value=1e-161, Identity=82%"; Hit description =Plastid alpha-amylase
  Pfam annotation: Domain name=Alpha-amyl_C2; Domain location=254-313; Score=116.7; E_value=7.6e-32; Accession=PF07821.4; Description=Alpha- amylase C-terminal beta-sheet dom
  Pfam annotation: Domain name=Alpha-amylase; Domain location=1-253; Score=-30.0; E_value=9.5e-08; Accession=PF00128.16; Description =Alpha amylase, catalytic domain
  Pfam module annotation: Pfam domain module=Alpha-amyl_C2::Alpha -amylase; Domain location=254-313::1-253
LKVRVLGDAVLNHRCAQFQNSNGIWNIFGGRMNWDDRAVVADDPHFQGRGNKSSGDSFHAAPNIDHSQEFVRNDLKEWLCWMRKEVGYDGWRLDFVRGFWGGYVKDYLEASEPYFAVGEYWDSLSYTYGEMDYNQDAHRQRIVDWINATNGTAGAFDVTTKGILHAALERSEYWRLSDEKGKPPGVLGWWPSRAVTFIENHDTGSTQGHWRFPYGMELQGYAYILTHPGTPAVFYDHIFSHLQPEIAKFINIRSRQKIHCRSKIKILKAERSLYAAEIDEKLTMKIGSEHFEPSGPQNWIVAAEGQDYKIWEVSS

SEQ ID NO: 102592 - protein, 89 aa, Setaria italica
  Transcript Sequence Number=SeqID_36618
RCRCPSHPSPHVPPIVLVVHHHTATVASSIATPSRPIILPRFKMGQPILTRDKHLHFLGSSLFVWLCTSLSSGGGRGGTHDPVGDEPPH

SEQ ID NO: 102593 - protein, 214 aa, Setaria italica
  misc_feature (5)..(5): Xaa can be any naturally occurring amino acid
  misc_feature (175)..(175): Xaa can be any naturally occurring amino acid
  Transcript Sequence Number=SeqID_36619
  Gene Ontology: Mol. function=methyltransferase activity; Cellular component=cytoplasm; Biological process=fatty acid biosynthetic process
  Homolog annotation: Hit_ID=B9S844; Match level="QueryCoverage=99%, HitCoverage=57%, E-value=1e-61, Identity=53%"; Hit description =Jasmonate O-methyltransferase, putative
  Pfam annotation: Domain name=Methyltransf_7; Domain location=30-214; Score=59.4; E_value=7.3e-19; Accession=PF03492.7; Description=SAM dependent carboxyl methyltransferase
LHMKXGLGETSYAQNSSLQKRGMDTLKSLITNSATDVYISQMPERFTVADLGCSSGPNALCLVEDIVGSIGRVCGRSSQPPPEFSVLLNDLPTNDFNTIFFSLPEFTDRLKAAAETDEWGRPMVFLSGVPGSFYGRLFPRKSVHFICSCSSLHWLSQVPPGLFDEVTGRPINKGXMYISSSSPLAVPTAYLRQFQRDFGLFLKSRAAEVVAGGR

SEQ ID NO: 102594 - protein, 69 aa, Setaria italica
  Transcript Sequence Number=SeqID_36620
  Subcellular localization annotation: CTP_CleavageSite=35; ConfidenceScore=5.84e-01
WPPSPCPRGSPPPTTTSKPYPSTPPPPVSRSRPTPCSARPLPPRPPPPPPRRREPRPVRRGGGGRRRGG

SEQ ID NO: 102595 - protein, 57 aa, Setaria italica
  Transcript Sequence Number=SeqID_36621
SRLFPEEVLRCVGSVVRELHFTLHPSQQPLSLVKTDRDRDAAKHTAAEGLDVNLRAF

SEQ ID NO: 102596 - protein, 87 aa, Setaria italica
  misc_feature (9)..(9): Xaa can be any naturally occurring amino acid
  Transcript Sequence Number=SeqID_36622
APPPGRGHXGLRDLLFCINGALMLHLPSGSYRVLDVDYAYRGLTLHDPAMSDCRALDRTPAGRGNGFVLEPWREPYLSPDPDNAFLL

SEQ ID NO: 102597 - protein, 104 aa, Setaria italica
  Transcript Sequence Number=SeqID_36623
  Subcellular localization annotation: CTP_CleavageSite=24; ConfidenceScore=5.27e-01
RRRRRGEIPQLPPPSSSLFFFLPRDSKMGTAPPTTRCPPASLLPPLVSPCLACNSIGALVGYPVVLLAAAAGDLGHAGAHFDPTCAKQSEVKRSGGRSAKEGDG

SEQ ID NO: 102598 - protein, 57 aa, Setaria italica
  Transcript Sequence Number=SeqID_36624
  Gene Ontology: Mol. function=small conjugating protein ligase activity; Biological process=regulation of protein metabolic process
  Homolog annotation: Hit_ID=Q9SVD7; Match level="QueryCoverage=64%, HitCoverage=25%, E-value=7e-14, Identity=89%"; Hit description =Ubiquitin-conjugating enzyme E2 variant 1D
GFVIYQLKLFCDKDYPEKPPSVRFHSRINMTCVNHETGAVTTVLQWFMQNITFTFDV

SEQ ID NO: 102599 - protein, 148 aa, Setaria italica
  Transcript Sequence Number=SeqID_36625
  Gene Ontology: Mol. function=small conjugating protein ligase activity; Cellular component=cytosol; Biological process=regulation of protein metabolic process
  Homolog annotation: Hit_ID=Q9SVD7; Match level="QueryCoverage=100%, HitCoverage=100%, E-value=4e-68, Identity=83%"; Hit description =Ubiquitin-conjugating enzyme E2 variant 1D
  Pfam annotation: Domain name=UQ_con; Domain location=19-147; Score= -9.3; E_value=0.00018; Accession=PF00179.18; Description=Ubiquitin -conjugating enzyme
MTPGSSAAGSGVVVPRNFRLLEELERGEKGIGDGTVSYGMDDADDIYMRSWTGTIIGPHNTVHEGRIYQLKLFCDKDYPEKPPSVRFHSRINMTCVNHETGAVDPKKFSVLANWQREYTMEYILTQLKKEMASPQNRKLVQPPEGTFF

SEQ ID NO: 102600 - protein, 491 aa, Setaria italica
  Transcript Sequence Number=SeqID_36626
  Gene Ontology: Mol. function=protein serine/threonine kinase activity; Cellular component=plasma membrane; Biological process =protein amino acid phosphorylation
  Homolog annotation: Hit_ID=B6T9Q6; Match level="QueryCoverage=100%, HitCoverage=100%, E-value=0.0, Identity=88%"; Hit description =Protein kinase APK1B
  Pfam annotation: Domain name=Pkinase; Domain location=58-309; Score =9.4; E_value=4.8e-09; Accession=PF00069.17; Description=Protein kinase domain
  Pfam annotation: Domain name=Pkinase_Tyr; Domain location=71-309; Score=-52.5; E_value=3.1e-10; Accession=PF07714.9; Description =Protein tyrosine kinase
  Pfam annotation: Domain name=TPR_1; Domain location=420-453; Score =8.4; E_value=0.58; Accession=PF00515.20; Description=Tetratricopeptid e repeat
  Pfam annotation: Domain name=TPR_1; Domain location=454-487; Score =7.2; E_value=0.8; Accession=PF00515.20; Description=Tetratricopeptide repeat
  Pfam annotation: Domain name=TPR_2; Domain location=420-453; Score =12.1; E_value=1.1; Accession=PF07719.9; Description=Tetratricopeptide repeat
  Pfam annotation: Domain name=TPR_2; Domain location=454-487; Score =11.0; E_value=1.5; Accession=PF07719.9; Description=Tetratricopeptide repeat
  Pfam module annotation: Pfam domain module=Pkinase::Pkinase_Tyr::TPR _1::TPR_1::TPR_2::TPR_2; Domain location=58-309::71-309::420-453::454- 487::420-453::454-487
MGACVSKVTCCCRKQHNGITNESTDAVTEEQGEAYELPAFQEFTFEQLRLATSGFAVENIVSEHGEKAPNVVYKGKLDAQRRIAVKRFNRSAWPDPRQFLEEARSVGQLRSKRLANLLGCCCEGDERLLVAEYMPNDTLAKHLFHWESQAMKWPMRLRVVLYLAEALEYCTSRGRALYHDLNAYRVLFDDDCNPRLSCFGLMKNSRDGKSYSTNLAFTPPEYMRTGRITPESVIYSFGTMLLDVLSGKHIPPSHALDLIRDRNFNMLTDSCLEGQFSNEEGTELVRLASRCLHYEPRERPNVRSLLQSLAPLQKDVETPSYELMDIPRGGASSIQSLTLSPLAEACSRKDLTAIHEILEKTGYKDDEGTANELSFQMWTNQMQDTLTSKKKGDNAFRQKDFTTAIDCYSQFIEVGTMVSPTIYARRCLSYLMNDKTQEALSDAMQALVISPTWPTAFYLQAAALLSQGMENEAQEALKDGCNLEQSSSSGH

SEQ ID NO: 102601 - protein, 72 aa, Setaria italica
  Transcript Sequence Number=SeqID_36627
  Gene Ontology: Mol. function=protein tyrosine kinase activity; Biological process=protein amino acid phosphorylation
  Homolog annotation: Hit_ID=Q6QNV0; Match level="QueryCoverage=87%, HitCoverage=9%, E-value=2e-12, Identity=50%"; Hit description =Receptor-like kinase
SLNFLPLFTGKQKLLLFEYMEKGDLHRWLHELPVGSMDTEDIGIDTMEAIEDRKPAGDWPTRYRVILGIARG

SEQ ID NO: 102602 - protein, 94 aa, Setaria italica
  Transcript Sequence Number=SeqID_36628
CQPLLSQVVIGAPQISTLALFLPNQFAFSIIVNILLPTFPVVLQAIHILLCYRLLVFPVQVCKLRFCHQRFPEECILFNRISMQIKVYLHNFRN

SEQ ID NO: 102603 - protein, 296 aa, Setaria italica
  misc_feature (109)..(109): Xaa can be any naturally occurring amino acid
  Transcript Sequence Number=SeqID_36629
  Gene Ontology: Mol. function=cysteine-type peptidase activity; Biological process=proteolysis
  Homolog annotation: Hit_ID=Q2R8W5; Match level="QueryCoverage=60%, HitCoverage=100%, E-value=2e-60, Identity=65%"; Hit description=Ulp1 protease family protein, putative, expressed
  Pfam annotation: Domain name=Peptidase_C48; Domain location=78-277; Score=40.7; E_value=5.9e-09; Accession=PF02902.11; Description=Ulp1 protease family, C-terminal catalytic domain
MSRRRASQVQAQAQAQALIDLDSDAEDESQNKRSRTSRTTALKTSGRPKHVLPSFYDNLPKNRSSRNATSRRDKGNQDKLNTDIFELYMEDLWKHIDEDKKSAYGRYFXSFIWFNMYYRGRNIPNVLKWIKAKRIFSRQYVFVPIVCSGHWSLLVLCHFDEANCSDIKKGPRMIVLDSLNTTDPTRLQSYIRKFIVDIYETEEREESKQFINKIRLEFPKVPQQNGDECGIYVLYFIQCFLQNKKLAEVLENKKLEEDFTQLLDDGWFNPEELENLRKDIHSFQANRNSEIADYGT

SEQ ID NO: 102604 - protein, 50 aa, Setaria italica
  Transcript Sequence Number=SeqID_36630
  Homolog annotation: Hit_ID=B6TNT5; Match level="QueryCoverage=74%, HitCoverage=20%, E-value=3e-10, Identity=83%"; Hit description =Peptide methionine sulfoxide reductase
MSSSAATTTDGAANPALEPDTDAPAGEGLEVAQFAAGCFWSVELTYQRLP

SEQ ID NO: 102605 - protein, 158 aa, Setaria italica
  Transcript Sequence Number=SeqID_36631
  Gene Ontology: Mol. function=chlorophyllase activity; Biological process=chlorophyll catabolic process
  Homolog annotation: Hit_ID=Q8LJY8; Match level="QueryCoverage=96%, HitCoverage=17%, E-value=5e-52, Identity=63%"; Hit description =Putative stripe rust resistance protein Yr10
IIMIASLLARKGGNIIEWYKVYKSMGTGLENDPDVSNMREFLSLSYYDMPSHLRTCLLYLSLFPEDYMIHKVCLINLWIAEGFIQRGKQGQSLFDVGESYFNDLLNRSMIQPMHDWYSGLVQGCKVHDMVLDLICSFSNEENFIPILNDMENTHHQIQ

SEQ ID NO: 102606 - protein, 86 aa, Setaria italica
  Transcript Sequence Number=SeqID_36632
  Homolog annotation: Hit_ID=P93812; Match level="QueryCoverage=82%, HitCoverage=6%, E-value=4e-15, Identity=56%"; Hit description =F19P19.6 protein
RSSPTSSAAGRHLAQSNHFDHPRAAAQSAIIRVAEVAAYRLIFLDSHHSFYGGLYVGAVADARIRPALRTLKQNLSFLVSILVDRA

SEQ ID NO: 102607 - protein, 468 aa, Setaria italica
  Transcript Sequence Number=SeqID_36633
  Gene Ontology: Mol. function=transferase activity, transferring glycosyl groups; Biological process=metabolic process
  Homolog annotation: Hit_ID=B6TDR2; Match level="QueryCoverage=91%, HitCoverage=91%, E-value=1e-161, Identity=64%"; Hit description =Indole-3-acetate beta-glucosyltransferase
  Pfam annotation: Domain name=UDPGT; Domain location=8-467; Score= -100.7; E_value=5.5e-06; Accession=PF00201.10; Description=UDP -glucoronosyl and UDP-glucosyl transferase
MADDEGRHHFLLVVYGFQSHLNPGRVLAHRLARLGADGSVLATLSVPAATYRRMFPSPDAAATAETTTTDGVISYVPYSDGVDDGSWGKDADDRALRRRASSESLSAIVARFANRGQPVTCIMCTMMLLPVLDVARERNIPVAICWIQPATLLAITYHYFHGYDDLIASHATDPAYEVCLPGLSRPLEISNFPSFLTDTSGSESTKAFIEVFQELFEYMDQWRPKVLVNTFGELEANVLREMKRHLDVFTVGPMVGSSTEARIHLFKHDDVDEKRYMEWLQAHPEKSVVYVSSGSVTKYTKRQMDEIVGGLRQCGRPYLLVVRKDDESHSLEDHTQGQGMVVEWCNQLEVLSHSAVGCFVSHCGWNSTIEAMASGVPIIGVPNMFDQPTNTYLVDKEWEIGIKGERNGDGVLTGTELARCIELVMGEGAKAKAIRERAKALKEMAQASASRGGSAERNLRDFVKTIQV

SEQ ID NO: 102608 - protein, 79 aa, Setaria italica
  Transcript Sequence Number=SeqID_36634
  Gene Ontology: Mol. function=hydrolase activity, hydrolyzing O -glycosyl compounds; Cellular component=anchored to membrane; Biological process=carbohydrate metabolic process
  Homolog annotation: Hit_ID=B9S3K0; Match level="QueryCoverage=96%, HitCoverage=30%, E-value=4e-29, Identity=71%"; Hit description =Hydrolase, hydrolyzing O-glycosyl compounds, putative
  Pfam annotation: Domain name=X8; Domain location=1-76; Score=136.3; E_ value=9.4e-38; Accession=PF07983.5; Description=X8 domain
PDPIIQEAMDYACGSGAECDSIQPTGACYHPNTVLAHASFAFNSYWQQSKAAGGTCDFGGTATIVTRDPSYEKCKFDLL

SEQ ID NO: 102609 - protein, 56 aa, Setaria italica
  Transcript Sequence Number=SeqID_36635
  Homolog annotation: Hit_ID=Q2EF47; Match level="QueryCoverage=64%, HitCoverage=12%, E-value=3e-10, Identity=91%"; Hit description =Phosphoenolpyruvate carboxylase kinase 1
RHVVALQAAFEDADAVHLVLDLCEGGDLFSLVSARGPLPEPEAADLAAQLADALAG

SEQ ID NO: 102610 - protein, 74 aa, Setaria italica
  misc_feature (60)..(60): Xaa can be any naturally occurring amino acid
  misc_feature (62)..(62): Xaa can be any naturally occurring amino acid
  Transcript Sequence Number=SeqID_36636
MEADERAEAARRAKEAGNDAYRKSFLETAVEHYTRGALLDPGDISFLTNRAAAYLKLCKXKXCVRDCDDAAERG

SEQ ID NO: 102611 - protein, 86 aa, Setaria italica
  Transcript Sequence Number=SeqID_36637
KGKRTEVKRTDTPMNYCEQEAVSGEPAPTINYFLLFSNNTTTNSTNALCTEATDPLPPSLNQEPTQSYLQDLISFISLLPPLSPLT

SEQ ID NO: 102612 - protein, 88 aa, Setaria italica
  Transcript Sequence Number=SeqID_36638
KLLRSLLPAHPLGVLRLFPRLLRILPGFRPNNYAFSFLLKAAADSSASPASLHALAVVLGWDAHAYVANGLIHAYASHGLLPSARRLF

SEQ ID NO: 102613 - protein, 252 aa, Setaria italica
  Transcript Sequence Number=SeqID_36639
  Gene Ontology: Mol. function=DNA binding; Cellular component=nucleus; Biological process=regulation of transcription, DNA-dependent
  Homolog annotation: Hit_ID=Q52QH4; Match level="QueryCoverage=100%, HitCoverage=84%, E-value=5e-90, Identity=65%"; Hit description=NAC domain-containing protein 68
  Pfam annotation: Domain name=NAM; Domain location=1-100; Score=187.5; E_value=3.8e-53; Accession=PF02365.7; Description=No apical meristem (NAM) protein
VPIIAEVDLYKFDPWDLPEKALFGRKEWYFFTPRDRKYPNGSRPNRAAGRGYWKATGADKPITPKGSGRAAGIKKALVFYSGKAPRGVKTDWIMHEYRLADADRAPGKKGSQKLDEWVLCRLYNKKKNWEKVKVEEPEAAPHHHHADSMSDSFQTHDSDIDNAAGMQNSFGSMPQGVQAMKNGIGAVTVKEDNDWFTGLNLDDLQAPYNMVQLVNPNPVHQTMNLAAGQGHGYFQSMSSPSMKMWQTILPPF

SEQ ID NO: 102614 - protein, 161 aa, Setaria italica
  Transcript Sequence Number=SeqID_36640
  Gene Ontology: Mol. function=protein tyrosine kinase activity; Cellular component=integral to membrane; Biological process=protein amino acid phosphorylation
  Homolog annotation: Hit_ID=Q10M75; Match level="QueryCoverage=96%, HitCoverage=14%, E-value=4e-81, Identity=89%"; Hit description =Leucine Rich Repeat family protein, expressed
RAACTQHRHSIFRVHSPDKLVGDLHLFDNSVVFTAEELSCAPAEIIGRSCHGTSYKATLDNGYMLTVKWLKEGFAKSKKEFSREIKKLGCVKHPNLVPLRGYYWGPKEHERIIISDYVDATSLSTYLSEFEERNLPPLSVGQRLNIATDIAHCLDYLHNER

SEQ ID NO: 102615 - protein, 203 aa, Setaria italica
  Transcript Sequence Number=SeqID_36641
  Gene Ontology: Mol. function=protein tyrosine kinase activity; Cellular component=plasma membrane; Biological process=protein amino acid phosphorylation
  Homolog annotation: Hit_ID=Q10M75; Match level="QueryCoverage=100%, HitCoverage=19%, E-value=1e-105, Identity=91%"; Hit description =Leucine Rich Repeat family protein, expressed
  Pfam annotation: Domain name=Pkinase_Tyr; Domain location=4-198; Score=-163.5; E_value=0.0074; Accession=PF07714.9; Description =Protein tyrosine kinase
SLSTYLSEFEERNLPPLSVGQRLNIATDIAHCLDYLHNERVIPHGNIKSSNVLIQNSTPSALVTDYSLHRLMTPTGMAEQVLNAGALGYSPPEFSSTSKPCPSLKSDVYAFGVILLELLTGKIAGEIICVNDGVVDLTDWVRMLALEERVSECYDRNIVEAGSSDGAPKALDDMLRIAIRCIRSASERPEIRTVFEDLSSLSS

SEQ ID NO: 102616 - protein, 54 aa, Setaria italica
  misc_feature (1)..(1): Xaa can be any naturally occurring amino acid
  Transcript Sequence Number=SeqID_36642
XGGGGGSCFEFYQYILQVLFRIMKYTGWCVMPLVSLNPNGVLPGPWSNLYRTYW

SEQ ID NO: 102617 - protein, 77 aa, Setaria italica
  misc_feature (64)..(64): Xaa can be any naturally occurring amino acid
  Transcript Sequence Number=SeqID_36643
  Gene Ontology: Mol. function=ATPase activity, coupled to transmembrane movement of ions, phosphorylative mechanism; Cellular component=integral to membrane; Biological process=phospholipid transport
  Homolog annotation: Hit_ID=Q9SAF5; Match level="QueryCoverage=97%, HitCoverage=6%, E-value=1e-31, Identity=86%"; Hit description =Putative phospholipid-transporting ATPase 11
LFINQDIEMYHEESDKPTHARTSNLNEELGMVDTILSDKTGTLTCNMMEFIKCSIAGTAYGQGXVTEVERAMAMRKG

SEQ ID NO: 102618 - protein, 56 aa, Setaria italica
  Transcript Sequence Number=SeqID_36644
FSELAFCLSIIFPFLLLRNKTMDPMMDKQKSKNVSEHVVYIEASSNPAQDVDLLIA

SEQ ID NO: 102619 - protein, 59 aa, Setaria italica
  Transcript Sequence Number=SeqID_36645
DELVVELASLLELTKLGVAVCYYSMVLNISKMTGEDAGVTEAYGAIADCYYSMVLNISK

SEQ ID NO: 102620 - protein, 83 aa, Setaria italica
  Transcript Sequence Number=SeqID_36646
  Gene Ontology: Mol. function=binding
  Homolog annotation: Hit_ID=B4FXB9; Match level="QueryCoverage=98%, HitCoverage=25%, E-value=4e-39, Identity=97%"; Hit description=FLU
SSEPCEQEYSLPNMPLLFAIAMVGATVGGLLARQRRGELARLNDQLRQINAALRRQAKIESYAPALSYAPVGSKIPESEVIVD

SEQ ID NO: 102621 - protein, 72 aa, Setaria italica
  Transcript Sequence Number=SeqID_36647
  Gene Ontology: Mol. function=binding
  Homolog annotation: Hit_ID=B4FXB9; Match level="QueryCoverage=72%, HitCoverage=16%, E-value=1e-16, Identity=76%"; Hit description=FLU
MDLLRSCLVSSCIIYILPPACLAEPCEQEYSLPNMPLLFAIAMVGATVGGKLVTMTLIASSKPQLPFHVSTS

SEQ ID NO: 102622 - protein, 50 aa, Setaria italica
  Transcript Sequence Number=SeqID_36648
  Gene Ontology: Mol. function=binding
  Homolog annotation: Hit_ID=B4FXB9; Match level="QueryCoverage=88%, HitCoverage=13%, E-value=3e-15, Identity=88%"; Hit description=FLU
DVLVVELVSSCIIYILPPACLAEPCEQEYSLPNMPLLFAIAMVGATVGGL

SEQ ID NO: 102623 - protein, 180 aa, Setaria italica
  Transcript Sequence Number=SeqID_36649
  Gene Ontology: Mol. function=binding
  Homolog annotation: Hit_ID=B4FXB9; Match level="QueryCoverage=91%, HitCoverage=51%, E-value=4e-56, Identity=70%"; Hit description=FLU
  Subcellular localization annotation: CTP_CleavageSite=50; ConfidenceScore=5.83e-01
MALPLRPAAPAPPPWRCSGVRSSPCSSLLPTASKQMFPVPLPVDRVARFSLSAKRSASRLVQSLTDSTDSRSDGIHAANEHGHDLKRSISDLQEVVCSYFGKACLVSSCIIYILPPACLAEPCEQEYSLPNMPLLFAIAMVGATVGGLLARQRRGELARLNDQLRQINAALRRQAKIESY

SEQ ID NO: 102624 - protein, 229 aa, Setaria italica
  Transcript Sequence Number=SeqID_36650
  Gene Ontology: Mol. function=binding
  Homolog annotation: Hit_ID=B4FXB9; Match level="QueryCoverage=100%, HitCoverage=71%, E-value=1e-121, Identity=93%"; Hit description=FLU
  Pfam annotation: Domain name=TPR_1; Domain location=116-149; Score =3.6; E_value=2.2; Accession=PF00515.20; Description=Tetratricopeptide repeat
  Pfam annotation: Domain name=TPR_1; Domain location=156-189; Score =11.5; E_value=0.24; Accession=PF00515.20; Description=Tetratricopepti de repeat
  Pfam annotation: Domain name=TPR_1; Domain location=196-229; Score =19.5; E_value=0.014; Accession=PF00515.20; Description =Tetratricopeptide repeat
  Pfam annotation: Domain name=TPR_2; Domain location=116-149; Score =11.1; E_value=1.4; Accession=PF07719.9; Description=Tetratricopeptide repeat
  Pfam annotation: Domain name=TPR_2; Domain location=156-189; Score =10.1; E_value=1.9; Accession=PF07719.9; Description=Tetratricopeptide repeat
  Pfam annotation: Domain name=TPR_2; Domain location=196-229; Score =17.9; E_value=0.042; Accession=PF07719.9; Description=Tetratricopepti de repeat
  Pfam module annotation: Pfam domain module=TPR_1::TPR_1::TPR_1::TPR _2::TPR_2::TPR_2; Domain location=116-149::156-189::196-229::116 -149::156-189::196-229
MMEVVCSYFGKACLVSSCIIYILPPACLAEPCEQEYSLPNMPLLFAIAMVGATVGGLLARQRRGELARLNDQLRQINAALRRQAKIESYAPALSYAPVGSKIPESEVIVDPQKERLIAYLRTGKNYLRNQAPDKAFPEFKAALDLAQSLGDHVEEKKAARGLGASLQRQGKYKEAIKYHSMVLNISKMTGEDAGVTEAYGAIADCYTELGELEKAGKFYDKYISRLEND

SEQ ID NO: 102625 - protein, 76 aa, Setaria italica
  misc_feature (44)..(44): Xaa can be any naturally occurring amino acid
  Transcript Sequence Number=SeqID_36651
  Gene Ontology: Mol. function=nucleoside-triphosphatase activity; Cellular component=chloroplast; Biological process=nucleotide -excision repair
  Homolog annotation: Hit_ID=Q7F9I1; Match level="QueryCoverage=98%, HitCoverage=8%, E-value=3e-23, Identity=76%"; Hit description =OSJNBa0039C07.4 protein
DKAEEESGETGPMVNEADIQHIVSSWTGIPVEKVSSDESDKLSXDWKKNFRHKRVIGQDEAVVAISRSIRRARVGL

SEQ ID NO: 102626 - protein, 54 aa, Setaria italica
  Transcript Sequence Number=SeqID_36652
  Gene Ontology: Mol. function=nucleoside-triphosphatase activity; Cellular component=chloroplast; Biological process=nucleotide -excision repair
  Homolog annotation: Hit_ID=Q7F9I1; Match level="QueryCoverage=90%, HitCoverage=5%, E-value=4e-16, Identity=85%"; Hit description =OSJNBa0039C07.4 protein
  Pfam annotation: Domain name=UVR; Domain location=15-50; Score=56.1; E_value=1.3e-13; Accession=PF02151.11; Description=UvrBuvrC motif
IELLVQVPEEARELDKELKQVTKQKNEAVRSQDFEKAGELRDREMELKAQITAF

SEQ ID NO: 102627 - protein, 100 aa, Setaria italica
  misc_feature (89)..(89): Xaa can be any naturally occurring amino acid
  Transcript Sequence Number=SeqID_36653
  Gene Ontology: Mol. function=nucleoside-triphosphatase activity; Cellular component=chloroplast; Biological process=nucleotide -excision repair
  Homolog annotation: Hit_ID=O98447; Match level="QueryCoverage=93%, HitCoverage=10%, E-value=1e-45, Identity=94%"; Hit description=ClpC protease
MCFLYSARGELQCIGATTLDEYRKHIEKDPALERRFQPVKVPEPTVDETIEILRGLRERYEIHHKLRYTDEALIAAAKLSYQYISDRFXLPDKAIDLIDE

SEQ ID NO: 102628 - protein, 72 aa, Setaria italica
  misc_feature (36)..(36): Xaa can be any naturally occurring amino acid
  Transcript Sequence Number=SeqID_36654
  Gene Ontology: Mol. function=protein binding
  Homolog annotation: Hit_ID=Q2R1Z8; Match level="QueryCoverage=97%, HitCoverage=7%, E-value=1e-21, Identity=67%"; Hit description=ETO1 -like protein 1, putative, expressed
MRRSIRKDYPGAERLFNTAFSACHIYLVVGLVEIGXLRGNKHFALKKLDSVMSSWWPLGWMHPEIALHLDGD

SEQ ID NO: 102629 - protein, 54 aa, Setaria italica
  Transcript Sequence Number=SeqID_36655
LTIFNAGHLIPWMMNLARRTRKVGTAAAPDQGQVQSLSVPSPLCQLMFFNLSSN

SEQ ID NO: 102630 - protein, 346 aa, Setaria italica
  misc_feature (134)..(134): Xaa can be any naturally occurring amino acid
  Transcript Sequence Number=SeqID_36656
  Gene Ontology: Mol. function=nucleotide binding; Cellular component =nucleus; Biological process=defense response
  Homolog annotation: Hit_ID=Q2R8L1; Match level="QueryCoverage=86%, HitCoverage=23%, E-value=2e-43, Identity=39%"; Hit description=NB -ARC domain containing protein, expressed
GRINDAVLPSKIGDLQQLETFEVQLDYKFLQGRKSLKLPSDIVHLSRLLHLIVPVRTILPDGIGNMRSLHTVHRFNLANSLHSIKSLRELTNLTDLEIGFAGSIIDHEVVERGREVLHVCFEKLCNLKYLKVNXFPSEAYLDAFSPIPASFRHLQRFHGSSFSRVPGWIGELHSIYDLVLTVQEVLEDDVGILAQLPSLIHLILHIRGAPKGKILIRGGTGLFPVLKYFEARCCRVSYLSFEAGAMPKLERLVLCLNAHRWDRYDAPPAGIEHLSGLKEICVDIGALGAKKSNGSAAESALRNAADMHPGRPVANIRINNFQCWAFDTMDDEPCEKDEEGWNSSST

SEQ ID NO: 102631 - protein, 158 aa, Setaria italica
  Transcript Sequence Number=SeqID_36657
  Gene Ontology: Mol. function=nucleotide binding; Biological process =defense response
  Homolog annotation: Hit_ID=A7U1X3; Match level="QueryCoverage=98%, HitCoverage=11%, E-value=1e-22, Identity=40%"; Hit description=Lr1 -like protein
LLPHRFSKLIHLRYLKIQLPFGSVTSLPDTITRFYDLEFFDLKGWDGDSSLPRGMSRLVNLRHLLSHKELHCKIPGVGKMKFLQELRKFQVRKHDIGFELRELEELKELGGSLSICNLENVKTKGDAARAKLMLKDKLDKLKLVWDSQRNRKPTLEAD

SEQ ID NO: 102632 - protein, 1258 aa, Setaria italica
  misc_feature (24)..(24): Xaa can be any naturally occurring amino acid
  Transcript Sequence Number=SeqID_36658
  Homolog annotation: Hit_ID=Q2HV05; Match level="QueryCoverage=72%, HitCoverage=97%, E-value=0.0, Identity=68%"; Hit description =Peptidase S8 and S53, subtilisin, kexin, sedolisin; WD40-like
  Pfam annotation: Domain name=WD40; Domain location=130-171; Score =17.1; E_value=0.075; Accession=PF00400.24; Description=WD domain, G -beta repeat
  Pfam annotation: Domain name=WD40; Domain location=31-74; Score=4.4; E_value=12; Accession=PF00400.24; Description=WD domain, G-beta repeat
  Pfam annotation: Domain name=WD40; Domain location=78-120; Score =17.3; E_value=0.065; Accession=PF00400.24; Description=WD domain, G -beta repeat
  Pfam module annotation: Pfam domain module=WD40::WD40::WD40; Domain location=130-171::31-74::78-120
VSYLYFGYLSFVVVICCENKVIFXDLVTMRGRDVPKQELDNRSLLCMEFLSRSSSSDAPLVAFGSSDGVIRVLSMLTWKLVRRYTGGHKGAIACLMTYMSAAGEVHLVSGGSDGLLILWSADHIHDSRELVPKISMKAHDGGVVAVELSRVMGSAPQLITIGADKTLAIWDTVTFKEIRRIKPVPKLACHSVASWCHPRAPNLDILTCVKDSHIWAIEHPTYSALTRPLCELSSLVPPQVLAQHKKLRVYCMVAHPLQPHLVATGTNIGIILSEFDPRALPAIAPLPTPTGNKEHSAVYIVERELKLLNFQLSNTANPSLGNAGVASDTGRSRNESIDQLIVKQTKKHISTPAPHDSYSVLSVSSSGKYVAIVWPDIPSFAVYKASDWSVVDSGTGKLFAWDTCRDRYALVESALAPRMPLVVKGGSSKKAKEAAAAAAQAAAAAASAASAATVQVRILLDDGTAHVLQRSIDGRSEPVIGLHGGALLGVTYRTSRRISPLTATAISTVQSMPLSGFGGSGSSFASDDPFSSKEGPPQNFQLYSWETYQPVSGLLAQPEWTVWDQTVEYCAFAYQQYIVISSLRPQFRYLGDVSIPFATGAVWHRRQLFVATPTTIECVFVDAGVAAIDIETKKRKEEMKAREAQSQAVAEHGDLALITVEAPQVTASEKISLRPPMLQVVRLASFQHSPSIPPFIVPKQSKLDGDDSVYQKELDDRRYAEVAVAGGGVSVAVTRFPPEQKRPIGPLVVVGVRDGVLWLVDRYMCAHALSLSHPGIRCRCLAAYGDPVSAVKWATRLGREHHDDLAQFMLGMGYATEALHLPGISKRLEFDLAMQSNDLKRALACLLTMSNSRDVGQETAAADVTDVTQILNLAVAKQAKQESLADAVQGIVKFVKEFFDLIDAADATGQSDIAREVLKRLAAAASVKGALHGQMLRGLALRLANHGELTRLSGLVTNLIAAGHGREAAFAAAVLGDNALMEKAWQDTGMLAEAVLHSQAHGRPSLRSLVIAWNKMLQKELDHTPTVKTDAAAAFLASLEDPKLTSLGETEKKPPIEILPPGMPPLSAPPIVIKKSATKPGLPNAAPASNGPIGAPMVQGATAPQGTPMVQGAPMAQGAPAAQGVPMNQSAPAPSQGTDEAKPSEATAADAAPPSAEAAAAPSSDEAKAAPGNEEAIAAPGNEEATAAPVIDAASNTDPAAAAAPAPAADTNSTGAPDATPVEAATSAPSTETPEATDKPSSTEASPPPPPPAYESVV

SEQ ID NO: 102633 - protein, 80 aa, Setaria italica
  Transcript Sequence Number=SeqID_36659
QSQRARPPYTHREPRAMDAAGGRDGEEKKEEKKGNGGGAAAADKRVSFTGLFRYADGTDVLLMLLGTVGALGNGVTQPVM

SEQ ID NO: 102634 - protein, 86 aa, Setaria italica
  Transcript Sequence Number=SeqID_36660
NCFERFWCFLVVVMGTLYVKLLPSLIIPPGNQSFYGQLLLRKFCCSPVYTYVTAKTQVCLTDLHWIPCWIGSLIVTCIQSCFAISS

SEQ ID NO: 102635 - protein, 197 aa, Setaria italica
  misc_feature (29)..(29): Xaa can be any naturally occurring amino acid
  Transcript Sequence Number=SeqID_36661
  Gene Ontology: Biological process=carbohydrate metabolic process
  Homolog annotation: Hit_ID=B6TXN0; Match level="QueryCoverage=100%, HitCoverage=64%, E-value=2e-94, Identity=85%"; Hit description=DNA -damage-repair/toleration protein DRT102
  Pfam annotation: Domain name=Cupin_2; Domain location=100-168; Score =17.9; E_value=0.0054; Accession=PF07883.3; Description=Cupin domain
NVLALSGMATPPDAAAAIADTWLATPFRXPCPASGDAPWPEDIQRFLDTAPDEMAAIPEAEVPPNSACAICCLRNGMEFEPVGIMPGGEMRIVRESPTSAYVRFKAGSVEPAHHHTFGHDLVVVKGKKKVWNLTKKESYDLVDGDFLFTPAGDVHRVKYFEDTEFFIRWDGHWDIFLDEDLDTARSAIDAELGAASK

SEQ ID NO: 102636 - protein, 92 aa, Setaria italica
  Transcript Sequence Number=SeqID_36662
  Gene Ontology: Mol. function=transferase activity, transferring glycosyl groups; Cellular component=membrane
  Homolog annotation: Hit_ID=B9SKL7; Match level="QueryCoverage=100%, HitCoverage=21%, E-value=9e-32, Identity=68%"; Hit description =Xyloglucan galactosyltransferase KATAMARI1, putative
LQPPGDSCTRRSVFDSMVAGCIPVFFHTASAYKQYRWHLPKDHLNYSVYIPDADVRRRNVSIEAVLRAIPPDTVERMREEVIKLIPRVSYAD

SEQ ID NO: 102637 - protein, 174 aa, Setaria italica
  Transcript Sequence Number=SeqID_36663
  Gene Ontology: Mol. function=hydrolase activity, hydrolyzing O -glycosyl compounds; Biological process=carbohydrate metabolic process
  Homolog annotation: Hit_ID=B9R6T2; Match level="QueryCoverage=71%, HitCoverage=44%, E-value=4e-27, Identity=41%"; Hit description =Hydrolase, hydrolyzing O-glycosyl compounds, putative
  Pfam annotation: Domain name=CBM_4_9; Domain location=51-174; Score= -15.8; E_value=0.073; Accession=PF02018.9; Description=Carbohydrate binding domain
  Subcellular localization annotation: CTP_CleavageSite=23; ConfidenceScore=5.22e-01
RNKRELKTTFTTNKKTTQGRRTRARPSSPGSFEPSREVVDKPGASDEVVMENILSNNDFSEGLHLWQPNSCHAFVAVEGSGYHYGVRPHSGSSYAVLTHRTQSWQGLEQDITEKVTLGTAYFVAAYVRVCGEVHEPVPVQATLKFEDESSSTNYVSIARILASQERWEKMEGSF

SEQ ID NO: 102638 - protein, 162 aa, Setaria italica
  misc_feature (139)..(139): Xaa can be any naturally occurring amino acid
  misc_feature (152)..(152): Xaa can be any naturally occurring amino acid
  Transcript Sequence Number=SeqID_36664
  Gene Ontology: Mol. function=structural constituent of ribosome; Cellular component=intracellular
EASAAGNGASEEQQKGDILGEKAEEIEGAVAGNGVVEEVEEDDDDDFITNEVKRRLKELRKNSFMVLIPEEECAEVEEDGGEEGEEEGSSSREWLESDVGDGFPLCGFDSLYDKYCERMLVFHKMIAQLMKDPESLNMXKKSPRSASKLASXTLRNLSLQKK

SEQ ID NO: 102639 - protein, 422 aa, Setaria italica
  misc_feature (403)..(403): Xaa can be any naturally occurring amino acid
  Transcript Sequence Number=SeqID_36665
  Gene Ontology: Mol. function=protein serine/threonine kinase activity; Cellular component=integral to membrane; Biological process=protein amino acid phosphorylation
  Homolog annotation: Hit_ID=B0ZEQ1; Match level="QueryCoverage=66%, HitCoverage=100%, E-value=6e-68, Identity=45%"; Hit description =Putative leucine-rich repeat receptor protein kinase EXS (Fragment)
  Pfam annotation: Domain name=LRR_1; Domain location=11-33; Score =17.0; E_value=0.077; Accession=PF00560.25; Description=Leucine Rich Repeat
  Pfam annotation: Domain name=LRR_1; Domain location=119-141; Score =10.0; E_value=3.6; Accession=PF00560.25; Description=Leucine Rich Repeat
  Pfam annotation: Domain name=LRR_1; Domain location=143-166; Score =8.1; E_value=8.4; Accession=PF00560.25; Description=Leucine Rich Repeat
  Pfam annotation: Domain name=LRR_1; Domain location=167-189; Score =10.3; E_value=3.2; Accession=PF00560.25; Description=Leucine Rich Repeat
  Pfam annotation: Domain name=LRR_1; Domain location=192-214; Score =1.4; E_value=1.7e+02; Accession=PF00560.25; Description=Leucine Rich Repeat
  Pfam annotation: Domain name=LRR_1; Domain location=216-235; Score =11.7; E_value=1.8; Accession=PF00560.25; Description=Leucine Rich Repeat
  Pfam annotation: Domain name=LRR_1; Domain location=244-266; Score =7.3; E_value=12; Accession=PF00560.25; Description=Leucine Rich Repeat
  Pfam annotation: Domain name=LRR_1; Domain location=268-290; Score =17.2; E_value=0.069; Accession=PF00560.25; Description=Leucine Rich Repeat
  Pfam annotation: Domain name=LRR_1; Domain location=292-314; Score =7.0; E_value=14; Accession=PF00560.25; Description=Leucine Rich Repeat
  Pfam annotation: Domain name=LRR_1; Domain location=35-57; Score =15.1; E_value=0.3; Accession=PF00560.25; Description=Leucine Rich Repeat
  Pfam annotation: Domain name=LRR_1; Domain location=59-82; Score =14.8; E_value=0.36; Accession=PF00560.25; Description=Leucine Rich Repeat
  Pfam module annotation: Pfam domain module=LRR_1::LRR_1::LRR_1::LRR _1::LRR_1::LRR_1::LRR_1::LRR_1::LRR_1::LRR_1::LRR_1; Domain location =11-33::119-141::143-166::167-189::192-214::216-235::244-266::268 -290::292-314::35-57::59-82
PIPQAVGDLGNLTEISLGGNRLSGSIPQELFNCRNLVKLNLSSNNLIGHIPRSISQLTSLTGLVLSHNQLSGSIPAEICGGFTNPTHPESEYVQHHGLLDLSYNLLSGRIPPAIKNCVILEELHLQGNLLNGSIPAELGELKNLRTVDLSSNALVGPMVPWSAPLLTLQGLFLSNNHLNGNIPAEIGRILPNIAVVNLSSNAFMATLPQSLLCSKSLNRLDVSNNNLSGEIPLSCPWHEESLSSLVFFNASSNHLSGSLDGSISDFGQLSSLDIHNNSLTGSLPLALSNLSYLNYLDLSKNDFSGSNPCGICNIVAITFANFSGNRIGMHSLSDCAAPGICAPDSIKHKEGHPTHVILKAVTICAAVIIVIIVVVYVWRKLSIRSRPMHFEPTSQAQSLQLSXATIDPASSDALLGKDEGAG

SEQ ID NO: 102640 - protein, 60 aa, Setaria italica
  Transcript Sequence Number=SeqID_36666
TQLRYDLIESSWSASQRVLSLDTVSLSSGSQCKPSAHTKLRAWARAGAVRYSDEEHAMRD

SEQ ID NO: 102641 - protein, 53 aa, Setaria italica
  Transcript Sequence Number=SeqID_36667
QNTMVPGQWPGCGIFLQTSVMNQCFTGVTLLYALLLGNIYGSDPIVQLQPPYD

SEQ ID NO: 102642 - protein, 156 aa, Setaria italica
  Transcript Sequence Number=SeqID_36668
  Gene Ontology: Mol. function=phospholipid binding; Cellular component= cytoplasmic vesicle; Biological process=clathrin coat assembly
  Homolog annotation: Hit_ID=Q53M05; Match level="QueryCoverage=87%, HitCoverage=34%, E-value=8e-22, Identity=51%"; Hit description=ANTH domain containing protein, expressed
SGCAAVRSAFGIVLRESFKVYDAFTEGLDAMLLRSRSLAGLSKPMRVSAHEILKKACAQTPDLKEFYHKCKGSNASKSLEYPLVRVVTPAQASAMEVLPVPIPEEDGQEKEPEAEAEAEAETSDGGGSTTFARKMETTISTVWVEFEEDDKLIPGD

SEQ ID NO: 102643 - protein, 83 aa, Setaria italica
  Transcript Sequence Number=SeqID_36669
  Gene Ontology: Mol. function=transcription factor activity; Cellular component=nucleus; Biological process=regulation of transcription, DNA-dependent
  Homolog annotation: Hit_ID=Q84P66; Match level="QueryCoverage=100%, HitCoverage=8%, E-value=2e-31, Identity=81%"; Hit description=TF -like protein (Fragment)
  Pfam annotation: Domain name=zf-NF-X1; Domain location=60-78; Score =18.9; E_value=0.021; Accession=PF01422.9; Description=NF-X1 type zinc finger
QSVYDTPARDLAYTCFCRRRREPPNDHFLTPHSCGEPCSKPLERAEPPGAKGEDADATRCPHVCVLQCHPGPCPPCKAFAPDR

SEQ ID NO: 102644 - protein, 138 aa, Setaria italica
  Transcript Sequence Number=SeqID_36670
  Homolog annotation: Hit_ID=B6TP81; Match level="QueryCoverage=100%, HitCoverage=33%, E-value=4e-59, Identity=82%"; Hit description=Ring canal kelch
  Pfam annotation: Domain name=F-box; Domain location=6-53; Score=29.9; E_value=1e-05; Accession=PF00646.25; Description=F-box domain
RGGQCPLLPGLPDDLAIACLIRVPRADHWKLRLVCRRWCRLLAGNYFYGLRRRLGLAEQWVYAVRRDGKDGHVSWDVLDPCRGAWRALPPLPQEYAGADGFGCAVLGGCHLYLLGGADPRRGGAMRRVVFYSARSNRW

SEQ ID NO: 102645 - protein, 84 aa, Setaria italica
  Transcript Sequence Number=SeqID_36671
  Gene Ontology: Cellular component=integral to membrane
  Homolog annotation: Hit_ID=B6SU55; Match level="QueryCoverage=97%, HitCoverage=32%, E-value=9e-19, Identity=54%"; Hit description=Seven- transmembrane-domain protein 1
  Pfam annotation: Domain name=MtN3_slv; Domain location=3-84; Score =24.5; E_value=6.1e-05; Accession=PF03083.8; Description=MtN3saliva family
  Subcellular localization annotation: CTP_CleavageSite=26; ConfidenceScore=5.04e-01
LQSVSGNVFAFVLFISPLPTFRRIVRNGSTEQFSAMPYIYSLLNCLICMWYGLPFVSYGVVLVVTVNSIGAAFQLAYTAVFIAL

SEQ ID NO: 102646 - protein, 63 aa, Setaria italica
  Transcript Sequence Number=SeqID_36672
LRQSVSSLVERAKGTGSAVVGGWEHHGLGCSGIDELRSRPVPPGPLLLRGRNRRSVVNIHPYP

SEQ ID NO: 102647 - protein, 193 aa, Setaria italica
  misc_feature (135)..(135): Xaa can be any naturally occurring amino acid
  Transcript Sequence Number=SeqID_36673
  Homolog annotation: Hit_ID=B6SU55; Match level="QueryCoverage=90%, HitCoverage=77%, E-value=1e-22, Identity=35%"; Hit description=Seven- transmembrane-domain protein 1
  Pfam annotation: Domain name=MtN3_slv; Domain location=132-193; Score= 0.9; E_value=0.004; Accession=PF03083.8; Description=MtN3saliva family
  Pfam annotation: Domain name=MtN3_slv; Domain location=26-112; Score =50.9; E_value=5e-12; Accession=PF03083.8; Description=MtN3saliva family
  Pfam module annotation: Pfam domain module=MtN3_slv::MtN3_slv; Domain location=132-193::26-112
  Subcellular localization annotation: CTP_CleavageSite=49; ConfidenceScore=5.02e-01
MDWGAPALMSSAAGPSHRDLCCYGAGIAGNVFAFVLFISPLPTFRRIVRNGSTEQFSAMPYIYSLLNCLICMWYGLPFVSYGVVLVVTVNSIGAAFQLAYTAVFIAFANAKERVGAGHLFLNCLFGNLLHIHILXFLRMGISLLQLKNLVIRTKSVEYMPFYLSLSMFLMSVSFFVYGVLLHDFFIYIPNGLE

SEQ ID NO: 102648 - protein, 144 aa, Setaria italica
  misc_feature (67)..(67): Xaa can be any naturally occurring amino acid
  misc_feature (127)..(127): Xaa can be any naturally occurring amino acid
  misc_feature (133)..(133): Xaa can be any naturally occurring amino acid
  Transcript Sequence Number=SeqID_36674
  Gene Ontology: Mol. function=2 iron, 2 sulfur cluster binding; Biological process=abscisic acid biosynthetic process
  Homolog annotation: Hit_ID=Q69R21; Match level="QueryCoverage=95%, HitCoverage=16%, E-value=5e-47, Identity=69%"; Hit description =Probable aldehyde oxidase 4
  Pfam annotation: Domain name=CO_deh_flav_C; Domain location=71-144; Score=5.2; E_value=0.0004; Accession=PF03450.9; Description=CO dehydrogenase flavoprotein C-terminal domain
GHKNNPFPSDIATILLGAGATVCLQVVAGRRQITLEEFLGQPPLHPTTLLLSIFIPHWISDYQTKNXLLFETYRAAPRPLGNAVSYVNCAFLGHASVDQQSNALVLNNLRLAFGAYGTKHAIRAKEXVEEFLXGKSLTASVVLG

SEQ ID NO: 102649 - protein, 106 aa, Setaria italica
  Transcript Sequence Number=SeqID_36675
MLLFSTFLSMSTEDLEPEALSGDEAPDEAIEEDDEGLSAEHEDFDPAEVYMLEDFIAEDARLEEFRRKIGDKIKAKVQGESSEPPRRRQSRPRRYISRNHDDLVAS

SEQ ID NO: 102650 - protein, 76 aa, Setaria italica
  Transcript Sequence Number=SeqID_36676
  Gene Ontology: Mol. function=nucleotidyltransferase activity; Cellular component=cytoplasm; Biological process=biosynthetic process
  Homolog annotation: Hit_ID=Q10Q60; Match level="QueryCoverage=100%, HitCoverage=20%, E-value=4e-36, Identity=94%"; Hit description=ADP -glucose pyrophosphorylase family protein, putative, expressed
MAGSEQRVVAVIMVGGPTKGTRFRPLSLNVPKPLFPLAGQPMVHHPISACRRIPNLAQIYLIGFHEEREFKLYVSS

SEQ ID NO: 102651 - protein, 76 aa, Setaria italica
  Transcript Sequence Number=SeqID_36677
CSIISHIGSALKCLTYISCIYHKLSMDATKHQILPLLIHGCTLTKTTRHGRATRNSKHIGRTRNNPWRLIRNAQVA

SEQ ID NO: 102652 - protein, 50 aa, Setaria italica
  Transcript Sequence Number=SeqID_36678
TSANNYSPGFCKAETADRKIEFTLSRLEQFVDTDAHVLWKMEILQLGYKF

SEQ ID NO: 102653 - protein, 124 aa, Setaria italica
  Transcript Sequence Number=SeqID_36679
  Gene Ontology: Mol. function=hydrolase activity; Cellular component =extracellular region
  Homolog annotation: Hit_ID=B9T602; Match level="QueryCoverage=58%, HitCoverage=13%, E-value=2e-22, Identity=63%"; Hit description =Heparanase, putative
MAAGLLLKMVGFCVWALFWLGGTATVSTTALAGGDAVVVDARSAVAATDDDFVCATLDWWPPDKCDYGTCSWGRASLLNLNLSNKILLNAVKAFSPLKLRLGGSLQDMLIYDTGDSHQSCTPFV

SEQ ID NO: 102654 - protein, 122 aa, Setaria italica
  misc_feature (74)..(74): Xaa can be any naturally occurring amino acid
  Transcript Sequence Number=SeqID_36680
  Gene Ontology: Mol. function=hydrolase activity; Cellular component =extracellular region
  Homolog annotation: Hit_ID=B6SXU7; Match level="QueryCoverage=98%, HitCoverage=22%, E-value=1e-43, Identity=67%"; Hit description =Heparanase-like protein 3
  Pfam annotation: Domain name=Glyco_hydro_79n; Domain location=1-120; Score=-103.9; E_value=6.9e-06; Accession=PF03662.6; Description =Glycosyl hydrolase family 79, N-terminal domain
QPSTKDNDIHGWELGNELSGSGVGARIDADQYAADVITLKQIIDSTYQGNPSKPLVVAPGGFFDAAWFTELVSXTKPSQMDVITHHIYNLGPGVDDHLIEKILNPSYLDGEASTFSNLQGIL

SEQ ID NO: 102655 - protein, 165 aa, Setaria italica
  misc_feature (78)..(78): Xaa can be any naturally occurring amino acid
  misc_feature (94)..(94): Xaa can be any naturally occurring amino acid
  Transcript Sequence Number=SeqID_36681
  Gene Ontology: Mol. function=hydrolase activity; Cellular component =extracellular region
  Homolog annotation: Hit_ID=B6SXU7; Match level="QueryCoverage=83%, HitCoverage=25%, E-value=3e-64, Identity=83%"; Hit description =Heparanase-like protein 3
LNLRIGRRTKTTLQANLQGILKSAGTSTVAWVGEAGGAYNSGHHLVTDAFVFSFWYLDQLGMSSKYDTKSYCRQTLVXGNYGLLNKTTFEPNPXYYSALLWHRLMGTKVLSTTFNGTNKIRTYAHCARNSEGITLLLINLSGNNTNHIYVASEGARTQSAKERKK

SEQ ID NO: 102656 - protein, 188 aa, Setaria italica
  misc_feature (12)..(12): Xaa can be any naturally occurring amino acid
  misc_feature (124)..(124): Xaa can be any naturally occurring amino acid
  Transcript Sequence Number=SeqID_36682
  Gene Ontology: Mol. function=hydrolase activity; Cellular component =extracellular region
  Homolog annotation: Hit_ID=B6SXU7; Match level="QueryCoverage=88%, HitCoverage=28%, E-value=1e-71, Identity=78%"; Hit description =Heparanase-like protein 3
KPSQMDVITHHXIYNLGPGVDDHLIEKILNPSYLDGEASTFSNLQGILKSAGTSTVAWVGEAGGAYNSGHHLVTDAFVFSFWYLDQLGMSSKYDTKSYCRQTLVGGNYGLLNKTTFEPNPDYYXVDIHKFSIASVALLWHRLMGTKVLSTTFNGTNKIRTYAHCAKKFGEGAHTIQSSVLFLQLLVTI

SEQ ID NO: 102657 - protein, 472 aa, Setaria italica
  Transcript Sequence Number=SeqID_36683
  Gene Ontology: Mol. function=hydrolase activity; Cellular component =extracellular region
  Homolog annotation: Hit_ID=B6SXU7; Match level="QueryCoverage=97%, HitCoverage=86%, E-value=0.0, Identity=71%"; Hit description =Heparanase-like protein 3
  Pfam annotation: Domain name=Glyco_hydro_79n; Domain location=2-285; Score=414.6; E_value=1.6e-121; Accession=PF03662.6; Description =Glycosyl hydrolase family 79, N-terminal domain
  Subcellular localization annotation: CTP_CleavageSite=21; ConfidenceScore=5.03e-01
PPSSTWSLIFSSLQNLSNKILLNAVKAFSPLKLRLGGSLQDMLIYDTGDSHQSCTPFVKNTSAMFGFSQGCLPLNRWDELNAFFQKSGAKIIFGLNALNGRVPMPDGSLGGPWNYTNAASFIRYTVNKGYDIHGWELGNELSGSGVGARIDADQYAADVITLKQIIDSTYQGNPSKPLVVAPGGFFDAAWFTELVSKTKPSQMDVITHHIYNLGPGVDDHLIEKILNPSYLDGEASTFSNLQGILKSAGTSTVAWVGEAGGAYNSGHHLVTDAFVFSFWYLDQLGMSSKYDTKSYCRQTLVGGNYGLLNKTTFEPNPDYYSALLWHRLMGTKVLSTTFNGTNKIRTYAHCARNSEGITLLLINLSGNNTNHIYVASEGARTQSARKENRRFGHIPGLGEAAELTREEYHLTPKDGNLQSQQVLLNGNVLATDANGDIPKLEPVQVEGTQPITVGPYSIVFAHIPSFYAPACS

SEQ ID NO: 102658 - protein, 115 aa, Setaria italica
  Transcript Sequence Number=SeqID_36684
  Homolog annotation: Hit_ID=Q54X41; Match level="QueryCoverage=80%, HitCoverage=51%, E-value=8e-10, Identity=37%"; Hit description=OB fold-containing protein, nucleic acid binding
GPVRPTPTAQAQARGGEEVTCLALVADETAAAHFLLWGGECGAFEPGDIVRLTGGIFSYHRGNALVLRAGRRGRAEKVGEFTMLFVETPNMSEIQWGRDPDDPRRMVQEAVVSPY

SEQ ID NO: 102659 - protein, 192 aa, Setaria italica
  Transcript Sequence Number=SeqID_36685
  Gene Ontology: Mol. function=nucleotide binding; Cellular component =cytoskeleton; Biological process=cell division
  Homolog annotation: Hit_ID=Q6I614; Match level="QueryCoverage=98%, HitCoverage=33%, E-value=2e-90, Identity=85%"; Hit description =Putative dynamin
  Pfam annotation: Domain name=Dynamin_M; Domain location=1-190; Score =9.9; E_value=2.7e-11; Accession=PF01031.12; Description=Dynamin central region
GQVIKSRIPGIQSLITKTIAELETELNRLGKPIANDAGGKLYTIMEICRMFDSIYKEHLDGVRPGGEKVYHVFDNQFPVAIKRLQFDKQLSMENVRKLITEADGYQPHLIAPEQGYRRLIESCLVSIRGPAEAAVDAVHAILKDLVRKAINKTHVTKLVKYLSAGAEAVPTLRVEVGNAAFESLDRMRMKAR

SEQ ID NO: 102660 - protein, 524 aa, Setaria italica
  Transcript Sequence Number=SeqID_36686
  Gene Ontology: Mol. function=nucleotide binding; Cellular component =cytoskeleton; Biological process=cell division
  Homolog annotation: Hit_ID=Q39828; Match level="QueryCoverage=100%, HitCoverage=85%, E-value=0.0, Identity=86%"; Hit description=Dynamin- related protein 5A
  Pfam annotation: Domain name=Dynamin_M; Domain location=136-422; Score=371.2; E_value=1.9e-108; Accession=PF01031.12; Description =Dynamin central region
  Pfam annotation: Domain name=Dynamin_N; Domain location=1-127; Score =117.4; E_value=4.6e-32; Accession=PF00350.15; Description=Dynamin family
  Pfam annotation: Domain name=GED; Domain location=427-520; Score =139.1; E_value=1.4e-38; Accession=PF02212.10; Description=Dynamin GTPase effector domain
  Pfam module annotation: Pfam domain module=Dynamin_M::Dynamin_N::GED; Domain location=136-422::1-127::427-520
AEFLHQPRKRYTDFAAVRKEIADETDRETGRSKQISPVPIHLSIYSPYVVNLTLIDLPGLTKVAVEGQPDSIVQDIENMVRSYIEKPNCIILAVSPANQDLATSDAIKISREVDPKGERTFGVLTKIDLMDKGTDAVDILEGRSYRLQQPWVGVVNRSQQDINKNVDMIAARRRERDYFSSTPEYKHLAPRMGSEYLAKMLSKHLEQVIKSRIPGIQSLITKTIAELETELNRLGKPIANDAGGKLYTIMEICRMFDSIYKEHLDGVRPGGEKVYHVFDNQFPVAIKRLQFDKQLSMENVRKLITEADGYQPHLIAPEQGYRRLIESCLVSIRGPAEAAVDAVHAILKDLVRKAINETHELKQFPTLRVEVGNAAFESLDRMRDESKKNTLKLVDMECSYLTVDFFRKLPQDVEKGGNPSHSIFDRYNDSYLRRIGQTVLSYVNMVCATLRNSIPKSIVYCQVREAKRSLLDHFFTELGAREMKQLSKLLDEDPAVMERRTNLAKRLELYRSAQAEIDAVAWSK

SEQ ID NO: 102661 - protein, 79 aa, Setaria italica
  Transcript Sequence Number=SeqID_36687
  Gene Ontology: Mol. function=transferase activity, transferring glycosyl groups; Cellular component=integral to membrane; Biological process=cell wall organization and biogenesis
  Homolog annotation: Hit_ID=Q8S7W0; Match level="QueryCoverage=100%, HitCoverage=14%, E-value=7e-40, Identity=96%"; Hit description =Probable mannan synthase 4
TRIQKMSLDYHFKVEQESGSSVHAFFGFNGTAGVWRVSAISEAGGWKDRTTVEDMDLAVRASLKGWQFLYVGDIRVKSE

SEQ ID NO: 102662 - protein, 54 aa, Setaria italica
  Transcript Sequence Number=SeqID_36688
ILEFYHYAMTCYILELDLDCLACKSFFNQTFSRVYASRMVLSSNAIYFHTIQLT

SEQ ID NO: 102663 - protein, 64 aa, Setaria italica
  Transcript Sequence Number=SeqID_36689
HELSIHIFCWDFLVTVDMHFEFGNTVTTLMGGNTGVVLWWHVYNKCYKSMLVGYDVKHYTTVTT

SEQ ID NO: 102664 - protein, 76 aa, Setaria italica
  Transcript Sequence Number=SeqID_36690
NRHRRAYKEQEMQLIIRLNCKSKLRTTLGCKPPPYFFRNITVVVTLIHSLLDVLGWKVPLSFDIIELKKGEMVTFS

SEQ ID NO: 102665 - protein, 149 aa, Setaria italica
  Transcript Sequence Number=SeqID_36691
  Gene Ontology: Biological process=protein localization
  Homolog annotation: Hit_ID=Q6K796; Match level="QueryCoverage=100%, HitCoverage=3%, E-value=3e-72, Identity=89%"; Hit description =Vacuolar protein sorting 13C protein-like
DYIFKFSMTVQTNNSLDFCVYPYVGVQVPESCVFFVNIHEPIIWRLHEMIQHLKFDRIYSSQPSAVSIDPILKIGLLNISEIRFRVSMAMSPSQRPRGVLGFWSSLMTALGNIEHMPVRIAQRYREELCMRQSALMNAAISNIQKDLLS

SEQ ID NO: 102666 - protein, 402 aa, Setaria italica
  Transcript Sequence Number=SeqID_36692
  Gene Ontology: Biological process=protein localization
  Homolog annotation: Hit_ID=Q6K796; Match level="QueryCoverage=99%, HitCoverage=9%, E-value=0.0, Identity=89%"; Hit description=Vacuolar protein sorting 13C protein-like
EIRVSMAMSPSQRPRGVLGFWSSLMTALGNMEHMPVRIAQRYREELCMRQSALMNAAISNIQKDLLSQPLQLLSGVDILGNASSALSNMSKGIAALSMDKKFIQSRMRQDSKGVEDFGDVIRDGGGALAKGIFRGVTGILTKPIEGAKSSGVEGFVQGVGKGIIGAAAQPVSGVLDLLSKTTEGANAVKMKISSAIMAEEQLLRRRLPRAIGGDGLLYPYDENKATGQAILHLAECATFLGQIDIFKIRGKFASTDAYEDHFVLPKGKILLITHRRVLLLQLPMMTQRKFNPAKDPCSVIWDVLWDDLVTVEMTHGKKDPPGSLPSKLILYLKAKPSNSKEVVRLVKCNRGSDQATIIYSAIDRAYKAYGPNSIKELLRWKVPRPYAPRNNSGRSFQDLTFG

SEQ ID NO: 102667 - protein, 124 aa, Setaria italica
  Transcript Sequence Number=SeqID_36693
  Gene Ontology: Mol. function=peptidase activity; Cellular component =nucleus
LSINKWNSTDLKFCTGSSDSCKTGCPVCNKDCIIPIKHEACNQGKEFLTSKDGVLPPCSVCVLLRQASVHHCNESTKLKALRKNLRNAEASPPLDVKAKRTSRNSSRLAKEHIVETHAKTINSL

SEQ ID NO: 102668 - protein, 213 aa, Setaria italica
  Transcript Sequence Number=SeqID_36694
  Homolog annotation: Hit_ID=Q10PA0; Match level="QueryCoverage=94%, HitCoverage=24%, E-value=6e-47, Identity=44%"; Hit description =Pentatricopeptide, putative, expressed
  Pfam annotation: Domain name=PPR; Domain location=27-61; Score=43.2; E_value=9.9e-10; Accession=PF01535.12; Description=PPR repeat
  Pfam annotation: Domain name=PPR; Domain location=62-95; Score=13.1; E_value=0.25; Accession=PF01535.12; Description=PPR repeat
  Pfam annotation: Domain name=PPR; Domain location=98-132; Score=2.0; E_value=5.2; Accession=PF01535.12; Description=PPR repeat
  Pfam module annotation: Pfam domain module=PPR::PPR::PPR; Domain location=27-61::62-95::98-132
LVDMYGKCGSIESARRLFCLMCEKDLHSWTAMISGLASHGHGKEAVALFFSMLEAGLNPDSTTFIVVLSACSHSGLVDEGIHVFNSMESEYRVSLSIKHYGCMVDLFSRAGLIHRAYEFVSTMPFEPNLEILGALLSACSINNELEIGELVLNKIESVCSYKGGAGVLLSNMYANQNLWQEVDTIRRKIKTEAIARKPPGQSLIATEVLCMSW

SEQ ID NO: 102669 - protein, 102 aa, Setaria italica
  misc_feature (41)..(41): Xaa can be any naturally occurring amino acid
  Transcript Sequence Number=SeqID_36695
  Gene Ontology: Mol. function=aspartic-type endopeptidase activity; Cellular component=chromatin
  Homolog annotation: Hit_ID=Q8SA93; Match level="QueryCoverage=99%, HitCoverage=3%, E-value=1e-14, Identity=42%"; Hit description =Putative polyprotein
QFWLQLLRHFRLPDLAPQSISAGFFEWWQHPGDRLNMEVRXGFNSLVVLGAWTLWKMRNDIVFNGASPRLDRTLLLAQDEADHWMMAGANGLSGLVAARPGG

SEQ ID NO: 102670 - protein, 184 aa, Setaria italica
  misc_feature (161)..(161): Xaa can be any naturally occurring amino acid
  Transcript Sequence Number=SeqID_36696
  Gene Ontology: Mol. function=endonuclease activity; Cellular component=nucleus; Biological process=response to DNA damage stimulus
  Homolog annotation: Hit_ID=Q60GC1; Match level="QueryCoverage=90%, HitCoverage=19%, E-value=3e-42, Identity=58%"; Hit description =Exonuclease 1
NRYSPISSDDSPPVIDEGRDTDDLDDANIRTEGRFGCNVSHVNMYSGIAEKSMDKFAALVSSFRYPGSRASGLRAPLKDVKNTLSVRSILRAPEKGKFRCASKKSDLGPPSRSRYTSDNKETAASPPDISAFAYRPVKTVHADQDGTTSKTKDAADAPPDXLGTFAYTPMAPTLCHPDRSKFTG

SEQ ID NO: 102671 - protein, 420 aa, Setaria italica
  misc_feature (84)..(84): Xaa can be any naturally occurring amino acid
  misc_feature (164)..(164): Xaa can be any naturally occurring amino acid
  Transcript Sequence Number=SeqID_36697
  Gene Ontology: Mol. function=protein serine/threonine kinase activity; Cellular component=plasma membrane; Biological process =protein amino acid phosphorylation
  Homolog annotation: Hit_ID=B9T2T2; Match level="QueryCoverage=99%, HitCoverage=43%, E-value=1e-136, Identity=60%"; Hit description =Serine/threonine-protein kinase PBS1, putative
  Pfam annotation: Domain name=Pkinase; Domain location=193-419; Score =118.7; E_value=1.9e-32; Accession=PF00069.17; Description=Protein kinase domain
  Pfam annotation: Domain name=Pkinase_Tyr; Domain location=193-412; Score=97.0; E_value=6.7e-26; Accession=PF07714.9; Description =Protein tyrosine kinase
  Pfam module annotation: Pfam domain module=Pkinase::Pkinase_Tyr; Domain location=193-419::193-412
  Subcellular localization annotation: CTP_CleavageSite=63; ConfidenceScore=5.32e-01
TGTVPDSLTKLASLQKLDLSMNDLSGPLPTFKPSVQVNLSGNLNFNSTAAAPDAQPSNSPRSPAAHDGGAPGSHGSNAAIPGGXKKTSSAVLLGTTIPVAVSVAALISVGAVFFCKKRASTPPQGASVVVHPRDSSDPDNLAKIVVATNDGSSGTSQGNTHSGXSSLTGGVHMIEAGNFVIAVQVLRGATKNFAKENVLGHGGFGVVYKGELHDGTMIAVKRMESVAVSNKALDEFQAEIAVLTKVRHRNLVSILGYAIEGNERLLVYEYMPNGALSRHLFQWKQFGLEPLSLKKRLNIALDVARGMEYLHNLGHHRFIHRDLKSANILLGDDFRAKVSDFGLMKDAPDGNFSVATRLAGTFGYLAPEYAVTGKISTKADVFSFGVVLLELITGTTAIDDSRVGEGEETRHLAYWFCQIR

SEQ ID NO: 102672 - protein, 159 aa, Setaria italica
  Transcript Sequence Number=SeqID_36698
  Gene Ontology: Mol. function=protein serine/threonine kinase activity; Cellular component=integral to membrane; Biological process=protein amino acid phosphorylation
  Homolog annotation: Hit_ID=B9T2T2; Match level="QueryCoverage=99%, HitCoverage=15%, E-value=9e-56, Identity=68%"; Hit description =Serine/threonine-protein kinase PBS1, putative
TLLELITGTTAIDDSRVGEGEETRHLAYWFCQIRKDEEKLRAAIDPTLDVTDEEIFESISVIAELAGHCTAREPSQRPDMGHAVNVLVPMVEKWKPVKDEAEDYLGIDLHLPLLQMVKSWQDAEASMTDGSILSLEDSKGSIPARPAGFAESFTSADGR

SEQ ID NO: 102673 - protein, 109 aa, Setaria italica
  Transcript Sequence Number=SeqID_36699
  Pfam annotation: Domain name=RALF; Domain location=53-109; Score =27.5; E_value=3.1e-05; Accession=PF05498.3; Description=Rapid ALkalinization Factor (RALF)
MAWRTRVLLVLAFAAVALLASGTAAAAVGSSAGAEAMPSLHALRRVEDDASSFVEGEEAAAYPRRRALYSSGSINYAALTASKAACYGPCPARGQAYSRGCQAIYQCRG

SEQ ID NO: 102674 - protein, 166 aa, Setaria italica
  Transcript Sequence Number=SeqID_36700
  Homolog annotation: Hit_ID=B4FMC9; Match level="QueryCoverage=84%, HitCoverage=83%, E-value=4e-52, Identity=69%"; Hit description=GPI -anchored protein
  Subcellular localization annotation: CTP_CleavageSite=36; ConfidenceScore=5.16e-01
MAADRGLLLLLLSAAAIAGVASAAGPFLSDGVFQVSAGSTGRSLLQAKKNCAMNFEFQNYTIITSKCKGPKFPADQCCGAFKEFACPFRDYINEDSSDCSSAMFSYINLYGKYPPGLFANMCREGKKGLACTDAQSSIAANGGQRAQSSSLVLVTLVCGLVALLFH

SEQ ID NO: 102675 - protein, 256 aa, Setaria italica
  Transcript Sequence Number=SeqID_36701
  Gene Ontology: Mol. function=galactinol-sucrose galactosyltransferase activity; Cellular component=chloroplast
  Homolog annotation: Hit_ID=B6ST00; Match level="QueryCoverage=100%, HitCoverage=32%, E-value=1e-120, Identity=83%"; Hit description =Stachyose synthase
  Pfam annotation: Domain name=Raffinose_syn; Domain location=1-240; Score=-303.7; E_value=1.3e-09; Accession=PF05691.4; Description =Raffinose synthase or seed imbibition protein Sip1
AVSGGPIYVSDSVGQHDFALLRRLALPDGTILRCEGYALPSRDCLFADPLHDGRTVLKIWNVNRFAGVVGAFNCQGGGWSPEARRNKCFSECSVPLATRASPADVEWRSGKGPGVSVKGVSQFAVYLVEARRLELLRPDEGVDLTLAPFTYELLVVAPVRVISPERAVKFAPIGLANMLNTAGAVQAFETKKDANGVIAEVAVKGAGEMVSYSSARPRLCRVNGEEAEFAYKDGMVTVDVPWSGSSSKLCRVEYVY

SEQ ID NO: 102676 - protein, 65 aa, Setaria italica
  Transcript Sequence Number=SeqID_36702
  Subcellular localization annotation: CTP_CleavageSite=59; ConfidenceScore=5.30e-01
AYRLFSLQQTQMLNGATNVHNSSFHLHLISTPTFLFLPSLGLSHFLATTFTCEDFPGIVAAALVL

SEQ ID NO: 102677 - protein, 62 aa, Setaria italica
  Transcript Sequence Number=SeqID_36703
TEQIIFSPQLPGGLVLFNHCHISLQIIKYACSRLGSRCCQSSLTRTPLWCAALFQLSLAQNL

SEQ ID NO: 102678 - protein, 129 aa, Setaria italica
  misc_feature (44)..(44): Xaa can be any naturally occurring amino acid
  Transcript Sequence Number=SeqID_36704
  Gene Ontology: Mol. function=protein serine/threonine kinase activity; Biological process=protein amino acid phosphorylation
  Homolog annotation: Hit_ID=Q25AG2; Match level="QueryCoverage=98%, HitCoverage=15%, E-value=8e-29, Identity=52%"; Hit description =H0512B01.12 protein
VLNNQTTCVCLPQYSFIGESKGCKPDFQPQSCDFDEAGATEQVXVVTMSNVDWPQCDYEQHDNIPNDQCQQLCLTDCLCAVAVFRDSDNTCWKKKMPLTNNVVGDTVQRTVYIKVPKNNSQQPELLDSN

SEQ ID NO: 102679 - protein, 1216 aa, Setaria italica
  Transcript Sequence Number=SeqID_36705
  Pfam annotation: Domain name=Hep_Hag; Domain location=843-870; Score =3.2; E_value=8.1; Accession=PF05658.6; Description=Hep_Hag
  Pfam annotation: Domain name=Hep_Hag; Domain location=877-904; Score =12.9; E_value=0.75; Accession=PF05658.6; Description=Hep_Hag
  Pfam annotation: Domain name=Hep_Hag; Domain location=919-946; Score =12.8; E_value=0.77; Accession=PF05658.6; Description=Hep_Hag
  Pfam annotation: Domain name=Hep_Hag; Domain location=947-974; Score =14.8; E_value=0.37; Accession=PF05658.6; Description=Hep_Hag
  Pfam module annotation: Pfam domain module=Hep_Hag::Hep_Hag::Hep _Hag::Hep_Hag; Domain location=843-870::877-904::919-946::947-974
MDNGKNIAATSDDKALSEVEHLLMRKTFTRVEFDRLTDLLRARTIEPDPPTSIVSREEKNEDIRIDGIGGSTSHQMAADKSPTVKVHSHGTSSPAELAKQYMSSRYSREPQSSNLRSRLFLENKGEASNTAYDRRFGPPIVQAPIEFGNENPGLPVNGYVTSGLRGRSAIYRMSRSPYFKAPSSSEVNRSSLSQRAQSLHVGGRQVLKRRGGDLENEVGSIGPIRRIRQKSNMMSPFRDAHSVPRGNLLTSRTSDSDFIEDSTSIQESPSSERLLLGTSQSVRPLGSHNNGDGKPSDSAPPIPAQSNKMAEKIFEQLNIIAPSPKEKQSGQQSVTGNASNSMSKKPILQDAGPSSMYDPSSSLKFQDLDGANGPLDPDLNGSLLKKDKLNMIKDGPSKVALSDKSTFLGNSVSASTSRKPSFKMAVIEDLPEFDDDLEVPIPSKSPSSKIEIETTGQRSESIRKEQKVEQNILEQKVESNLMKKNIVGSPVSEQPVASLSKTVSSSGGLLSSNDPGKAVPKASVDKNAGFAFLNAPPGTRPASVSAMPLAPVNDDKQTGASNFIFGLKQSNTSDLETPNVKNNSTLGQSVTKLTTSDNSSEKGDKTEKAEDVIKSSDKVLPSAASTTQNVPVHFASAASTSASLSNGFPHSSSPKLATVPPTDKPSVGSAASTLFAVSSSSPAISSSSSPAFTGFNFSSSASVGLSSAKSDGTTAGVKPASTLSFGIGGATDDAKSTAPDSASMPPSKLTSPISSYPITSAPTSSPAASTASFTFPSSGNSLFGFNSPAQPTGLSTSSAAGSTSQPSAASTFFGSKPTQSEGTIQQPSQSPKPQFGSPFPSVTPGVGASSSGSGTLSFGIGASSTGSGTMSFVGAASSGPGTVSFGAGTASSGPGAVSFGAGTSSSGSGTVPFGVGAASSGPGTVSFGAGTASSGPGTVSFGAGAASSGPGTVSFGAGASSSGPGTVSFGATTSTSGSGFGNSPFGTGATFANPFSSSSGTGFTFSSASSSAGASAVASTSVFASTSTASSASTFSNPFGSSSSPPSTFTFGQSASSSGGFAFGAQPAPTFSSQPSVFSFTSANTGINSSTPQPAFGMANTNTAFGMGSPGNDQMNEDSMADDTNQAAPAPAPVFGSPFGQQNSTPAAPVFGAPAVQPGGAFQFGGQQQAAQQNPSFPAAGSLEFQGGNFSLGSGGGGGDKSNRRMIKVKRAPKKR

SEQ ID NO: 102680 - protein, 71 aa, Setaria italica
  Transcript Sequence Number=SeqID_36706
SLRLRGRCRSRRPLDEAGLFGSVSASPKDAAADLVGVAAAALILTLVRRRRRERKAREDSDARIPDGVSMV

SEQ ID NO: 102681 - protein, 56 aa, Setaria italica
  Transcript Sequence Number=SeqID_36707
KAALRMARRGSGLAPVVGRRPRRPPLSVRCDATSRDGRITQQEFTEMAWQSIVSSP

SEQ ID NO: 102682 - protein, 768 aa, Setaria italica
  Transcript Sequence Number=SeqID_36708
  Gene Ontology: Mol. function=actin binding; Cellular component =cytoskeleton
  Homolog annotation: Hit_ID=Q84TX2; Match level="QueryCoverage=98%, HitCoverage=35%, E-value=1e-138, Identity=44%"; Hit description=SCAR- like protein 1
  Pfam annotation: Domain name=WH2; Domain location=702-720; Score =16.6; E_value=0.1; Accession=PF02205.12; Description=WH2 motif
MGKPVLVQESEVFAFGEFDSPIVPLSSIDDIEDNQDSASRTYVQTEQESECCTSGELDSQTTPSPLLDEKIDKLDGPPLSNAAMLDQESEVCVPSGLDSRIALCSSTDENVHELDHPPLSSSVLINPESEDHVLGDTSSKVTMCSLVEDKIDESEDPQPNHNFPEVRQEALASPELDFQVAPCPLNDDKVGEIEGPPSCNGRVESEKESDCSIESDSQSAPCSSNSPVLADTGVLTSPVMPNNEEMNQLSPGPPPAVQFQNDSYEDPQAQAPPPLPPLQWRLGRPRLGLLSRKSSMPEPARSIDPVFQASNQDMDIRLGLLDQPDRSIEPVSSQATEEDTHQSSLLDGSDQNVEVGLSTSVTVTGVARTEHYWPFSEASENIKGPEHISSSFNRNLDAGVTSATADEEHLDDSGVTHGAVLYSSDPLLRLPADEQQEPQLCTLSSDTRETSVHPSRMHPGASENDKSTDAAGGMESTSTKGPDYENSFYQQPQHVESFSKTSDYGEHITNASVEGVKHQSGTSETLSDPAKHSAPGTLLKDGNSKGSQILQEQNVGSSQDNKSGGPLPSSESMASEDYRHDEYNLERENRHPPSNPGPLVAWPGDKNNFFSGLDEASFAHAEQPPVMGWTVGPQMIHPKYGISAEESQFEPNITDNHLIKKPISIKNIPRNPLVDAVAAHDRSSMRKISELAPSADKPKPTERNLLLEQIRNKTFNLKPVAPSQPTAMRSPARANTRNLKVAAIIEKANAIRQAVGSDDEDADSWSDA

SEQ ID NO: 102683 - protein, 458 aa, Setaria italica
  misc_feature (426)..(426): Xaa can be any naturally occurring amino acid
  Transcript Sequence Number=SeqID_36709
  Homolog annotation: Hit_ID=Q1SN04; Match level="QueryCoverage=99%, HitCoverage=86%, E-value=6e-79, Identity=28%"; Hit description =Tetratricopeptide-like helical
  Pfam annotation: Domain name=PPR; Domain location=193-227; Score =43.2; E_value=1e-09; Accession=PF01535.12; Description=PPR repeat
  Pfam annotation: Domain name=PPR; Domain location=22-56; Score=38.4; E_value=2.9e-08; Accession=PF01535.12; Description=PPR repeat
  Pfam annotation: Domain name=PPR; Domain location=228-262; Score =12.6; E_value=0.29; Accession=PF01535.12; Description=PPR repeat
  Pfam annotation: Domain name=PPR; Domain location=264-297; Score=1.2; E_value=6.5; Accession=PF01535.12; Description=PPR repeat
  Pfam annotation: Domain name=PPR; Domain location=330-364; Score=4.3; E_value=2.7; Accession=PF01535.12; Description=PPR repeat
  Pfam annotation: Domain name=PPR; Domain location=57-91; Score=34.6; E_value=4e-07; Accession=PF01535.12; Description=PPR repeat
  Pfam annotation: Domain name=PPR; Domain location=92-126; Score=39.8; E_value=1.1e-08; Accession=PF01535.12; Description=PPR repeat
  Pfam module annotation: Pfam domain module=PPR::PPR::PPR::PPR::PPR::PP R::PPR; Domain location=193-227::22-56::228-262::264-297::330-364::57- 91::92-126
SKCGRLDYAKKVFDALELRNMTTWNSLVAGYANAGQFDNSLKLVEEMKMNRLDPDITTWNSLITGYSMNGLSSQAVLLLRQVKAIGLTPNVVSWTSLISGSCNNGDYEDSFYFFNEMQKDDVQPSLVTMSVLLRACAGLALLKKGKELHSFALRRAYDYDMVVRTALIDMYSKAGSLTSAKRIFERIQKNNLVSCNAMLTGLAVHGHGREAIELFHDMCNSGLKPDSITFTALLTACRSMELITEGWEYFDSMESRYGVTPTVENYACMVDLLSRCGYLDEAMDFIKKSPFKSAASLWGALLTGCTVHGNLALAEVAARKLFKLEPYNSANYLQMVSLYEQEQMFDEAESLKYVMKARSLNTRPGWSWIQIEQSIHVFEVEGKPHPDTAEIYEELIRLVFQIRKAGYVPDTSCIVYNVPEEEKEKXLLLSHTEKLAITYGLIHSDTSQAPIRVIKNTR

SEQ ID NO: 102684 - protein, 167 aa, Setaria italica
  misc_feature (24)..(24): Xaa can be any naturally occurring amino acid
  Transcript Sequence Number=SeqID_36710
PHPAGILEPQCASAGEAGELLGRXWVAGLMRELCPFKMMESFPVIDIGKHAHLLEVLYYILLPKPADDDSAAEADANGNFHDDGYDIEEQPAAGSGGGGEEQRKPAAGCEYVKQLFLAVWGIVSGLNNTAGPVRYVTKPIEFAIKAPWKMLAVVPGVGVVRCSWSYG

SEQ ID NO: 102685 - protein, 97 aa, Setaria italica
  Transcript Sequence Number=SeqID_36711
  Gene Ontology: Mol. function=catalytic activity; Cellular component =plasma membrane
  Homolog annotation: Hit_ID=B6SW95; Match level="QueryCoverage=100%, HitCoverage=17%, E-value=3e-51, Identity=96%"; Hit description =Neutral/alkaline invertase
  Pfam annotation: Domain name=Invertase_neut; Domain location=1-97; Score=-295.3; E_value=0.039; Accession=PF04853.4; Description=Plant neutral invertase
TFPTLLCADGCCMIDRRMGVYGYPIEIQALFFMALRCALLMLKPDAEGKEIMERIVTRLAALSYHVRGYFWLDFQQLNDIYRFKTEEYSHTAVNKFN

SEQ ID NO: 102686 - protein, 203 aa, Setaria italica
  Transcript Sequence Number=SeqID_36712
  Homolog annotation: Hit_ID=Q01N17; Match level="QueryCoverage=37%, HitCoverage=19%, E-value=5e-20, Identity=64%"; Hit description =OSIGBa0147B06.6 protein
  Subcellular localization annotation: CTP_CleavageSite=45; ConfidenceScore=5.43e-01
RNNEQSGKEEYIRSKQSPGKVAVRPTNGVTTSLSPRNVMSSTPVPQSSVAANLAHSGVSSATNAASRAAISAANLVSSSVSATTAASNNAISATNLAPNRAHPPRSSNQDRSDRFLQLQTFLRNNEQSGQEEYIRMLRSLSSVGLSKHAIELEKRAANLLVEEGKELQKMKVLNVLGKLSPTDAPQFPAQPATVKHLPFPARR

SEQ ID NO: 102687 - protein, 46 aa, Setaria italica
  Transcript Sequence Number=SeqID_36713
  Gene Ontology: Mol. function=phosphatidylinositol phosphate kinase activity; Biological process=phosphatidylinositol metabolic process
  Homolog annotation: Hit_ID=Q2QVA9; Match level="QueryCoverage=100%, HitCoverage=2%, E-value=4e-17, Identity=91%"; Hit description =Phosphatidylinositol-4-phosphate 5-Kinase family protein, expressed
DKQLESWVKTSLVVPKNLSPTVISPREYKIRFRMFMSQYFPSVPDA

SEQ ID NO: 102688 - protein, 341 aa, Setaria italica
  misc_feature (245)..(245): Xaa can be any naturally occurring amino acid
  Transcript Sequence Number=SeqID_36714
  Gene Ontology: Mol. function=phosphatidylinositol phosphate kinase activity; Biological process=phosphatidylinositol metabolic process
  Homolog annotation: Hit_ID=Q2QVA9; Match level="QueryCoverage=100%, HitCoverage=22%, E-value=1e-157, Identity=75%"; Hit description =Phosphatidylinositol-4-phosphate 5-Kinase family protein, expressed
  Pfam annotation: Domain name=PIP5K; Domain location=104-335; Score =149.3; E_value=1.2e-41; Accession=PF01504.10; Description =Phosphatidylinositol-4-phosphate 5-Kinase
  Subcellular localization annotation: CTP_CleavageSite=18; ConfidenceScore=5.21e-01
GSSIIAVALTISEQQGFSSEAASSNLDRNVSMLSSMLASPISPMESTSGFYDSFLSALKDMHPAIDLNNQNIALRSKYTVVCIYAKQFHDLRKICCPSELAYISSISRCKHWNAQGGKSKVFFAKSMDDRFIIKQIKMTEFHSFLKFGLGYFKHFSVYQVSSNPTCLAKILGIYQVKETRNGKEARTNFMVMENLLFGHNIIRRYDLKGALFSRYVPDSENPEKVLLDQNFIEDMRTMPIYIQGXTKNLMERAIWNDTAFLSLMNVMDYSLLVGVDKQKKELVFGIIDYLRQYTWDKQLESWVKTSLVVPKNLSPTVISPREYKIRFRGFMSQYFLSVPNA

SEQ ID NO: 102689 - protein, 119 aa, Setaria italica
  Transcript Sequence Number=SeqID_36715
  Pfam annotation: Domain name=DUF309; Domain location=90-119; Score= -5.3; E_value=0.047; Accession=PF03745.6; Description=Domain of unknown function (DUF309)
  Subcellular localization annotation: CTP_CleavageSite=17; ConfidenceScore=5.61e-01
MAPSAAPIYAGWAPPAAATMLAATNLSPRLRQLPTSPARANVSLCPQHHGNGRRARNADLRCRRRLLTARGERPDDDDDEDDQDPSATGGGFDYAVALFNRGEFHACHDVVEELWYGAE

SEQ ID NO: 102690 - protein, 276 aa, Setaria italica
  Transcript Sequence Number=SeqID_36716
  Homolog annotation: Hit_ID=Q8YPX4; Match level="QueryCoverage=25%, HitCoverage=53%, E-value=8e-13, Identity=50%"; Hit description =Alr4066 protein
  Pfam annotation: Domain name=DUF309; Domain location=87-148; Score =102.2; E_value=1.7e-27; Accession=PF03745.6; Description=Domain of unknown function (DUF309)
  Subcellular localization annotation: CTP_CleavageSite=45; ConfidenceScore=5.21e-01
MALAPSGSVAPIYAGWAPPRLRQLPTTPARANVSLYYLRHRGSCRGSDGGGARNADLRCRRRLLTARGERPDEEEEEDDEDPSATGGGFDYAVALFNRGEFHACHDVVEELWYGAEDPARTLLHAILQCAVGFHHLFNQNHRGAMMELGEGLCKLRKLNLGGGDDDDPFSRFRDDVAAVLQFLYRTQKELAACTDDLCLTMDGSPSSYQLLGNFAAGQQLYRLQADDTHEDGASTIVFSVPDHPASRAVPSCRVKLPTLHATEQNLTELQRAYQYI

SEQ ID NO: 102691 - protein, 34 aa, Setaria italica
  Transcript Sequence Number=SeqID_36717
LIFPDLLNIHVNIINLGPALHFGSFPYCWDLFLL

SEQ ID NO: 102692 - protein, 187 aa, Setaria italica
  Transcript Sequence Number=SeqID_36718
  Homolog annotation: Hit_ID=Q10A51; Match level="QueryCoverage=85%, HitCoverage=65%, E-value=6e-15, Identity=31%"; Hit description=F-box domain containing protein, expressed
IAIGVPVTLVNPSVLTKDSLCWLVQEYDTGSDGNHILEFDLDRQALAVFGAPVGTEESCLELVRMEDNKLGLAALLDDVTIQLWERKAGSDGVARWMLQKSIKLDKLLSVGSPIVGTLIHGYDENGHVIFISTSLDVFMIQLKTMQFRHLFKAMFITSYHPYTGFYTTGNISQYLSEVSFSFSVYVF

SEQ ID NO: 102693 - protein, 68 aa, Setaria italica
  Transcript Sequence Number=SeqID_36719
  Subcellular localization annotation: CTP_CleavageSite=46; ConfidenceScore=5.28e-01
SIWLTSNEFIPTQVSIPQVISHNTFQKYHFPFQYMSSATSFMLLLSISSINNTWIFCFGPMIAIHSKL

SEQ ID NO: 102694 - protein, 173 aa, Setaria italica
  misc_feature (33)..(33): Xaa can be any naturally occurring amino acid
  Transcript Sequence Number=SeqID_36720
  Pfam annotation: Domain name=Dev_Cell_Death; Domain location=1-46; Score=-58.2; E_value=0.058; Accession=PF10539.1; Description =Development and cell death domain
VKFTIHGDFLPLREKSLRKAMKENFFKGMFNPXLTSTQVKKLSTLFQPITLLPESSPPHDVDNWPPVPAFLPPSAHSAQPPAYAHHPTTHAAPATSMASQPSPPASTFLLPRKWPHSLVVATKDDVHTGASSSTITVSLAGFIFMCSSATRPECYRHRVLGLPPGSLEAVSRI

SEQ ID NO: 102695 - protein, 48 aa, Setaria italica
  Transcript Sequence Number=SeqID_36721
RRHLHLDPETMFNLFIQLRSVHNLYLGKNETDMLIKRFSFEFFTEVNL

SEQ ID NO: 102696 - protein, 132 aa, Setaria italica
  Transcript Sequence Number=SeqID_36722
  Gene Ontology: Mol. function=acid phosphatase activity
  Homolog annotation: Hit_ID=B9SRV6; Match level="QueryCoverage=99%, HitCoverage=34%, E-value=2e-49, Identity=68%"; Hit description =Purple acid phosphatase, putative
NPSREFSFRTPPATLPFKFVIVGDLGQTGWTDSTLKHIAAADYDVLLLPGDLSYADSIQPRWDSYGRVVEPLASARPWMVTQGNHEVEKLPLVEPTPFKAYNARWRMPFDAGATPSGDNLYYSFDVAGGAVH

SEQ ID NO: 102697 - protein, 143 aa, Setaria italica
  Transcript Sequence Number=SeqID_36723
  Gene Ontology: Mol. function=Rab GTPase activator activity; Cellular component=intracellular
  Homolog annotation: Hit_ID=Q70AJ0; Match level="QueryCoverage=51%, HitCoverage=55%, E-value=3e-13, Identity=53%"; Hit description =Putative microtubule-associated protein (Fragment)
KTGEDNCHNNDSERSSITSNSCAGDDDRDEVLQDESSSSIYEDQIVSEVAASEKDADPVGPSEKTAVSNERKPFINKLQWFLRFGRPSGEGNVEKSTGEVSDDKHAVVPPSTSPPDVSSDSSRGGINLASGDKKVMGTLKNIG

SEQ ID NO: 102698 - protein, 714 aa, Setaria italica
  Transcript Sequence Number=SeqID_36724
  Gene Ontology: Mol. function=Rab GTPase activator activity; Cellular component=intracellular; Biological process=regulation of Rab GTPase activity
  Homolog annotation: Hit_ID=Q9XHE5; Match level="QueryCoverage=94%, HitCoverage=100%, E-value=1e-120, Identity=41%"; Hit description =Microtubule-associated protein
CWRPDPEDGSYFQTPTCQAMLRRILLMWCLQHPECGYRQGMHELLAPLVYVLQVDIDKLSQVRKLHEDCFNDDFDGVPFPDTDMVFSYKPRKDSKWHSGADNGNDSERASKVNSLDELDMDTKEIILLSDAYGAEGELGVVLSERFMEHDAYSIFDGLMDGGSGVVRMAEFFSASKVGSSSSLPPVIEASSSLFHLLSIVEPSLHSHFIELDVEPQYFALRWLRVLFGREFCLNDLLVVWDEVFACSNDMLLRENEEYSFKILCSSRGAFITAMAVSMILHLRSSLLATEINTSCLQRLLNFPNNVDVHKLIEKAKSLQSIAIDANTPSPSFLSKDSHDYDRVYSNLATSTPPRTPLHPLPESYWEEQWRNLHNDGTAPKEIEKVQSYKRSLKKSLSQRLGLSRTESDPSPVIISAKNSVRRCLLNSYDDVVRAGEVAGKIEQDEFPISIHKERERPSRLKLRAASENLTLSSSVETANPLVDSPVKPTDESSIKGIEACSTGENSPVFYAASAGTEQDNCHNNDSERSSITSNSCAGDDDRDEVLQDESSSSIYEDQIVSEVAASEKDADPVGPSEKTAVSNERKPFINKLQWFLRFGRPSGEGNVEKSTGEVSDDKHAVVPPSTSPPDVSSDSSRGGINLASGDKKVMGTLKNIGQNMLENIQVIESAFQQDRGQPSAMENFSNNILGGKGQVTAMAALTELRKISNLLREM

SEQ ID NO: 102699 - protein, 138 aa, Setaria italica
  misc_feature (12)..(12): Xaa can be any naturally occurring amino acid
  Transcript Sequence Number=SeqID_36725
LRYDPERRREIXLLRVARAAEVDDCSSSASGTGASEDDGGSVSSDAAAASPVSFARRSDSEAELDDSDDDDDEEEVAQPRRGRWERRLFLLLVAVACSFCYMHCMNPAAFYVPSGDRMDFIGPIGGMYDAGDHEVDSL

SEQ ID NO: 102700 - protein, 198 aa, Setaria italica
  misc_feature (137)..(137): Xaa can be any naturally occurring amino acid
  Transcript Sequence Number=SeqID_36726
  Gene Ontology: Cellular component=extracellular region; Biological process=plant-type cell wall organization and biogenesis
  Homolog annotation: Hit_ID=B6TJY0; Match level="QueryCoverage=100%, HitCoverage=75%, E-value=1e-103, Identity=94%"; Hit description =Alpha-expansin 20
  Pfam annotation: Domain name=DPBB_1; Domain location=6-93; Score =110.6; E_value=5.3e-30; Accession=PF03330.10; Description=Rare lipoprotein A (RlpA)-like double
  Pfam annotation: Domain name=Pollen_allerg_1; Domain location=104 -182; Score=137.2; E_value=5.2e-38; Accession=PF01357.13; Description= Pollen allergen
  Pfam module annotation: Pfam domain module=DPBB_1::Pollen_allerg_1; Domain location=6-93::104-182
RYGRYTAGLSAALFGRGGACGGCYELRCVNDIRGCLRASPTVVVTATDFCPANMGLADEAGGWCNFPREHLELSEAAFLRVAKAKASIVPVQFRRVSCDRAGGMRFTITGSAHFLQVLITNVAADGEVAAVKVKGSXRTGWIPMGRNWGQNWQCDADLRGQPLSFEVTGGRGRTVTAYSVAPADWMFAQTFEGKQFVE

SEQ ID NO: 102701 - protein, 182 aa, Setaria italica
  misc_feature (28)..(28): Xaa can be any naturally occurring amino acid
  Transcript Sequence Number=SeqID_36727
  Gene Ontology: Mol. function=ER retention sequence binding; Cellular component=endoplasmic reticulum membrane; Biological process=protein retention in ER lumen
  Homolog annotation: Hit_ID=B9FES2; Match level="QueryCoverage=90%, HitCoverage=33%, E-value=1e-78, Identity=86%"; Hit description=ER lumen protein retaining receptor
  Pfam annotation: Domain name=ER_lumen_recept; Domain location=29-175; Score=271.1; E_value=2.6e-78; Accession=PF00810.10; Description=ER lumen protein retaining receptor
MNAFRLAGDMTHLMSVLVLLLKIHTIKXSCAGVSLKTQELYALVFATRYLDMFTDFISLYNTVMKLIFLSSSFSIVWYMRRHKLVRRSYDKDHDTFRHQFLVLPCLILALLIHEQFTFKEVMWTFSIYLEAVAILPQLVLLQRTRNIDNLTGQYVFFLGAYRSLYTITSNLVFYRTYFLLVT

SEQ ID NO: 102702 - protein, 152 aa, Setaria italica
  Transcript Sequence Number=SeqID_36728
  Gene Ontology: Mol. function=RNA binding
  Homolog annotation: Hit_ID=B6U0F3; Match level="QueryCoverage=100%, HitCoverage=42%, E-value=1e-53, Identity=67%"; Hit description=RNA binding protein
PVCWAVGSILEAFDSYSWKVAEVVRVLGKKHYLVRLLGSSLESRAHASDLRLRKLWLDDKWIVTQKYSAKCLDGSFRGRSKDGNLGCNLVMDSHIQLENQNAFEGATSRGIKRKSSAITTHPQCSEITKKLRTPHRDGRHSKLVDRGSLRLA

SEQ ID NO: 102703 - protein, 114 aa, Setaria italica
  Transcript Sequence Number=SeqID_36729
  Gene Ontology: Mol. function=RNA binding
  Homolog annotation: Hit_ID=B6U0F3; Match level="QueryCoverage=100%, HitCoverage=30%, E-value=4e-40, Identity=72%"; Hit description=RNA binding protein
SPVDSGVAVERVPRRLMRPCPPADDPVCWAVGSILEAFDSYSWKVAEVVRVLGKKHYLVRLLGSSLESRAHASDLRLRKLWLDDKWIVTQKYSAKCLDGSFRGRSKDGNLGCNL

SEQ ID NO: 102704 - protein, 62 aa, Setaria italica
  misc_feature (3)..(3): Xaa can be any naturally occurring amino acid
  Transcript Sequence Number=SeqID_36730
QMXPWCLAFINIGLSLLVHDYVPCSYVNISSLFLINVCYLTFFVEKENTASYFVGLIVKKKK

SEQ ID NO: 102705 - protein, 85 aa, Setaria italica
  Transcript Sequence Number=SeqID_36731
  Subcellular localization annotation: CTP_CleavageSite=64; ConfidenceScore=5.60e-01
QIYCYIFQSFCIRSFLQGIVTSPASSISNISASVLPTITTTATNATLSCTFVNQGFLQFCFTIGCSTKEASSTFVCLLLYVYTVY

SEQ ID NO: 102706 - protein, 213 aa, Setaria italica
  misc_feature (135)..(135): Xaa can be any naturally occurring amino acid
  Transcript Sequence Number=SeqID_36732
AGFLAAPRLAGAMDGGGEALLVRRSKGKKRPPAAAHAERDSGAGGRFRSLMRDYNDLLEETEAKKKMLASANRTKLALAAEVKFLQRKHRSFAKSSNKTHYKLKKQARYVPSPLGRASVFADHDVTRTEGASCSXNPNFDLNQGSAMVCDNDEGNDYQGHRSHLELDNFDQVGVDEEMIAADVKLSVCRDSGNSPASDDKRTIPWQDRLALKA

SEQ ID NO: 102707 - protein, 71 aa, Setaria italica
  Transcript Sequence Number=SeqID_36733
  Gene Ontology: Cellular component=integral to peroxisomal membrane; Biological process=peroxisome organization and biogenesis
  Homolog annotation: Hit_ID=B6U9L1; Match level="QueryCoverage=91%, HitCoverage=14%, E-value=2e-16, Identity=63%"; Hit description=LHT1
FALAPSEGRTDSQEGRWRPPEKPVVEDWRAINSRRNAKWWYAAFHNVTAMVGAGVLSLPFAMSELGWGVGI

SEQ ID NO: 102708 - protein, 446 aa, Setaria italica
  Transcript Sequence Number=SeqID_36734
  Gene Ontology: Cellular component=integral to peroxisomal membrane; Biological process=peroxisome organization and biogenesis
  Homolog annotation: Hit_ID=B6U9L1; Match level="QueryCoverage=96%, HitCoverage=97%, E-value=0.0, Identity=81%"; Hit description=LHT1
  Pfam annotation: Domain name=Aa_trans; Domain location=33-433; Score =536.3; E_value=3.7e-158; Accession=PF01490.10; Description =Transmembrane amino acid transporter protein
  Pfam annotation: Domain name=Trp_Tyr_perm; Domain location=33-427; Score=-266.0; E_value=0.02; Accession=PF03222.5; Description =Tryptophantyrosine permease family
  Pfam module annotation: Pfam domain module=Aa_trans::Trp_Tyr_perm; Domain location=33-433::33-427
MGTQAPESYSPAKDGKTAQEKAIEDWLPINGSRNAKWWYSAFHNVTAMVGAGVLGLPYAMSELGWGPGIAVMILSWIITLYTLWQMVEMHEMVPGKRFDRYHELGQHVFGEKLGLWIVVPQQLVVEVSLNIIYMVTGGQSLKKFHDVVCEGKCKHIKLSYFIMIFASVHFVLSQLPNFNSISGVSLAAAVMSLSYSTIAWGASLDKGREANVDYGLRATTTPGKVFGILGGLGDVAFAYSGHNVVLEIQATIPSTPEKPSKHAMWKGALVAYIIVAMCYFPVSLVGYWAFGNRVDSNILITLSRPKWLIALANMMVVIHVIGSYQIYAMPVFDMIETVLVKRLKFPPGLTLRLIARTVYVAFTMFVAITFPFFDGLLSFFGGFAFAPTTYFLPCIMWLAIYKPRRFSLSWFTNWICIVLGVLLMVLAPIGGLRNIILNAKTYKFYQ

SEQ ID NO: 102709 - protein, 142 aa, Setaria italica
  misc_feature (133)..(133): Xaa can be any naturally occurring amino acid
  Transcript Sequence Number=SeqID_36735
  Gene Ontology: Mol. function=DNA binding; Cellular component=nucleus; Biological process=regulation of transcription, DNA-dependent
  Homolog annotation: Hit_ID=Q6H976; Match level="QueryCoverage=61%, HitCoverage=9%, E-value=1e-43, Identity=90%"; Hit description =STYLOSA protein
  Pfam annotation: Domain name=LisH; Domain location=30-56; Score=38.0; E_value=3.8e-08; Accession=PF08513.3; Description=LisH
SLAACARVAAPGRRAAGAAAMSQTNWEADKMLDVYIYDYFMKRNLQATAKAFQAEGKVSSDPVAIDAPGGFLFEWWSVFWDIFIARTNEKHSDVAASYIETQLMKAREQQQQQPPQQRQQQPQHIQMTTNAVXRAVHQQQQQ

SEQ ID NO: 102710 - protein, 93 aa, Setaria italica
  Transcript Sequence Number=SeqID_36736
QQRSQSQSHSYYNKQSDQSLLTSPCIISHGNHCDGLRHELPRLRRRRRLPCPAPSGQPSAAPARAAHRQGRPERGCRDKQRSGQAQAGGEEPG

SEQ ID NO: 102711 - protein, 67 aa, Setaria italica
  misc_feature (10)..(10): Xaa can be any naturally occurring amino acid
  Transcript Sequence Number=SeqID_36737
MSFRGRGRGXRGRGGGFGGFDHAAKHVPHEDFPDITLPEMTCRKASKEEKALIVSTLKLEEFWEDFL

SEQ ID NO: 102712 - protein, 48 aa, Setaria italica
  Transcript Sequence Number=SeqID_36738
  Subcellular localization annotation: CTP_CleavageSite=21; ConfidenceScore=5.33e-01
LFSLTMVDPFSSRSSTYSSVRSSHSSKSSSKLFLSISEAIGNGLDTRT

SEQ ID NO: 102713 - protein, 453 aa, Setaria italica
  Transcript Sequence Number=SeqID_36739
  Gene Ontology: Mol. function=translation initiation factor activity; Cellular component=eukaryotic translation initiation factor 2B complex; Biological process=cellular metabolic process
  Homolog annotation: Hit_ID=B6U6N6; Match level="QueryCoverage=95%, HitCoverage=70%, E-value=0.0, Identity=90%"; Hit description =Translation initiation factor eIF-2B delta subunit
  Pfam annotation: Domain name=IF-2B; Domain location=144-436; Score =351.7; E_value=1.4e-102; Accession=PF01008.9; Description=Initiation factor 2 subunit family
KAERRAIQEAQRAAKAAAKEAGKSAGPATSKQAKSAKTAPKKDVPQAASTVASEKKVTERLSERERKLDAPHPRMQFDDVHKVEKAKKRAVVNQSEARNRVELFRHLPQYVHGTQLPDLESKFFQLEPMHPSVYKVGLQYLSGEVSGGNGRCIAMLLAFREAIKDYTTPPNKTLSRDLTAKVSSYVSFLIECRPLSISMGNAIRFLKNRIAKLPHTLSESEAKASLQSDIDRFINEKIVLADKAIVSHAITKVRDNDVLLTYGSSSVVEMILDYAHELGRKFRVIVVDSRPKLEGQGLLRRLVSRGINCTYTHINAISYIMHEVTRVFLGASSILSNGTVYSRVGTASVAMVAHAFGVPVLVCCEAYKFHERVQLDSICANELGDPDVILKVPGKAEDHLKNWAENANLQLLNLTYDATPPDYVSMIVTDYGMLPPTSVPVIVREYRKEQLWI

SEQ ID NO: 102714 - protein, 120 aa, Setaria italica
  Transcript Sequence Number=SeqID_36740
  Gene Ontology: Mol. function=hydrolase activity; Biological process =metabolic process
  Homolog annotation: Hit_ID=B9SDP1; Match level="QueryCoverage=100%, HitCoverage=36%, E-value=3e-26, Identity=49%"; Hit description =Gibberellin receptor GID1, putative
  Pfam annotation: Domain name=Abhydrolase_3; Domain location=1-116; Score=-3.0; E_value=2.8e-07; Accession=PF07859.5; Description =alphabeta hydrolase fold
GFCLGSCTWANVHAFCLRLAAEAGAVVLSAGYRLAPEHRLPAAVDDAAGFLRWLREQSANAAADDGWLAEAADFGRVFVTGDSAGGTIAHHLAVRAATTRRGELDLDPVTVRGYVLLMPF

SEQ ID NO: 102715 - protein, 399 aa, Setaria italica
  Transcript Sequence Number=SeqID_36741
  Gene Ontology: Mol. function=serine-type endopeptidase activity; Cellular component=endoplasmic reticulum membrane; Biological process=proteolysis
  Homolog annotation: Hit_ID=Q0WUG6; Match level="QueryCoverage=100%, HitCoverage=38%, E-value=1e-162, Identity=67%"; Hit description =Subtilisin like protein
GSQFSGIISGNVTLTIYTPAAHGESSPRTSTCVLYLKIKVVPTPVRSKRILWDQYHNIKYPSGYVPRDSLNVHNDILDWHGDHLHTNFHILFNMLRDAGYYIETLGSPLTCFDASNYGTLLMVDLEDEYFDEEIQKLRDDVIHKGLGIAVFAEWYHVDTMIKMTFFDENTRSWWTPITGGANVPALNELLAPFGIALGDKILTGDFSINGEQTHYASGTDIVQFPAGGFLHSFQLQESSRTVQDHIGTLDTENTQGKSKLSSILGMMEAGEGRIAVYGDSNCLDSSHMVTNCYWLLRKILEFTGNKVKDPVLFSETTQLKFPVFENIHQPSRRLDVNFSTYSTVIGKELICHQDSRFEVWGTKGYGVQPTGTTRKLPEYQMDENSSSLNVTVQTPDRNR

SEQ ID NO: 102716 - protein, 75 aa, Setaria italica
  Transcript Sequence Number=SeqID_36742
  Subcellular localization annotation: CTP_CleavageSite=37; ConfidenceScore=5.06e-01
MPRFILFCLVSSQLAMTAVVARPFAVFLDGGAMSSVVADAPSAPAVLHAHSLLEESRFAGSPLGSHHSHHSPFDR

SEQ ID NO: 102717 - protein, 214 aa, Setaria italica
  misc_feature (18)..(18): Xaa can be any naturally occurring amino acid
  Transcript Sequence Number=SeqID_36743
  Gene Ontology: Mol. function=electron carrier activity
  Homolog annotation: Hit_ID=Q7XSQ6; Match level="QueryCoverage=94%, HitCoverage=38%, E-value=8e-89, Identity=75%"; Hit description =OSJNBa0084K11.8 protein
VVVFFKYCYGLSSQRLYXEVFEPAIQAALFAPGEQCSAAATLGMLYYYMLSHQENSDFLLCRGEVEEKILSPWLQLLEMEGLKFVANKVPSSMTIDTDSGCISAIVCGGDVYKADAFVSATGLSSLQSIVKNSPSLWSHREFANLLHLSAVDVISVKLWFDKKITIPKVANVCSGFDDSSGWTFFDLTSIYDDYYEESITVVEAEFYNASQLIP

SEQ ID NO: 102718 - protein, 229 aa, Setaria italica
  Transcript Sequence Number=SeqID_36744
  Gene Ontology: Mol. function=O-methyltransferase activity; Biological process=lignin biosynthetic process
  Homolog annotation: Hit_ID=B6TG62; Match level="QueryCoverage=97%, HitCoverage=60%, E-value=1e-109, Identity=86%"; Hit description =Caffeic acid 3-O-methyltransferase
  Pfam annotation: Domain name=Methyltransf_2; Domain location=3-223; Score=165.9; E_value=1.2e-46; Accession=PF00891.10; Description=O -methyltransferase
SAGSPRRFALTAVGRTLVPSGPSGASYADYVLQHHQDGCSVAWPRLHEAVLDPAGPEPFARANAGVPAYAYYGRDREANEVMLRAMTGVSEPFMEALLDGYAAGFEGVATLVDVGGSSGACLEMIMRRVDTIREGINFDLPDVVAAAPPIVGVRHVGGDMFKSIPSGDAIFMKWVLTTWTNEECTAILGNCYSALPDGGKVIACEPVVPEETDGSTRTRALLENDIFVM

SEQ ID NO: 102719 - protein, 340 aa, Setaria italica
  Transcript Sequence Number=SeqID_36745
MEMHIMLLVSNYGSAQTIPIIVEQELEIQEVDSEMIADPDVESMAKFGDAEVEEPINDAEMEQEYAVPSVMEEADSSVDDAEVEEFIAEMAEEVSGSSGEEMAGEASGSGSEEMADFIQNSDIPSQSAAEPEQAEDMASLQQDVQTEDSEGDHADGKEDQEAHHGEKLGSDMWPSYLDKISNPATLGAALAAIIVPAALALLYMRQKQARVAMDSNEPVEQVEQVEQVGSLSGSGSSEGVAKSSRSQNPVVEETEKLGGSGASQYSSSLSSGLGRRRKAREEGSLGLEPVVSRRDSTAQSTASYGSFTTYEKIPAKKGNKEDEAMTPVRRSRRNVKPPEA

SEQ ID NO: 102720 - protein, 77 aa, Setaria italica
  Transcript Sequence Number=SeqID_36746
  Homolog annotation: Hit_ID=C1KLC0; Match level="QueryCoverage=50%, HitCoverage=9%, E-value=2e-11, Identity=92%"; Hit description=Dof -type zinc finger protein
VTDPTGAIIHGSELLIFNNKTENLNTLYKNSARLSAWLQDIQQSGSSTTELKGQENTLQDSTGSPPQQEVADTEDSS

SEQ ID NO: 102721 - protein, 129 aa, Setaria italica
  misc_feature (97)..(97): Xaa can be any naturally occurring amino acid
  Transcript Sequence Number=SeqID_36747
  Gene Ontology: Mol. function=zinc ion binding; Cellular component =nucleus; Biological process=regulation of transcription
  Homolog annotation: Hit_ID=C1KLC0; Match level="QueryCoverage=89%, HitCoverage=26%, E-value=1e-40, Identity=76%"; Hit description=Dof -type zinc finger protein
MAECRVGGGGGDGLIKLFGKTIPVPEAAAAVGEADKDIQQSGSSTTELKGQENTLQDSTGSPPQQEVADTEDSSATKKSSGDQQQGETTNQKEKVKXSKSLYKILPCPRCNSMDTKFCYYNNYNINQPR

SEQ ID NO: 102722 - protein, 413 aa, Setaria italica
  Transcript Sequence Number=SeqID_36748
  Gene Ontology: Mol. function=zinc ion binding; Cellular component =nucleus; Biological process=regulation of transcription
  Homolog annotation: Hit_ID=C1KLC0; Match level="QueryCoverage=95%, HitCoverage=93%, E-value=0.0, Identity=79%"; Hit description=Dof -type zinc finger protein
  Pfam annotation: Domain name=zf-Dof; Domain location=82-144; Score =141.9; E_value=2e-39; Accession=PF02701.7; Description=Dof domain, zinc finger
LEKLRNNYFNKDSARLSEADKDIQQSGSSTTELKGQENTLQDSTGSPPQQEVADTEDSSATKKSSGDQQQGETTNQKEKLKKPDKILPCPRCNSMDTKFCYYNNYNINQPRHFCKNCQRYWTAGGAMRNVPVGAGRRKSKSASATSHFLQRVRAALPIDALCAAAKTNGTVLSFGSDMSSLDLTEQMKHLKEKLVPITRIKSSDDRSAGSCTEGSAKVEDSNQKEKVTADKSANVVPHPCMNGVTMWPFSCAPPPACYTSGIAIPFYPAAAAYWGCMVPGAWNTPWPPHSQSESASPLSTASPASTKSNCFTPGKRSRDCDEEGDTKGHGKVWVPKTIRIDDADEVARSSILSLIGINGDKAGKDGRGCKLAKVFEQQKEEAKTATHAVINSLPFLQGNPAALSRSLTFQEGS

SEQ ID NO: 102723 - protein, 125 aa, Setaria italica
  misc_feature (108)..(108): Xaa can be any naturally occurring amino acid
  Transcript Sequence Number=SeqID_36749
  Gene Ontology: Mol. function=metal ion binding; Cellular component =ribonucleoprotein complex
  Homolog annotation: Hit_ID=Q8S5X9; Match level="QueryCoverage=100%, HitCoverage=25%, E-value=3e-54, Identity=70%"; Hit description =Putative RING zinc finger protein
SVLQVLEDEHLEDCHWSSSSVITKESLLLAQREDLRKVIELLGLREHHARTLLIHYRWDVERIFELLDQKGRDRLFSEAGIPLQYANNAGPTSSTEVTCDVCYEDVPXSAASEMDCGHNYCNDCW

SEQ ID NO: 102724 - protein, 56 aa, Setaria italica
  Transcript Sequence Number=SeqID_36750
MIRLFRGSGSSCSFARQDPKFWGHQLPVPNQSNLIDVLSTYMTLVSIGNLKKSCIF

SEQ ID NO: 102725 - protein, 109 aa, Setaria italica
  Transcript Sequence Number=SeqID_36751
  Subcellular localization annotation: CTP_CleavageSite=37; ConfidenceScore=5.01e-01
SYSSPTLVGEKKKQNKMIAPTCNNSCAASSIGTKWVSAQSLPDLDSKRMAAITVPNPSNGTLAHPYPATDNSQSPHGPSQYPTADRDSRTRSRQEPGRTTVEQLRAKQD

SEQ ID NO: 102726 - protein, 178 aa, Setaria italica
  Transcript Sequence Number=SeqID_36752
ERERRGSEKGRGAKAREEAMECSAWAAIERRGRWSRTSGMTPAVIGLWRQGGAGAGMPVVEIWRRRASSCGRVDGSDRVNGARIEGAQVRRQAVTGARASAEQQIVGRFLAGWGRSCRCRGRGLAEEKSSGSEDQAAQLCRSDGKDWRHRALRPGSGDVMMGAGGEVLQKGCRGASAA

SEQ ID NO: 102727 - protein, 174 aa, Setaria italica
  misc_feature (14)..(14): Xaa can be any naturally occurring amino acid
  Transcript Sequence Number=SeqID_36753
FAEENPNLSIVSSXEEMRYYRGHEAGDHVDTDGMKQVGSLPDYLLDIAVNSYLKAQYTMYLHEFLNTQLQLKSPEPNSATDLVLDPQEGKWKIADQMHNVHNDISKSGRYNGAMEEVSYAGSTEEPSKVDNVVEPPYFIPGKFPDPAYKSNALQKYSSRPNTKTVVMYLEGGYL

SEQ ID NO: 102728 - protein, 162 aa, Setaria italica
  misc_feature (12)..(12): Xaa can be any naturally occurring amino acid
  misc_feature (20)..(20): Xaa can be any naturally occurring amino acid
  Transcript Sequence Number=SeqID_36754
  Homolog annotation: Hit_ID=Q9FLF8; Match level="QueryCoverage=98%, HitCoverage=30%, E-value=6e-57, Identity=65%"; Hit description=Auxin- independent growth promoter-like protein
  Pfam annotation: Domain name=DUF246; Domain location=1-162; Score =14.7; E_value=2e-15; Accession=PF03138.6; Description=Plant protein family
SSRCLYQALGFXDPIEDLGXSHGKFIALHLRYEKDMLAFTGCTYGLSDSEANELRIMRERTSHWKLKDINSTEQRSEGNCPLTPNEVGIFLRAMGYPESTWIYLAAGEIYGGDKYISKLRSYFPNLVSKEMLATKEELEKFSNHASQVAALDYIISVESCIV

SEQ ID NO: 102729 - protein, 228 aa, Setaria italica
  Transcript Sequence Number=SeqID_36755
  Homolog annotation: Hit_ID=Q9FLF8; Match level="QueryCoverage=92%, HitCoverage=39%, E-value=5e-78, Identity=65%"; Hit description=Auxin- independent growth promoter-like protein
  Pfam annotation: Domain name=DUF246; Domain location=36-228; Score =116.2; E_value=1.1e-31; Accession=PF03138.6; Description=Plant protein family
QVSSEQLWASIGYGYDACVTPTSRYKVPGKSDRYMTVRSNGGLNQMRTGICDMVAVARLVNATLVVPQLDKRSFWQDTSTFKDIFDQPHFIKALEGDVHIVDDLPESLESAPRTRKHFTSWSGASYYEEVKELWKNQKVVHIPKSDSRLANNGLPIDIQRLRCRCLYQALRFLDPIEDLGKKLVDRLRSHGKFIALHLRYEKDMLAFTGCTYGLVVVFLVSLNCSCSN

SEQ ID NO: 102730 - protein, 77 aa, Setaria italica
  misc_feature (23)..(23): Xaa can be any naturally occurring amino acid
  Transcript Sequence Number=SeqID_36756
  Gene Ontology: Mol. function=DNA binding; Cellular component=nucleus; Biological process=regulation of transcription
  Homolog annotation: Hit_ID=B2NIC5; Match level="QueryCoverage=100%, HitCoverage=17%, E-value=2e-25, Identity=67%"; Hit description =Transcription factor
  Pfam annotation: Domain name=NAM; Domain location=6-77; Score=48.3; E_ value=6e-12; Accession=PF02365.7; Description=No apical meristem (NAM) protein
MAQTSLPPGFRFHPTDVELCSYXLKKKITGKKLLVEAIAEVELYKYSPWDLPDKSCVKSRDMEWYFFCPRDKKYATG

SEQ ID NO: 102731 - protein, 65 aa, Setaria italica
  Transcript Sequence Number=SeqID_36757
  Gene Ontology: Mol. function=hydrolase activity
  Homolog annotation: Hit_ID=Q75KE2; Match level="QueryCoverage=96%, HitCoverage=20%, E-value=1e-27, Identity=96%"; Hit description =Putative hydrolases
LFPCHIVQSTKDLAVPVVVSEYLHKHLGSDSIVEVMPSEGHLPQLSSPDIVVPVLLRHIQHDIAV

SEQ ID NO: 102732 - protein, 271 aa, Setaria italica
  Transcript Sequence Number=SeqID_36758
  Gene Ontology: Mol. function=hydrolase activity
  Homolog annotation: Hit_ID=Q75KE2; Match level="QueryCoverage=100%, HitCoverage=100%, E-value=1e-142, Identity=82%"; Hit description =Putative hydrolases
  Pfam annotation: Domain name=Abhydrolase_1; Domain location=45-263; Score=39.1; E_value=1.8e-08; Accession=PF00561.12; Description =alphabeta hydrolase fold
  Pfam annotation: Domain name=Ndr; Domain location=1-263; Score= -114.3; E_value=0.04; Accession=PF03096.6; Description=Ndr family
  Pfam module annotation: Pfam domain module=Abhydrolase_1::Ndr; Domain location=45-263::1-263
MGIVEEAHNLRVVGEGKRGVIVLAHGFGTDQSVWKHLVPHLVADYRVVLFDTMGAGPTNPDYFDFGRYATLEGYALDLLAILQELGVQSCIYVGHSVSAVIGLLASISRPDLFTKLVLLSASPRYLNDVDYYGGFEQDELDELFEAIRSNYKAWCSGFAPLCVGGDMESVAVQEFSRTLFNIRPDIALSVAQTIFQSDVRSLLPLVSVPCHIVQSTKDLAVPVVVSEYLHKHLGSDSIVEVMPSEGHLPQLSSPDIVVPVLLRHIQHDIAV

SEQ ID NO: 102733 - protein, 160 aa, Setaria italica
  misc_feature (56)..(56): Xaa can be any naturally occurring amino acid
  misc_feature (98)..(98): Xaa can be any naturally occurring amino acid
  Transcript Sequence Number=SeqID_36759
  Gene Ontology: Mol. function=serine-type endopeptidase activity; Biological process=DNA integration
  Homolog annotation: Hit_ID=Q7XTI9; Match level="QueryCoverage=64%, HitCoverage=8%, E-value=4e-17, Identity=46%"; Hit description =OSJNBa0020P07.15 protein
AGFVAPSSAGSIANVRYPVDDIQVDTPCKLVIPYERKQNKFREVATSMTVTDHVFXRHLLEYAWVQVVTVLDESCEIDIPTDERIEVLGDAMNQYILXHRQDIVLNASPETSRPSQELPLPDSNVDTEELTLSHVQGANNEDEQQMLSSVREALNEDDGT

SEQ ID NO: 102734 - protein, 131 aa, Setaria italica
  misc_feature (119)..(119): Xaa can be any naturally occurring amino acid
  Transcript Sequence Number=SeqID_36760
  Gene Ontology: Mol. function=nucleic acid binding; Cellular component= nucleosome; Biological process=nucleosome assembly
  Homolog annotation: Hit_ID=B9S4G9; Match level="QueryCoverage=100%, HitCoverage=7%, E-value=4e-34, Identity=56%"; Hit description=Snf2 histone linker phd ring helicase, putative
LAFSPIEEYFYKKQHATCMDRAHQIIRSLRSDVNIRESTSDSNASLNVYLSNDDIAKLLVPLLKLRQACCHPQVGSSGLCSLQHNPLSMDEILQVLIGKAKIEGEEELRKIVVALNGLXGLAAIEQRNQEA

SEQ ID NO: 102735 - protein, 104 aa, Setaria italica
  Transcript Sequence Number=SeqID_36761
QFQGVIIVSFKVLCNCLCILMIAQDFQLPLKLLSVRIMNIMMLQDRMPSHSHKKCYCNTFVSLKRELDTVTYRRNKSDIVVHVNMFTILLQDGSCSNRKVGTIS

SEQ ID NO: 102736 - protein, 46 aa, Setaria italica
  Transcript Sequence Number=SeqID_36762
LLSGMGDTWVARDPSGAWVWMKNVPIMSFSAGGFHVHGYEFVLSNL

SEQ ID NO: 102737 - protein, 218 aa, Setaria italica
  misc_feature (9)..(9): Xaa can be any naturally occurring amino acid
  misc_feature (108)..(108): Xaa can be any naturally occurring amino acid
  misc_feature (206)..(206): Xaa can be any naturally occurring amino acid
  Transcript Sequence Number=SeqID_36763
  Gene Ontology: Mol. function=transferase activity
  Homolog annotation: Hit_ID=B9T3D5; Match level="QueryCoverage=99%, HitCoverage=87%, E-value=8e-53, Identity=32%"; Hit description =Pentatricopeptide repeat-containing protein, putative
  Pfam annotation: Domain name=PPR; Domain location=112-146; Score =21.4; E_value=0.0036; Accession=PF01535.12; Description=PPR repeat
  Pfam annotation: Domain name=PPR; Domain location=147-181; Score =29.3; E_value=1.6e-05; Accession=PF01535.12; Description=PPR repeat
  Pfam annotation: Domain name=PPR; Domain location=182-216; Score =30.5; E_value=6.9e-06; Accession=PF01535.12; Description=PPR repeat
  Pfam annotation: Domain name=PPR; Domain location=42-76; Score=10.6; E_value=0.5; Accession=PF01535.12; Description=PPR repeat
  Pfam annotation: Domain name=PPR; Domain location=7-41; Score=43.5; E_ value=8.6e-10; Accession=PF01535.12; Description=PPR repeat
  Pfam annotation: Domain name=PPR; Domain location=77-111; Score=34.4; E_value=4.7e-07; Accession=PF01535.12; Description=PPR repeat
  Pfam module annotation: Pfam domain module=PPR::PPR::PPR::PPR::PPR::PP R; Domain location=112-146::147-181::182-216::42-76::7-41::77-111
LVPNEVTFXNVMIDGYCRVGNVRKAFQLYDQMVDRGLTPDNYTYRSLISVLCLTLGASKAKEFVDDLENSCAVLNSFSLTALLHGLCKEGRLTEAYHVWNEMGARGVXLDLISFTVIVYAALKQHDKEKATMLIRQLKEKGVKPDNVFHTCMIDVHSKEANIVQALNCWDKMIADGCSPNVVTYTVLINNLCKSGYLSSAEILCKXMLAGRFLPNSFY

SEQ ID NO: 102738 - protein, 115 aa, Setaria italica
  Transcript Sequence Number=SeqID_36764
RAAADLFRFLVRRRSLHPSDGALAPVVRHLARRRDFPAVRALIQEFPTALGPDTLDAYLHQFARAGRPTDAVKVFDELPEQLRNREALTSLVSSLSAEGFPSHAERAAKKVANEI

SEQ ID NO: 102739 - protein, 215 aa, Setaria italica
  Transcript Sequence Number=SeqID_36765
  Gene Ontology: Mol. function=DNA-directed RNA polymerase activity; Cellular component=nucleus; Biological process=transcription
  Homolog annotation: Hit_ID=Q84R88; Match level="QueryCoverage=80%, HitCoverage=14%, E-value=3e-79, Identity=80%"; Hit description=DNA -directed RNA polymerase
  Pfam annotation: Domain name=RNA_pol_Rpb2_1; Domain location=74-215; Score=88.9; E_value=1.8e-23; Accession=PF04563.7; Description=RNA polymerase beta subunit
RRRSSPPPPPRSAPKPLLNRPAAAAAAMTVPPQGDDAAKKDKDVPPPSYRSLAAPVANPVDKFALLPAFLKVRGLVKEHIDSFNYFITRGIRNIIQANNRIEARNDPNIYLRYTNVHVGTPSVQVDYKVEEITPHFCRLTDRTYSAPIKVDIEYTVGKQHELQFKRNVLIGYMPIMLRSYACILHGKDEAELARLGECPLDPGGYFIVKGTEKVI

SEQ ID NO: 102740 - protein, 438 aa, Setaria italica
  Transcript Sequence Number=SeqID_36766
  Gene Ontology: Mol. function=transferase activity; Biological process= spermidine biosynthetic process
  Homolog annotation: Hit_ID=Q304Z5; Match level="QueryCoverage=85%, HitCoverage=95%, E-value=0.0, Identity=86%"; Hit description =Spermidine synthase
  Pfam annotation: Domain name=Methyltransf_12; Domain location=195 -301; Score=11.5; E_value=0.041; Accession=PF08242.4; Description =Methyltransferase domain
  Pfam annotation: Domain name=Spermine_synth; Domain location=102-361; Score=412.3; E_value=8e-121; Accession=PF01564.9; Description =Sperminespermidine synthase
  Pfam module annotation: Pfam domain module=Methyltransf_12::Spermine _synth; Domain location=195-301::102-361
MSGYFPQYYNNPMWPGEAHSLFRSTAHRSSLFLLAVVSRDWDLQRATGPMEAGDAGNGSAAAAQIKGSGDDAAHKPLPPCCVKVKAGVPESEAKCHDTVVSGWFTEPRSRFGKTSKMQYYNNPMWPGEAHSLKVEKILYQGKSPYQEILVFESSTYGNVLVLDGIVQLTDKDECAYQEMVTHLPLCSIPSPKNVLVVGGGDGGVLREIARHDSVETIDICEIDQLVIDVCKEFFPNLSIGYKDPRVRLHVGDAVDFLRNSPEGKYDAIIVDSSDPIGPAQALVEKPFFQTIARALKSGGVLCNLAESMWLHTHLIQDMLAICRQTFKGAVHYAWTSVPTYPSGVIGFLLCAKEGRPVNFLTPVNPIEKIQGATKAGKELRFYNSEIHRAAFVLPTFVRRELESYTTPSTSNEKEKPKESVSKSQKIKILPNNAIVTAS

SEQ ID NO: 102741 - protein, 130 aa, Setaria italica
  Transcript Sequence Number=SeqID_36767
TEVPFYSPRLLVLVQIVRSQIVPGIALVPMFGRTCRYAVVGLHETAAEPPPNPVSVGLFGSSLSGAARQLDPAPDARNRTPEIAAWFRQVCQDLNQRNLCAVSSYRIMLRVINHLVLAGRTRSQSQVAFN

SEQ ID NO: 102742 - protein, 73 aa, Setaria italica
  Transcript Sequence Number=SeqID_36768
QGCHCPTDALVTLDAASYILRIGVLTYKQMASITFSPGNLHALSVRLGILGGTGAFQYGPFNCGVQRRWKKPV

SEQ ID NO: 102743 - protein, 104 aa, Setaria italica
  Transcript Sequence Number=SeqID_36769
  Subcellular localization annotation: CTP_CleavageSite=23; ConfidenceScore=5.10e-01
WFSRLEATASPNKQTGNSRERRRAAIRVPPPVRRPSAAGPGLPPPDPVLPHRILLSTAKSLPPLHRKVPYRELPPPNPGRSYRQVRSPLTASCCTKVRSPSTPL

SEQ ID NO: 102744 - protein, 143 aa, Setaria italica
  misc_feature (111)..(111): Xaa can be any naturally occurring amino acid
  Transcript Sequence Number=SeqID_36770
  Gene Ontology: Mol. function=hydrolase activity; Biological process =lipid catabolic process
  Homolog annotation: Hit_ID=Q9XE77; Match level="QueryCoverage=94%, HitCoverage=28%, E-value=2e-25, Identity=46%"; Hit description =Patatin-like protein
IRLRRKLQDKDVHLVHGGLVRRLERRNNPTTAAMTAMIAGMEEKRNKHHRMGRQDDGGVGASVYRNILVISIGTGIAKQAERYTAADCNKWNMLNWLAYDGFNPLIDFSTXASVDMVDIHAEVLFELLGCEDNYLRIQTDTLE

SEQ ID NO: 102745 - protein, 78 aa, Setaria italica
  Transcript Sequence Number=SeqID_36771
  Gene Ontology: Mol. function=inositol oxygenase activity; Cellular component=cytoplasm; Biological process=L-ascorbic acid biosynthetic process
  Homolog annotation: Hit_ID=Q5Z8T3; Match level="QueryCoverage=55%, HitCoverage=13%, E-value=9e-17, Identity=90%"; Hit description =Probable inositol oxygenase
  Pfam annotation: Domain name=DUF706; Domain location=2-78; Score= -161.1; E_value=7e-05; Accession=PF05153.7; Description=Family of unknown function (DUF706)
MQATIVPYSREVKIQCLDLLYMFIPNSEYINKYNVQYFKENPDYHNPKFNTKFGVYSEGCGLDNVLMSWGHDDYMYLV

SEQ ID NO: 102746 - protein, 38 aa, Setaria italica
  Transcript Sequence Number=SeqID_36772
CYCLVPPVCSKYDLYSKSNVRIDVEKVKPYYMSLINKV

SEQ ID NO: 102747 - protein, 305 aa, Setaria italica
  Transcript Sequence Number=SeqID_36773
  Gene Ontology: Mol. function=inositol oxygenase activity; Cellular component=cytoplasm; Biological process=L-ascorbic acid biosynthetic process
  Homolog annotation: Hit_ID=Q5Z8T3; Match level="QueryCoverage=100%, HitCoverage=100%, E-value=1e-162, Identity=88%"; Hit description =Probable inositol oxygenase
  Pfam annotation: Domain name=DUF706; Domain location=49-305; Score =660.6; E_value=1.4e-195; Accession=PF05153.7; Description=Family of unknown function (DUF706)
MTITIEQPQLDAVAERKVAAGANPAELVLDGGFIVPDANAFGKTFRDYDAESERKETVEEFYRVNHIRQTHEFVSRMRGEYGRLDKTEMGIWECIELLNEFVDDSDPDLDMPQIEHLLQTAEAIRKDYPDQDWLHLTGLIHDLGKVLLHPTFGELPQWAVVGDTFPVGCAYDECNVHFKYFKENPDYHNPKFNTKFGVYSEGCGLDNVLMSWGHDDYMYLVAKENKTTLPSAGLFIIRYHSFYPLHKHGAYTHLMNDEDKENLKWLHVFNKYDLYSKSNVRIDVEKVKPYYMSLINKYFPEKLRW

SEQ ID NO: 102748 - protein, 109 aa, Setaria italica
  Transcript Sequence Number=SeqID_36774
LQKLNVKYIIKFPPSNELDYIIITVHTFSRKLLSIYIFLHRTNIVQHLAHTIVITSLYLQLPQTSLNANQLQAISELTSQRKGKLVNSLTGLTEITLNTIHTHLKNTSL

SEQ ID NO: 102749 - protein, 51 aa, Setaria italica
  Transcript Sequence Number=SeqID_36775
  Gene Ontology: Mol. function=sequence-specific DNA binding; Cellular component=nucleus; Biological process=regulation of transcription, DNA-dependent
  Homolog annotation: Hit_ID=B6U513; Match level="QueryCoverage=96%, HitCoverage=38%, E-value=2e-18, Identity=87%"; Hit description=GATA transcription factor 22
  Pfam annotation: Domain name=GATA; Domain location=22-49; Score=36.3; E_value=1.2e-07; Accession=PF00320.19; Description=GATA zinc finger
MGSADRSEIDGVVVAEKGARSCVECRATTTPMWRSGPTGPRSLCNACGIGI

SEQ ID NO: 102750 - protein, 65 aa, Setaria italica
  Transcript Sequence Number=SeqID_36776
  Subcellular localization annotation: CTP_CleavageSite=38; ConfidenceScore=5.21e-01
ESSASHDRSPGKLAAAWTQANHSGFVSRVARGHGRFKAVAAVWRRVLLLLWQAGGGGEGAWAEWG

SEQ ID NO: 102751 - protein, 54 aa, Setaria italica
  Transcript Sequence Number=SeqID_36777
YLTSHNFSAYQQGPMTLRNREHMVKYYGGKPLEFGGCTLPRYPCHMISVPRFHS

SEQ ID NO: 102752 - protein, 78 aa, Setaria italica
  Transcript Sequence Number=SeqID_36778
  Gene Ontology: Mol. function=catalytic activity; Biological process =proteolysis
  Homolog annotation: Hit_ID=B6TVV1; Match level="QueryCoverage=98%, HitCoverage=45%, E-value=4e-36, Identity=89%"; Hit description =Aprataxin
GEVGKDLLNQDAPNSEEHRLGFHQPPFNSVDHLHLHCLALPFMPSWRQVKYTPLGPLGGFLEAEKLLERIKPEAEVYS

SEQ ID NO: 102753 - protein, 55 aa, Setaria italica
  Transcript Sequence Number=SeqID_36779
LVSSSVRSLFCSAVNCLLKIFHLYLGSKLVAAGYLAVNKFQFILIVCLHCLIEKK

SEQ ID NO: 102754 - protein, 112 aa, Setaria italica
  Transcript Sequence Number=SeqID_36780
AGSRGEEVVGVVDAAGYAHGGLLIRAASSGPPAPARLGGWLPGSDPTQLAAAAAAVATPLLWSGPWGSAHGLLLGRKAVVVPKIFAKPTTRSCLFYGVIVGFAAIRAARFAG

SEQ ID NO: 102755 - protein, 168 aa, Setaria italica
  Transcript Sequence Number=SeqID_36781
  Gene Ontology: Mol. function=RNA-directed DNA polymerase activity; Biological process=RNA-dependent DNA replication
  Homolog annotation: Hit_ID=Q8H044; Match level="QueryCoverage=67%, HitCoverage=9%, E-value=2e-51, Identity=82%"; Hit description =Putative reverse transcriptase
FNSSDPEDMDNFHAILCTVDVVIDQTYALEPAEYKLSTFFENINVSHDSCFSFVSNRRIWRFDKRIGASGTLDWYDGAISQTPPQLVLGDLIEVFFPTGNYTTIYFRNLAKEEGVTEIGPEMCLRSISTTMEPIILALPMMSPDEHEDFSSYYTRRQWRLVDGSILSY

SEQ ID NO: 102756 - protein, 89 aa, Setaria italica
  Transcript Sequence Number=SeqID_36782
  Gene Ontology: Mol. function=ligase activity, forming aminoacyl-tRNA and related compounds; Cellular component=cytoplasm; Biological process=tRNA aminoacylation for protein translation
  Homolog annotation: Hit_ID=Q8LPC9; Match level="QueryCoverage=80%, HitCoverage=13%, E-value=3e-21, Identity=70%"; Hit description =Threonyl-tRNA synthetase (Fragment)
  Pfam annotation: Domain name=HGTP_anticodon; Domain location=6-84; Score=35.1; E_value=2.8e-07; Accession=PF03129.12; Description =Anticodon binding domain
ISLKLGFFVLGLTIVSLGFSIVDIDMSDRTIQKKVREAQVAQFNYTLVVGAQEAETGNVSVRVRGSDGLATMSLDGLITRFREEIAAFK

SEQ ID NO: 102757 - protein, 97 aa, Setaria italica
  Transcript Sequence Number=SeqID_36783
  Gene Ontology: Mol. function=ligase activity, forming aminoacyl-tRNA and related compounds; Cellular component=cytoplasm; Biological process=tRNA aminoacylation for protein translation
  Homolog annotation: Hit_ID=Q8LPC9; Match level="QueryCoverage=98%, HitCoverage=18%, E-value=2e-50, Identity=93%"; Hit description =Threonyl-tRNA synthetase (Fragment)
  Pfam annotation: Domain name=tRNA_SAD; Domain location=2-46; Score =57.7; E_value=4.4e-14; Accession=PF07973.6; Description=Threonyl and Alanyl tRNA synthetase s
MCGPLVDLCRGPHIPNTSFVKAFACLKASSSYWRGKADRESLQRVYGISFPDSKRLKEYKHFLEEAKKRDHRTLGLAQELFFFHPLSPGSCFFLPHG

SEQ ID NO: 102758 - protein, 71 aa, Setaria italica
  Transcript Sequence Number=SeqID_36784
IASNSTLTVQSRTNMTVFEVSPYNFAASVSEAWLVGFRVYLLNSVDDWRVPIWAKGLKRICGAVKCLQINK

SEQ ID NO: 102759 - protein, 741 aa, Setaria italica
  Transcript Sequence Number=SeqID_36785
  Gene Ontology: Mol. function=ligase activity, forming aminoacyl-tRNA and related compounds; Cellular component=cytoplasm; Biological process=tRNA aminoacylation for protein translation
  Homolog annotation: Hit_ID=B9S4M4; Match level="QueryCoverage=86%, HitCoverage=92%, E-value=0.0, Identity=76%"; Hit description =Threonyl-tRNA synthetase, putative
  Pfam annotation: Domain name=HGTP_anticodon; Domain location=646-736; Score=86.8; E_value=7.9e-23; Accession=PF03129.12; Description =Anticodon binding domain
  Pfam annotation: Domain name=TGS; Domain location=107-167; Score =71.7; E_value=2.7e-18; Accession=PF02824.13; Description=TGS domain
  Pfam annotation: Domain name=tRNA-synt_2b; Domain location=378-542; Score=227.4; E_value=3.6e-65; Accession=PF00587.17; Description=tRNA synthetase class II core domain (G, H, P, S and T)
  Pfam annotation: Domain name=tRNA_SAD; Domain location=275-324; Score= 80.3; E_value=6.8e-21; Accession=PF07973.6; Description=Threonyl and Alanyl tRNA synthetase s
  Pfam module annotation: Pfam domain module=HGTP_anticodon::TGS::tRNA -synt_2b::tRNA_SAD; Domain location=646-736::107-167::378-542::275-324
MLVCLRRGLSLVRQHTPRFLPSPPLRPARLFLHHLPAADGMGESSAAGKDAKGKGKAKAKAPAAASALVVTRDDSYLEAVTQTRIRKFEEIQARQALERLNIGGELIKVTLPDGAIKEGKKLITTPMDIAKEISSGLAASCLIAKVDETLWDMGRPLEGDCKLQLFKFDSNEGRDTFWHSSAHILGESLERVYGCKLCIGPCTTRGEGFYYDAYYNDLTLNEEHFGIIESQAQKAVAEKQPFERIEVSRAEALEMFAENKFKVEIINELPEDKTITVYRCGPLVDLCRGPHIPNTSFVKAFACLKASSSYWRGKADRESLQRVYGISFPDSKRLKEYKHFLEEAKKRDHRTLGLAQELFFFHPLSPGSCFFLPHGARVYNKLMDFMRQQYRDRGYQEVLSPNIYNMQLWETSGHAANYKENMFVFEIEKQEFGLKPMNCPGHCLMFNNRVRSYRELPLRMADFGVLHRNELSGALTGLTRVRRFQQDDAHIFCREDQIKDEVKGVLEFINYVYEIFGFKYELELSTRPEKYLGDIETWNKAEQQLTEALNEFGMPWQINEGDGAFYGPKIDIGVFDALKRKFQCATLQLDFQLPLRFKLSYSAEDEAKIERPVMIHRAILGSVERMFAILLEHYNGKWPLWLSPRQAIVCSVSSGSVEYAKQVLARLHEAGFHVDIDMSDRTIQKKVREAQVAQFNYTLVVGAQEAETGNVSVRVRGSDGLATMSLDGLITRFREEIAAFK

SEQ ID NO: 102760 - protein, 156 aa, Setaria italica
  misc_feature (6)..(6): Xaa can be any naturally occurring amino acid
  misc_feature (27)..(27): Xaa can be any naturally occurring amino acid
  misc_feature (75)..(75): Xaa can be any naturally occurring amino acid
  Transcript Sequence Number=SeqID_36786
KGVCHXSVDESGLTFYSFCTCDRDHGXFDCSDELVSPNQLHPLGWLTRGHIWQSVFLIASNAAAILPAFWALRQXEWILYTSSGISSALYHSCDVGTWCILSFRVLFFLDFWLSFMAVVGTFICMATIDEASKRAMHTAVFILTALLAATGATRSA

SEQ ID NO: 102761 - protein, 205 aa, Setaria italica
  Transcript Sequence Number=SeqID_36787
MDRSVSEELCIIKRSSKQDFWLSFMAVVGTFICMATIDEASKRAMHTAVFILTALLAATGATRSANIGIVIAIGSLGLLMGWLLEFSTARRFICWPWQINLNVPQSWPNFGTLLRNTLEVLNKRFRWIFLLLGFITLSFAATSWKLESNSNYWIWHSMWHITIYTSSFFFLCSMRVNARNRNPESNYELTRQDSLPRSETQPREN

SEQ ID NO: 102762 - protein, 89 aa, Setaria italica
  Transcript Sequence Number=SeqID_36788
VHASSAAPLLFGWRMERRDLLSATVLAVLLATGIAATTAAKTATSQRHKPRRPVPAAVSSCDVYNKGSWVADESYPLYDAASCPFVQVR

SEQ ID NO: 102763 - protein, 73 aa, Setaria italica
  misc_feature (69)..(69): Xaa can be any naturally occurring amino acid
  Transcript Sequence Number=SeqID_36789
  Gene Ontology: Mol. function=microtubule motor activity; Cellular component=microtubule associated complex; Biological process =microtubule-based movement
  Homolog annotation: Hit_ID=Q10MN5; Match level="QueryCoverage=65%, HitCoverage=4%, E-value=3e-18, Identity=83%"; Hit description =Kinesin-4, putative, expressed
NSVGDWEGDSAALPDFFYQRYHSGMREKQYQRNNTRQKDDHEYEQQRPRFYSTNTDDSDDIDMATSDSXESRC

SEQ ID NO: 102764 - protein, 84 aa, Setaria italica
  Transcript Sequence Number=SeqID_36790
  Gene Ontology: Mol. function=microtubule motor activity; Cellular component=microtubule associated complex; Biological process =microtubule-based movement
  Homolog annotation: Hit_ID=Q10MN5; Match level="QueryCoverage=96%, HitCoverage=7%, E-value=1e-22, Identity=67%"; Hit description =Kinesin-4, putative, expressed
  Subcellular localization annotation: CTP_CleavageSite=75; ConfidenceScore=5.29e-01
SSESDALWQLNVQSMNSSISESGAKVKKPQAKLRDGSDSRTPVHSQIPSASRKATNGSNRSVRQPLSRSDSRRLSSNGRQAGTK

SEQ ID NO: 102765 - protein, 787 aa, Setaria italica
  Transcript Sequence Number=SeqID_36791
  Gene Ontology: Mol. function=microtubule motor activity; Cellular component=microtubule associated complex; Biological process =microtubule-based movement
  Homolog annotation: Hit_ID=Q10MN5; Match level="QueryCoverage=100%, HitCoverage=73%, E-value=0.0, Identity=82%"; Hit description=Kinesin- 4, putative, expressed
  Pfam annotation: Domain name=Kinesin; Domain location=207-527; Score =518.7; E_value=7.2e-153; Accession=PF00225.15; Description=Kinesin motor domain
MNEGEVPYEEAGFNADAHLDSSDMSTSRPLKMLVSAVLSDKRPDEVPQLLESMLSKLVEEFENRLNSQNELVKAALKNGTDSTKSFSKSKVLVETTPNTSGRKMDATDIYCNHKQTKKEASREVSLKQHSILQQQSKNVEELKADLITTKAGMEYMQMKYSEDVNLLGRHLFSLAHAASGYHKVLEENRKLYNQVQDLKGNIRVYCRVRPFLPGQGSPSTVGSIDEGNITIITPSKSGKEGRKTFSFNKVFGPSATQDEVFIDTQPLIRSVLDGYNVCIFAYGQTGSGKTYTMSGPKNMTELTQGVNYRALGDLFKLAEQRKGTFIYDIAVQMIEIYNEQVRDLLVTDGLNKRLEIRNNSQNGLNVPDASLVRVASTMDVMELMNVGQKNRAVGATALNDRSSRSHSCLTVHVQGRDLTSGTILRGCMHLVDLAGSERVDKSEVTGERLKEAQHINKSLSALGDVIASLAQKNAHVPYRNSKLTQLLQDSLGGQAKTLMFVHISPESDAVGETISTLKFAERVSTVELGAARLNKESGEVRELKEQIARLKSALALKDSGSEQIMSRDSDAFNMKMPSPGFSNRRQGSCDLLSSQTNFRQPMEDVGNIEVRANPTLRQKKPSFDLQDLLTSNDSPSWPDSNLRVNFQMGDEREMVSGDWIDKVVVNNNNSVGDWEGDSAALPDFFYQRYHSGMREKQYQRNNTRQKDDHEYEQQRPRFYSTNTDDSDDIDMATSDSSESDALWQLNVQSMNSSISESGAKVKKPQAKLRDGSDSRTPVHSQIPSASK

SEQ ID NO: 102766 - protein, 72 aa, Setaria italica
  Transcript Sequence Number=SeqID_36792
NLHLHLSQETRRANIPFRIQIHVKMCGWNSQASSACKAATCSGILQTWTENIDTHSHSHGRVRARTVAGSII

SEQ ID NO: 102767 - protein, 63 aa, Setaria italica
  Transcript Sequence Number=SeqID_36793
  Subcellular localization annotation: CTP_CleavageSite=28; ConfidenceScore=5.08e-01
LFYHHCDHSTHLASHSFSDFTILPIKNRCFYKKVTAVSNRFGMFYTTSYCIQTVNTAIQNSHI

SEQ ID NO: 102768 - protein, 131 aa, Setaria italica
  Transcript Sequence Number=SeqID_36794
  Gene Ontology: Mol. function=nucleic acid binding
  Homolog annotation: Hit_ID=A8I426; Match level="QueryCoverage=99%, HitCoverage=9%, E-value=7e-75, Identity=92%"; Hit description =Required to maintain repression 1
ATEHSQDFHLYGTVWDLIPGVITTMYEHQREAFEFMWTNLVGDIRLDELKHGAKPDVVGGCVICHAPGTGKTRLAIVFIQTYMKVFPDCRPVIIAPRGMLFAWDEEFKKWNINVPFHIMNTTDYTGKEDRE

SEQ ID NO: 102769 - protein, 64 aa, Setaria italica
  Transcript Sequence Number=SeqID_36795
ELNDFLIFIGTINHPPPCTWKQYYDIHKENLFTKQVVWILFIINCSIIEVDRRMGRVDCMTAQI

SEQ ID NO: 102770 - protein, 99 aa, Setaria italica
  Transcript Sequence Number=SeqID_36796
  Gene Ontology: Mol. function=NADH dehydrogenase (ubiquinone) activity; Cellular component=mitochondrial respiratory chain; Biological process=oxidation reduction
  Homolog annotation: Hit_ID=B6TDN0; Match level="QueryCoverage=100%, HitCoverage=100%, E-value=2e-44, Identity=86%"; Hit description=NADH- ubiquinone oxidoreductase 10.5 kDa subunit
  Pfam annotation: Domain name=L51_S25_CI-B8; Domain location=28-79; Score=90.3; E_value=6.7e-24; Accession=PF05047.8; Description =Mitochondrial ribosomal protein L51  S25  CI-B8 domain
MAWTATLSRSVKEIRFLFCQSSPASAAAREFVKKNYAEIKSRNPSVPFLVRECSGVQPQLWARYEMGVERCVNLDGLTEAQIDKKLEELAKAGESANAK

SEQ ID NO: 102771 - protein, 79 aa, Setaria italica
  Transcript Sequence Number=SeqID_36797
  Gene Ontology: Mol. function=nucleic acid binding
LVSLGFSVVPVASQTWKAYFGLSRSESPKDDSRQAASILFPDKALSLKLKKHHGRAEALLLAAYGKGLVLPQLDIDVDC

SEQ ID NO: 102772 - protein, 119 aa, Setaria italica
  Transcript Sequence Number=SeqID_36798
  Gene Ontology: Mol. function=nucleic acid binding
HGLDAPPGTTAYIEKSSPFPTDGKLGWWSTGFSYGLWIASLVSLGFSVVPVASQTWKAYFGLSRSESPKDDSRQAASILFPDKALSLKLKKHHGRAEALLLAAYGKGLVLPQLDIDVDC

SEQ ID NO: 102773 - protein, 86 aa, Setaria italica
  Transcript Sequence Number=SeqID_36799
  Gene Ontology: Mol. function=nucleic acid binding
LQLRGFQVVPVASQTWKAYFGLSRSESPKDNSRQAASILFPDKALSLKLKKHHGRAEALLLAAYGKGLVLPSGKFSKPQLDIDVDC

SEQ ID NO: 102774 - protein, 145 aa, Setaria italica
  Transcript Sequence Number=SeqID_36800
FRRCRCRRAPAPAATTRTPRSRAGAKARAKLLLEAEPRDPWLASLSLLPADDSSGAGAAPNGWAIGVDPDTGGAIAVLSPDGSSQVFDNPLVHIVVSKVIRKRLDTKSIIQLLRGLDAPPGTTAYIEKSSPFPTDGKLVCFLSPK

SEQ ID NO: 102775 - protein, 161 aa, Setaria italica
  misc_feature (41)..(41): Xaa can be any naturally occurring amino acid
  Transcript Sequence Number=SeqID_36801
  Gene Ontology: Mol. function=DNA ligase (ATP) activity; Biological process=response to DNA damage stimulus
  Homolog annotation: Hit_ID=B9EYN2; Match level="QueryCoverage=100%, HitCoverage=11%, E-value=3e-61, Identity=71%"; Hit description=DNA ligase
  Pfam annotation: Domain name=DRMBL; Domain location=1-51; Score=23.0; E_value=8.1e-06; Accession=PF07522.6; Description=DNA repair metallo -beta-lactamase
  Pfam annotation: Domain name=RMMBL; Domain location=12-54; Score =10.1; E_value=0.048; Accession=PF07521.4; Description=RNA -metabolising metallo-beta-lactamase
  Pfam module annotation: Pfam domain module=DRMBL::RMMBL; Domain location=1-51::12-54
WMYETKKEGFAVRVKDSLEIHLVPYSEHSSYDELRDYVKFXHPKRVIPTVGVDAGKLDSKEAIAMQKHFSGLVDETANKQEFLMAFHRRSTDATHSCKDVAKCSILHDGEDAALLPAITSASEQLDTLRENITEEMKKELSDFLPSWVSEEQIMDLLISSG

SEQ ID NO: 102776 - protein, 80 aa, Setaria italica
  Transcript Sequence Number=SeqID_36802
ALVDLDQMRPQLWRVVPEPLHTLNCLYPQFRSKHHSLFSRTLLLWTLRNDAPKGAGNLGHHDFTPTLFQSTRKVQDLLLP

SEQ ID NO: 102777 - protein, 72 aa, Setaria italica
  Transcript Sequence Number=SeqID_36803
QQITNLQILLQSDCVLTQWHCESAFTLKRALVPSIKHMYSMIIILYGGAPQEVRQVSWRRKWWIKVVNYKAN

SEQ ID NO: 102778 - protein, 53 aa, Setaria italica
  Transcript Sequence Number=SeqID_36804
  Gene Ontology: Mol. function=cyclin-dependent protein kinase activity
  Homolog annotation: Hit_ID=Q7XUF4; Match level="QueryCoverage=62%, HitCoverage=4%, E-value=1e-09, Identity=93%"; Hit description=Cyclin- dependent kinase G-2
MAAGRHGGYRDYEARERELDAEGSRRSKEQQNHLGGRHRDADRRRDGGRSRGG

SEQ ID NO: 102779 - protein, 62 aa, Setaria italica
  Transcript Sequence Number=SeqID_36805
RVVPTPRSFFKRGAAKRPPRGSRCGTAPRGRVPPRENKQGQGLYYPYVHGDWLWYNTYLILT

SEQ ID NO: 102780 - protein, 342 aa, Setaria italica
  misc_feature (322)..(322): Xaa can be any naturally occurring amino acid
  Transcript Sequence Number=SeqID_36806
  Gene Ontology: Cellular component=vacuole
  Homolog annotation: Hit_ID=B6TSQ5; Match level="QueryCoverage=96%, HitCoverage=57%, E-value=1e-158, Identity=84%"; Hit description =Microtubule-associated protein MAP65-1a
KDLRQRRDERANEFRAIQLQIVRLQAEISGTIDHGDITAPVVDENDLSLKRLGELKVQLNELQTEKNLRLQKIDVQINCINEMCNIMSLDLKKALYDVHPSYAELGRSKPVSISNSTLERLAGKVHALNHEKKQRLRKLQDLGSTLIELWNLMDTPVDEQRCFDHVTSLIKVSQNTVMPHGCLAHDLIEKVEIEVKRLTHLKASKMKELVFKKMTELEEIYRSVHMEIDSDSERRILNDLIDSGRADLSELLAGMDDRIAEAKEHALSRKDILEKVEKWTSASEEETWLDEYERDQNRYNAGRGAHINLKRAEKARVLVNKXFQSLMENLTAKIKVWEKEKG

SEQ ID NO: 102781 - protein, 83 aa, Setaria italica
  Transcript Sequence Number=SeqID_36807
  Homolog annotation: Hit_ID=O65380; Match level="QueryCoverage=80%, HitCoverage=10%, E-value=2e-22, Identity=74%"; Hit description =F12F1.14 protein
LAALDFIACAAADAFAMTDPGSQFSSLVQGYRMYYGGGNLPTIRPNKRRLASILVKNATIEWQEFETRVRKLIQQTKQVHERP

SEQ ID NO: 102782 - protein, 426 aa, Setaria italica
  misc_feature (11)..(11): Xaa can be any naturally occurring amino acid
  Transcript Sequence Number=SeqID_36808
  Homolog annotation: Hit_ID=O48796; Match level="QueryCoverage=99%, HitCoverage=62%, E-value=1e-163, Identity=64%"; Hit description =F24O1.5
  Pfam annotation: Domain name=DUF246; Domain location=1-388; Score =651.6; E_value=7.4e-193; Accession=PF03138.6; Description=Plant protein family
MISANGGINQXQRVAICNAVTISRLLNATLVIPKFLYSNVWLDKSQFGDIYQEDYFINYLKSDIRIVKDLPVELQSLDLEAIGSLVNDTDVMKEAKPSLYVKKILPILLRNRVVHFIGFGNRLSFDPIPSDLQRLRCRCNFHALRFVPKIQEMGALLVERLHGHRSHLSPLKDTLLGPFAVKSAPSANKSDASKYLAVHLRFEIDMVAYSLCYFGGGKDEEDELEAYRQIHFPVLTELKKTTKLPSAAFLRSEGKCPLAPEEAVLMLAAIGFKRSTNIYIAGAEIYGGRHRMAAISRLYPALVTKETLLSPSELEPFRNFSSQLAALDFIACAAADAFAMTDPGSQFSSLVQGYRMYYGGGNLPTIRPNKRRLASILVKNATIEWQEFETRVRKLIQQTKQVHERPVARSIFRHPRCLECMCRTEH

SEQ ID NO: 102783 - protein, 58 aa, Setaria italica
  Transcript Sequence Number=SeqID_36809
CSNGNHILVLLAMQGVSPIKGLNWQAMEINCSNFTYIVAPPRQTLLILFLVSAPSLCA

SEQ ID NO: 102784 - protein, 284 aa, Setaria italica
  Transcript Sequence Number=SeqID_36810
  Gene Ontology: Mol. function=protein binding; Cellular component =nucleus; Biological process=regulation of transcription, DNA -dependent
  Homolog annotation: Hit_ID=B6SU23; Match level="QueryCoverage=92%, HitCoverage=58%, E-value=1e-125, Identity=86%"; Hit description =Nodulation signaling pathway 2 protein
  Pfam annotation: Domain name=GRAS; Domain location=1-264; Score =226.9; E_value=5e-65; Accession=PF03514.6; Description=GRAS family transcription factor
GEDRLHVIDLDIMQGLQWPGLFHILASRPRKPRSIRITGLGASLDVLEATGRRLADFATSLGLPFEFHPIEGKIGHVADAAALLGPRHHHQQQDEATVVHWMHHCLYDVTGSDVGTVRLLRTLRPKLITIVEQDLGHSGDFLGRFVEALHYYSALFDALGDGAGAAEEEAAERHAVERQLLGAEIRNIVAVGGPKRTGEVRVERWSDELRRAGFRPVSLAGSPATQARLLLGMYPWKGYTLVEEDACLKLGWKDLSLLTASAWEPADDDTVAAAPTPRHGSQET

SEQ ID NO: 102785 - protein, 65 aa, Setaria italica
  misc_feature (1)..(12): Xaa can be any naturally occurring amino acid
  Transcript Sequence Number=SeqID_36811
  Subcellular localization annotation: CTP_CleavageSite=53; ConfidenceScore=5.51e-01
XXXXXXXXXXXXNKFYLQVTSKTSATPAFVPVHASSCTLTVRTDRNTMPLQTKESTAQVKKIFTV

SEQ ID NO: 102786 - protein, 87 aa, Setaria italica
  misc_feature (2)..(2): Xaa can be any naturally occurring amino acid
  Transcript Sequence Number=SeqID_36812
GXGGSLTPPRPRRLSCLRSRNGKTRVMDRYGRGGTLLAPLTGEPWTGRSGVLCCFCFCDSLLRWPTEVLVYIKRFAGHACIRQKPRA

SEQ ID NO: 102787 - protein, 78 aa, Setaria italica
  Transcript Sequence Number=SeqID_36813
  Gene Ontology: Mol. function=DNA-directed RNA polymerase activity; Cellular component=nucleus; Biological process=transcription
  Homolog annotation: Hit_ID=B9RKM1; Match level="QueryCoverage=100%, HitCoverage=34%, E-value=5e-32, Identity=85%"; Hit description=DNA -directed RNA polymerase II, putative
  Pfam annotation: Domain name=RNA_pol_Rpb5_C; Domain location=5-78; Score=137.4; E_value=4.6e-38; Accession=PF01191.11; Description=RNA polymerase Rpb5, C-terminal domain
AELLVNIKEHVLVPEHELLTLDQKKKLLEQYTVKETQLPRIQITDPIARYYGMKRGQVVKIIRASETAGRYVTYRYVV

SEQ ID NO: 102788 - protein, 207 aa, Setaria italica
  Transcript Sequence Number=SeqID_36814
  Gene Ontology: Mol. function=DNA-directed RNA polymerase activity; Cellular component=nucleus; Biological process=transcription
  Homolog annotation: Hit_ID=B3TLL2; Match level="QueryCoverage=98%, HitCoverage=99%, E-value=9e-75, Identity=67%"; Hit description=DNA -directed RNA polymerases II 24 kDa polypeptide
  Pfam annotation: Domain name=RNA_pol_Rpb5_C; Domain location=134-207; Score=135.9; E_value=1.3e-37; Accession=PF01191.11; Description=RNA polymerase Rpb5, C-terminal domain
  Pfam annotation: Domain name=RNA_pol_Rpb5_N; Domain location=2-92; Score=127.8; E_value=3.6e-35; Accession=PF03871.6; Description=RNA polymerase Rpb5, N-terminal domain
  Pfam module annotation: Pfam domain module=RNA_pol_Rpb5_C::RNA_pol _Rpb5_N; Domain location=134-207::2-92
MASSEGETNRLWRIRRTLMQMLLDRGYMILEKDDIGLKREAFIDRYGDPVRRDDLVINRYKKDDPADQIYVFFPNEPKPGVKTIRNYVEKMKQENVFAGILVVQQALSAFARSAVQEVSQKYHLEVFQEAELLVNIKEHVLVPEHELLTLELKKMLLQRYTVKETQLPRIQITDPIARYYGMKRGQVVKIIRASETAGRYVTYRYVV

SEQ ID NO: 102789 - protein, 89 aa, Setaria italica
  Transcript Sequence Number=SeqID_36815
  Gene Ontology: Cellular component=plasma membrane
  Homolog annotation: Hit_ID=UPI0001A88FE0; Match level="QueryCoverage =61%, HitCoverage=10%, E-value=5e-25, Identity=96%"; Hit description =plant synaptotagmin
MGLVGGVLGFCVGLPIGLAAAYFLYLRYFAARRLQDPVIRPLRDLDSETLQTTIPDIPLWVKSPDYERIDWMNKFIFDMWPFLDKAICN

SEQ ID NO: 102790 - protein, 224 aa, Setaria italica
  Transcript Sequence Number=SeqID_36816
  Gene Ontology: Mol. function=catalytic activity; Cellular component =chloroplast envelope; Biological process=cellular metabolic process
  Homolog annotation: Hit_ID=B6U1C8; Match level="QueryCoverage=90%, HitCoverage=71%, E-value=1e-102, Identity=90%"; Hit description=3 -beta hydroxysteroid dehydrogenase/isomerase
  Pfam annotation: Domain name=3Beta_HSD; Domain location=27-198; Score= -135.8; E_value=0.075; Accession=PF01073.11; Description=3-beta hydroxysteroid dehydrogenaseisomerase family
  Pfam annotation: Domain name=DapB_N; Domain location=24-132; Score= -29.7; E_value=0.015; Accession=PF01113.12; Description =Dihydrodipicolinate reductase, N-terminus
  Pfam annotation: Domain name=Epimerase; Domain location=26-224; Score= -20.7; E_value=1.4e-05; Accession=PF01370.13; Description=NAD dependent epimerasedehydratase family
  Pfam annotation: Domain name=KR; Domain location=24-186; Score=-80.1; E_value=0.02; Accession=PF08659.2; Description=KR domain
  Pfam annotation: Domain name=NAD_binding_4; Domain location=28-213; Score=-84.8; E_value=0.0017; Accession=PF07993.4; Description=Male sterility protein
  Pfam annotation: Domain name=NmrA; Domain location=26-220; Score= -76.7; E_value=0.00076; Accession=PF05368.5; Description=NmrA-like family
  Pfam module annotation: Pfam domain module=3Beta_HSD::DapB _N::Epimerase::KR::NAD_binding_4::NmrA; Domain location=27-198::24 -132::26-224::24-186::28-213::26-220
  Subcellular localization annotation: CTP_CleavageSite=4; ConfidenceScore=5.16e-01
FRCRASSTMDAASASLPDAEKKTTTVFVAGSTGRTGKRIVEKLLARGFGVVAGTTDVGRAGGSLPQDPNLQLVRADVTESADKLVEVVRGVDAVVCATGFRRSFDPFAPWKVDNFGTVNLVEACRKAGITRFVLVSSILVNGAAMGQLLNPAYIVLNLLGLTLVAKLQAEKHIRKSGINYTIVRPGGLTDQPSTGNIVMEPEVKALTYLSDAITNPSFSKFKVG

SEQ ID NO: 102791 - protein, 305 aa, Setaria italica
  misc_feature (140)..(140): Xaa can be any naturally occurring amino acid
  Transcript Sequence Number=SeqID_36817
  Gene Ontology: Mol. function=catalytic activity; Cellular component =chloroplast envelope; Biological process=cellular metabolic process
  Homolog annotation: Hit_ID=B6U1C8; Match level="QueryCoverage=100%, HitCoverage=100%, E-value=1e-125, Identity=76%"; Hit description=3 -beta hydroxysteroid dehydrogenase/isomerase
  Pfam annotation: Domain name=DapB_N; Domain location=54-139; Score= -24.4; E_value=0.0048; Accession=PF01113.12; Description =Dihydrodipicolinate reductase, N-terminus
  Pfam annotation: Domain name=Epimerase; Domain location=56-301; Score= -40.0; E_value=0.00038; Accession=PF01370.13; Description=NAD dependent epimerasedehydratase family
  Pfam annotation: Domain name=NAD_binding_4; Domain location=58-268; Score=-99.1; E_value=0.016; Accession=PF07993.4; Description=Male sterility protein
  Pfam annotation: Domain name=NmrA; Domain location=56-299; Score= -74.3; E_value=0.00055; Accession=PF05368.5; Description=NmrA-like family
  Pfam module annotation: Pfam domain module=DapB_N::Epimerase::NAD _binding_4::NmrA; Domain location=54-139::56-301::58-268::56-299
  Subcellular localization annotation: CTP_CleavageSite=34; ConfidenceScore=5.34e-01
MARAVCVVTARPHLPLPPALALPAAAKKPLFRCRASSTMDAASASLPDAEKKTTTVFVAGSTGRTGKRIVEKLLARGFGVVAGTTDVGRAGGSLPQDPNLQLVRADVTESADKLVEVVRGVDAVVCATGLVYGLYIKNYXMQMICLLFHRRSFGHFAPWKVDNFGTVNLVEACRKAGITRFVLVSSILVNGAAMGQLLNPAYIVLNLLGLTLVAKLQAEKHIRKSGINYTIVRPGGLTDQPSTGNIVMEPEDTLYSGSISRDQVAEVAVGALLCTESSYKVVEIVARADAPNRPLEDMFAAIKQN

SEQ ID NO: 102792 - protein, 71 aa, Setaria italica
  misc_feature (42)..(42): Xaa can be any naturally occurring amino acid
  Transcript Sequence Number=SeqID_36818
  Gene Ontology: Mol. function=transition metal ion binding
  Homolog annotation: Hit_ID=Q84KI3; Match level="QueryCoverage=100%, HitCoverage=52%, E-value=4e-20, Identity=71%"; Hit description =Cytochrome b5
HSKSAKELMQDYFIGELDPTPEIPEMEVVRKEQDTGFASKLXMDSAVQYWVIPVAAVGISIVVAILCARRK

SEQ ID NO: 102793 - protein, 61 aa, Setaria italica
  Transcript Sequence Number=SeqID_36819
NSKTRYNKRNYRKQRHCISKEWVSKPSRQSITYKQTPTIDSIKIACQGQLKTKRRATLKLK

SEQ ID NO: 102794 - protein, 99 aa, Setaria italica
  Transcript Sequence Number=SeqID_36820
QCNTSHANVLFNDPDHLHEIQAYLSKKCSPISSFQIFQNIYCLDFSSWAWMYFLRHACATSFLYLPRNYRQKPSLNKLPICFEELELMINCDNKVGKLS

SEQ ID NO: 102795 - protein, 56 aa, Setaria italica
  Transcript Sequence Number=SeqID_36821
  Pfam annotation: Domain name=Yippee; Domain location=12-56; Score= -20.2; E_value=7.1e-07; Accession=PF03226.6; Description=Yippee putative zinc-binding protein
RRPEIQRRQVHTGEELTFTKVFKCKHCGVDSASPDAIVSKEFRGRHGRAYLFDSVV

SEQ ID NO: 102796 - protein, 66 aa, Setaria italica
  Transcript Sequence Number=SeqID_36822
KKKQQQHAPRKMWKKASEYEHICLFPQVWKWQLNQTSQMHSSTQVWTDLNGQWHLASTKEQAKSCS

SEQ ID NO: 102797 - protein, 109 aa, Setaria italica
  Transcript Sequence Number=SeqID_36823
  Gene Ontology: Cellular component=nucleus
  Homolog annotation: Hit_ID=B6TBM2; Match level="QueryCoverage=100%, HitCoverage=99%, E-value=2e-41, Identity=69%"; Hit description =Protein yippee-like OJ1003C07.11
  Pfam annotation: Domain name=Yippee; Domain location=1-109; Score =247.2; E_value=4e-71; Accession=PF03226.6; Description=Yippee putative zinc-binding protein
MGLLFVESLPGPKVFKCKHCGVDSASPDAIVSKEFRGRHGRAYLFDSVVNVSFGPNEDRILMTGMHIVNDIYCSCCQRLLGWRYEKAYNEDQKYKEGKYILEKSMMVKE

SEQ ID NO: 102798 - protein, 84 aa, Setaria italica
  misc_feature (80)..(80): Xaa can be any naturally occurring amino acid
  Transcript Sequence Number=SeqID_36824
YTSITSRNKTKQVLLSSTLPAPCTDPNGEAIQRCCHERIAAGGGRRVPVLTGRRRGAAAAGDRARDGRGRGGIIGGDGPXAGSR

SEQ ID NO: 102799 - protein, 169 aa, Setaria italica
  Transcript Sequence Number=SeqID_36825
  Gene Ontology: Cellular component=vacuole
  Homolog annotation: Hit_ID=Q52KD8; Match level="QueryCoverage=60%, HitCoverage=57%, E-value=1e-12, Identity=37%"; Hit description =Chromatin modification-related protein EAF6 homolog
  Pfam annotation: Domain name=NuA4; Domain location=28-109; Score =140.5; E_value=5.4e-39; Accession=PF09340.2; Description=Histone acetyltransferase subunit NuA4
  Subcellular localization annotation: CTP_CleavageSite=36; ConfidenceScore=5.48e-01
MDSGGGGGSGAHKAASGSAPSPAQPAPNPTAMLSVLMSKRAKLQEELRSIERQVYDMETTYLQESNQFGSVLKGFESFLSSSKNTSNLKRSRKFQADERLFSLSSVTSPAVDEHLTGRDDGREYGPGRSKGGTPANGQGKPKKGGRPGGRDGKRLRPSNDPDLDDEDDY

SEQ ID NO: 102800 - protein, 124 aa, Setaria italica
  misc_feature (6)..(6): Xaa can be any naturally occurring amino acid
  misc_feature (18)..(18): Xaa can be any naturally occurring amino acid
  Transcript Sequence Number=SeqID_36826
  Gene Ontology: Mol. function=protein serine/threonine kinase activity; Cellular component=integral to membrane; Biological process=protein amino acid phosphorylation
  Homolog annotation: Hit_ID=A7VM26; Match level="QueryCoverage=99%, HitCoverage=20%, E-value=2e-33, Identity=61%"; Hit description =Receptor-like kinase (Fragment)
PLALVXASKAKATVEPTXSDELLGKKFREPLSINLATFEHALLRVTADDILRATENFSKVHIIGDGGFGTVYRAALPEGRRVAIKRLHGGHQFQGDREFLAEMETIGKVKHPNLVPLLGYCVCG

SEQ ID NO: 102801 - protein, 165 aa, Setaria italica
  Transcript Sequence Number=SeqID_36827
  Gene Ontology: Mol. function=transferase activity, transferring glycosyl groups; Biological process=metabolic process
  Homolog annotation: Hit_ID=B4FG90; Match level="QueryCoverage=96%, HitCoverage=32%, E-value=3e-53, Identity=65%"; Hit description =Anthocyanidin 5,3-O-glucosyltransferase
  Pfam annotation: Domain name=Glyco_transf_28; Domain location=10-152; Score=-16.5; E_value=0.087; Accession=PF03033.12; Description =Glycosyltransferase family 28 N-terminal domain
MDNGPAKQTVVLYPGGGVGHVGPMTELAKVFLDHGHDVTMVLIEPPIKSTDSGAGFIERVAASNPSITFHVLPSIPPPDLTSSPKHPFLLILELMRRYNEKLESFLRSIPRERLHSLVIDMFCTQAIDVATKLGVPVYTFFASGAGVLAVLTQLPALLAGRQSGL

SEQ ID NO: 102802 - protein, 115 aa, Setaria italica
  Transcript Sequence Number=SeqID_36828
  Gene Ontology: Mol. function=phosphoinositide phospholipase C activity; Biological process=intracellular signaling cascade
  Homolog annotation: Hit_ID=A9P711; Match level="QueryCoverage=100%, HitCoverage=19%, E-value=1e-30, Identity=58%"; Hit description =Phosphoinositide-specific phospholipase C
  Pfam annotation: Domain name=efhand_like; Domain location=25-110; Score=8.2; E_value=0.0037; Accession=PF09279.3; Description =Phosphoinositide-specific phospholipase C
MGTTYKCCLIFKRRFQSRDAAPPDDVRALFNLHSGGGTHMGADGLRRYLDATEDALDDGEVDRLLDQIRIQQQQGRARLPRLSRPLLALDDFHRYLFSHDLNPPIRRPQVHHDMS

SEQ ID NO: 102803 - protein, 77 aa, Setaria italica
  Transcript Sequence Number=SeqID_36829
LLVAKLHVKTQLLSLCPLCNIVATTLYIRQSLSKIHAMLQSIIIDLQLISIAISSIMHMIYDFHDHMFVIIKSIVVS

SEQ ID NO: 102804 - protein, 70 aa, Setaria italica
  Transcript Sequence Number=SeqID_36830
IKWYLDYVPFLKHKYKMPIRKGNISLLKYTNSNDSSLYWLPLSQQAHAQLLELRDLLLSQPRDADADDVW

SEQ ID NO: 102805 - protein, 44 aa, Setaria italica
  Transcript Sequence Number=SeqID_36831
GKMIDYFIFQIIYINNCIKFHKLAHRISNLKECIYITNHIRFHP

SEQ ID NO: 102806 - protein, 448 aa, Setaria italica
  Transcript Sequence Number=SeqID_36832
  Subcellular localization annotation: CTP_CleavageSite=45; ConfidenceScore=5.07e-01
MPTITHYVLDPFLETGSPAQVQKAVPKPPPPPPEKATPVPVAPVRTQTSPASLYATPESTTLPDSPSSFPGTWSPYLINHKRRGASLAKTLSQGDAVGEVRELKLPVTLPGLSKSCEAVEVHEPEFAFQQANNGQAEGDCGVEEPFNGQDGILQKGKGTVAAENGQDQPEFEFQRGSLEALVRPVNVARPSNGAAPNNAESDAFFELQDSMSVASNTETDEAGVHERWWKPSSPLGTSVGTPGAEFYDAFEEISSDGGTRSSRAMDDDLREMRLSLLMEIERRKQAEEALENWQAEWKKLSHHLSRVALSLPSPSTAENTDDSSVDPGAELCQQITVSQLVAAAIARGLARAEVESEMETVIAAKNFDIARLSDRVQYYEAANREMSQRNQEAIEMSRQQRKERKKRQKWFWGSVGLAVTLGATAIAWSYLPSSQPQASADSNSASSE

SEQ ID NO: 102807 - protein, 66 aa, Setaria italica
  misc_feature (50)..(50): Xaa can be any naturally occurring amino acid
  Transcript Sequence Number=SeqID_36833
  Homolog annotation: Hit_ID=Q2R0L6; Match level="QueryCoverage=100%, HitCoverage=12%, E-value=9e-23, Identity=73%"; Hit description =Leucine Rich Repeat family protein, expressed
SALCHIAQGCKNLTELSIRRGYEIGDQALISIAENCKSLKELTLQFCERXNCSLHKLNLCGCTLIT

SEQ ID NO: 102808 - protein, 80 aa, Setaria italica
  misc_feature (62)..(62): Xaa can be any naturally occurring amino acid
  Transcript Sequence Number=SeqID_36834
  Homolog annotation: Hit_ID=Q2R0L6; Match level="QueryCoverage=85%, HitCoverage=10%, E-value=2e-27, Identity=88%"; Hit description =Leucine Rich Repeat family protein, expressed
KRTNKPIESKASSPALNNFERFTDRSLSSIAKGCKNLTDLVLNDCQLLTDSSLEFVARSCKXLARLKVNGCQNMETAALE

SEQ ID NO: 102809 - protein, 559 aa, Setaria italica
  Transcript Sequence Number=SeqID_36835
  Gene Ontology: Mol. function=protein binding; Cellular component =cytoplasm; Biological process=ubiquitin-dependent protein catabolic process
  Homolog annotation: Hit_ID=Q2R0L6; Match level="QueryCoverage=99%, HitCoverage=88%, E-value=0.0, Identity=75%"; Hit description=Leucine Rich Repeat family protein, expressed
  Pfam annotation: Domain name=LRR_1; Domain location=116-142; Score =5.2; E_value=31; Accession=PF00560.25; Description=Leucine Rich Repeat
  Pfam annotation: Domain name=LRR_1; Domain location=194-220; Score =0.2; E_value=2.8e+02; Accession=PF00560.25; Description=Leucine Rich Repeat
  Pfam annotation: Domain name=LRR_1; Domain location=270-297; Score =3.1; E_value=77; Accession=PF00560.25; Description=Leucine Rich Repeat
  Pfam annotation: Domain name=LRR_1; Domain location=348-375; Score =3.5; E_value=66; Accession=PF00560.25; Description=Leucine Rich Repeat
  Pfam annotation: Domain name=LRR_1; Domain location=400-423; Score =1.7; E_value=1.4e+02; Accession=PF00560.25; Description=Leucine Rich Repeat
  Pfam annotation: Domain name=LRR_1; Domain location=425-452; Score =5.2; E_value=31; Accession=PF00560.25; Description=Leucine Rich Repeat
  Pfam module annotation: Pfam domain module=LRR_1::LRR_1::LRR_1::LRR _1::LRR_1::LRR_1; Domain location=116-142::194-220::270-297::348 -375::400-423::425-452
  Subcellular localization annotation: CTP_CleavageSite=34; ConfidenceScore=5.24e-01
DRRRLPGRLADVSVDERLTSAGVVGAVPRSRRPRQAPTSSPFRRRRRLPLASNSVHIAPFPLDQPAGDDGSEHSCLTDVGLTHLSRGCRGLEKLSLIWCSAISSTGLVRIAENCKNLTSLDLQACYIGDPGLIAVGEGCKQLKNLNLRFVEGTTDEGLIGLVKGCGQSLVSLAVATCVWLTDASLRAVGSHCPNLEILSVESDRVQDEGVISISKGCRQLKTLKLQCISAGDEALDSIGLFCSLLESLSLNNFERFTDRSLSSIAKGCKNLTDLVLNDCQLLTDSSLEFVARSCKKLARLKVNGCQNMETAALEHIGRWCPGLLELSLIFCPRIQNSAFLEIGRGCSLLRTLYLVDCSSISDSALCHIAQGCKNLTELSIRRGYEIGDQALISIAENCKSLKELTLQFCERVSDTGMSAIAENCSLHKLNLCGCTLITDSGLTAIARGCPELVYLDISVLRIIGDIALAEIGEGCPMLKEIAFSHCPEVTDVGLNHLVRGCLQLESCQMVYCRQITSAGVATIISGCSRLKKLLVEESKVSERTRRRAGPVLSFLCTGL

SEQ ID NO: 102810 - protein, 98 aa, Setaria italica
  Transcript Sequence Number=SeqID_36836
PSPLHRLDQAGYISSLRCLSLAPLGQERKPDGVISSPPPPSTSCSAGESALSATGPGRCHTRPALCGRGILAPPPAVLAPPSVHLTPCSSMALLSTCS

SEQ ID NO: 102811 - protein, 92 aa, Setaria italica
  Transcript Sequence Number=SeqID_36837
KQDKHISETFMWMKPNLLYEALRICILSPMFSSLNCKVNCAVHLFAPLLLPCICYLRLCTLQVARLDDDQLHSSNDYICNDYDYTELSFAPN

SEQ ID NO: 102812 - protein, 52 aa, Setaria italica
  misc_feature (1)..(30): Xaa can be any naturally occurring amino acid
  Transcript Sequence Number=SeqID_36838
XXXXXXXXXXXXXXXXXXXXXXXXXXXXXXLNFCFSYSLYISNCTFVLTNNH

SEQ ID NO: 102813 - protein, 174 aa, Setaria italica
  Transcript Sequence Number=SeqID_36839
  Subcellular localization annotation: CTP_CleavageSite=26; ConfidenceScore=5.39e-01
SDWKGSVIQSEGGSCPRIQSGVVRVDCVMDSGSSSFSRTRSGLVRRKGIFAPNKASCSRTRSGLLRVKSFMRSRDGSCSRTRSGLVRIKSFKDSSDSSCSRTQSDPVRGSPHVVEDLIEDEAVLKGSPEEWVTEDSPVRTRNGLVRGSPAYKAVAMDEPVTKRFPDLDCFVIVL

SEQ ID NO: 102814 - protein, 60 aa, Setaria italica
  Transcript Sequence Number=SeqID_36840
  Subcellular localization annotation: CTP_CleavageSite=34; ConfidenceScore=5.05e-01
LAPFNLGHLVPPLILSCSCRLGRQLAIFFSFFPRSAVYHSDLVVDTTNITRGLFLSTQSW

SEQ ID NO: 102815 - protein, 98 aa, Setaria italica
  Transcript Sequence Number=SeqID_36841
  Gene Ontology: Mol. function=methyltransferase activity; Biological process=metabolic process
  Homolog annotation: Hit_ID=Q8L9U0; Match level="QueryCoverage=77%, HitCoverage=21%, E-value=1e-33, Identity=85%"; Hit description =Coclaurine N-methyltransferase
FDRIVSIEMFEHMKNYKSLLTKISKWMKEDSLLFVHFFCHKTFAYHFEDNNDDDWITRYFFTGGTMPSANLLLYFQVVSNHLYFSIYCTSVTQFTKNE

SEQ ID NO: 102816 - protein, 69 aa, Setaria italica
  Transcript Sequence Number=SeqID_36842
  Gene Ontology: Mol. function=methyltransferase activity; Biological process=metabolic process
  Homolog annotation: Hit_ID=Q8L9U0; Match level="QueryCoverage=92%, HitCoverage=18%, E-value=1e-22, Identity=71%"; Hit description =Coclaurine N-methyltransferase
PKHFCSEEWLKRMDRSIVSIRPIFEKTYGKESTTKWIAYWRTFFISVAELFGYNNGDEWMVAHYLFQRK

SEQ ID NO: 102817 - protein, 357 aa, Setaria italica
  misc_feature (212)..(212): Xaa can be any naturally occurring amino acid
  Transcript Sequence Number=SeqID_36843
  Gene Ontology: Mol. function=methyltransferase activity; Biological process=metabolic process
  Homolog annotation: Hit_ID=Q8L9U0; Match level="QueryCoverage=93%, HitCoverage=93%, E-value=1e-142, Identity=69%"; Hit description =Coclaurine N-methyltransferase
  Pfam annotation: Domain name=CMAS; Domain location=64-356; Score= -5.7; E_value=1.9e-14; Accession=PF02353.12; Description=Cyclopropane- fatty-acyl-phospholipid synthase
  Pfam annotation: Domain name=Methyltransf_11; Domain location=136 -233; Score=44.9; E_value=3.1e-10; Accession=PF08241.4; Description =Methyltransferase domain
  Pfam annotation: Domain name=Methyltransf_12; Domain location=136 -231; Score=33.8; E_value=7e-07; Accession=PF08242.4; Description =Methyltransferase domain
  Pfam module annotation: Pfam domain module=CMAS::Methyltransf _11::Methyltransf_12; Domain location=64-356::136-233::136-231
MVAAAVAERAYAAATRSALAALERNLIPDAVTRRLTRLLLAQRLRQGYLPSAPLQLQQLLQFVHSLQEMPIAIETDKAKAQHYELPTTFFKLVLGRNLKYSSCYFPDDSSTLEDAEVAMMELYCERAKIQDGQSILDVGCGWGSLSLHIAKKYRNCIVTGICNSTTQKAFIDEQCRENELSNVEIIVADISKFEMERSFDRIVSIEMFEHMXNYKSLLTKISKWMKEDSLLFVHFFCHKTFAYHFEDNNDDDWITRYFFTGGTMPSANLLLYFQEDVSVVNHWLVSGTHYARTSEEWLKRMDRSIVSIRPIFEKTYGKESTTKWIAYWRTFFISVAELFGYNNGDEWMVAHYLFQRK

SEQ ID NO: 102818 - protein, 74 aa, Setaria italica
  Transcript Sequence Number=SeqID_36844
  Homolog annotation: Hit_ID=B6TZ09; Match level="QueryCoverage=85%, HitCoverage=12%, E-value=5e-16, Identity=71%"; Hit description =Limonoid UDP-glucosyltransferase
HLRAPPAAEGVREAVDAVTTGPEADAMLANAKSWSAAARDAVAPGGSSDRHVQAFVNEVTGRACGGQAKASAVY

SEQ ID NO: 102819 - protein, 147 aa, Setaria italica
  Transcript Sequence Number=SeqID_36845
  Gene Ontology: Mol. function=nucleotide binding; Cellular component =cytoplasm; Biological process=small GTPase mediated signal transduction
  Homolog annotation: Hit_ID=B0G189; Match level="QueryCoverage=97%, HitCoverage=21%, E-value=4e-38, Identity=52%"; Hit description=GTP -binding protein
  Pfam annotation: Domain name=GTP_EFTU_D2; Domain location=61-131; Score=27.0; E_value=7.5e-05; Accession=PF03144.17; Description =Elongation factor Tu domain 2
DQLKRLFDIDPSEALLTSAKTGKGLEHVLPAVIERIPSPPGKCDSPVRMLLLDSYYDEYKGVICHVAVVDGALRKGDKIASAATGRAYEVLDVGIMHPELTPTGVLYTGQVGYVISGMRSTKEARIGDTLHQAKSIVEPLPGTESHS

SEQ ID NO: 102820 - protein, 53 aa, Setaria italica
  Transcript Sequence Number=SeqID_36846
TLKTSKMYPKENHRLAVGRYCSAPYFGSGSLLLTCMQNQSLFYLSLSKRPHRK

SEQ ID NO: 102821 - protein, 73 aa, Setaria italica
  Transcript Sequence Number=SeqID_36847
PSADAMDALHSDPYSRSSLQPYRDAPVSFENNNTVLDKHGIVSPRVGMTFETVDLAYQFYLEYGYRAGFGVSK

SEQ ID NO: 102822 - protein, 84 aa, Setaria italica
  Transcript Sequence Number=SeqID_36848
  Gene Ontology: Mol. function=3,4-dihydroxy-2-butanone-4-phosphate synthase activity; Cellular component=chloroplast; Biological process=riboflavin biosynthetic process
  Homolog annotation: Hit_ID=B6TBQ9; Match level="QueryCoverage=91%, HitCoverage=14%, E-value=1e-38, Identity=94%"; Hit description =Riboflavin biosynthesis protein ribAB
MDPKDGSMAGITVLQQMAMEHDIPIISIADLIRYRRKREKLVELIAVSRLPTKWGLFRAYCYQSKLDGTEHIAVVKGRTIRSYC

SEQ ID NO: 102823 - protein, 131 aa, Setaria italica
  Transcript Sequence Number=SeqID_36849
  Gene Ontology: Mol. function=3,4-dihydroxy-2-butanone-4-phosphate synthase activity; Cellular component=chloroplast; Biological process=riboflavin biosynthetic process
  Homolog annotation: Hit_ID=B6TBQ9; Match level="QueryCoverage=94%, HitCoverage=23%, E-value=6e-66, Identity=99%"; Hit description =Riboflavin biosynthesis protein ribAB
  Pfam annotation: Domain name=GTP_cyclohydro2; Domain location=1-96; Score=108.1; E_value=3e-29; Accession=PF00925.12; Description=GTP cyclohydrolase II
LIEKAGRGVLVYLRGHEGRGIGLGQKLRAYNLQDEGHDTVEANVELGLAVDAREYGIGAQILRDIGVRTMRLMTNNPAKFIGLKGYGLAVVGRVPVLSPITKENQKYLETKRTKMGHVYGSDLPWQAVRKF

SEQ ID NO: 102824 - protein, 534 aa, Setaria italica
  Transcript Sequence Number=SeqID_36850
  Gene Ontology: Mol. function=3,4-dihydroxy-2-butanone-4-phosphate synthase activity; Cellular component=chloroplast; Biological process=riboflavin biosynthetic process
  Homolog annotation: Hit_ID=B6TBQ9; Match level="QueryCoverage=100%, HitCoverage=100%, E-value=0.0, Identity=88%"; Hit description =Riboflavin biosynthesis protein ribAB
  Pfam annotation: Domain name=DHBP_synthase; Domain location=113-311; Score=306.4; E_value=6e-89; Accession=PF00926.11; Description=3,4 -dihydroxy-2-butanone 4-phosphate synthase
  Pfam annotation: Domain name=GTP_cyclohydro2; Domain location=316 -485; Score=385.0; E_value=1.3e-112; Accession=PF00925.12; Description=GTP cyclohydrolase II
  Pfam module annotation: Pfam domain module=DHBP_synthase::GTP _cyclohydro2; Domain location=113-311::316-485
  Subcellular localization annotation: CTP_CleavageSite=19; ConfidenceScore=5.21e-01
MDYVLLSSHLPSHNFVNARSQQGSSSLSSIGFAVIRNGCLKLRCCAIGDELGGQGRINHPFNENNNGPVFQGINASGASFRTVGAEITQETGDFFVSDAESDPDKPTDGFSSIDQAINALRQGKFVIAIDDENGDNEGDLVMAATLVNPESIAFMIRNGSGIISVGMKEEDLTRLMIPMMSPITEIEDISTAASTVTVDARVGISTGVSAADRAKTILTLASPDSKPSDLRRPGHIFPLKYRNGGVLKRVGHTEASVDLVVLAGLRPVSVLSTVMDPKDGSMAGITVLQQMAMEHDIPIISIADLIRYRRKREKLVELIAVSRLPTKWGLFRAYCYQSKLDGTEHIAVVKGDIGDGEDVLVRVHSECLTGDILGSARCDCGDQLELAMQLIEKAGRGVLVYLRGHEGRGIGLGQKLRAYNLQDEGHDTVEANVELGLAVDAREYGIGAQILRDIGVRTMRLMTNNPAKFIGLKGYGLAVVGRVPVLSPITKENQKYLETKRTKMGHVYGSDLPGRLSEFANPQDTAADEDDTQN

SEQ ID NO: 102825 - protein, 147 aa, Setaria italica
  Transcript Sequence Number=SeqID_36851
  Gene Ontology: Mol. function=methyltransferase activity
  Homolog annotation: Hit_ID=C1MJT8; Match level="QueryCoverage=95%, HitCoverage=41%, E-value=1e-10, Identity=35%"; Hit description=O -methlytransferase
  Pfam annotation: Domain name=Omt_N; Domain location=1-83; Score=32.0; E_value=2.1e-07; Accession=PF02409.10; Description=O-methyltransferase N-terminus
VRALWARTVRDPAAAVLAGERYLRGLHEKMRRDVRAGAREVHGVMIAVRTLWFDARIEAAVDALGGEPQVVILGAGMDARAYRLNCLKECTVFELDFPELLEMKSDLLHEAMSSANHQKLTLMAKSLIGVPSNIQDGDWVTKLQSCG

SEQ ID NO: 102826 - protein, 156 aa, Setaria italica
  Transcript Sequence Number=SeqID_36852
  Gene Ontology: Mol. function=methyltransferase activity
  Homolog annotation: Hit_ID=C1MJT8; Match level="QueryCoverage=94%, HitCoverage=40%, E-value=4e-13, Identity=30%"; Hit description=O -methlytransferase
CSLSFFSGMDARAYRLNCLKECTVFELDFPELLEMKSDLLHEAMSSANHQKLTLMAKSLIGVPSNIQDGDWVTKLQSCGYVPERNTIWVLEGIIYYLHHADAMQVLETIAASRSSACTVLLADFMNKNATSLSPAMYHFYHDNPELLLPSIGFSKV

SEQ ID NO: 102827 - protein, 243 aa, Setaria italica
  Transcript Sequence Number=SeqID_36853
  Gene Ontology: Mol. function=hydrolase activity; Cellular component =cytoplasm; Biological process=nucleotide metabolic process
  Homolog annotation: Hit_ID=B9RWM8; Match level="QueryCoverage=78%, HitCoverage=67%, E-value=5e-80, Identity=72%"; Hit description =Inosine triphosphate pyrophosphatase, putative
  Pfam annotation: Domain name=Ham1p_like; Domain location=54-230; Score=160.2; E_value=6.3e-45; Accession=PF01725.8; Description=Ham1 family
  Subcellular localization annotation: CTP_CleavageSite=68; ConfidenceScore=5.23e-01
LFVLLRIAPSPRRRRSSLASAPWPRSSPAEAGVNGDTSHHQAMSAAARVLPKAVTFVTGNAKKLEEVRAILGSSVPFQSLKLDLPELQGEPEDISKEKARMAASKVNGPVLVEDTCLCFNALKGLPGPYIKWFLEKIGHEGLNNLIKAYEDKSAFAMCIFSLALGPGEEPITFVGRTAGKIVPARGPNDFGWDPVFQPDGFEQTYAEMPKSVKNEISHRGKALALVKEHFASANYTVQSDGSA

SEQ ID NO: 102828 - protein, 117 aa, Setaria italica
  Transcript Sequence Number=SeqID_36854
  Gene Ontology: Mol. function=ubiquitin-protein ligase activity; Cellular component=ubiquitin ligase complex; Biological process =ubiquitin-dependent protein catabolic process
  Homolog annotation: Hit_ID=B6SRZ6; Match level="QueryCoverage=100%, HitCoverage=21%, E-value=2e-44, Identity=78%"; Hit description =Ubiquitin-protein ligase
GGSTADLEEWCVSAMYAMSRGSLRFRGLARAAGADRALRRVVADEGGGVRREMARKTLRAMRGDLDEDGEYNDLTGSSLECGDGEDCGGSIVSDGLMSFRRRQRELGVSSCGNTAEF

SEQ ID NO: 102829 - protein, 358 aa, Setaria italica
  Transcript Sequence Number=SeqID_36855
  Homolog annotation: Hit_ID=Q16P21; Match level="QueryCoverage=45%, HitCoverage=51%, E-value=3e-11, Identity=29%"; Hit description =Aspartyl beta-hydroxylase, putative
HGQVRDGDEAKGGASDIKGFEVRYSDGVNFVDDGIRIEPFNLEREREEGYFDENGNFVEYARGNEIKDAWLDSVEVDPTFVAKVQNKGKEKVEEFQDLSSDDIGRIKRQIANMLEPGETIMQALKRLKGTSTDKRGKMSEGTKRIFDELTEAAVKLMENGDYNVYSDDRETFEREAAGYERLARARLGLPEVKDASAGTKDIQAPSSILEMDQPSSVLEMDLGASTANISAATAAFNDDDSNLDMFGDDDNNDVKRSSDANTVGSGSNPGPVPQGTLGTSGVEKAENGSVESDYVYDPSSGYYYSSSTGYYYDPNSGYYGSASTGTWYSYDEHTGTYKEVQNEQTGVIKEELGDAIKE

SEQ ID NO: 102830 - protein, 499 aa, Setaria italica
  Transcript Sequence Number=SeqID_36856
  Homolog annotation: Hit_ID=C1DZS1; Match level="QueryCoverage=12%, HitCoverage=5%, E-value=1e-12, Identity=48%"; Hit description=SNF2 super family
MAPVGGVVDISSDEEDFLISDALGSIDPAGWTADLFDVDDDATGDFDDLMVMSEISAPPVLQQTAKPDDLVFMSELSKPALQKKANADGGCDEDDDDCVVLDGDPDKAVTLADEEGSAGDGSSDELQIVAEKGPIACRDFPHSRHLCSNLPFSTTSHAKHCGMCHCFVCDAPAPCKYWGNSTSSNDHCHATDKEPKWKLMRQVFRSTQLPASAPEKLPNDLYSARHFAAPQLPPSSVLHAGHPPLAIQSPLLNEGSQNQQRHHSVRVSLSVGGTVSSPRAGRGTCNAHITQNTHSRAIFKRAGAVSPGFASKNASQFGAACPDNSLMDQALPHVSQAAHVAPTTNAFTGTAQNNPFQRSFSAPTAYQVQQGQPAAYYQVATNGMDVIEPQLSRCTSLITERTPCLPEPVTDVGTKSWEDILATVASDLGVADYDISTTESPHVMTDSQPVHSPANQGFSLQHESVAAMENLMSSHMHDLSSHTTVSNVQEIVLGNNREF

SEQ ID NO: 102831 - protein, 104 aa, Setaria italica
  Transcript Sequence Number=SeqID_36857
  Gene Ontology: Mol. function=metal ion binding; Cellular component =integral to membrane; Biological process=ubiquitin-dependent protein catabolic process
  Homolog annotation: Hit_ID=Q53PZ1; Match level="QueryCoverage=84%, HitCoverage=34%, E-value=2e-21, Identity=56%"; Hit description=Zinc finger, C3HC4 type family protein
  Pfam annotation: Domain name=PHD; Domain location=53-98; Score=-3.6; E_value=0.065; Accession=PF00628.21; Description=PHD-finger
  Pfam annotation: Domain name=zf-C3HC4; Domain location=54-95; Score =40.2; E_value=8.4e-09; Accession=PF00097.17; Description=Zinc finger, C3HC4 type (RING finger)
  Pfam module annotation: Pfam domain module=PHD::zf-C3HC4; Domain location=53-98::54-95
SFAVPRHSAGGGAGGGLDPAAVANFPTRAFAGGGGGGGGSGASDSSDSDADSQCIICLAEYEEKDVLRTLPYCGHDFHMACIDLWLEQNTTCPVCRISLLGNPD

SEQ ID NO: 102832 - protein, 200 aa, Setaria italica
  Transcript Sequence Number=SeqID_36858
  Gene Ontology: Mol. function=metal ion binding; Cellular component =integral to membrane; Biological process=ubiquitin-dependent protein catabolic process
  Homolog annotation: Hit_ID=Q53PZ1; Match level="QueryCoverage=70%, HitCoverage=54%, E-value=9e-35, Identity=53%"; Hit description=Zinc finger, C3HC4 type family protein
  Pfam annotation: Domain name=PHD; Domain location=51-96; Score=-3.6; E_value=0.065; Accession=PF00628.21; Description=PHD-finger
  Pfam annotation: Domain name=zf-C3HC4; Domain location=52-93; Score =39.5; E_value=1.4e-08; Accession=PF00097.17; Description=Zinc finger, C3HC4 type (RING finger)
  Pfam module annotation: Pfam domain module=PHD::zf-C3HC4; Domain location=51-96::52-93
SYPVHVARHSVGSGAGGGLDPAAVAAFPTRAFAATPRGSGASDDSSEADSQCIICLAEYEEKDVLRTLPYCGHDFHMACIDLWLEQNSTCPVCRISLLDNPDTDSDHTTPPLHSIVISPPSSPESSRSDPCRCLFVSAGHSSRASEAPRHEPDQENQVASDPSVDGANNMPLSEVNPTPENNSQTVRKQVDRSTQLGPCK

SEQ ID NO: 102833 - protein, 357 aa, Setaria italica
  Transcript Sequence Number=SeqID_36859
  Gene Ontology: Mol. function=DNA binding; Cellular component =nucleolus; Biological process=amino acid biosynthetic process
  Homolog annotation: Hit_ID=B6U674; Match level="QueryCoverage=92%, HitCoverage=83%, E-value=1e-65, Identity=46%"; Hit description=6b -interacting protein 1
  Pfam annotation: Domain name=MADF_DNA_bdg; Domain location=35-110; Score=13.0; E_value=0.013; Accession=PF10545.1; Description=Alcohol dehydrogenase transcription f
HVAVAIPLRKPSPSSGGGGGGGREDAWSDGATSTLIDAWGERFVALGRGSLRHPQWQEVAEVVSSRDGYSKPPKSDVQCKNRIDTLKKKYKIEKSKRGSSWPYFDRLDDLLAPVHKPNSSSSSAAAAARSAPPMVPPRINFPQRTRTPLQPSAGSKRRMPSPPPQASASSESSDGFPPETRSALPNGKRQRVEEHTPAAAANGAESSDSRAQGLRDLAQAIRRLGEVYERVENAKREQEFRMERERLDAARELEDQRAQFFLKMQMELTKATGGGASAAAAPVAVPIPADGNGTRRTGMAAEVATSSNHRVRYRIKGSIHQHAAQQPHYQNNATGNGSDSDNKEAEEDAEDEEEESQ

SEQ ID NO: 102834 - protein, 76 aa, Setaria italica
  Transcript Sequence Number=SeqID_36860
QSAPKMVMCTKGPLRVITKGHSTVQLSANDLLNISSSLVLNLISMQIDPHHIQGYQILIFNFTPPPHMSQRTTIGP

SEQ ID NO: 102835 - protein, 60 aa, Setaria italica
  Transcript Sequence Number=SeqID_36861
MVNDSEQSAITAAAAAAATTTVEPGVERGRASGSGRRLAEESSNEEERSQRFSDAEDRSW

SEQ ID NO: 102836 - protein, 90 aa, Setaria italica
  Transcript Sequence Number=SeqID_36862
  Gene Ontology: Mol. function=serine-type endopeptidase activity; Biological process=negative regulation of catalytic activity
  Homolog annotation: Hit_ID=Q9SUN6; Match level="QueryCoverage=94%, HitCoverage=9%, E-value=3e-13, Identity=42%"; Hit description =Putative serine proteinase
  Subcellular localization annotation: CTP_CleavageSite=53; ConfidenceScore=5.27e-01
RNKKPITRTVTNVAADESYTVSYSAPYGTVVSVAPTQFVIPSGQKQLLTFVVNATMNSSTASFGSVGFYGDKGHRAIIPFSVISKVVYSS

SEQ ID NO: 102837 - protein, 31 aa, Setaria italica
  Transcript Sequence Number=SeqID_36863
KSKGAQLDLAKFDQNLQVVDTKDSCCELTYD

SEQ ID NO: 102838 - protein, 137 aa, Setaria italica
  Transcript Sequence Number=SeqID_36864
  Gene Ontology: Mol. function=transition metal ion binding; Cellular component=endoplasmic reticulum membrane; Biological process =electron transport chain
  Homolog annotation: Hit_ID=B6SLW8; Match level="QueryCoverage=69%, HitCoverage=68%, E-value=1e-39, Identity=82%"; Hit description =Cytochrome b5
  Pfam annotation: Domain name=Cyt-b5; Domain location=6-80; Score =100.1; E_value=7.6e-27; Accession=PF00173.20; Description=Cytochrome b5-like HemeSteroid binding doma
MAGGKMYSFEEVRKHNVRKDCWLIIAGKVYDVTAFMEEHPGGDEVLLACTGKDATADFVDIGHSDSAKEMMPQYCIGEVDAATVPAKLTYAYASDASPDKAATSAAGAWATLLRLAVPVLLLTLALAMQSYGKAKAE

SEQ ID NO: 102839 - protein, 230 aa, Setaria italica
  misc_feature (210)..(210): Xaa can be any naturally occurring amino acid
  Transcript Sequence Number=SeqID_36865
  Gene Ontology: Mol. function=metal ion binding; Cellular component =nucleus; Biological process=transcription from RNA polymerase II promoter
  Homolog annotation: Hit_ID=Q94BQ7; Match level="QueryCoverage=100%, HitCoverage=18%, E-value=4e-82, Identity=61%"; Hit description =Putative RB-binding protein
  Pfam annotation: Domain name=JmjC; Domain location=15-154; Score =184.9; E_value=2.3e-52; Accession=PF02373.14; Description=JmjC domain
LRTVRDKIAGVMVPWLYIGMLFSSFCWHVEDHCFYSINYLHWGEPKCWYGVPGAEANTFEQVMRQALPDLFDAQPDLLFHLVTMLNPSILRANGVPVYSVMQEPGNFVITFPRSFHGGFNLGNSGHHLPPNILYQIFKCIIQNSGLNCAEAVNFAPADWLPHGGIGADLYRLYRKAPVLSHEELLYVVAKNGVDAESLPHLKGEIERLFXNERRRREELWINGIIKSSPM

SEQ ID NO: 102840 - protein, 70 aa, Setaria italica
  Transcript Sequence Number=SeqID_36866
  Gene Ontology: Mol. function=nucleotide binding; Cellular component =nucleus; Biological process=defense response
  Homolog annotation: Hit_ID=Q5ZAJ3; Match level="QueryCoverage=100%, HitCoverage=6%, E-value=4e-20, Identity=68%"; Hit description =Putative powdery mildew resistance protein PM3b
WLKDLKTAAYEANDVFDEFKYEALRRQAKKKGHHSKLGNEVARLLVPARNPIVFRYRMGKKLRRIVQTIE

SEQ ID NO: 102841 - protein, 125 aa, Setaria italica
  Transcript Sequence Number=SeqID_36867
  Gene Ontology: Mol. function=nucleotide binding; Cellular component =nucleus; Biological process=defense response
  Homolog annotation: Hit_ID=Q3B9Y4; Match level="QueryCoverage=75%, HitCoverage=6%, E-value=4e-14, Identity=41%"; Hit description =Powdery mildew resistance protein PM3A
NCDVLIYWPEEVFQSLVSLKNLWIESCNKLIGPTQAKGGEPTQTTDQVLPHLNKISIRCCESMAQLFILPPSIRIIDIMDCPKLEFIWGKEEHLDTYTSLEHCRDPASTTGTLEQSPSPIIRRPC

SEQ ID NO: 102842 - protein, 70 aa, Setaria italica
  Transcript Sequence Number=SeqID_36868
  Subcellular localization annotation: CTP_CleavageSite=25; ConfidenceScore=5.06e-01
SNLVCQISFCLVAHRRRISFLFSTREGRRRRNCCGQFNPDHQNNSPFQTRRIWSPNSDGGKKSLITCSTE

SEQ ID NO: 102843 - protein, 133 aa, Setaria italica
  Transcript Sequence Number=SeqID_36869
  Gene Ontology: Mol. function=nucleotide binding; Biological process =defense response
KELWIHSCNKLIGPTQAKGGEPTQTTDQVLPHLNRIAPSIRFIDIWNCKSMAQLFILPPSIRFIDILACPKLEFIWGNEEHLDTYTSLEHCRGPASTTGTLEQSPSPIIRRPCLVYLTIRSCDSLVTLPNLPP

SEQ ID NO: 102844 - protein, 86 aa, Setaria italica
  Transcript Sequence Number=SeqID_36870
RYDLSLSSYSICFLQISLLCMPSYFVDELVNRWDCGVGFWGFIFIPRSFLTDVTPHIVGLYGYWFSVLDAVDVHREILEICAIPWC

SEQ ID NO: 102845 - protein, 75 aa, Setaria italica
  Transcript Sequence Number=SeqID_36871
RRALTCTHDCHMEASLLQASANDDRPAVDDKNDQVCFHGTTSCCLPPCRDNMTYLVVSRRCSRPSGSSLVWYGRK

SEQ ID NO: 102846 - protein, 183 aa, Setaria italica
  Transcript Sequence Number=SeqID_36872
  Gene Ontology: Mol. function=nucleotide binding; Cellular component =outer membrane-bounded periplasmic space; Biological process=defense response
  Homolog annotation: Hit_ID=Q5ZAJ3; Match level="QueryCoverage=89%, HitCoverage=13%, E-value=2e-28, Identity=42%"; Hit description =Putative powdery mildew resistance protein PM3b
LEMLSIKSYKGTNLPSWITDLSLLQHLTELQLVGCTLCEEFPQFCHFKALEVLYLEKLDKLQSLCSHMVSTPFPALKQLRLHDLESLEIWVATEGKEDELTFPVLEEIDIKNCPKLTSLPEAPRLRVVRLDEGKPLLSLGIVKSRHMSSISELELRVRDTEALPQIDYNWDSSQKLELSLGGT

SEQ ID NO: 102847 - protein, 161 aa, Setaria italica
  misc_feature (148)..(148): Xaa can be any naturally occurring amino acid
  Transcript Sequence Number=SeqID_36873
  Gene Ontology: Mol. function=nucleotide binding; Cellular component =nucleus; Biological process=defense response
  Homolog annotation: Hit_ID=Q8L441; Match level="QueryCoverage=86%, HitCoverage=14%, E-value=2e-32, Identity=51%"; Hit description =Putative NBS-LRR type resistance protein
  Pfam annotation: Domain name=LRR_1; Domain location=25-46; Score=4.3; E_value=45; Accession=PF00560.25; Description=Leucine Rich Repeat
  Pfam annotation: Domain name=LRR_1; Domain location=48-70; Score =15.7; E_value=0.2; Accession=PF00560.25; Description=Leucine Rich Repeat
  Pfam module annotation: Pfam domain module=LRR_1::LRR_1; Domain location=25-46::48-70
FTASITLPAYIDCSGQEQLTRHIQHLRYLNLSSHEFEKLPEGISIMYNLQTLDLSHCTNLCQLPKDMKYLANLRHLYTHGCKSLTCMPPGLGQITSLQTLTYFIIGDGLGCSTIRELQNLNLGGELELSGLQNVTEVLAKAASLENKXKLTHLSLKWNDDA

SEQ ID NO: 102848 - protein, 160 aa, Setaria italica
  Transcript Sequence Number=SeqID_36874
  Gene Ontology: Mol. function=nucleotide binding; Cellular component =nucleus; Biological process=defense response
  Homolog annotation: Hit_ID=Q5ZAJ3; Match level="QueryCoverage=99%, HitCoverage=14%, E-value=2e-48, Identity=62%"; Hit description =Putative powdery mildew resistance protein PM3b
MAELVIGPLISMVKEKASSYLLDQYKVMEGMEEQRKTLERMLPAILEIIQDAEEKGASRRGVAAWLKHLKTAAYEANDVFDEFKYEALRREAKKKGHHSKLGAEVARPSRRFSEALRRGARNPIVFRYRMGKKLRKIVQTIEDLVTEMNTFGFRNLQQAQ

SEQ ID NO: 102849 - protein, 139 aa, Setaria italica
  misc_feature (111)..(111): Xaa can be any naturally occurring amino acid
  misc_feature (119)..(119): Xaa can be any naturally occurring amino acid
  Transcript Sequence Number=SeqID_36875
  Gene Ontology: Mol. function=mismatched DNA binding; Cellular component=synaptonemal complex; Biological process=mismatch repair
  Homolog annotation: Hit_ID=Q6DTM5; Match level="QueryCoverage=100%, HitCoverage=17%, E-value=5e-56, Identity=73%"; Hit description=MSH4
  Pfam annotation: Domain name=MutS_V; Domain location=59-139; Score= -152.9; E_value=0.00074; Accession=PF00488.13; Description=MutS domain V
NKSAAAECFFRTELCLEGLIDKIREDIGILTLLAEVLCLLDMIVNSFAHTISTKPVDRYTRPEFTDDGPMAINAGRHPILETLHTDFVPNNTFLSEASNMVLVMGPNISGXSLRVVDRXIHVILAQIGCYVPAQFASLR

SEQ ID NO: 102850 - protein, 72 aa, Setaria italica
  Transcript Sequence Number=SeqID_36876
FWYGVTVPVLHWVEHLVGGAFGQGSGVGCPCCRGHPGNNRLRHPEKEHGLEIVIVICVLPSYAFSSAKLKFR

SEQ ID NO: 102851 - protein, 85 aa, Setaria italica
  Transcript Sequence Number=SeqID_36877
ERETYGSSLGLPLERLETKEKGCATANKTRLQPAYHARPLTAWGKRLQEELLKNRSSSQIPKPQRSETMILAYSSMVNKAHGSKM

SEQ ID NO: 102852 - protein, 113 aa, Setaria italica
  misc_feature (73)..(73): Xaa can be any naturally occurring amino acid
  Transcript Sequence Number=SeqID_36878
  Gene Ontology: Mol. function=acyltransferase activity; Cellular component=integral to membrane; Biological process=GPI anchor biosynthetic process
  Homolog annotation: Hit_ID=B6T822; Match level="QueryCoverage=100%, HitCoverage=21%, E-value=3e-58, Identity=93%"; Hit description=GUP1
  Pfam annotation: Domain name=MBOAT; Domain location=1-108; Score= -57.9; E_value=0.083; Accession=PF03062.11; Description=MBOAT family
NMPRCINNCHDLESFWKSWHASFNRWLVRYLYIPLGGSRRKLLSIWVIFTFVAVWHDLEWKLVSWAWLTCLFXVPEILVKSLSNKFQASSSLGMLVHREFKAIAGAVTISCLM

SEQ ID NO: 102853 - protein, 114 aa, Setaria italica
  Transcript Sequence Number=SeqID_36879
  Gene Ontology: Mol. function=transporter activity; Cellular component= membrane; Biological process=transport
  Homolog annotation: Hit_ID=B6U234; Match level="QueryCoverage=99%, HitCoverage=21%, E-value=6e-38, Identity=70%"; Hit description =Permease
LGFQHFILCLGTAVMIPTMLVPLMGGNAHDKALVVQTVLFVTGINTMLQTLFGTRLPTIIGGSYAFIIPVISIISDPSLMQIADDHTRFKMTMRAIQGALIISSCIQIILGYSL

SEQ ID NO: 102854 - protein, 88 aa, Setaria italica
  Transcript Sequence Number=SeqID_36880
VLGKVKDFLGEIAKANQKLQLDTQNKPLEEYDIETLTGNEEEYIEMDLLLGVADLHSEQAVEAAEATMNGFRPSGMPVACSSSDPEDD

SEQ ID NO: 102855 - protein, 187 aa, Setaria italica
  Transcript Sequence Number=SeqID_36881
MGEPSKELLDLPSEPRPPASFIESLLASRDHQQQDKEGKRKPGPPTDPLPKSQVLGKVKDFLGEIAKANQKLQLDTQNKPLEEYDIETLTGNEEEYIEMDLLLGVADLHSEQAVEAAEATMNGFRPSGMPVACSSSDPEDDSDDSDEDGGDRPIVSDIAKCKGPDEAETDPAEGKKPNKRQKIVVLN

SEQ ID NO: 102856 - protein, 45 aa, Setaria italica
  misc_feature (24)..(24): Xaa can be any naturally occurring amino acid
  misc_feature (40)..(40): Xaa can be any naturally occurring amino acid
  Transcript Sequence Number=SeqID_36882
MALWNGLGQAATLAQLAGVDAGGXISMIIHAAQTVQQNKXECRQL

SEQ ID NO: 102857 - protein, 95 aa, Setaria italica
  Transcript Sequence Number=SeqID_36883
YYNDYMELRLKNPSKNSFLTRIDELEFYMTVAILSQLESTVILEICTIIILIATTATPAAQEATRTPRQRNRSTQTICKHQTHQEHPVLNTGTIT

SEQ ID NO: 102858 - protein, 129 aa, Setaria italica
  Transcript Sequence Number=SeqID_36884
  Homolog annotation: Hit_ID=Q7XX33; Match level="QueryCoverage=99%, HitCoverage=14%, E-value=1e-34, Identity=60%"; Hit description =OSJNBa0060B20.9 protein
MLFNLPEAAKRIGVKFLSVASAECFGRDISPMHFASLLKECRSVNIVRQIHQKIIALDLLSCPASLLSVSLPPLPSHSYILPKSLGTGVVASYLAFGATSDALSVLERVTPSPAVWWNLLIREHIKEAA

SEQ ID NO: 102859 - protein, 85 aa, Setaria italica
  Transcript Sequence Number=SeqID_36885
  Gene Ontology: Cellular component=intracellular; Biological process =intracellular protein transport
  Homolog annotation: Hit_ID=B6U266; Match level="QueryCoverage=76%, HitCoverage=10%, E-value=2e-28, Identity=87%"; Hit description =Protein transporter
  Pfam annotation: Domain name=VHS; Domain location=16-85; Score=-20.5; E_value=0.0014; Accession=PF00790.11; Description=VHS domain
MYPSGAVVGAAPAAAPSAASRVEKATSHLLMGPDWAVNLEICDILNADVWQTKDVVKAVKKRLQNKDPKVQFFALTFLETMMKNC

SEQ ID NO: 102860 - protein, 143 aa, Setaria italica
  misc_feature (114)..(114): Xaa can be any naturally occurring amino acid
  Transcript Sequence Number=SeqID_36886
  Gene Ontology: Mol. function=DNA binding; Cellular component =chromosome; Biological process=nucleosome assembly
  Homolog annotation: Hit_ID=B6T485; Match level="QueryCoverage=44%, HitCoverage=32%, E-value=3e-26, Identity=92%"; Hit description =Histone H1
  Pfam annotation: Domain name=Linker_histone; Domain location=38-108; Score=107.6; E_value=4.2e-29; Accession=PF00538.11; Description =linker histone H1 and H5 family
GGGGGYGGGGYGGGGGGYGGRGGGGYAAKPKAAAAGASHPPYFEMIKEAITALKERTGSSSHAIAKYMEDKHGASLPANYKKMLSIQLRGFAAKGKLVKVKASYKLSDAAKKDXSPKAKPAAAKTAAAATKPKKTAAAGTKRK

SEQ ID NO: 102861 - protein, 161 aa, Setaria italica
  Transcript Sequence Number=SeqID_36887
  Gene Ontology: Mol. function=DNA binding; Cellular component =chromosome; Biological process=nucleosome assembly
  Homolog annotation: Hit_ID=B6T485; Match level="QueryCoverage=40%, HitCoverage=33%, E-value=7e-26, Identity=90%"; Hit description =Histone H1
  Pfam annotation: Domain name=Linker_histone; Domain location=7-73; Score=77.3; E_value=5.6e-20; Accession=PF00538.11; Description =linker histone H1 and H5 family
SRFFVCSVQMIKEAITALKERTGSSSHAIAKYMEDKHGASLPANYKKMLSIQLRGFAAKGKLVKVKASYKLSDAAKKDSPKAKPAAAKTAAAKPVKATAKPKKTAAAATKPKKTAAAGTKRKTPEKKKIVAKPKKSPAAKAKAKPKTVKSPASKKARKVAA

SEQ ID NO: 102862 - protein, 167 aa, Setaria italica
  Transcript Sequence Number=SeqID_36888
  Gene Ontology: Mol. function=DNA binding; Cellular component =chromosome; Biological process=nucleosome assembly
  Homolog annotation: Hit_ID=B6T485; Match level="QueryCoverage=42%, HitCoverage=36%, E-value=9e-31, Identity=92%"; Hit description =Histone H1
  Pfam annotation: Domain name=Linker_histone; Domain location=35-105; Score=107.6; E_value=4.2e-29; Accession=PF00538.11; Description =linker histone H1 and H5 family
  Subcellular localization annotation: CTP_CleavageSite=28; ConfidenceScore=5.03e-01
MPALAKPASRPAKTAAAPKPKPAAAKPKAAAAGASHPPYFEMIKEAITALKERTGSSSHAIAKYMEDKHGASLPANYKKMLSIQLRGFAAKGKLVKVKASYKLSDAAKKDSPKAKPAAATAAAGTKRKTPEKKKIVAKPKKSPAAKAKAKPKTVKSPASKKARKVAA

SEQ ID NO: 102863 - protein, 125 aa, Setaria italica
  Transcript Sequence Number=SeqID_36889
  Gene Ontology: Cellular component=plasma membrane; Biological process= response to stress
  Homolog annotation: Hit_ID=B5UB77; Match level="QueryCoverage=96%, HitCoverage=74%, E-value=1e-34, Identity=57%"; Hit description =Universal stress protein
  Pfam annotation: Domain name=Usp; Domain location=8-122; Score=20.7; E_value=0.006; Accession=PF00582.18; Description=Universal stress protein family
YILIHVNSSYQNEQGAVHLWEQSGSPLIPLAEFSDVTKTYGVSPDKETIEILTQVAHQRGIEVFAKVFYGDPAKKLYEAVDLVPLSCMVIGSRGLSTLKRALMGSVSTYIVNHAACPVTVVKENM

SEQ ID NO: 102864 - protein, 258 aa, Setaria italica
  misc_feature (11)..(11): Xaa can be any naturally occurring amino acid
  Transcript Sequence Number=SeqID_36890
  Gene Ontology: Mol. function=oxidoreductase activity; Biological process=oxidation reduction
  Homolog annotation: Hit_ID=Q40061; Match level="QueryCoverage=94%, HitCoverage=72%, E-value=1e-109, Identity=75%"; Hit description=Ids2
  Pfam annotation: Domain name=2OG-FeII_Oxy; Domain location=104-203; Score=144.1; E_value=4.3e-40; Accession=PF03171.12; Description=2OG -Fe(II) oxygenase superfamily
CHDFFKMPAEXKAEFYSEDKSKPNRLFSGSVYETLGERYWRDCLCLVYPLPAGDTSDWPHKPQRLREFVENYTVLTRGLAMETLRLLCEGMGLRPDYFVGDISGGVAVDINHYPPCPDPGRTLGLPPHCDRELITVLLPGAVPGLEVAYKGDWIKVQPVPNSFVVNFGLQLEVVTNGTLKSVEHRVVTNSAAPRMSVATFVAPADDCVVGPAEEFVGEGNPPRYRTVRFRDFKRMYNVVNLGSSLNQITSVKNNRKEM

SEQ ID NO: 102865 - protein, 170 aa, Setaria italica
  misc_feature (110)..(110): Xaa can be any naturally occurring amino acid
  misc_feature (127)..(127): Xaa can be any naturally occurring amino acid
  Transcript Sequence Number=SeqID_36891
  Gene Ontology: Cellular component=chloroplast
  Homolog annotation: Hit_ID=Q6K4N7; Match level="QueryCoverage=74%, HitCoverage=43%, E-value=4e-42, Identity=78%"; Hit description=Amino acid transporter-like
HWRGSLWEDRSSSHFSGGVFATLLVFLSVGLVGATSSAGFHMTGKAVKWDGIPFAIGIYGFCYAGHSVFPNIYQSMSDRSKFPKALFICFAICTAIYGSFAIIGFLMFGXNTLSQITLNLPEHSVAXQKVALWTTVTTPLDLTLLSQIPKVYFLYYCFSNFLYVFRLINP

SEQ ID NO: 102866 - protein, 518 aa, Setaria italica
  Transcript Sequence Number=SeqID_36892
  Gene Ontology: Cellular component=chloroplast
  Homolog annotation: Hit_ID=B9SLP1; Match level="QueryCoverage=92%, HitCoverage=90%, E-value=1e-129, Identity=49%"; Hit description =Amino acid transporter, putative
  Pfam annotation: Domain name=Aa_trans; Domain location=128-512; Score= 201.2; E_value=2.8e-57; Accession=PF01490.10; Description =Transmembrane amino acid transporter protein
  Pfam annotation: Domain name=Trp_Tyr_perm; Domain location=134-505; Score=-260.5; E_value=0.012; Accession=PF03222.5; Description =Tryptophantyrosine permease family
  Pfam module annotation: Pfam domain module=Aa_trans::Trp_Tyr_perm; Domain location=128-512::134-505
MAAAADWKEEQSVVEDGDIEDCLLGGVRGGSDDEVEAEAGSLNSQRWPRSFREATDSFTIAAPPGFGHLGGGDGSGLGSDLKLPLLSDKPEGKQDSVKNLLAEPLVSVLSDGKLTDNLKQAATAPITQGCSLTQTVFNGVNVLAGIGIFSAPYTISEAGWASLVVLAFFAIVCCYTGVLLKYCFESKDGVKTFPDIGEAAFGSIGRLLISIVLYTELYSFCVEFINLEGDNLASIFTSTTFDWHGIHADGKHFFGVLFALVVLPSVWLRDLRVISYVSAGGVFATLLVFLSVGLVGATSSAGFHMTGKAVKWDGIPFAIGIYGFCYAGHSVFPNIYQSMSDRSQFNKALYICFAICTTIYGAIAVIGYLMFGDKTLSQITLNLPKDSFASKVALWTTVIIPFTKYSIVINPLARSIEELRPAGFLTDRVFSVTLRTALVASTVCIAFLLPFFGLVMALIGSLLSILVALIMPALCFLKIARNKATRSQVIASVVTVVLGTVCAVLGTYNSIVKIAENY

SEQ ID NO: 102867 - protein, 493 aa, Setaria italica
  Transcript Sequence Number=SeqID_36893
  Gene Ontology: Cellular component=chloroplast
  Homolog annotation: Hit_ID=B9SLP1; Match level="QueryCoverage=98%, HitCoverage=90%, E-value=1e-133, Identity=51%"; Hit description =Amino acid transporter, putative
  Pfam annotation: Domain name=Aa_trans; Domain location=103-487; Score= 184.2; E_value=3.8e-52; Accession=PF01490.10; Description =Transmembrane amino acid transporter protein
  Pfam annotation: Domain name=Spore_permease; Domain location=100-427; Score=-165.4; E_value=0.036; Accession=PF03845.5; Description=Spore germination protein
  Pfam annotation: Domain name=Trp_Tyr_perm; Domain location=109-485; Score=-239.2; E_value=0.0014; Accession=PF03222.5; Description =Tryptophantyrosine permease family
  Pfam module annotation: Pfam domain module=Aa_trans::Spore _permease::Trp_Tyr_perm; Domain location=103-487::100-427::109-485
GDGVGSPRSFQSRPWPQSYRETTDTYTIAASPSFGYLGPSTSKYSLLDLGRSGLGSDLKLPLVSDNADGKQDFVKTLPKTLGSIRDERVSFHLQHTGEVYISQGCNVTQTVFNGINVLAGVGLLSTPFTIHEAGWTGLAVLVCFATVCCYTGILLKHCFESKDGISSYPDIGEAAFGRIGRLFISIILYTELYSYCVEFIILEGDNLTSIFPKASFDWLGFHVDGKHFFGVLTAILVLPTVWLRDLRVLSYLSAGGVIATLLVFVSVGLVGVTDNIGFHSTGKVVNWTGMPFAIGVYGFCYSGHSVFPNIYQSMSDRSKFPKALFICFAICTAIYGSFAIIGFLMFGENTLSQITLNLPEHSVASKVALWTTVINPFTKYALLLNPIARGLEELRPEGFMNETSCSIILRTALVASTVCIAFLMPFFGLVMALIGSLLSILVAVIMPALCFLKIVQNKATRSQVIASVGIIILGIISAIVGTYSSIERIAENY

SEQ ID NO: 102868 - protein, 122 aa, Setaria italica
  misc_feature (118)..(118): Xaa can be any naturally occurring amino acid
  Transcript Sequence Number=SeqID_36894
  Subcellular localization annotation: CTP_CleavageSite=83; ConfidenceScore=5.54e-01
GRSPAPTASTDPHCRPLSGGDSTGLPPLLAWTGNLASVASFTLSGKRGNSASPAPPRRNGQRHSAHFACLRSPVGTLRRSPPTAEDESETAGTGQAGSTLWMMASRNLALPMLPPCTXWSLL

SEQ ID NO: 102869 - protein, 57 aa, Setaria italica
  misc_feature (50)..(50): Xaa can be any naturally occurring amino acid
  Transcript Sequence Number=SeqID_36895
  Gene Ontology: Mol. function=protein binding; Cellular component =cytoplasm; Biological process=multicellular organismal development
  Homolog annotation: Hit_ID=A3RLT9; Match level="QueryCoverage=91%, HitCoverage=46%, E-value=3e-21, Identity=88%"; Hit description=FT protein (Fragment)
VMIDPDAPSPNDPNLREYLHWLVTDIPGTTGATFGQEVMCYENPRPTMGXTASCSCC

SEQ ID NO: 102870 - protein, 97 aa, Setaria italica
  Transcript Sequence Number=SeqID_36896
LDSLMQEYLMSVVFIQQGHQSSGLKIYRVDIVKKQTNRKANKEMTTSSKSIDLGIRIFFIDHDEFKLKHYATNICITIRLENTTWMARVLSRSSYSR

SEQ ID NO: 102871 - protein, 177 aa, Setaria italica
  Transcript Sequence Number=SeqID_36897
  Gene Ontology: Mol. function=protein binding; Cellular component =cytoplasm; Biological process=multicellular organismal development
  Homolog annotation: Hit_ID=A0SQ82; Match level="QueryCoverage=84%, HitCoverage=84%, E-value=5e-75, Identity=86%"; Hit description=VRN3
  Pfam annotation: Domain name=PBP; Domain location=21-166; Score =214.6; E_value=2.6e-61; Accession=PF01161.12; Description =Phosphatidylethanolamine-binding protein
MAGGRDRDPLVVGRVVGDVLDPFTQTTKLKVSFGARTIANGCELKPSMVSHQPRVEVGGPDMRTFYTLVMIDPDAPSPNDPNLREYLHWLVTDIPGTTGATFGQEVMCYENPRPTMGMHRFVFVLFQQLGRQVVYAPGWRHNFNTRDFAELYNLGPPVAAVYFNCQREAGSDDSTPH

SEQ ID NO: 102872 - protein, 103 aa, Setaria italica
  Transcript Sequence Number=SeqID_36898
  Homolog annotation: Hit_ID=B6TWI9; Match level="QueryCoverage=78%, HitCoverage=64%, E-value=8e-27, Identity=72%"; Hit description =SAUR33-auxin-responsive SAUR family member
  Pfam annotation: Domain name=Auxin_inducible; Domain location=49-100; Score=26.4; E_value=3.3e-06; Accession=PF02519.6; Description=Auxin responsive protein
MAKGGLGKLRCMIRRWHSSSRIARAPSPPGEDGVDARGASFHGADEVPKGLHPVYVGKSRRRYLIAEELVGHPLFQTLVDRTGGGGAAEAGCTVVRTRTKGNV

SEQ ID NO: 102873 - protein, 57 aa, Setaria italica
  Transcript Sequence Number=SeqID_36899
RDFLVMLDKACKEVGASQKKGTNKLRNNGNPTSQPTLQEQQFPAVIDDHSDNSDSND

SEQ ID NO: 102874 - protein, 82 aa, Setaria italica
  Transcript Sequence Number=SeqID_36900
  Gene Ontology: Mol. function=serine-type carboxypeptidase activity; Cellular component=extracellular region; Biological process =proteolysis
  Homolog annotation: Hit_ID=Q7XKJ9; Match level="QueryCoverage=64%, HitCoverage=9%, E-value=4e-13, Identity=73%"; Hit description =OSJNBa0038O10.8 protein
MAVATAMAVLMLALATAPDSATGVSPRSPRPEADLVTGLPGQPAVGFRHYAGYVDVGSGGGGSGKALFYWFFEAEREPEKKP

SEQ ID NO: 102875 - protein, 53 aa, Setaria italica
  Transcript Sequence Number=SeqID_36901
TSSSTNHLRKLLRCLEYSTLHEKTYRHTSLRLANITLVSVAHNNSSIHHLCPW

SEQ ID NO: 102876 - protein, 57 aa, Setaria italica
  Transcript Sequence Number=SeqID_36902
VPVVLDGVVGASGAVAGAGADEFEARPCKRVSLSPDSPSSGTGTVSDRSDLSHGAGA

SEQ ID NO: 102877 - protein, 61 aa, Setaria italica
  Transcript Sequence Number=SeqID_36903
  Subcellular localization annotation: CTP_CleavageSite=24; ConfidenceScore=5.35e-01
TKQTDLYAMLNKQSSRGQNGSSITGSSVHSCQFDIATRFRFSSYVKQSLNLFVNHLSDLGH

SEQ ID NO: 102878 - protein, 144 aa, Setaria italica
  Transcript Sequence Number=SeqID_36904
MEANEERRPLPPPPAAGAGAAPPSANGYFSAVFSSSPAGNAKDAKQTDLYAMLNKQSSRGQNGSSITGNSKSHGRTTYKDGKHAYPNESSESPYFGSSVHYGGREFYSSSQQKQPANEPPRNYKEDNPDGSATRGDWWQGSLYY

SEQ ID NO: 102879 - protein, 131 aa, Setaria italica
  misc_feature (28)..(28): Xaa can be any naturally occurring amino acid
  Transcript Sequence Number=SeqID_36905
MEAKKKSAASAAAAAGAGAAPPPANGGXAKDAKQTDLYAMLNKQSSRGQNGSSITDSKSHGRTTYKDGKHAYPNESSESPYFGSSVHYGGREFYSSSQQKQPANEPPRNYKEDNPDGSATRGDWWQGSLYY

SEQ ID NO: 102880 - protein, 265 aa, Setaria italica
  Transcript Sequence Number=SeqID_36906
  Gene Ontology: Mol. function=DNA binding; Cellular component=nucleus; Biological process=regulation of transcription
  Homolog annotation: Hit_ID=B6TWV8; Match level="QueryCoverage=100%, HitCoverage=84%, E-value=2e-78, Identity=62%"; Hit description=MYB transcription factor TaMYB1
  Pfam annotation: Domain name=Myb_DNA-bind_2; Domain location=11-65; Score=-5.9; E_value=0.025; Accession=PF08914.3; Description=Rap1 Myb domain
  Pfam annotation: Domain name=Myb_DNA-binding; Domain location=11-57; Score=59.6; E_value=1.2e-14; Accession=PF00249.23; Description=Myb -like DNA-binding domain
  Pfam annotation: Domain name=Myb_DNA-binding; Domain location=63-108; Score=48.2; E_value=3.2e-11; Accession=PF00249.23; Description=Myb -like DNA-binding domain
  Pfam module annotation: Pfam domain module=Myb_DNA-bind_2::Myb_DNA -binding::Myb_DNA-binding; Domain location=11-65::11-57::63-108
MGAEAECDRIRGPWSPEEDDALRRLVERHGARNWTAIGREIPGRSGKSCRLRWCNQLSPQVERRPFTAEEDAAIVRAHARLGNRWAAIARLLPGRTDNAVKNHWNCSLKRKLAAATAASGAVAGAGADEFEARPCKRVSLSPDSPSSGTGTVSDRSDLSHGAGAGSGSGSGQIYRPVPRSGGFEPADCAMSRPVEDDDPLTSLSLSLPGTDQRFHHDRAHSQFQELPPSPSPPSPSPPPPPAPVAAAATSPYPFNPDFMAVMQEL

SEQ ID NO: 102881 - protein, 157 aa, Setaria italica
  Transcript Sequence Number=SeqID_36907
  Subcellular localization annotation: CTP_CleavageSite=29; ConfidenceScore=5.61e-01
AGLSRTTTRSPPSPFRRTAPRREPARSPTAATSAAPPPANGYFSAVFSSSPAGNAKDAKQTDLYAMLNKQSSRGQNGSSITDSKSHGRTTYKDGKHAYPNESSESPYFGSSVHYGGREFYSSSQQKQPANEPPRNYKEDNPDGSATGGDWWQGSLYY

SEQ ID NO: 102882 - protein, 140 aa, Setaria italica
  Transcript Sequence Number=SeqID_36908
  Gene Ontology: Cellular component=chloroplast
  Homolog annotation: Hit_ID=B9SH09; Match level="QueryCoverage=99%, HitCoverage=13%, E-value=1e-53, Identity=67%"; Hit description=GTP binding protein, putative
  Pfam annotation: Domain name=PPR; Domain location=12-46; Score=21.2; E_value=0.0042; Accession=PF01535.12; Description=PPR repeat
  Pfam annotation: Domain name=PPR; Domain location=83-116; Score=12.0; E_value=0.34; Accession=PF01535.12; Description=PPR repeat
  Pfam module annotation: Pfam domain module=PPR::PPR; Domain location =12-46::83-116
KMQKNGIPPRAITYKVLVRAFWEQGKINEAVEAVNEMEQRGVVGAASVYYELACCLCNNGRWRDAMLQVGKLKQLPLTKPLEYTFTGMILASFNGGYIYECISIFESMKDYCTPNIGTVNVMLKVYGRCDMFGKAKDLFE

SEQ ID NO: 102883 - protein, 63 aa, Setaria italica
  Transcript Sequence Number=SeqID_36909
TGIAPRYTVFFVLLFFEEKWASSNFSCSDVSKINCLKFLYLISVDGITYCLPCHAIFLYLLLS

SEQ ID NO: 102884 - protein, 92 aa, Setaria italica
  Transcript Sequence Number=SeqID_36910
TCSENKHHTSKLGNFMNELQQTYMIISTWTVIRTIMQTQKKTEWGLYVPCKTGSTLSNFLTTHTVLIQSVIKAGIHHFSVAFSFHETALDRH

SEQ ID NO: 102885 - protein, 101 aa, Setaria italica
  Transcript Sequence Number=SeqID_36911
IPFAGFLLSDILTLLLSLLVSVKQNSCFLPETAPGSAVPNGIMHNGSSSGIINGTPSGDQLLNAGKDLHGLHSGIDASTSLQSDQNATAVLFGDNGAKCEQ

SEQ ID NO: 102886 - protein, 288 aa, Setaria italica
  Transcript Sequence Number=SeqID_36912
  Homolog annotation: Hit_ID=Q9SS36; Match level="QueryCoverage=99%, HitCoverage=91%, E-value=8e-44, Identity=39%"; Hit description =F14P13.15 protein
  Pfam annotation: Domain name=A_thal_3526; Domain location=10-63; Score=101.8; E_value=2.4e-27; Accession=PF09713.2; Description=Plant protein 1589 of unknown function (A
MASEELVHKVQALIERCLQLYMNQKEVIDTLSQHAKIEPCITELVWRQLEQQNPLFFKAYYMRLMLKNQIMVFNKLLEDQLQIMNKEFPPGIPSMSLPNGSNSNQLKQNSCFLPETAPGSAVPNGIMHNGSSSGIINGTPSGDQLLNAGKDLHGLHSGIDASTSLQSDQNATAVLFGDNGASATIKTESGYSSNADFAFCGNTFLESCQSIGDASGGGSFSSSELNGQPLNDSILDMESSSFSFLNQIPQSFIFSDLAEDFSQSAEMTPFLTSETNNFSDSTGGDHTG

SEQ ID NO: 102887 - protein, 58 aa, Setaria italica
  Transcript Sequence Number=SeqID_36913
PFAFNRNGLDQSLRFWWEYQFRFNSPNRSAFPAHPKGFNFLIPIHFRWRIGHHGVGAH

SEQ ID NO: 102888 - protein, 283 aa, Setaria italica
  misc_feature (46)..(46): Xaa can be any naturally occurring amino acid
  misc_feature (59)..(59): Xaa can be any naturally occurring amino acid
  Transcript Sequence Number=SeqID_36914
  Gene Ontology: Mol. function=hydrolase activity
  Homolog annotation: Hit_ID=B6SKI3; Match level="QueryCoverage=100%, HitCoverage=66%, E-value=1e-109, Identity=69%"; Hit description =Hydrolase/ zinc ion binding protein
MGWELTEVPGIPTPSLQDSTVDVVAANIEPKLANALIRELSMICPXENLRHVNYLVRYXLGRVRRCTECGKSDLSIILCLSTGSQTCIKQLPGDVQKIVDTYQLSPFIAKVAKCSATSKEEWEEQCKLWPTSYHPAHNLDIIRGFRDDELPSIFNCMKTAIQLSKAGNAAIIVDPSSMQIIAKATDQTHQHDTSAEGNKLAEVKANDTFSLDESTENNGNLLWPSSRLSKCNSLNMEVSCINPLGWTKQRTTEQKPLPCEGCFAWHPLRHAAMVAIENAAERD

SEQ ID NO: 102889 - protein, 284 aa, Setaria italica
  Transcript Sequence Number=SeqID_36915
  Gene Ontology: Mol. function=exonuclease activity; Cellular component= intracellular; Biological process=DNA replication
  Homolog annotation: Hit_ID=B6TZF8; Match level="QueryCoverage=94%, HitCoverage=93%, E-value=5e-55, Identity=42%"; Hit description=DNA polymerase III subunit epsilon
  Pfam annotation: Domain name=Exonuc_X-T; Domain location=84-254; Score=85.7; E_value=1.7e-22; Accession=PF00929.16; Description =Exonuclease
MPLVLRFNLLRNNIWGSRSVRFLKQHAGFSSGKLLQPGTYEKRHFTTKLTDTASWHKTDSGSCSPSIPPLWLQQTSEHDNPGTVLVFDIETTGFLHADHRIIEFALRDLSGGKNCTFETLINPERNVPIYAAKANKITTELVCRPDVPRFSDVLPLLLAYVQRRQAPGKPVLWVAHNAKQFDIPFLMQEFERCSAQVPADWLFVDSLCLARKLKKLDGNIGHVNLEALGKHYGIIFKGPSHRAMPDVQALSKIFQKITLGLKLTRDGLMSEASIFYDFRKVSRI

SEQ ID NO: 102890 - protein, 117 aa, Setaria italica
  misc_feature (98)..(98): Xaa can be any naturally occurring amino acid
  misc_feature (103)..(103): Xaa can be any naturally occurring amino acid
  Transcript Sequence Number=SeqID_36916
RGDTSVEVRVRGGRELQACIVPHHASPGGGGGGGGGRKQYVLRSMHDPNYVLGFVDRLESECLVLQGTRSTRVASALSKAQLGRTGYVAYPWEKKMRXTLRMXPNSSCYLSMLVLPR

SEQ ID NO: 102891 - protein, 50 aa, Setaria italica
  Transcript Sequence Number=SeqID_36917
MTVDAVYLTIFAWWNCSTMYVETTRSLAFPGHCQSVVLSDTVEHLMCRSL

SEQ ID NO: 102892 - protein, 180 aa, Setaria italica
  Transcript Sequence Number=SeqID_36918
  Homolog annotation: Hit_ID=B7ETM3; Match level="QueryCoverage=95%, HitCoverage=79%, E-value=3e-43, Identity=55%"; Hit description=(RAP Annotation release2) Histone deacetylase superfamily protein
  Pfam annotation: Domain name=NC; Domain location=27-101; Score=11.6; E_value=0.0024; Accession=PF04970.5; Description=NC domain
PDCGFQLPDSGVVLTCLDCFLRGGALHRFEYGAPPAVFLAIENGCEEVHGAAHGGPDAAVRRAMHLLQNGFGDYDVFENNCEDFALYCKTGLLPAAGGDDIGRSGQAASAVGVPLAALLSTPFKLFATGPLGMAAVTAGVYCAGRYITDIGVRKDVVKVEVENLAAHLGWRRAKAEEAVK

SEQ ID NO: 102893 - protein, 102 aa, Setaria italica
  Transcript Sequence Number=SeqID_36919
  Subcellular localization annotation: CTP_CleavageSite=71; ConfidenceScore=5.83e-01
FPPVGHWPAAALLARRRSWSSVSPPLSTSPSLIQFFSGRGRLSLAASSPQSRGGRRRERGAGFEVEEEWVRAQKSSTTRHQRNNLPRDPLRRRHPTRVYLSD

SEQ ID NO: 102894 - protein, 58 aa, Setaria italica
  Transcript Sequence Number=SeqID_36920
ITEPEITKRPKITKHYIIGLLDYKSLNYRIQNYQRPKITECCTAGLLDYPSLNYSEII

SEQ ID NO: 102895 - protein, 79 aa, Setaria italica
  Transcript Sequence Number=SeqID_36921
IIIILKYDHFLTRLTSYSQHGSGTTFVTPDFKDKIECIKYMCARIKLHTCTTIVNNKDSAKANKESIKHYYMTESLNKT

SEQ ID NO: 102896 - protein, 101 aa, Setaria italica
  Transcript Sequence Number=SeqID_36922
  Subcellular localization annotation: CTP_CleavageSite=47; ConfidenceScore=5.74e-01
NNPSREQIRSHRSPSPTSTLVFLVAFPARIPNSPSPGASPRSPLLPRAPSRSARHHRRRPPPTPQRRPGMEETPPGQRPQPAHASPPFPAAPFTPPPRVFS

SEQ ID NO: 102897 - protein, 164 aa, Setaria italica
  misc_feature (148)..(148): Xaa can be any naturally occurring amino acid
  Transcript Sequence Number=SeqID_36923
  Gene Ontology: Mol. function=inositol or phosphatidylinositol phosphatase activity
  Homolog annotation: Hit_ID=Q852L1; Match level="QueryCoverage=100%, HitCoverage=30%, E-value=7e-74, Identity=83%"; Hit description =Putative inositol polyphosphate 5-phosphatase
PPADIYVLGFQEIVPLNAGNVLGTEDNLPAKKWVSLVRRTLNKNPGCCYGGYRTPSPVPDPVVELDADFEGSSRKQDNFSILHRRSFNLSRSLRVEGNHMSSHPRLDRRFSVCDPVSLGGRPSDFDGNFPFMGSPDDHCIEEDSSNGXYFSPFTYGYGASAPTE

SEQ ID NO: 102898 - protein, 74 aa, Setaria italica
  Transcript Sequence Number=SeqID_36924
MAETEWRVNTASTKEVDASIVGVPKITSGGDQTTLYAISSVKRIKTRKDNWSCWFGGSSSWRNRKHTFLLFRRK

SEQ ID NO: 102899 - protein, 42 aa, Setaria italica
  Transcript Sequence Number=SeqID_36925
EDTSGAPVVELLQMQVTDGHLQDVSPWPVNKISHKPGTMNMH

SEQ ID NO: 102900 - protein, 330 aa, Setaria italica
  misc_feature (248)..(248): Xaa can be any naturally occurring amino acid
  Transcript Sequence Number=SeqID_36926
  Homolog annotation: Hit_ID=Q8W0T8; Match level="QueryCoverage=60%, HitCoverage=18%, E-value=1e-26, Identity=41%"; Hit description=Gb protein
APSPGVVGEYGTNEMITSKVTYSQPQFQHQDNPAIQNFKSYEPDSRYVMPFITKFVDGQTAQSTAYTSEAMGLHPANAHQLPASGAAQQPVPQMYPQQFPVPQYPNFLPYRNVYSAQYGSPMVVPNYSSNPAFPQLPHASSYLVMPNGAPQLAANGMKYGSSHQYKPVFQGTPAGYGGYASHNGYPVSNGVISSTGAIEDANMNKYKDNSLYAPNPQAEAADLWVQGQREIPNMPPAQFYNIVGQPVXPHAAYLPPHNGHPSFSPAPPHPAQLQYPGFPHALHPTSVTMVQNPQAMVHQPGAPGNLGLDMAAMGPGSQVGAFQQNQLGHL

SEQ ID NO: 102901 - protein, 53 aa, Setaria italica
  Transcript Sequence Number=SeqID_36927
GKQIRYNKVKQKVLSHEIHKLKLLSASIDVTYSTDFCQKLPRLSISHVYNRKY

SEQ ID NO: 102902 - protein, 251 aa, Setaria italica
  Transcript Sequence Number=SeqID_36928
  Gene Ontology: Mol. function=oxidoreductase activity
  Homolog annotation: Hit_ID=B6T581; Match level="QueryCoverage=100%, HitCoverage=100%, E-value=3e-97, Identity=71%"; Hit description=RNA recognition motif containing protein
  Pfam annotation: Domain name=RRM_1; Domain location=8-75; Score=21.1; E_value=0.0022; Accession=PF00076.14; Description=RNA recognition motif. (a.k.a. RRM, RBD, o
MSETGYTVQVTNLSGRVSESDLHEFFSFSGPIEHIELIRSGEYGATAYVTFKERYALETAVLLSGATIVDQPVCITYWGQPEETFSFWDRPTWEVEEEIEYRNYQSCQFNTTPQEALTVAQDVVKTMLARGYVLSKDALAKARAFDESRGYTAAAAAKAAELSKRFGLTDRVNAGVGALSAGVGAMRSVDETYGISETTKTVATATGRTAAKVANSIVTSSYFSAGAMMVSDALNRAAKAAADLAAHGRQS

SEQ ID NO: 102903 - protein, 143 aa, Setaria italica
  Transcript Sequence Number=SeqID_36929
  Gene Ontology: Cellular component=vacuole
  Homolog annotation: Hit_ID=Q7XXC5; Match level="QueryCoverage=100%, HitCoverage=10%, E-value=2e-57, Identity=76%"; Hit description =OSJNBa0027O01.13 protein
VEIRPNVKIICPVRGCYITVNVSGSIRIGEHVEVIGGSVSLDAANVSLDHHSTINTTALAGEPPPQTSGTPHSLEAAGGGHGGRGASCKVSNDTNWGGDVYAWSTLAWPWSYGSMGGSMSADQQFGGYGGGRVMLRARTFMNI

SEQ ID NO: 102904 - protein, 116 aa, Setaria italica
  misc_feature (104)..(104): Xaa can be any naturally occurring amino acid
  Transcript Sequence Number=SeqID_36930
RRLQSRSSNPLLNALYKLNFIRTVEPARPLLPPPAAGADAESLAAGDTNAPFCVNPPDAPPASTMAPPFTSTPFTPSIPDQAPPLPPITPVPPSFEPSPPDSGXPGGGGQGGQGQG

SEQ ID NO: 102905 - protein, 81 aa, Setaria italica
  misc_feature (10)..(10): Xaa can be any naturally occurring amino acid
  misc_feature (19)..(19): Xaa can be any naturally occurring amino acid
  Transcript Sequence Number=SeqID_36931
  Gene Ontology: Mol. function=transferase activity, transferring glycosyl groups; Biological process=metabolic process
  Homolog annotation: Hit_ID=B6T4P0; Match level="QueryCoverage=95%, HitCoverage=16%, E-value=5e-12, Identity=50%"; Hit description =Anthocyanidin 5,3-O-glucosyltransferase
RLNKVFIAEXVGLGVVMKXDQAMVKAEEVEAKVRLVMESQQGEELRERTAMAKDRAAAALEIGGSSTTALVDFLNSLEIST

SEQ ID NO: 102906 - protein, 135 aa, Setaria italica
  Transcript Sequence Number=SeqID_36932
  Homolog annotation: Hit_ID=Q9ZVF7; Match level="QueryCoverage=99%, HitCoverage=23%, E-value=2e-54, Identity=73%"; Hit description =Similar to axi 1 protein
  Pfam annotation: Domain name=DUF246; Domain location=1-135; Score= -97.3; E_value=6.4e-09; Accession=PF03138.6; Description=Plant protein family
SKPIVSLSETLVSRMRERSVESDGKYISVHLRFEEDMVAFSCCVYDGGDEEKKEMDAAREIGWRGKFTKRGRVIRPGVIRMNGKCPLTPLEVGLMLRGMGFSNKTAIFLASGKIYKAEKNMAPLLEMFPLLQTKR

SEQ ID NO: 102907 - protein, 273 aa, Setaria italica
  misc_feature (257)..(257): Xaa can be any naturally occurring amino acid
  Transcript Sequence Number=SeqID_36933
  Gene Ontology: Mol. function=protein binding
  Homolog annotation: Hit_ID=B6SGI6; Match level="QueryCoverage=98%, HitCoverage=74%, E-value=1e-56, Identity=47%"; Hit description =Speckle-type POZ protein
  Pfam annotation: Domain name=BTB; Domain location=182-273; Score =45.2; E_value=2.6e-10; Accession=PF00651.23; Description=BTBPOZ domain
  Pfam annotation: Domain name=MATH; Domain location=29-155; Score=5.9; E_value=0.017; Accession=PF00917.18; Description=MATH domain
  Pfam module annotation: Pfam domain module=BTB::MATH; Domain location= 182-273::29-155
MAAALRRPRIRTASRCTAETAHATHRFEVDGFSLHMGLGAGRFIRSAAFTVGGFDWCVRFYPDGLHRADTGDSFCVCLELLSEKAEVRVLYHLRLVHHNGAPWPAFWRNKPTLFTTMEASKNRGLDIFKFIGTSDREASGHIHNDRLVIECDVTVIKEPQVSEVAAISEDLVVPPSDLSVNFGKLLESEEGADVKFIVQGEIFPAHKVIVATRSPVFKAELYGPVGEGNRECITIEDMLAPVFKALLHFIYTDSLPXMEDLGSDDKEMMKHLH

SEQ ID NO: 102908 - protein, 145 aa, Setaria italica
  misc_feature (116)..(116): Xaa can be any naturally occurring amino acid
  Transcript Sequence Number=SeqID_36934
  Gene Ontology: Mol. function=lyase activity
  Homolog annotation: Hit_ID=Q69PU2; Match level="QueryCoverage=86%, HitCoverage=29%, E-value=1e-25, Identity=47%"; Hit description =Ribosomal RNA apurinic site specific lyase-like
  Pfam annotation: Domain name=LRR_2; Domain location=102-126; Score =22.4; E_value=0.0019; Accession=PF07723.5; Description=Leucine Rich Repeat
APLNLDQSDLPSNREAFAGVVSRILSVHWGPCRRFCVPAGYLEDRPAAMDAWLWSPALDNLEEIDFILPPASTLRFLATLRVAALRKCHIPDGLAQSLQLPQLKELALEEVTISEXSLHGLISSCPVSPNLEECLLLSNLHWLWL

SEQ ID NO: 102909 - protein, 155 aa, Setaria italica
  misc_feature (146)..(146): Xaa can be any naturally occurring amino acid
  Transcript Sequence Number=SeqID_36935
  Gene Ontology: Mol. function=serine-type endopeptidase activity; Cellular component=endoplasmic reticulum membrane; Biological process=proteolysis
  Homolog annotation: Hit_ID=B9RKQ2; Match level="QueryCoverage=100%, HitCoverage=14%, E-value=1e-64, Identity=78%"; Hit description=Site -1 protease, putative
SAIGNDGPLYGTLNNPADQSDVIGVGGIDYNNHIASFSSRGMTTWELPHGYGRVKPDVVAYSRDIIGSKISTGCKTLSGTSVASPVVAGVVCLLVSVIPEDKRKSILNPAAMKQALVEGASKLSGPNMYEQGAGKLDLWQSYEILXKNFQPRASI

SEQ ID NO: 102910 - protein, 85 aa, Setaria italica
  Transcript Sequence Number=SeqID_36936
SGSGRIGYLKLKKFIFLSTYLRLLPNTKRDIKAKKIQPYFIRKAHSRSTTHKSNPQIHLSTLHHHTHRPFEAPNRPKSQREQHQT

SEQ ID NO: 102911 - protein, 82 aa, Setaria italica
  Transcript Sequence Number=SeqID_36937
YFALEGRRRNHPSSLGALERGSGLLPHGRWMRRRRGGGWWLRVELEPSASGLRHPWLSAMECLDDLGGDWHHQMVILPRLTE

SEQ ID NO: 102912 - protein, 563 aa, Setaria italica
  misc_feature (65)..(65): Xaa can be any naturally occurring amino acid
  misc_feature (285)..(285): Xaa can be any naturally occurring amino acid
  Transcript Sequence Number=SeqID_36938
  Gene Ontology: Mol. function=protein tyrosine kinase activity; Biological process=protein amino acid phosphorylation
  Homolog annotation: Hit_ID=B9R9U0; Match level="QueryCoverage=98%, HitCoverage=87%, E-value=1e-109, Identity=36%"; Hit description =Receptor protein kinase, putative
  Pfam annotation: Domain name=LRR_1; Domain location=108-130; Score =12.5; E_value=1.2; Accession=PF00560.25; Description=Leucine Rich Repeat
  Pfam annotation: Domain name=LRR_1; Domain location=12-34; Score =10.8; E_value=2.6; Accession=PF00560.25; Description=Leucine Rich Repeat
  Pfam annotation: Domain name=LRR_1; Domain location=132-154; Score =11.1; E_value=2.3; Accession=PF00560.25; Description=Leucine Rich Repeat
  Pfam annotation: Domain name=LRR_1; Domain location=156-183; Score =9.7; E_value=4.2; Accession=PF00560.25; Description=Leucine Rich Repeat
  Pfam annotation: Domain name=LRR_1; Domain location=36-58; Score=9.5; E_value=4.6; Accession=PF00560.25; Description=Leucine Rich Repeat
  Pfam annotation: Domain name=LRR_1; Domain location=60-82; Score =11.5; E_value=1.9; Accession=PF00560.25; Description=Leucine Rich Repeat
  Pfam annotation: Domain name=LRR_1; Domain location=84-106; Score =18.0; E_value=0.04; Accession=PF00560.25; Description=Leucine Rich Repeat
  Pfam annotation: Domain name=Pkinase; Domain location=282-546; Score =140.4; E_value=5.6e-39; Accession=PF00069.17; Description=Protein kinase domain
  Pfam annotation: Domain name=Pkinase_Tyr; Domain location=282-546; Score=54.6; E_value=2.4e-17; Accession=PF07714.9; Description =Protein tyrosine kinase
  Pfam module annotation: Pfam domain module=LRR_1::LRR_1::LRR_1::LRR _1::LRR_1::LRR_1::LRR_1::Pkinase::Pkinase_Tyr; Domain location=108 -130::12-34::132-154::156-183::36-58::60-82::84-106::282-546::282-546
GYIPHELGMLHRLSFLHLLGNSIIGSIPGSFGNLTRLELLDLSEGQIRGSIPSTFWNLKSLKSLXLASNQINGLLPSEIGFLVNLTHLDLSTNQFTGSIPPQIGQCRHLLQLRISDNLLTGPIPQDLGECTGLYDLDFSRNNLSGTIPITFAQLYQLHNLNLSYNSLGGRFGGTSLPSALVSLDHNIDICGDQRYGLTPCESSGLGGKNEGKRHNKRLILALLLAFGLFCFICLAIGNLALFCWRRKLAKCRTKSKPGDMFSIWNFNGKIAFQDILDATENFDEXYCIGSGGHGSVFRAEVRGSVFAVKLLHSMEDYTDEGTFNAEIDVLTKIRHRCIVKLYGYCSHSQCRFLVYDLMERGSLASILHEEQLARELDWPKRIAIVRDVAHALSYLHHDCDEPIIHRDIKSNNILLDRDFRGYVSDFGMARKLKHIYSSSSTIFAGTCGYMAPELSSTMVLTEKCDVYSFGVVVMEVVMGKHPGDLLLPFFCQTQQHTKLKDILDQRVVEPTSNEEKDVILLVLVAFGCLQICPKARPTMQQVCQALTDRSCPAAILKPLHEVT

SEQ ID NO: 102913 - protein, 341 aa, Setaria italica
  Transcript Sequence Number=SeqID_36939
  Gene Ontology: Cellular component=integral to membrane
  Homolog annotation: Hit_ID=Q00TI8; Match level="QueryCoverage=69%, HitCoverage=90%, E-value=1e-51, Identity=43%"; Hit description=[S] KOG4533 Uncharacterized conserved protein
  Pfam annotation: Domain name=DUF218; Domain location=103-283; Score= -25.1; E_value=0.06; Accession=PF02698.9; Description=Uncharacterized ACR, COG1434
MSSSQGFGPGSPKSFRYPRGVDFDLESGVSRKGRKPKNPHLEASIVMRIRYFYEAHPVAVALILLSFGLSVLILLSVYETRFRTMRSGGAWSSEVGEYPFPNLRNLVMVAGHSIYTSASCGKTDREDSWLLEPYQKHPGQAATFLAHIKEGVDIAARDEGALLLFSGGETRKDAGPRSEAQSYWAIAESKGWFGNDESVRSRALTEEHARDSFENLLFSVCRFRELTGRYPQNITVVSYDFKEERFAQLHRTALGFPEGRFFFTGTPATPAAREAALKGEAAVRAQFLEDPYGCLGSLHVKRLKRDPFHRTIPYPDGCPELKGLFSYCGPVPFSGHLPWTE

SEQ ID NO: 102914 - protein, 209 aa, Setaria italica
  misc_feature (197)..(197): Xaa can be any naturally occurring amino acid
  Transcript Sequence Number=SeqID_36940
  Homolog annotation: Hit_ID=Q1SN04; Match level="QueryCoverage=99%, HitCoverage=26%, E-value=2e-54, Identity=49%"; Hit description =Tetratricopeptide-like helical
MKRDHGVEPTPDLHACAVDILGRAGRLDEAYSIISSMEPGEQQVSAWSSFLGACRLHRNVQLGEIAAERLFELEPDEASHYVLLCNIYSAAGLWEKSSEVRSRMRQRGVSKEPGCSWIELDGAIHRFMAGESAHPESAVVHAHMDALWERMRGQGYAPDTSCVLHDIEEGEKAAILRYHSEKLAIAFGLLRTPPGAXPSRVAKNLRVCN

SEQ ID NO: 102915 - protein, 98 aa, Setaria italica
  Transcript Sequence Number=SeqID_36941
  Gene Ontology: Mol. function=binding; Biological process=cell redox homeostasis
  Homolog annotation: Hit_ID=B9SE65; Match level="QueryCoverage=100%, HitCoverage=15%, E-value=9e-19, Identity=48%"; Hit description=Small glutamine-rich tetratricopeptide repeat-containing protein A, putative
ECEEALRIDPSYGRAHHRLASLHIRLGHIEDALKHLSLAAPQPDLLELHKLQTVEKHLGRCLDARKAGDWKSALRESDAAIAAGADSSALLLATRAEA

SEQ ID NO: 102916 - protein, 145 aa, Setaria italica
  Transcript Sequence Number=SeqID_36942
  Gene Ontology: Mol. function=binding; Cellular component =mitochondrion; Biological process=cell redox homeostasis
  Homolog annotation: Hit_ID=B9SE65; Match level="QueryCoverage=98%, HitCoverage=22%, E-value=2e-59, Identity=74%"; Hit description=Small glutamine-rich tetratricopeptide repeat-containing protein A, putative
  Pfam annotation: Domain name=Thioredoxin; Domain location=63-142; Score=12.8; E_value=2e-05; Accession=PF00085.12; Description =Thioredoxin
DYEVLRKELPNDTEVAEAYFHAQVALKSSRGEEVSNMKFGGEVEAITGMEQFQMATSLPGVSVVHFMTPSNQQCCKISPFVNTLCTRYPSVNFLKVDVNESPAVARAENVRTIPTFKIYKNGMRVKEMICPSQQLLEYSVRHYGI

SEQ ID NO: 102917 - protein, 274 aa, Setaria italica
  Transcript Sequence Number=SeqID_36943
  Gene Ontology: Mol. function=binding; Biological process=cell redox homeostasis
  Homolog annotation: Hit_ID=B9SE65; Match level="QueryCoverage=98%, HitCoverage=42%, E-value=3e-80, Identity=54%"; Hit description=Small glutamine-rich tetratricopeptide repeat-containing protein A, putative
  Pfam annotation: Domain name=TPR_1; Domain location=125-158; Score =4.0; E_value=2; Accession=PF00515.20; Description=Tetratricopeptide repeat
  Pfam annotation: Domain name=TPR_1; Domain location=159-192; Score =38.7; E_value=2.3e-08; Accession=PF00515.20; Description =Tetratricopeptide repeat
  Pfam annotation: Domain name=TPR_1; Domain location=193-226; Score =10.7; E_value=0.31; Accession=PF00515.20; Description=Tetratricopepti de repeat
  Pfam annotation: Domain name=TPR_1; Domain location=79-112; Score =6.8; E_value=0.89; Accession=PF00515.20; Description=Tetratricopeptid e repeat
  Pfam annotation: Domain name=TPR_2; Domain location=125-158; Score =9.8; E_value=2.1; Accession=PF07719.9; Description=Tetratricopeptide repeat
  Pfam annotation: Domain name=TPR_2; Domain location=159-192; Score =28.4; E_value=2.9e-05; Accession=PF07719.9; Description =Tetratricopeptide repeat
  Pfam annotation: Domain name=TPR_2; Domain location=193-226; Score =16.3; E_value=0.13; Accession=PF07719.9; Description=Tetratricopeptid e repeat
  Pfam annotation: Domain name=TPR_2; Domain location=31-64; Score=7.1; E_value=4.4; Accession=PF07719.9; Description=Tetratricopeptide repeat
  Pfam annotation: Domain name=TPR_2; Domain location=79-112; Score =15.6; E_value=0.2; Accession=PF07719.9; Description=Tetratricopeptide repeat
  Pfam module annotation: Pfam domain module=TPR_1::TPR_1::TPR_1::TPR _1::TPR_2::TPR_2::TPR_2::TPR_2::TPR_2; Domain location=125-158::159 -192::193-226::79-112::125-158::159-192::193-226::31-64::79-112
LVTTDARKAGDWKSALRESDAAIAAGADSSALLLATRAEALLRLNLLDEADLAIASASKLDYSSSSSSDTKFCGFLANAYLFYVHAQVDMALGRFDHAVSSIDKARIIDPGNSEVVAMHNKVKSVARARSLGNELFNSGKFSEACLAYGEGLKQHPVNKVLYCNRAACRFKLGQWEKSIEDCNEALKIHPNYTKALLRRAASYGKMEQWAESVKDYEVLRKELPNDTEVAEAYFHAQVALKSSRGEEVSNMKFGGEVEAITGMEQFQMATSLPG

SEQ ID NO: 102918 - protein, 80 aa, Setaria italica
  Transcript Sequence Number=SeqID_36944
  Homolog annotation: Hit_ID=B6SVR8; Match level="QueryCoverage=42%, HitCoverage=5%, E-value=7e-09, Identity=82%"; Hit description =Protein binding protein
LSSITSDLFPSPSPASPASDPEASAEQEPADPAASLAAFDAAEQLIHLWDTTPEALVFEAPEDDAAHYLAAVDVAVDHLH

SEQ ID NO: 102919 - protein, 316 aa, Setaria italica
  Transcript Sequence Number=SeqID_36945
  Gene Ontology: Mol. function=hydrolase activity; Cellular component =nucleus; Biological process=mRNA transport
  Homolog annotation: Hit_ID=B9U140; Match level="QueryCoverage=97%, HitCoverage=68%, E-value=1e-107, Identity=58%"; Hit description =Apyrase
  Pfam annotation: Domain name=GDA1_CD39; Domain location=1-316; Score =174.9; E_value=2.3e-49; Accession=PF01150.9; Description=GDA1CD39 (nucleoside phosphatase) family
QKAEQILDAVRDLVHKKSKFQYKANWINVLEGTQEGSYLWVALNYLLDKLGGDYSQTVGVIDMGGGSVQMAYAISANAAARAPAAANGEDPYITKEYYKGKDYNVYVHSYLRYGAFAARAEILKSKNGPFSSCMLRGFSGNYTYHGKEYDATARPEGAVYENCREEITKALKLNAPCHTKNCTFNGVWNGGGGAGQNNIYASTGFYYLASHVGFIDSKAPSAKAAPAAFMAAAKKACQLDVKKAKVAYPNVDDMDVPYLCMDLAYTYTLLVDGFGLQPMKNITFVDKVKHGEYYIEAAWPLGTAIEAVTHKEKPGN

SEQ ID NO: 102920 - protein, 72 aa, Setaria italica
  Transcript Sequence Number=SeqID_36946
HNNRQLTKLYPLLVLASIPSYYVTPPELSSLLSEPSHLDGLYNFDWTSGRVCLERQVRREPIRPRKTYYQTT

SEQ ID NO: 102921 - protein, 166 aa, Setaria italica
  Transcript Sequence Number=SeqID_36947
AAGSSDPSHGWQTVSYPKRNRKQAQAPRAAAPDLALQANGGKAGVFDAVEKRSQERHRALQQQLASRAADLDGARIAAATGFAADSDDEDDSDEAAAPRQEGEPKKPKKPKVKKPKVTVAEAAALIDAESLAAHLIEISGSYENQQDIQLMRFADYFGRAFVTVSA

SEQ ID NO: 102922 - protein, 217 aa, Setaria italica
  misc_feature (155)..(155): Xaa can be any naturally occurring amino acid
  misc_feature (160)..(160): Xaa can be any naturally occurring amino acid
  misc_feature (171)..(171): Xaa can be any naturally occurring amino acid
  Transcript Sequence Number=SeqID_36948
  Gene Ontology: Mol. function=binding; Cellular component=plasma membrane
  Homolog annotation: Hit_ID=Q9SF11; Match level="QueryCoverage=90%, HitCoverage=43%, E-value=5e-45, Identity=46%"; Hit description =F26K24.17 protein
PEVLTNIMPKIMGNNKYLGQEKLPIIVWVIAQASQGDLVTGMFCWAHSLFPTLCAKSSGNPQARDLVLQLLERILSVPKARSILLNGAVRKGERLVPPVSFDLFMRATFPVSNARIKATERFEAAYPTVKELALAGPPGSKTVKQASQQLLPLCXKAMQXKNAELTREAVXMYCWCLTQNTESYKQWERIYAENIEASVAVSSAASFLAFKFFTVVL

SEQ ID NO: 102923 - protein, 75 aa, Setaria italica
  Transcript Sequence Number=SeqID_36949
TLCKARFSLIDANDIINLNSQYIYISRYSCVLLCSSLLLQNDAALETATDAGKQASIKEADKHCKVVLGRLTRGA

SEQ ID NO: 102924 - protein, 81 aa, Setaria italica
  misc_feature (79)..(79): Xaa can be any naturally occurring amino acid
  Transcript Sequence Number=SeqID_36950
  Subcellular localization annotation: CTP_CleavageSite=59; ConfidenceScore=5.12e-01
LQSCLPSRSLSPPREASAAIPFPSQNGFKTAAAQIHTQSHRHGQTKPPLGFSNPGADFPAERRERERGRNARPPLLDKXLV

SEQ ID NO: 102925 - protein, 151 aa, Setaria italica
  Transcript Sequence Number=SeqID_36951
  Subcellular localization annotation: CTP_CleavageSite=83; ConfidenceScore=5.14e-01
SSRFHPQTTVVGAHHGQASCHVSFSQTEAATVCTGPGSEYSSDPRVTSDTRAGPIVCPDLSQQVATTGRPSRTMLCQILRSVLASWVEATSCVLLSLPPPDLCLYPFLEVHYLLDLNANLIMHSGWIHLQTERGISIPKKTHRPHFHQTAS

SEQ ID NO: 102926 - protein, 147 aa, Setaria italica
  Transcript Sequence Number=SeqID_36952
  Gene Ontology: Mol. function=protein serine/threonine kinase activity; Biological process=protein amino acid phosphorylation
  Homolog annotation: Hit_ID=Q6YXH0; Match level="QueryCoverage=93%, HitCoverage=36%, E-value=4e-57, Identity=74%"; Hit description =Putative calcium-dependent protein kinase
  Pfam annotation: Domain name=Pkinase; Domain location=1-146; Score =18.5; E_value=1.4e-09; Accession=PF00069.17; Description=Protein kinase domain
  Pfam annotation: Domain name=Pkinase_Tyr; Domain location=1-145; Score=-156.4; E_value=0.0025; Accession=PF07714.9; Description =Protein tyrosine kinase
  Pfam module annotation: Pfam domain module=Pkinase::Pkinase_Tyr; Domain location=1-146::1-145
VLRGKGVRSSSERRAAYVIRELMTVLEYCHEMGVVHRDIKPDNVLLTKAGRLKLADFGLAVRVADGQKLTGVAGSPAYMAPEILLGDYSQKVDIWAAGVVLHVLLMGTLPFQGNCVEAIFKAIKTVELDFHSDQWGSVSLLARDLIS

SEQ ID NO: 102927 - protein, 226 aa, Setaria italica
  Transcript Sequence Number=SeqID_36953
  Gene Ontology: Mol. function=protein serine/threonine kinase activity; Cellular component=plasma membrane; Biological process =protein amino acid phosphorylation
  Homolog annotation: Hit_ID=Q6YXH0; Match level="QueryCoverage=90%, HitCoverage=54%, E-value=1e-102, Identity=88%"; Hit description =Putative calcium-dependent protein kinase
  Pfam annotation: Domain name=APH; Domain location=28-202; Score= -12.4; E_value=0.016; Accession=PF01636.15; Description =Phosphotransferase enzyme family
  Pfam annotation: Domain name=Kdo; Domain location=12-195; Score= -86.3; E_value=0.089; Accession=PF06293.6; Description=Lipopolysacchar ide kinase (Kdo)
  Pfam annotation: Domain name=Pkinase; Domain location=26-224; Score =167.1; E_value=5.1e-47; Accession=PF00069.17; Description=Protein kinase domain
  Pfam annotation: Domain name=Pkinase_Tyr; Domain location=26-226; Score=-29.6; E_value=9.2e-12; Accession=PF07714.9; Description =Protein tyrosine kinase
  Pfam module annotation: Pfam domain module=APH::Kdo::Pkinase::Pkinase_ Tyr; Domain location=28-202::12-195::26-224::26-226
RGLKRKVGCIDSATRIGRRKRLESEYDLGEEIGHGKFGSVRVCRAKAGGEEEFACKALPKNAGETAHREVEIMQHLSGHPGVVTLKAVFEDADQFYLVMELCGGGRLLDEIAREGKFSEQRAAIVIKDLMAVLKYCHEMGVVHRDIKPENILLTKAGKMKLADFGLAARVTNGQKLSGIAGSPAYVAPEVLSGSYSEKVDIWGAGVLLHVLLLGSLPYSRRLSGSR

SEQ ID NO: 102928 - protein, 213 aa, Setaria italica
  Transcript Sequence Number=SeqID_36954
  Gene Ontology: Mol. function=protein serine/threonine kinase activity; Biological process=protein amino acid phosphorylation
  Homolog annotation: Hit_ID=B6UA37; Match level="QueryCoverage=63%, HitCoverage=33%, E-value=2e-54, Identity=75%"; Hit description =Calcium-dependent protein kinase
  Pfam annotation: Domain name=Pkinase; Domain location=1-118; Score= -69.9; E_value=0.00025; Accession=PF00069.17; Description=Protein kinase domain
VHNKCSFTCHLLYLGQKLSGIAGSPAYVAPEVLSGSYSEKVDIWGAGVLLHVLLLGSLPFQGGSLDAVFESIKMVELDFSSSPWESISGLGKDLIGRMLNRDVSSRLTADEVLSHPWVLFYTECPLKVVTANLCVTNKIIAPIIPRGRLRSECESLSDLSQSSEEQDECGIVDALTAAITRVRISEPKRSRLCSPALQQECSSNLKSNLCTAF

SEQ ID NO: 102929 - protein, 382 aa, Setaria italica
  Transcript Sequence Number=SeqID_36955
  Gene Ontology: Mol. function=protein serine/threonine kinase activity; Biological process=protein amino acid phosphorylation
  Homolog annotation: Hit_ID=Q0DCT8; Match level="QueryCoverage=99%, HitCoverage=64%, E-value=0.0, Identity=83%"; Hit description=Protein kinase G11A
  Pfam annotation: Domain name=Pkinase; Domain location=102-382; Score =123.1; E_value=9.2e-34; Accession=PF00069.17; Description=Protein kinase domain
  Pfam annotation: Domain name=Pkinase_Tyr; Domain location=102-346; Score=-116.3; E_value=5.4e-06; Accession=PF07714.9; Description =Protein tyrosine kinase
  Pfam module annotation: Pfam domain module=Pkinase::Pkinase_Tyr; Domain location=102-382::102-346
VVEEKKVVDHDNTGRSLKPSSTLDKECSLAKANESGRLIKRSETGEREISSRYRPSNSSDISDESLCSSISSITKPHKANDSRWEAIQMIRTRDGILGLSHFKLLRKLGCGDIGSVYLSELSGTKSYFAMKVMDKASLASRKKLLRSQTEKDILQCLDHPFLPTLYTHFETDKFSCLVMEFCPGGDMHTLRQRQRGKYFPEQAVKFYVAEILLALEYLHMLGIIYRDLKPENILIREDGHIMLTDFDLSLRCAVSPTLIRSSNPDAESLRKNQAHSAQQACVKPSCMMQPSCTAPTTCFGPRLFSKSKKDRKPKPEVVNQVSPWPELIAEPSDARSMSFVGTHEYLAPEIIKGDGHGSAVDWWTFGIFLYELLFGKTPFKGS

SEQ ID NO: 102930 - protein, 55 aa, Setaria italica
  Transcript Sequence Number=SeqID_36956
TYNVQSFDSSLRDSRAKLDKEHSFTIEPGMECIHSFGFRTITCIRNGNAKRCHSF

SEQ ID NO: 102931 - protein, 122 aa, Setaria italica
  Transcript Sequence Number=SeqID_36957
  Gene Ontology: Mol. function=inositol or phosphatidylinositol phosphatase activity
  Homolog annotation: Hit_ID=B9SDQ6; Match level="QueryCoverage=96%, HitCoverage=31%, E-value=2e-55, Identity=82%"; Hit description=Myo inositol monophosphatase, putative
LENWGGLIGDSLSEYLWCIDPLDGTTNFAHGYPSFSVSIGVLFRGKPAASTVVEFCGGPFCWSTRTISASAGGGAYCNGQKIHVSQTDKVEQSLLVTGFGYEHDDAWTTNINLFKEFTDISR

SEQ ID NO: 102932 - protein, 186 aa, Setaria italica
  Transcript Sequence Number=SeqID_36958
  Gene Ontology: Mol. function=inositol or phosphatidylinositol phosphatase activity
  Homolog annotation: Hit_ID=B9SDQ6; Match level="QueryCoverage=94%, HitCoverage=46%, E-value=2e-82, Identity=81%"; Hit description=Myo inositol monophosphatase, putative
  Pfam annotation: Domain name=Inositol_P; Domain location=1-168; Score= 15.2; E_value=4.2e-07; Accession=PF00459.17; Description=Inositol monophosphatase family
MYFSRFYHYLTVVEFCGGPFCWSTRTISASAGGGAYCNGQKIHVSQTDKVEQSLLVTGFGYEHDDAWTTNINLFKEFTDISRGVRRLGSAAADMSHVGLGITEAYWEYRLKPWDMAAGVLIVEEAGGVVTRMDGGAFTVFDRSVLVSNGVVHGQLLDRIGPPTEDLKKKGIDFSLWFKPDKYPTDF

SEQ ID NO: 102933 - protein, 96 aa, Setaria italica
  misc_feature (16)..(16): Xaa can be any naturally occurring amino acid
  misc_feature (28)..(28): Xaa can be any naturally occurring amino acid
  Transcript Sequence Number=SeqID_36959
  Gene Ontology: Mol. function=substrate-specific transmembrane transporter activity; Cellular component=integral to membrane; Biological process=transmembrane transport
  Homolog annotation: Hit_ID=Q9C757; Match level="QueryCoverage=98%, HitCoverage=16%, E-value=4e-30, Identity=71%"; Hit description =Probable inositol transporter 2
NPYVLRLAFSAGIGGXLFGYDTGVISGXALLYIRDDFRSVDRNTWLQELIVSMAVAGAIIGAAIGGWATDRFGRRTSILVADSLFFAGAVVMASAT

SEQ ID NO: 102934 - protein, 211 aa, Setaria italica
  Transcript Sequence Number=SeqID_36960
  Gene Ontology: Mol. function=aspartyl esterase activity; Cellular component=cell wall; Biological process=cell wall modification
  Pfam annotation: Domain name=Pectinesterase; Domain location=18-211; Score=31.6; E_value=5.2e-24; Accession=PF01095.11; Description =Pectinesterase
LRHSTFQHALARAFPSYSLVVDKNPAFGDFTTIQAAIDSLPAINLVRVVIRVNAGTYTEKVTISAMRAFITLEGAGADSTIVQWGDTADSPTGPKGRPLGTFNSATFAVNAQYFLARNITFKNTSPVPKPGATGKQAVALRVSADNAAFVGCKFLGAQDTLYDHSGRHYYKECYIEGSVDFIFGNALSLYEVRRRSLPQRWSLCKTLLHLR

SEQ ID NO: 102935 - protein, 80 aa, Setaria italica
  misc_feature (64)..(64): Xaa can be any naturally occurring amino acid
  Transcript Sequence Number=SeqID_36961
  Gene Ontology: Mol. function=hydrolase activity, acting on ester bonds; Cellular component=plasma membrane
  Homolog annotation: Hit_ID=B9SDD8; Match level="QueryCoverage=98%, HitCoverage=14%, E-value=3e-24, Identity=64%"; Hit description =Phospholipase C 3, putative
  Subcellular localization annotation: CTP_CleavageSite=49; ConfidenceScore=5.16e-01
GAPATKAGVAAPPMSGFAQQAEKERPGMSATVMNGFRPDAVPVYRELVREFAVCDRWFASVPTXSTQPNRMFVHSATSHG

SEQ ID NO: 102936 - protein, 104 aa, Setaria italica
  Transcript Sequence Number=SeqID_36962
  Gene Ontology: Mol. function=binding
  Homolog annotation: Hit_ID=O65310; Match level="QueryCoverage=72%, HitCoverage=17%, E-value=1e-22, Identity=64%"; Hit description =Pollenless3
MMQQMQQEPWNAAAVGLLRPTKSAPCSPIKPAAAAGMVRTHSDSFHVAHKVPVGDTPYVRAKRVQLVDKDPEKAIALFWSAINAGDRVDSALKDMAIVMKQQNR

SEQ ID NO: 102937 - protein, 280 aa, Setaria italica
  Transcript Sequence Number=SeqID_36963
  Gene Ontology: Mol. function=molecular_function; Cellular component =cellular_component; Biological process=biological_process
  Homolog annotation: Hit_ID=B9SJ14; Match level="QueryCoverage=98%, HitCoverage=58%, E-value=1e-76, Identity=55%"; Hit description =Nucleic acid binding protein, putative
  Pfam annotation: Domain name=PUB; Domain location=1-71; Score=36.9; E_ value=8.1e-08; Accession=PF09409.2; Description=PUB domain
  Pfam annotation: Domain name=UBX; Domain location=168-255; Score=3.5; E_value=0.038; Accession=PF00789.12; Description=UBX domain
  Pfam module annotation: Pfam domain module=PUB::UBX; Domain location =1-71::168-255
LLREPRSDKFRRVRLGNPRIKEAVADREGGVELLEAVGFLVGDEGGELFALMDEVPSDVRLGGIRRAVLLLERAHPSASPAQVDADEKESCSNGVYGQEEVKKTIDRQIRVFFSVPGSSVADNDVPDSFYNLSGEEIRNEARMRRERLEQSRLLIPKSYKEKQALAARQKYKQAVIRVQFPDRVILQGVFLPGEATGSLYEFVASALKQPGLEFELIFPAVPKPRVVPHFPKPGERSRTLQEEDLVPSALLKFKPKETDSVMFTGLLDELLQASEPLPAA

SEQ ID NO: 102938 - protein, 56 aa, Setaria italica
  Transcript Sequence Number=SeqID_36964
QSILHKISWKCSELPKRLNQQGLMKAVAVGSGPEARTESHARSEVPRRTSPAGTIQ

SEQ ID NO: 102939 - protein, 118 aa, Setaria italica
  misc_feature (83)..(83): Xaa can be any naturally occurring amino acid
  Transcript Sequence Number=SeqID_36965
  Homolog annotation: Hit_ID=Q656N0; Match level="QueryCoverage=99%, HitCoverage=3%, E-value=6e-31, Identity=64%"; Hit description =Putative STH1 protein
DIHQGSMSQKSGRSSGIESPASLQMEDTRSMNSHDSLKSDEKTSKKTSSKRKRMDSKGAGDLHSEDNSKSDAISTGHNTRKGXQVGKAGRQGQPSMGMEHEQPHSLQVQGGTAQVPPS

SEQ ID NO: 102940 - protein, 92 aa, Setaria italica
  Transcript Sequence Number=SeqID_36966
  Homolog annotation: Hit_ID=B6TLX2; Match level="QueryCoverage=98%, HitCoverage=100%, E-value=5e-43, Identity=89%"; Hit description =Fiber protein Fb15
MALRALYNEIRGMKVREVPAYLKPRLTWENVKKSADQAVDRYIEKYIETSKPDPLFHVCFGGMAFSYLVALPWERAHLAHLEEMERTGGKHH

SEQ ID NO: 102941 - protein, 92 aa, Setaria italica
  Transcript Sequence Number=SeqID_36967
MFRRAKTTMAPPLEGEVRIQKVEKIDLVYNLLTKPSIYANKPMVATGKYPTSGHDVTGWKKTGNTSKGIVSVEDINKRSERYITEMKKRFLG

SEQ ID NO: 102942 - protein, 86 aa, Setaria italica
  misc_feature (9)..(9): Xaa can be any naturally occurring amino acid
  Transcript Sequence Number=SeqID_36968
  Gene Ontology: Mol. function=zinc ion binding; Cellular component =intracellular; Biological process=regulation of transcription, DNA -dependent
  Homolog annotation: Hit_ID=Q2L9Y1; Match level="QueryCoverage=95%, HitCoverage=13%, E-value=2e-31, Identity=80%"; Hit description=EMF -like
DEQLAAEKXLALYCKPVELYNIIQRRAVKNPLFIQRSLLYKIQARRKKRIQLTISLSGSTNTQAQNIFPLYVLLARPTSNITSRSS

SEQ ID NO: 102943 - protein, 341 aa, Setaria italica
  Transcript Sequence Number=SeqID_36969
  Gene Ontology: Mol. function=4 iron, 4 sulfur cluster binding; Cellular component=chloroplast; Biological process=protein folding
  Homolog annotation: Hit_ID=B6SQG7; Match level="QueryCoverage=78%, HitCoverage=79%, E-value=1e-110, Identity=70%"; Hit description =Electron transporter/ heat shock protein binding protein
  Pfam annotation: Domain name=DnaJ; Domain location=77-139; Score =86.9; E_value=7.3e-23; Accession=PF00226.23; Description=DnaJ domain
  Pfam annotation: Domain name=Fer4; Domain location=162-185; Score =14.1; E_value=0.0026; Accession=PF00037.19; Description=4Fe-4S binding domain
  Pfam module annotation: Pfam domain module=DnaJ::Fer4; Domain location=77-139::162-185
  Subcellular localization annotation: CTP_CleavageSite=64; ConfidenceScore=5.51e-01
MAPLLSPPLLADSVTKFHAASTAVPCSGSPQRYAITGLAGAGRRDRRRCRRTRGRTGLRVEAVAAESRSSEGGVAEDYYAVLGVMPDATPKQIKKAYYNCMKSCHPDLSGNDPDVTNFCMFINEVYTVLTDPIQRAVYDEIHGYAATATNPFLDDNAPRDHVFVDEFSCIGCKNCANVCSKVFQIEEDFGRARVYDQSGDIKLIEEAIESCPVDCIHWTSAAQLSLLEDEMRRVERVNVGLMLAGMGGSIDVFRMASSRWEKRQAKVLEKVRRRVSQDDSSKGGSWSDIWGAPTRYQKNEEEAKERAKRAAAAARRWREYSRKGADKPPTYKLPEAVPNKE

SEQ ID NO: 102944 - protein, 89 aa, Setaria italica
  Transcript Sequence Number=SeqID_36970
  Gene Ontology: Mol. function=protein serine/threonine kinase activity; Biological process=protein amino acid phosphorylation
  Homolog annotation: Hit_ID=B9S365; Match level="QueryCoverage=89%, HitCoverage=23%, E-value=6e-23, Identity=62%"; Hit description =Protein kinase, putative
  Pfam annotation: Domain name=Pkinase_Tyr; Domain location=1-89; Score= -180.1; E_value=0.094; Accession=PF07714.9; Description=Protein tyrosine kinase
GNFGTVYKAKLRDGSIIAVKRATKTHGGHISVEFRSEIQMLSKVEHLNLVKFLGYVEYEDERLILVEYVNNGTLRQHLDGMSNICNRHA

SEQ ID NO: 102945 - protein, 61 aa, Setaria italica
  Transcript Sequence Number=SeqID_36971
AIAETSILNALHLYVSSPNCKSITKETNSKYPTRQPKSCKQKKHYLYKMWQVRILNPEEPS

SEQ ID NO: 102946 - protein, 98 aa, Setaria italica
  Transcript Sequence Number=SeqID_36972
MSKLKRILPEHGRSEILIIACSKLSKLLEASEREYNMGQIVRLDSFHGNYGLTAEKKLMPFCDNPGTDGSYKVSPFTTTYFAQGFMDQERWCFRWHSW

SEQ ID NO: 102947 - protein, 757 aa, Setaria italica
  misc_feature (694)..(694): Xaa can be any naturally occurring amino acid
  Transcript Sequence Number=SeqID_36973
  Gene Ontology: Mol. function=N-acetyltransferase activity; Cellular component=nucleus; Biological process=metabolic process
  Homolog annotation: Hit_ID=B9SE60; Match level="QueryCoverage=64%, HitCoverage=36%, E-value=1e-143, Identity=50%"; Hit description=DNA binding protein, putative
  Pfam annotation: Domain name=Acetyltransf_1; Domain location=579-654; Score=14.1; E_value=0.041; Accession=PF00583.16; Description =Acetyltransferase (GNAT) family
  Pfam annotation: Domain name=C1_3; Domain location=314-335; Score =0.4; E_value=0.53; Accession=PF07649.4; Description=C1-like domain
  Pfam annotation: Domain name=C1_3; Domain location=383-409; Score =0.5; E_value=0.52; Accession=PF07649.4; Description=C1-like domain
  Pfam annotation: Domain name=C1_3; Domain location=424-459; Score =11.3; E_value=0.028; Accession=PF07649.4; Description=C1-like domain
  Pfam annotation: Domain name=PHD; Domain location=384-427; Score =58.3; E_value=3e-14; Accession=PF00628.21; Description=PHD-finger
  Pfam module annotation: Pfam domain module=Acetyltransf_1::C1_3::C1 _3::C1_3::PHD; Domain location=579-654::314-335::383-409::424 -459::384-427
KKSKRMFDIDATGLDGLFSLSVMQSTTENVFGHGTDVATMFMSDTGIINASEEHGMCSRVGTLKNHMKAELKSEKLDEDDQSNKREMFLSSESKHLNMLQSVRTEELRDCITFSETHCIARESQSDATASCPDDKVQEKMLPSHGQFSEDSQNGPTGSPVPAKLSHECTATVLCTDPTRDLKACKTATTKMKPKGWEKYMKKRPRELRISDEDLLITAIVKNKDLVSCHKFAAGFPGAKKFKKLKNHKKCNKLLSKTGKAGTNLLGGKRVCLARKTVICWLIATGFLTVKDVIQYRDPKSNKVVKDGLVTWEGIVCNCCQKTLSVSDFMAHAGCSNPKSSLGLFLESGKSYTLCQVEAWSAEFMSRRSNACGRKVEAVDENDDTCGFCGDGGELLCCDNCPSTYHQTCLSAKELPEGSWYCHNCTCQICGRPVSEKEVSTFSAIFKCLQCGDSYHDTCIEQEKLPSEGQISDTWFCGKYCKEIFIGLRSHVGTDNILDNELSWSILRCNGDGQKLHSVQKIAYFAECNTKLAVALTLLEECFIRMVDPRTGVDMIPHVLYSKGSNFARVDYQGFYTVILEKGDEILCAASIRVHGTKAAELPFIATSVDHRRQGMCRILMNIIEKMLISFNVKMLVLSAIPELVSTWVSGFGFKPIEDAERKQLHNVNLMLFPGTSLLTKRLDGFSMATKPGEXKDLQEIYGLPNGKSREHFELHDLDLSGKEFKAEVSVSGPFRTLKHEWGSAAWFQSTKLAVGEV

SEQ ID NO: 102948 - protein, 49 aa, Setaria italica
  Transcript Sequence Number=SeqID_36974
QATKLYSRHSSSGDVGELANRTTRRLGWGGCLSSWRGIAAAGGAVYVTG

SEQ ID NO: 102949 - protein, 198 aa, Setaria italica
  misc_feature (195)..(195): Xaa can be any naturally occurring amino acid
  Transcript Sequence Number=SeqID_36975
NTKGSGPPQSKGDIFRDLSKSSFTSEHSKPAVLHEKTGQLSRISDAVQNTVKDTPKVASQPPAFSPTPVTQTNSYSIKPTVSSSATSASSGMQASAAKTSDILSSSMQKSTPKVSPLVPEDNVSSSLQSIPTPVKDLSTGLGKNAAKPETLTSEVTRTIVPASMASVISTTESKPSSPPTTGANLPSTPVPAPKXAPT

SEQ ID NO: 102950 - protein, 83 aa, Setaria italica
  Transcript Sequence Number=SeqID_36976
  Gene Ontology: Cellular component=nucleus
  Homolog annotation: Hit_ID=B6SJ26; Match level="QueryCoverage=96%, HitCoverage=81%, E-value=3e-33, Identity=86%"; Hit description=SWIb domain-containing protein
  Pfam annotation: Domain name=SWIB; Domain location=1-78; Score=74.4; E_value=4.3e-19; Accession=PF02201.10; Description=SWIBMDM2 domain
WWDLVNLPTALREFAGGRSQMSQLSFFLRVWSHIKEHNLQDPTNKNIVNCDEKLKTVLLGRSKVQLLELPMIVKLHFPKAPKS

SEQ ID NO: 102951 - protein, 697 aa, Setaria italica
  Transcript Sequence Number=SeqID_36977
  Gene Ontology: Mol. function=two-component response regulator activity; Cellular component=nucleus; Biological process=two -component signal transduction system (phosphorelay)
  Homolog annotation: Hit_ID=Q2RAB7; Match level="QueryCoverage=93%, HitCoverage=95%, E-value=0.0, Identity=75%"; Hit description=CCT motif family protein, expressed
  Pfam annotation: Domain name=CCT; Domain location=639-683; Score =89.3; E_value=1.3e-23; Accession=PF06203.6; Description=CCT motif
  Pfam annotation: Domain name=Response_reg; Domain location=53-167; Score=104.0; E_value=5.1e-28; Accession=PF00072.16; Description =Response regulator receiver domain
  Pfam module annotation: Pfam domain module=CCT::Response_reg; Domain location=639-683::53-167
TPTPTPPVGLVPAEGAGGGGRADGGASSSPAAAANGRAVVRWDQILPRRSLQVLLVEHDDCTRQVVTALLRKCGYRVAAVADGMKAWEVMRGRAYAFDLVLTEVAMPTLSGIQLLARIVAADECKNIPVIMMSSQDSIGTVLKCMHKGAVDFLVKPVRKNELRNLWQHVWRRHAMNSQTNGSENNAASNHISANVANGSKAGENSDEESDAQSFGSKRETEIQSVEKLPDIRADEGAGPSRKIKLQNESYDGVNTKLHASKDSDDAPSGSEKNVRSKGLNGITSAKVAEQIMDNALRIADASSRRPSNLGKDLAMARPTADVQRKSSVMESNAVTENNLGEKSKGAAISHAKSCPSQFLETNLGKQHHLNGYKIQEFREKDIFNHSNSSAFSRYGNKRIEPSAEHQFSPSLCITHQEPVHDKDPVSQPSGVLPPHEHNTGESTRQARIPLDSSTEGAAVLCSSSAREDAGASSSSHRQDSMSHPSYGFIPLPIPVGAAMPYHYGAILQPVYYSQAPHMHCDSAGINKAAIQHASGQSNYHENPSKPSQVDEHKQSEENQQLHHSRQILRESEPIDLTRGHLEHINQSASCSQDIRKGSGCTGSGETDIHTNTGVALESGNESGIQNCYNNGLDSDRSRREAALMKFRLKRKDRCFEKKVRYHSRKKLAEQRPRVKGQFVSQKLKSATTGDAETDFDS

SEQ ID NO: 102952 - protein, 97 aa, Setaria italica
  Transcript Sequence Number=SeqID_36978
  Gene Ontology: Mol. function=protein binding; Cellular component =histone methyltransferase complex; Biological process=embryonic development ending in birth or egg hatching
  Homolog annotation: Hit_ID=B6SH81; Match level="QueryCoverage=98%, HitCoverage=16%, E-value=5e-51, Identity=94%"; Hit description =Retinoblastoma-binding protein-like
  Pfam annotation: Domain name=WD40; Domain location=14-51; Score=27.1; E_value=7e-05; Accession=PF00400.24; Description=WD domain, G-beta repeat
  Pfam annotation: Domain name=WD40; Domain location=57-95; Score=18.8; E_value=0.022; Accession=PF00400.24; Description=WD domain, G-beta repeat
  Pfam module annotation: Pfam domain module=WD40::WD40; Domain location=14-51::57-95
MNAPVVDPYQGEFPETIEEYLHHGTMKCIAFNRTGTLLAAGCSNGSCVIWDFETRGLAREFRDKDCTAPITSVSWSRYGHRLLASATDKSLTLWDVS

SEQ ID NO: 102953 - protein, 89 aa, Setaria italica
  Transcript Sequence Number=SeqID_36979
LRVPVCRGSRDGRTREAKQATGSKKRRAVSGKASPAAAGCSKIADASADVGVAPGCPPSLCLTRRPRPELRMREPSSSAPPAPLGLART

SEQ ID NO: 102954 - protein, 102 aa, Setaria italica
  misc_feature (80)..(80): Xaa can be any naturally occurring amino acid
  misc_feature (92)..(92): Xaa can be any naturally occurring amino acid
  Transcript Sequence Number=SeqID_36980
  Gene Ontology: Cellular component=chloroplast
  Homolog annotation: Hit_ID=B9SMX6; Match level="QueryCoverage=100%, HitCoverage=14%, E-value=4e-31, Identity=61%"; Hit description =Pentatricopeptide repeat-containing protein, putative
GCMIDMFVRLGRLDDAFFFIKRTGFEPNEAIWSSLVAGCRSHGNMELAFYAANRLLELKPKGVETYVLLLNMYISSGRWXDVARVRKLMRQXDLGILRDRSW

SEQ ID NO: 102955 - protein, 62 aa, Setaria italica
  Transcript Sequence Number=SeqID_36981
  Subcellular localization annotation: CTP_CleavageSite=8; ConfidenceScore=5.18e-01
PRPRPRSRSSRRRARSPHPAQPGSAPRHGLAWAWPGSWPCTSARSRAAGQGGGSAVLFSFCS

SEQ ID NO: 102956 - protein, 40 aa, Setaria italica
  Transcript Sequence Number=SeqID_36982
LQFFMMSPYVLKTMSTDKKGLYSISFKVPDVMNLSYSLCL

SEQ ID NO: 102957 - protein, 66 aa, Setaria italica
  Transcript Sequence Number=SeqID_36983
  Homolog annotation: Hit_ID=Q10P98; Match level="QueryCoverage=60%, HitCoverage=14%, E-value=8e-14, Identity=82%"; Hit description =Senescence-associated protein, expressed
PRSYFQYSYIVDTNVLTFCRYGEQAGEATHNYLHATGNALGVAWAVFKIRKALDPKGNIEKVIDRQ

SEQ ID NO: 102958 - protein, 332 aa, Setaria italica
  Transcript Sequence Number=SeqID_36984
  Homolog annotation: Hit_ID=Q10P98; Match level="QueryCoverage=73%, HitCoverage=88%, E-value=1e-110, Identity=85%"; Hit description =Senescence-associated protein, expressed
  Pfam annotation: Domain name=Senescence; Domain location=1-315; Score= 414.6; E_value=1.6e-121; Accession=PF06911.4; Description=Senescence -associated protein
RDVAAVKLDAAHYFFSLHVPHTDHPDDKEEGDEGADEAEAALSYGLTVAGKGQEKVLEELDRALEEYTTFSVKQVEAAAKEKLEVMDSRAVAEITPEEAVGDKKEVVEEKSAAFWTTIAPNVDDYSSSVARLIARGSGQLVRGIIWCGDITAEGLRRGEDVVKKSVGPSAKPTQVKPSTLRRMKRARRVTKMSNRVANSILSGVLKVTGFVTSTVMNSKPAQKFFKLMPGEVILASLDGFGKVWDAVEVSGKNVMQTSSVVTTSVVTHRYGEQAGEATHNYLHATGNALGVAWAVFKIRKALDPKGNMKKSSIVSQAAHAVAKESITRQKKK

SEQ ID NO: 102959 - protein, 75 aa, Setaria italica
  Transcript Sequence Number=SeqID_36985
  Homolog annotation: Hit_ID=B6SWV7; Match level="QueryCoverage=100%, HitCoverage=13%, E-value=3e-22, Identity=72%"; Hit description =Transposon protein CACTA, En/Spm sub-class
  Subcellular localization annotation: CTP_CleavageSite=30; ConfidenceScore=5.37e-01
DIRQNLGGIRGASLFPHSIRSTNTKGRPARSSDPGHSVSNGDRCFTDNGSSNGHFSGDSSGALSHNGGSSIGSPD

SEQ ID NO: 102960 - protein, 213 aa, Setaria italica
  Transcript Sequence Number=SeqID_36986
  Homolog annotation: Hit_ID=B6SWV7; Match level="QueryCoverage=99%, HitCoverage=36%, E-value=7e-85, Identity=71%"; Hit description =Transposon protein CACTA, En/Spm sub-class
  Subcellular localization annotation: CTP_CleavageSite=34; ConfidenceScore=5.63e-01
QPPLKKMSVPAITRSKFSDVQSKASSPTNGHQSRQSERSVLEGQTTRPSRSVTAADNGFGRTISRKSLDMAIRHMDIRQNLGGIRGASLFPHSIRSTNTKGRPARSSDPGHSVSNGDRCFTDNGSSNGHFSGDSSGALSHNGGSSIGSPDRESTGTKEVLSELDIYANSRYEAMLLKEDTKNTSWLHSVDDKSDQSPVFDHRFEPLPEPFGPL

SEQ ID NO: 102961 - protein, 113 aa, Setaria italica
  Transcript Sequence Number=SeqID_36987
  Gene Ontology: Mol. function=oxidoreductase activity; Biological process=cellular aromatic compound metabolic process
  Homolog annotation: Hit_ID=B6U1E2; Match level="QueryCoverage=100%, HitCoverage=25%, E-value=6e-51, Identity=84%"; Hit description=FscO
LHEALPASATVLWGHQFLSFEAPDDTRVGVIATARVLRTGKTVDVAGDILVAADGSTSSIRRRFLPDLKLRYSGYCAWRGVFDFAGKESSDTMIGIRRAYPELGNCLYFDLAY

SEQ ID NO: 102962 - protein, 91 aa, Setaria italica
  Transcript Sequence Number=SeqID_36988
SFMDVNIVVLNFHTIVDNCFCPVFSCFKTFLWVYELSFEFALVAWITLLVISLVIFVTILCTHYFLLHVLTYVLLDSICCLGDCIGIVKLC

SEQ ID NO: 102963 - protein, 70 aa, Setaria italica
  Transcript Sequence Number=SeqID_36989
  Subcellular localization annotation: CTP_CleavageSite=46; ConfidenceScore=5.60e-01
MYGLPSAARPQLPPQFACFASSSVPRVRAAPAYCCASLKQARPSAVAAAVTGRAAAPLLAAALLLAAAPY

SEQ ID NO: 102964 - protein, 32 aa, Setaria italica
  Transcript Sequence Number=SeqID_36990
MMQCLNHYGSDISKCQFYLDMLNECRRGGATA

SEQ ID NO: 102965 - protein, 127 aa, Setaria italica
  misc_feature (47)..(47): Xaa can be any naturally occurring amino acid
  misc_feature (60)..(60): Xaa can be any naturally occurring amino acid
  Transcript Sequence Number=SeqID_36991
  Subcellular localization annotation: CTP_CleavageSite=16; ConfidenceScore=5.32e-01
MPRRSSGRSASRPAPRAAPLRNPPQPARQAPPPAPAQSGGGSILGGXLGSTIAQGMAFGXGSAMAHRAVDAVMGPRTIQHETVVSEAAAAAPTTVTRVIPMCRLVSSSSSPTCVGLLFPVVAHLCFD

SEQ ID NO: 102966 - protein, 86 aa, Setaria italica
  Transcript Sequence Number=SeqID_36992
  Gene Ontology: Mol. function=protein binding
  Homolog annotation: Hit_ID=B6T269; Match level="QueryCoverage=56%, HitCoverage=35%, E-value=2e-12, Identity=75%"; Hit description =p8MTCP1
RLSCRRLIGGIGSTIAQGMAFGTGSAMAHRAVDAVMGPRTIQHETVVSEAAAAAPAAPMMNGADSCGSLGGLGSRTTTAALVQHVK

SEQ ID NO: 102967 - protein, 58 aa, Setaria italica
  Transcript Sequence Number=SeqID_36993
MSSQKTFIIHKYLAEVGFSEEQREEQDAMLTFLPIQNGEHKHLIFYKQMVQFIIERAN

SEQ ID NO: 102968 - protein, 54 aa, Setaria italica
  Transcript Sequence Number=SeqID_36994
ISMNFSFHLLKRNIFPTQQLILLRMCTHMTFKNTTVKVLYFILEEAILLFCCPV

SEQ ID NO: 102969 - protein, 82 aa, Setaria italica
  Transcript Sequence Number=SeqID_36995
HGCDDDHRAEAAADAGDDVAAADIVGGPRADTLFWFDEAVFEDTALLLGDEGRDHLYTPTAAARCLQQVESTFPMEEESARI

SEQ ID NO: 102970 - protein, 150 aa, Setaria italica
  misc_feature (137)..(137): Xaa can be any naturally occurring amino acid
  Transcript Sequence Number=SeqID_36996
KLLYAYLTHFVPARTPPGRMVVGAGTLLHRTANDGVDAAESFARAEFLLHTLVQFWLVGDDFSPLPVQACQALGLRLPSRARAELSERPPSPGLGDAVKLLVMYLNCCDGHILVDGDARMLSEGIPVWSGVLDTQAXLWNPLIQRPLYRF

SEQ ID NO: 102971 - protein, 130 aa, Setaria italica
  Transcript Sequence Number=SeqID_36997
  Homolog annotation: Hit_ID=Q10FJ2; Match level="QueryCoverage=99%, HitCoverage=32%, E-value=1e-52, Identity=73%"; Hit description =Pleckstriny domain-containing protein, putative, expressed
  Pfam annotation: Domain name=PH; Domain location=31-130; Score=33.6; E_value=7.8e-07; Accession=PF00169.21; Description=PH domain
MASNGSSTVVGEMQSSLERVRRQLSSTSTRQLLQGPLLKRSDTLRKWNERWVILDPTTGKIEYKVRRSDKDVRGVIVFDSTSTVTLSPMNFHGLAKYDGCCFYIGTPQKKEYFLCAETPSAARAWVSTLH

SEQ ID NO: 102972 - protein, 176 aa, Setaria italica
  misc_feature (70)..(70): Xaa can be any naturally occurring amino acid
  misc_feature (93)..(93): Xaa can be any naturally occurring amino acid
  misc_feature (134)..(134): Xaa can be any naturally occurring amino acid
  Transcript Sequence Number=SeqID_36998
  Gene Ontology: Mol. function=glutamate-cysteine ligase activity; Cellular component=chloroplast; Biological process=glutathione biosynthetic process
  Homolog annotation: Hit_ID=Q6Z3A3; Match level="QueryCoverage=100%, HitCoverage=39%, E-value=3e-86, Identity=81%"; Hit description =Glutamate--cysteine ligase B, chloroplastic
  Pfam annotation: Domain name=GCS2; Domain location=1-175; Score=36.9; E_value=1.1e-10; Accession=PF04107.5; Description=Glutamate-cysteine ligase family 2(GCS2)
GRYEIMRNYMPKVGTLGHDMMFRTCTVQVNLDFSSEQDMIRKFRAGLALQPIATAIFANFPFKEGKPNGXLSLRRFEQYVDYALDVPMYFVYXNKKYIDCTGMSFRDFMQGKLPQVPGELPTLNDWENHLTTIXFPEVRLKRYLEMRGADGGPWTETLCALPAFWVGLLYDEESLQ

SEQ ID NO: 102973 - protein, 694 aa, Setaria italica
  Transcript Sequence Number=SeqID_36999
  Gene Ontology: Mol. function=transferase activity, transferring glycosyl groups; Cellular component=integral to membrane
  Homolog annotation: Hit_ID=Q2L3C5; Match level="QueryCoverage=97%, HitCoverage=95%, E-value=0.0, Identity=73%"; Hit description =Glycosyl transferase-like protein
  Pfam annotation: Domain name=Glyco_transf_8; Domain location=356-668; Score=375.3; E_value=1.1e-109; Accession=PF01501.12; Description =Glycosyl transferase family 8
CRGAVLLLLLASVLAPLVLYGGSPVSVAPLPDSTVASAAFDREDAPNLVWPQIAASLAKDLTIERLGEHKNRVLSATDHWQAVEGASSRSRVPGKPDASVLREESETRNADEEDAPVIEGNERARLGQGGVIKQVVGSEASADGFGEPRDGKEAVLQNGEEVGIKLLHPIDAEHKEGSDEAGENIVSGMHTVGNLNSSSSETRDATTSRKHQTRVSNNNSARSTANRSAGRSTTLPDATIHIIKDQLTRAKTYLGFVASRGNHGFARELRARMRDIQQALGDATSDRQLPQNVHSKIRAMEQTLVKVRKIHDSCSGAVNRLRTVLHSTEQQLESNKRQANYLAQVAAKSLPKGLHCLTLRLTNEYYFTNPKNKDFPYAEKLEDPKLYHYALFSDNVLAAAVVVNSTLVHAKKPENHVFHIVTDRLNYAAMKMWFLANPLGKAAIQVQNIEEFTWLNSTYSPVLKQLESQFMIDYYFRNGHARPDENPKFRNPKYLSILNHLRFYLPEIFPKLNKVLFLDDDTVVQRDLTALWLVDLKGKVNGAVETCRETFHRFDKYLNFSNPLIAKNFDPHACGWAYGMNMFDLSEWRKQNITEVYHTWQKLNENRLLWKLGTLPAGLVTFWNRTFPLDRSWHQLGLGYNPNVNEKDIRRAAVIHYNGNLKPWLEIGLPKYRKYWSRHVDFDQVFLRECNINP

SEQ ID NO: 102974 - protein, 85 aa, Setaria italica
  Transcript Sequence Number=SeqID_37000
  Homolog annotation: Hit_ID=C4UFG6; Match level="QueryCoverage=97%, HitCoverage=19%, E-value=2e-13, Identity=45%"; Hit description =Virulence effector protein
PMSIPPEALKSGSTRFLDGNWRAGAGIQDAKTGKPLQLGYDFKDGKGQVSIRRDDGVRCAGPVNATVQGGSLAIASQGQATCSED

SEQ ID NO: 102975 - protein, 273 aa, Setaria italica
  Transcript Sequence Number=SeqID_37001
MAAASDRAEVDTARPFRSVKEAVAVFGDRITVGESHSRHSSSAAATATPNANASASANSMPTASAKHEASSSSSTMTFSPNPMAEAEEEIMPATVPMYSAPSSPPSLASSPSPIKARGDDRDHEVGGLVVMRSIRKLEAEVAETRHEVAQLRKRGNEMEMAVASLNAQLHRGLSKLAEMEADRAAAAARRSIGGDTDVASTLRSERWGDKLGAGEYLPSFSHALSLGEIDDAELMGSRSRKAQKVKPIVPLIGDILFSKRKSTKEKVDDGFYS

SEQ ID NO: 102976 - protein, 88 aa, Setaria italica
  Transcript Sequence Number=SeqID_37002
  Homolog annotation: Hit_ID=B6SW12; Match level="QueryCoverage=72%, HitCoverage=10%, E-value=5e-18, Identity=75%"; Hit description =Transposon protein Mutator sub-class
NEPGNVTPGTNELGRRRRAYRRAASKIATLRMKLAEEDEDHDADEFARKAGLARSASLRFRAFCAIPAGKPKRVLSKLWPIGRSGVSH

SEQ ID NO: 102977 - protein, 115 aa, Setaria italica
  misc_feature (6)..(6): Xaa can be any naturally occurring amino acid
  misc_feature (49)..(49): Xaa can be any naturally occurring amino acid
  misc_feature (68)..(68): Xaa can be any naturally occurring amino acid
  misc_feature (93)..(93): Xaa can be any naturally occurring amino acid
  misc_feature (107)..(107): Xaa can be any naturally occurring amino acid
  Transcript Sequence Number=SeqID_37003
  Gene Ontology: Mol. function=DNA-directed DNA polymerase activity; Cellular component=apoplast; Biological process=nucleobase, nucleoside, nucleotide and nucleic acid metabolic process
  Homolog annotation: Hit_ID=Q0E0Y5; Match level="QueryCoverage=100%, HitCoverage=5%, E-value=5e-51, Identity=88%"; Hit description=DNA polymerase
FYLNSXKAPVTEEFPGRRVKKILPHGRPCFNLIEVVTTEEQFRAEGKKXLAAHLAEPDVEGIYETKFXPELNAVLQIGCVCKVDNLHKKRSIXQDGWDLAELQMKTXAECSYLEQ

SEQ ID NO: 102978 - protein, 116 aa, Setaria italica
  Transcript Sequence Number=SeqID_37004
GAAGDVQIKGSKENGQPEQQQQQQPSGSEALEMPATLLPRDIDWSEHFSFFTSLGGFGGSSDGARGLTSIGLSNSESRPDSVTQRGLDNGAEERVEELTLKNCINTDVQPEVSAGG

SEQ ID NO: 102979 - protein, 69 aa, Setaria italica
  Transcript Sequence Number=SeqID_37005
SSPAASPPPLSCYYLHGDGGGHRPATAQLPPHPFLDLVCVTSKAREKCYSLLYFACVYSSFDFCWLKNN

SEQ ID NO: 102980 - protein, 28 aa, Setaria italica
  Transcript Sequence Number=SeqID_37006
MAVAFPAHIMALSKVQRLYDACDVVFSS

SEQ ID NO: 102981 - protein, 77 aa, Setaria italica
  misc_feature (70)..(70): Xaa can be any naturally occurring amino acid
  Transcript Sequence Number=SeqID_37007
  Gene Ontology: Mol. function=methyltransferase activity; Cellular component=nucleus; Biological process=intracellular signaling cascade
  Homolog annotation: Hit_ID=B9IA87; Match level="QueryCoverage=79%, HitCoverage=5%, E-value=3e-11, Identity=49%"; Hit description=SET domain protein (Fragment)
RIERNKNFTNTPLEEMRSLNVNIGISNQDKKGHDELLALAVSFHDYQGLDSGDLVWAKITGHAMWPAVVXVDESDVP

SEQ ID NO: 102982 - protein, 47 aa, Setaria italica
  Transcript Sequence Number=SeqID_37008
  Gene Ontology: Mol. function=protein serine/threonine kinase activity; Biological process=protein amino acid phosphorylation
RFLELALQCVDDFPSKRPNMLQVVATLRELDDAPPSSNEPAQSAACD

SEQ ID NO: 102983 - protein, 168 aa, Setaria italica
  Transcript Sequence Number=SeqID_37009
  Gene Ontology: Cellular component=cytoplasm; Biological process =embryonic development ending in birth or egg hatching
  Homolog annotation: Hit_ID=Q6PH38; Match level="QueryCoverage=75%, HitCoverage=54%, E-value=1e-32, Identity=44%"; Hit description=E2f -associated phosphoprotein
  Pfam annotation: Domain name=Eapp_C; Domain location=42-166; Score =227.1; E_value=4.5e-65; Accession=PF10238.1; Description=E2F -associated phosphoprotein
MEPEKPEEAAKQPMDAEAGDPVDPRELVSSDDEIDYSVEPEFYDPDLDDVDERWMNRQRKGHTSDAVLSCPACFTTLCVDCQRHEKYVNQYRAMFVRNCKVKTDQILREGKSKRKNRKGKAAEPSTTSEAESKGQAYHPVCCEVCSTEVGVFDEDEVYHFFNVIPSNS

SEQ ID NO: 102984 - protein, 83 aa, Setaria italica
  Transcript Sequence Number=SeqID_37010
  Pfam annotation: Domain name=Eapp_C; Domain location=42-82; Score= -24.8; E_value=0.0009; Accession=PF10238.1; Description=E2F -associated phosphoprotein
MEPEKPEEAAKQPMDAEAGDPVDPRELVSSDDEIDYSVEPEFYDPDLDDVDERWMNRQRKGHTSDAVLSCPACFTTLCVDCQR

SEQ ID NO: 102985 - protein, 145 aa, Setaria italica
  Transcript Sequence Number=SeqID_37011
  Gene Ontology: Mol. function=transferase activity, transferring glycosyl groups; Biological process=metabolic process
  Homolog annotation: Hit_ID=C4MF46; Match level="QueryCoverage=99%, HitCoverage=28%, E-value=1e-38, Identity=55%"; Hit description=UDP -glycosyltransferase
RRTDTEEQEWLPDGFAELLARGDRGLIIRGWAPQMLILNHSAVGVFVTHCGWNSTLEAVSAGVPMVTWPRYADQFYNEKVVVELLNVGVGVGSTDYASKLEARRVIGGEVVAEAIGRVMGNGEEGEAIRERARVLGEKARLAVEK

SEQ ID NO: 102986 - protein, 60 aa, Setaria italica
  Transcript Sequence Number=SeqID_37012
VSSTCAKSLLLPLRPNEEVFSSSMPTRCANKKENHSCSTPHAARQCLQCANTSFSLSLIQ

SEQ ID NO: 102987 - protein, 83 aa, Setaria italica
  misc_feature (71)..(71): Xaa can be any naturally occurring amino acid
  Transcript Sequence Number=SeqID_37013
  Gene Ontology: Mol. function=hydrolase activity, hydrolyzing O -glycosyl compounds; Biological process=carbohydrate metabolic process
  Homolog annotation: Hit_ID=B4FSU9; Match level="QueryCoverage=60%, HitCoverage=8%, E-value=2e-14, Identity=78%"; Hit description =Hydrolase, hydrolyzing O-glycosyl compounds
MARLLVAAACLAAALALACQCHEAAEGAAALPKSLSTSSRWVVDERGRRVKLACVNWASHLEPMLAEGLGXSPLGAIAAGVAA

SEQ ID NO: 102988 - protein, 136 aa, Setaria italica
  misc_feature (105)..(105): Xaa can be any naturally occurring amino acid
  Transcript Sequence Number=SeqID_37014
  Gene Ontology: Mol. function=nucleoside-triphosphatase activity; Cellular component=membrane; Biological process=transport
  Homolog annotation: Hit_ID=B9HUH9; Match level="QueryCoverage=80%, HitCoverage=10%, E-value=3e-39, Identity=69%"; Hit description=White- brown-complex ABC transporter family (Fragment)
RALRHEALEGVNVCAVVHQPSYTLFNMFDDFVLLARGGLIAYHGPVSEVEIYFAGLGINVPDRENPPDYFIDILEGIVKTKMRGNVTPKHLPLLWMLHNGYEVPXYFQKDLENINTIRELYTVRSISSERSLAEQS

SEQ ID NO: 102989 - protein, 291 aa, Setaria italica
  Transcript Sequence Number=SeqID_37015
  Gene Ontology: Mol. function=binding; Cellular component=plasma membrane; Biological process=cellular iron ion homeostasis
  Homolog annotation: Hit_ID=B6U2D5; Match level="QueryCoverage=96%, HitCoverage=39%, E-value=5e-51, Identity=40%"; Hit description =Calmodulin-binding protein MPCBP
  Pfam annotation: Domain name=TPR_1; Domain location=140-173; Score =5.4; E_value=1.3; Accession=PF00515.20; Description=Tetratricopeptide repeat
  Pfam annotation: Domain name=TPR_1; Domain location=174-207; Score =25.9; E_value=0.00016; Accession=PF00515.20; Description =Tetratricopeptide repeat
  Pfam annotation: Domain name=TPR_1; Domain location=244-277; Score =17.4; E_value=0.048; Accession=PF00515.20; Description =Tetratricopeptide repeat
  Pfam annotation: Domain name=TPR_1; Domain location=51-84; Score=4.6; E_value=1.6; Accession=PF00515.20; Description=Tetratricopeptide repeat
  Pfam annotation: Domain name=TPR_2; Domain location=140-173; Score =5.6; E_value=6.9; Accession=PF07719.9; Description=Tetratricopeptide repeat
  Pfam annotation: Domain name=TPR_2; Domain location=16-49; Score=6.8; E_value=4.8; Accession=PF07719.9; Description=Tetratricopeptide repeat
  Pfam annotation: Domain name=TPR_2; Domain location=174-207; Score =11.4; E_value=1.3; Accession=PF07719.9; Description=Tetratricopeptide repeat
  Pfam annotation: Domain name=TPR_2; Domain location=244-277; Score =18.4; E_value=0.031; Accession=PF07719.9; Description=Tetratricopepti de repeat
  Pfam annotation: Domain name=TPR_2; Domain location=87-120; Score =4.9; E_value=8.3; Accession=PF07719.9; Description=Tetratricopeptide repeat
  Pfam module annotation: Pfam domain module=TPR_1::TPR_1::TPR_1::TPR _1::TPR_2::TPR_2::TPR_2::TPR_2::TPR_2; Domain location=140-173::174 -207::244-277::51-84::140-173::16-49::174-207::244-277::87-120
ALRLLQDAAAMAEYNPEILYSLAWENAMQRKLNAAVESATECLEMVMGGSVSAWKLLILVLSAQQNLQEAEAVADFAMDEAEKDDQLDILRLKAQIQASRGQFKSAVESFQVLLSTIQAKKEVWKSTTCKEVKSLQKLEMDAWLDLASIYSKLEAWHDSNVCLDKAISIDLFYPKCWHIRGLLLEAQSLHQEALMAFSFALSIDPDYVPGMVCMAGILRNIGGKSLSIARTFLRNALRLEPTNHRAWLSLGLVLKAEGSLVEAADCFQAAYELRELSPIQDFSEQLPIMLH

SEQ ID NO: 102990 - protein, 264 aa, Setaria italica
  Transcript Sequence Number=SeqID_37016
  Gene Ontology: Cellular component=anchored to membrane
  Homolog annotation: Hit_ID=Q06I96; Match level="QueryCoverage=99%, HitCoverage=99%, E-value=1e-77, Identity=57%"; Hit description =Fasciclin-like protein FLA10
  Pfam annotation: Domain name=Fasciclin; Domain location=62-194; Score= 103.3; E_value=8.4e-28; Accession=PF02469.14; Description=Fasciclin domain
MMGFKAGIFTVTMLVIVLSSPAIAQKAKSPPAPASPILPPSPAPAPAPHHVDLADLLSVAGPFHTFLDYLQKTNVIETFQNQANNTKEGITVFVPKDSAFAALKKTTFANLTQDQLKSLILYHAFPKYYSLAEFNKLSTLNPVTTFAGSQYTLNITYDMGTVQVESMWSNPKISSSVYSTRPVAVYEVNKVLLPMQIFKSDPPLAPAPAPAPDAKASDVAPSPTSGKAASAKAKAEEKNSSYQVSVSIVNYLVLAVSGGLMLLW

SEQ ID NO: 102991 - protein, 78 aa, Setaria italica
  misc_feature (32)..(32): Xaa can be any naturally occurring amino acid
  Transcript Sequence Number=SeqID_37017
  Gene Ontology: Mol. function=catalytic activity; Biological process =lipoate biosynthetic process
  Homolog annotation: Hit_ID=Q9SXP7; Match level="QueryCoverage=80%, HitCoverage=25%, E-value=6e-17, Identity=65%"; Hit description =Octanoyltransferase
NIDPDLGYFDHIVPCGIAGKEVTSLRREVGTXVELPADEVIHDQLVRCLARTLGFTDVEFKDDSESGDMIGAAAATRS

SEQ ID NO: 102992 - protein, 113 aa, Setaria italica
  misc_feature (9)..(9): Xaa can be any naturally occurring amino acid
  misc_feature (90)..(90): Xaa can be any naturally occurring amino acid
  Transcript Sequence Number=SeqID_37018
  Gene Ontology: Mol. function=protein serine/threonine kinase activity; Cellular component=ubiquitin ligase complex; Biological process=protein amino acid phosphorylation
  Homolog annotation: Hit_ID=Q9SWX8; Match level="QueryCoverage=69%, HitCoverage=11%, E-value=9e-11, Identity=42%"; Hit description =Receptor-like kinase CHRK1
MEEIDRLQXKLKELQGEGHNHGVRSLSPRQMAASLKRKSLSEPKYPELQIPENIEEFSMSQIAKATDNFHSRNFIGEGGYGPVYKGNFGXNDQVAIKMLKPHGRQGFPEYQQE

SEQ ID NO: 102993 - protein, 357 aa, Setaria italica
  Transcript Sequence Number=SeqID_37019
  Gene Ontology: Mol. function=oxidoreductase activity; Biological process=metabolic process
  Homolog annotation: Hit_ID=B6SU70; Match level="QueryCoverage=98%, HitCoverage=97%, E-value=1e-176, Identity=88%"; Hit description=Cis -2,3-dihydrobiphenyl-2,3-diol dehydrogenase
  Pfam annotation: Domain name=DoxA; Domain location=125-250; Score= -17.6; E_value=0.077; Accession=PF07680.3; Description=TQO small subunit DoxA
  Pfam annotation: Domain name=KR; Domain location=54-221; Score=-72.6; E_value=0.0077; Accession=PF08659.2; Description=KR domain
  Pfam annotation: Domain name=adh_short; Domain location=53-221; Score= 89.9; E_value=9.2e-24; Accession=PF00106.17; Description=short chain dehydrogenase
  Pfam module annotation: Pfam domain module=DoxA::KR::adh_short; Domain location=125-250::54-221::53-221
MSKEAAVNVFLSCFMHVGLALVLLVYLPIAFVCRLLARVFVRPFARGEDLRGKVVLVTGASSGIGEHLVYEYARKGACVALVARTEIALRAVAKTARDLGAPDVLVVPADITKVDEAKRAVEETVAHFGKLNHLVANAGIWSSCFFEEITNITAFHNIIDLNFWGAVYPTYFALPYLKASRGNIVVTSSVAGRVPTARMSFYNASKGAVIRFYETLRAELGSHVRVTILMPGYVVSNLTKGKGLQKDGHVGIDEEARDINVGPLPVGKTESLAAVVVASVQRGDYYVTWPGWYWPFHMVMCAAPELLDWFSRTFYVSSSGEPQDGGAALSKKILEAVGGKKFLYPKTIRSQAAMAAN

SEQ ID NO: 102994 - protein, 56 aa, Setaria italica
  Transcript Sequence Number=SeqID_37020
NGKRLKVTAAVADGGGGAETLRDCMCGLEAFLGLEHAGAEEGDDVEAWDAVDLMFA

SEQ ID NO: 102995 - protein, 126 aa, Setaria italica
  Transcript Sequence Number=SeqID_37021
  Subcellular localization annotation: CTP_CleavageSite=28; ConfidenceScore=5.63e-01
MQQQGSGGGTGSSSTPTATGGRRRVSVRGAAAASTGSASVWETRMRMDEVKGGVKVFSAGGADEPADEEGMRVYRRLRRNQSEGNAGAGTGAAAAAAKKRRNWKASEPVTAIGDLRKSRSDAAAAV

SEQ ID NO: 102996 - protein, 87 aa, Setaria italica
  Transcript Sequence Number=SeqID_37022
FMLSQTATQINPINIVRTIIAQNNSICCNVSGPVLHPKLQSAASDNVTASKLPFYYCLPSSNFFSGQCAALQDKKRQVDRPFTRPKL

SEQ ID NO: 102997 - protein, 310 aa, Setaria italica
  Transcript Sequence Number=SeqID_37023
  Gene Ontology: Mol. function=agmatine deiminase activity; Biological process=polyamine biosynthetic process
  Homolog annotation: Hit_ID=B6TJ57; Match level="QueryCoverage=99%, HitCoverage=83%, E-value=1e-163, Identity=86%"; Hit description =Agmatine deiminase
  Pfam annotation: Domain name=PAD_porph; Domain location=15-310; Score= 466.7; E_value=3.3e-137; Accession=PF04371.7; Description =Porphyromonas-type peptidyl-arginine deiminase
MMAKVMEGRPAKMGFRMPAEWEPHEQCWMGWPERPDNWRDNAGPAQQTFARAAIAISKFEPVTICASTKQYPYVHKLMEHHTNIRVIEINMNDSWFRDMGPTFITHKVESGITKQTIAGIDWQFNAWGGIYDDWSLDNDIAKKIVEIERIPRFSHKMVLEGGSIHVDGEGTCITTEECLLDPNRNPNMTKLEIENELKDFLGVTKVIWIPRGLYGDEDTNGHVDNLCCFIKPGVILLSWTDDEKDPQYERSAEALSVLTQSVDAKGRQIEVVKIHVPGPLYMTKEEADGVLSTGHAVAREPGTRLAASFV

SEQ ID NO: 102998 - protein, 107 aa, Setaria italica
  Transcript Sequence Number=SeqID_37024
  Homolog annotation: Hit_ID=Q01L01; Match level="QueryCoverage=72%, HitCoverage=42%, E-value=5e-28, Identity=73%"; Hit description =OSIGBa0148P16.4 protein
  Subcellular localization annotation: CTP_CleavageSite=36; ConfidenceScore=5.36e-01
MACCRALALHPLPASAPRARVSAHRLRPSSVRVRCCASAGDRAEPPQEAVLKAISQIASSKGRVAQTTNVIMGGTVTDDATDEWLVLDKKVNTYPTVRGFTAIGTGG

SEQ ID NO: 102999 - protein, 77 aa, Setaria italica
  Transcript Sequence Number=SeqID_37025
WSDAYTEVSSIDVARDSKGELFRCLGNPCRCNVTCETSLFIEEHNIFLPHRQLYSHRIGVMENGYSLRSPFQNCRLF

SEQ ID NO: 103000 - protein, 129 aa, Setaria italica
  Transcript Sequence Number=SeqID_37026
  Homolog annotation: Hit_ID=Q01L01; Match level="QueryCoverage=93%, HitCoverage=65%, E-value=8e-51, Identity=77%"; Hit description =OSIGBa0148P16.4 protein
  Pfam annotation: Domain name=DUF493; Domain location=38-129; Score =113.0; E_value=1e-30; Accession=PF04359.6; Description=Protein of unknown function (DUF493)
TLTTRSFLKTEIASSKGRVAQQTNVIMGGTVTDDATDEWLVLDKKVNTYPTVRGFTAIGTGGDDFVQSMVVAVESVIEERIPEGQISQKVSAKGKYVSVKIGPIRVVSSEQVQAVYNAMKKDMRMKFFL

SEQ ID NO: 103001 - protein, 73 aa, Setaria italica
  Transcript Sequence Number=SeqID_37027
TILPIEDQYSICAHMLILASLMHRPNQNTYSLGIIASNTLAWTLHILLEAKNCRAAPALPSLGLAALMPVFSI

SEQ ID NO: 103002 - protein, 126 aa, Setaria italica
  Transcript Sequence Number=SeqID_37028
  Gene Ontology: Mol. function=DNA-directed DNA polymerase activity; Cellular component=intracellular
QNYSHSSDMEVRGSSTFKLGFYANLNVQNIAQEWLVESRRLFYLRTVNSVTNNIFKGTTPLRAENLQNELSEDRRGLNPPSLHNLREFISCKSIVNRHENTELVRHSMINHVQSVFPVTTGFLTFL

SEQ ID NO: 103003 - protein, 148 aa, Setaria italica
  misc_feature (11)..(11): Xaa can be any naturally occurring amino acid
  Transcript Sequence Number=SeqID_37029
  Homolog annotation: Hit_ID=Q6ZIK7; Match level="QueryCoverage=87%, HitCoverage=32%, E-value=2e-13, Identity=48%"; Hit description =Protein Brevis radix-like 2
MLACIACSSNXGGEDGSRAAATPNGKDAVKSLTSQLKDMVLLKFTGSSKHHHYKGAGRTPSSFRSGGGRLPPPYPGFIDDTSFTPAASKVPGEDYYPRTGLAAAGGKDTLDVTKRQVGKSPGGSGWIPSAEGEAAADVAVEGTDDVPR

SEQ ID NO: 103004 - protein, 109 aa, Setaria italica
  Transcript Sequence Number=SeqID_37030
FRAEHYQMGHKRCPYKVAQDNMKGKSFHQKIKYRAPIYGRTTCNDTISNSRMIYLRRLPQMGTLCSEFRYIESRNNIRVPEQEPNQNNTMIQLQQTLLPQECCCRTQPN

SEQ ID NO: 103005 - protein, 50 aa, Setaria italica
  Transcript Sequence Number=SeqID_37031
  Gene Ontology: Mol. function=protein serine/threonine kinase activity; Biological process=protein amino acid phosphorylation
GKLTTNYIVTGSNVTLLEEIGRLSLKCVCLEIDQRPTMKEVAEHLRTLRT

SEQ ID NO: 103006 - protein, 159 aa, Setaria italica
  Transcript Sequence Number=SeqID_37032
  Gene Ontology: Mol. function=protein serine/threonine kinase activity; Biological process=protein amino acid phosphorylation
  Homolog annotation: Hit_ID=Q2R2M7; Match level="QueryCoverage=91%, HitCoverage=22%, E-value=1e-14, Identity=34%"; Hit description =Protein kinase domain containing protein
KLTGFSWARRLIKESNITAGDDVICSQLPSSGLNNDPIHDQRALLKLKTDVYQFGVLLLTLISRKNFIFYADHEPLILQFRAAYQADNRGRPLFDDDIAARAEDIALLEEIGRLSLKCVCLEIDQRPTMKEVAEHLRTLRTSWKKSLEEVLGQGSYTGV

SEQ ID NO: 103007 - protein, 304 aa, Setaria italica
  misc_feature (15)..(15): Xaa can be any naturally occurring amino acid
  misc_feature (115)..(115): Xaa can be any naturally occurring amino acid
  Transcript Sequence Number=SeqID_37033
  Gene Ontology: Mol. function=protein serine/threonine kinase activity; Biological process=protein amino acid phosphorylation
  Homolog annotation: Hit_ID=Q7XGR6; Match level="QueryCoverage=88%, HitCoverage=35%, E-value=3e-45, Identity=42%"; Hit description =Protein kinase domain containing protein
  Pfam annotation: Domain name=Pkinase; Domain location=46-302; Score= -44.5; E_value=7.7e-06; Accession=PF00069.17; Description=Protein kinase domain
  Pfam annotation: Domain name=Pkinase_Tyr; Domain location=42-302; Score=-80.0; E_value=2.1e-08; Accession=PF07714.9; Description =Protein tyrosine kinase
  Pfam module annotation: Pfam domain module=Pkinase::Pkinase_Tyr; Domain location=46-302::42-302
NSRMQLKKSLSIFKXRNRSNSKILSEPGNVRIFTQEELNDVTNYSYLLSGGTSGKVYKGTLEDNTVVAVRIFSEVLESFEQAFINGGMILSQIIHKNIIRLLGYCLDADCPAFVXYEYAAKGSLSDILDGHEYFPLHLRVKIAVQTAEALEYLHSSATGIIRHGYVVPSKILLDDNFTPKLTGFSWARRLIKESNITAGDDVICSQLPSSGLNNDPIHDQRALLKLKTDVYQFGVLLLTLISRKNFIFYADHEPLILQFRAAYQADNRGRPLFDDDIAARAEDIALLEEIGRLSLKCVCLEINQ

SEQ ID NO: 103008 - protein, 243 aa, Setaria italica
  Transcript Sequence Number=SeqID_37034
  Gene Ontology: Mol. function=electron carrier activity; Biological process=oxidation reduction
  Homolog annotation: Hit_ID=B6SZ78; Match level="QueryCoverage=87%, HitCoverage=42%, E-value=7e-36, Identity=35%"; Hit description =Cytochrome P450 CYP71W7
MEDKQLLAVAVAVLLVVVLCKRRKPRPNLPPGPWTLPVIGSLHHLMRSPLLFRVLRGLAHKHGPLMAIRLGEVPAVVASSVEAAQAILKTHDAAFADRFAPATFATAAYDATDLILSPYGERWRQLRKVVVQEMLTAARVQSFRHIREEEVARFLHDVAASAAAAAAVDFSKGVLKLVNDTFVRECVGSRCKYQDEYLDAIHGAIRLSSGITVADLYPSSKMMQMLGTAPRKALACRRRIDRI

SEQ ID NO: 103009 - protein, 205 aa, Setaria italica
  Transcript Sequence Number=SeqID_37035
  Gene Ontology: Mol. function=nucleotide binding; Biological process =defense response
  Homolog annotation: Hit_ID=Q69XW4; Match level="QueryCoverage=99%, HitCoverage=16%, E-value=4e-53, Identity=54%"; Hit description =Putative disease resistance protein
MEIYVNHEVCMSRTVFDNLKSLKKLKIYGIHRANTCSVIATLWDQNGLTVFPSSLRSLQLLHCYLQPSFLSKQLNNLSSLDTLCLMDCDTVEMPCPPVSLHHLRMLKQLNIYKCDWITSFEGSEALVSLEEMKVEQCYDLGYVPVVNNMPSIQKLHLIRCPQVMYLSNAGYHTALKELVIESCDGLSSLKGLRGLVSLTKLKVTS

SEQ ID NO: 103010 - protein, 277 aa, Setaria italica
  Transcript Sequence Number=SeqID_37036
  Pfam annotation: Domain name=DUF177; Domain location=127-271; Score =49.4; E_value=1.4e-11; Accession=PF02620.9; Description =Uncharacterized ACR, COG1399
PSFLSSSPSLLHSTPTSWRSRRRAIAAVSVQGDDDGFFTVDLDPDDYAAESESDDDSPWEGALVYRRDAAVHHLEHATTLERLGLGDLSSNDSRARAAAMGLGAPDQPQTPVLVSLDVTRRRARLRLDGIVRTVITLGCFRCAEPAPQGIFANFSLLLTEDPVEEPDVVDLGTIYEEDTASGAGTLGEDDQDVDWDDRLHFPAGDKEIDISKNIRDIIHLEITMDAVCSPSCKGLCLACGENLNTSSCSCSKEKPREPKNVKGPGPLKELLKPIQKR

SEQ ID NO: 103011 - protein, 82 aa, Setaria italica
  Transcript Sequence Number=SeqID_37037
SWSATMSYHWYSSCLRYWNRSIYHLDTIVHVKQDSPDAWIFVNILAVNVIIHTNKTAFQIDKYRYQAKRKDYCADMIQVTPL

SEQ ID NO: 103012 - protein, 144 aa, Setaria italica
  misc_feature (23)..(23): Xaa can be any naturally occurring amino acid
  Transcript Sequence Number=SeqID_37038
  Gene Ontology: Mol. function=N-acetyltransferase activity; Cellular component=cytoplasm; Biological process=metabolic process
  Homolog annotation: Hit_ID=Q2R3D8; Match level="QueryCoverage=100%, HitCoverage=73%, E-value=9e-71, Identity=91%"; Hit description =Acetyltransferase, GNAT family protein, expressed
  Pfam annotation: Domain name=Acetyltransf_1; Domain location=16-96; Score=77.6; E_value=4.4e-20; Accession=PF00583.16; Description =Acetyltransferase (GNAT) family
  Pfam annotation: Domain name=FR47; Domain location=22-106; Score= -3.8; E_value=0.035; Accession=PF08445.2; Description=FR47-like protein
  Pfam module annotation: Pfam domain module=Acetyltransf_1::FR47; Domain location=16-96::22-106
YFVYLWPQLTFLAFDAKEGKCVXGTVVCKMGEHRGAFRGYIAMLVVLKPYRGRGIATELVTRSIRVMMEFGCEEVTLEAEVTNKGALALYGRLGFIRAKRLYRYYLNGVDAFRLKLLFPHPDPGLPPMIVGSERDDQHIDSPYL

SEQ ID NO: 103013 - protein, 100 aa, Setaria italica
  Transcript Sequence Number=SeqID_37039
LRIEAQHFPQRVEYIGHHQSSAQQLLEVRSNPLSGHSMTPVGHHSYGQRGCHARLLLLLRSISFTSLSKLIPKVGSLISYSIMRIHTIKQPTSCMSFDVF

SEQ ID NO: 103014 - protein, 117 aa, Setaria italica
  Transcript Sequence Number=SeqID_37040
  Subcellular localization annotation: CTP_CleavageSite=73; ConfidenceScore=5.75e-01
TSDSAGNSSTWLSTASASRVPVDSLTADSPCLSTGDLSMTTRVPTLGTTTPGRSPRATKSAPSDATETGAIINSSSVKSIKGVASRVEVASAAAVGSPNLEPSSAGMTSSSSPTQSK

SEQ ID NO: 103015 - protein, 181 aa, Setaria italica
  Transcript Sequence Number=SeqID_37041
  Gene Ontology: Mol. function=nucleoside-triphosphatase activity; Cellular component=membrane; Biological process=transport
  Homolog annotation: Hit_ID=Q8GU83; Match level="QueryCoverage=96%, HitCoverage=12%, E-value=6e-63, Identity=65%"; Hit description=PDR -like ABC transporter
  Pfam annotation: Domain name=ABC2_membrane; Domain location=1-178; Score=66.1; E_value=1.3e-16; Accession=PF01061.16; Description=ABC-2 type transporter
  Subcellular localization annotation: CTP_CleavageSite=32; ConfidenceScore=5.07e-01
FIYKSKSLQVGLVAILTGTVFLRTHLSNDRTHANSYMSSLFFALTFLIVNGLPEMAMTINRLPVFYKQRDCCFYPSWAYAIPAFFTKIPVSLVESVTWTCITYYLIGYTPQASRFFRQLLVLFLMHSTALSLFRCVVSYCQTAPVSSVGSTLLLLFILLCGGFVIPQSSIPNCHKIYLIRP

SEQ ID NO: 103016 - protein, 230 aa, Setaria italica
  Transcript Sequence Number=SeqID_37042
DGDRDDKASRSNGSGSLERDHDRTSLVGSDHSSFKGSSSMSSGPDGAGHEDSMDHHGDTDSETCHLGVLVDTKVALNANMYDSQPGGQQIVGKNSIVKEQVNDPLTEKISEVREPKFPLDDGKDLLRDANQEFLPHLEDNNVAKKETIPLQSLLPLPVPKSPSESWLSRTLPSVTNKPPLPSFLGIQVHSKKQAPWATGHPKENDHKPSKPRQIRFADVVEKPISMGSEI

SEQ ID NO: 103017 - protein, 118 aa, Setaria italica
  Transcript Sequence Number=SeqID_37043
  Gene Ontology: Mol. function=catalytic activity; Cellular component =chloroplast envelope; Biological process=cellular metabolic process
  Homolog annotation: Hit_ID=Q9XEJ6; Match level="QueryCoverage=94%, HitCoverage=27%, E-value=2e-42, Identity=72%"; Hit description=MRNA binding protein
AAASKIFNCVSDRAVTLDGMARLCAAAAGAAVEIVHYDPAAVGVDAKKAFPFRSMHFYAEPRAAKEALGWASTTNLPEDLKERYAEYAASGRGDKAMAFDLDDKILGAVGIVPASATV

SEQ ID NO: 103018 - protein, 163 aa, Setaria italica
  Transcript Sequence Number=SeqID_37044
IGNYNIKVVEGKIIYQIIKGDQERYSDDSMSIPPGFGKSMDIISFKPRDEALRPRIITVQVTQVKKHNFTEDMCTTVMDELDSAQDVEVLYEHVDLRRSKRMKTQPDRFTCYDAPNFNRTYKKKEGNASSTKNENSQSDSSWDSPVQGESSDEEVLGNPWVKQ

SEQ ID NO: 103019 - protein, 219 aa, Setaria italica
  Transcript Sequence Number=SeqID_37045
  Homolog annotation: Hit_ID=B6U4T9; Match level="QueryCoverage=97%, HitCoverage=46%, E-value=1e-113, Identity=92%"; Hit description =EMB2756
  Pfam annotation: Domain name=DUF616; Domain location=1-217; Score =240.5; E_value=4.2e-69; Accession=PF04765.5; Description=Protein of unknown function (DUF616)
SFYDENGGFRVSAADKEYMRYCKVVVATCAFGGGDDLHQPIGMTENSFRKVCYVAFWDEVTRAAQEEEGNMIGEDNKIGLWRIILVSDLPFSDQRLNGKIPKLISHRLFPMARYSIWVDSKSQFRRDPLGVLEALLWRSNSSLALSEHGARSSLYDEAKAIVKKHKATPEEVKVQLDQYRQDGIPDEKRFNGKKALAEASVIVRDHGPSTNLFMLPLGF

SEQ ID NO: 103020 - protein, 113 aa, Setaria italica
  Transcript Sequence Number=SeqID_37046
LRYKVLQLCVWYNGTRNYCFAWSIHGGVFFFVPPPCLLTFLTIMVAVTIRRSSSLAASGSPAAHRRFIGSPTSCQRYHVSRRTPPSTRAAWVGGWRHWFLLFCELGHGHAPFV

SEQ ID NO: 103021 - protein, 60 aa, Setaria italica
  Transcript Sequence Number=SeqID_37047
SSQCLINKTTYSILCSLVLIISPHLSCIILARSPRLLTRAAETRVNVLFKMDSMHPPISE

SEQ ID NO: 103022 - protein, 468 aa, Setaria italica
  Transcript Sequence Number=SeqID_37048
  Gene Ontology: Biological process=intracellular transport
  Homolog annotation: Hit_ID=Q10FH4; Match level="QueryCoverage=90%, HitCoverage=99%, E-value=1e-127, Identity=59%"; Hit description =RanBP1 domain containing protein, expressed
  Pfam annotation: Domain name=Ran_BP1; Domain location=335-467; Score=- 24.9; E_value=3.5e-05; Accession=PF00638.10; Description=RanBP1 domain
MTTRGAKRAATSGPGAPDLPSKRVMDGPSFDVHRAESSHQHVMAGPATLDPRRAEAASKHVRALNNQFASWVQLQLQNHPAELWEDGVKDYISHASEIMEKFKDVVNWLRQNQAGSTVVSSPSPHKDEKANLPAVVSSPSPLKDEKTSPPTADDSKLLVQPSSDNSQKAPVMASSSSAFQSSSSPTPNLFSSPPKSQTPDFSGMFGGKKNTSGDSNKPAFQFGGNNVIFGDKKNASGDSSKPPFQFGGNNAIFDDKKSTSGDSSKPPFQFGVNNGFSTSNAPSLFSTKAAQSFSSQAPPLFSLNQQSVLSGNKNTSEASADADEDAEPEKPSSPSVKKAEEKGIVVVHEAKCKVYVKHDDATKGWKDIGVGQLSIRSKEGAEKASKESTPTIVIRNDVGKILLNALIYKGIKMNVQKNTVASIFHTSDAQSDESSGGTVVARTYLFRLKNEEEATKLSTAIKENAPSD

SEQ ID NO: 103023 - protein, 208 aa, Setaria italica
  misc_feature (10)..(10): Xaa can be any naturally occurring amino acid
  misc_feature (185)..(185): Xaa can be any naturally occurring amino acid
  Transcript Sequence Number=SeqID_37049
  Gene Ontology: Mol. function=protein serine/threonine kinase activity; Cellular component=plasma membrane; Biological process =protein amino acid phosphorylation
  Homolog annotation: Hit_ID=C0LGM5; Match level="QueryCoverage=80%, HitCoverage=53%, E-value=9e-37, Identity=41%"; Hit description =Leucine-rich repeat receptor-like protein kinase (Fragment)
  Pfam annotation: Domain name=LRR_1; Domain location=120-142; Score =11.4; E_value=2; Accession=PF00560.25; Description=Leucine Rich Repeat
  Pfam annotation: Domain name=LRR_1; Domain location=144-166; Score =13.9; E_value=0.65; Accession=PF00560.25; Description=Leucine Rich Repeat
  Pfam annotation: Domain name=LRR_1; Domain location=168-190; Score =15.1; E_value=0.3; Accession=PF00560.25; Description=Leucine Rich Repeat
  Pfam annotation: Domain name=LRR_1; Domain location=96-118; Score =12.5; E_value=1.2; Accession=PF00560.25; Description=Leucine Rich Repeat
  Pfam module annotation: Pfam domain module=LRR_1::LRR_1::LRR_1::LRR _1; Domain location=120-142::144-166::168-190::96-118
  Subcellular localization annotation: CTP_CleavageSite=35; ConfidenceScore=5.32e-01
LAGFVSSSLXLGVHLTSYHSFARNNFTGSVTSLPLAAEKLGMQGSYAFLADGNRLGGQLQPSIFDKCNNSRGFVVEVSDNLIAGAIPAEIGSLCSSLVVLGIAGNQLSGAIPSSIGELSYLVSLDLSRNGLGGEIPTSVKKLPHLERLSLAHNLLNGTIPADINQLHALRVLDLSSNLLTGVIPXALADLRNLTALLLDNNKLTGKIP

SEQ ID NO: 103024 - protein, 61 aa, Setaria italica
  Transcript Sequence Number=SeqID_37050
TTGVSTSAHASLTAKLLEYGNLVMPMGLWPEDADVPVVHLLQRPRVLLHVLQQVKNTRVQL

SEQ ID NO: 103025 - protein, 154 aa, Setaria italica
  Transcript Sequence Number=SeqID_37051
  Gene Ontology: Mol. function=carbonate dehydratase activity; Cellular component=extracellular region; Biological process=one-carbon compound metabolic process
  Homolog annotation: Hit_ID=B6T9W3; Match level="QueryCoverage=85%, HitCoverage=44%, E-value=2e-50, Identity=70%"; Hit description =Carbonic anhydrase
  Pfam annotation: Domain name=Carb_anhydrase; Domain location=2-154; Score=-71.6; E_value=1.4e-05; Accession=PF00194.13; Description =Eukaryotic-type carbonic anhydrase
RNKPTDQRTIMVRLQRTNAGRLVINGTVYHLRQLHWHTPSEHTVDGRRYVMELHLVHQTTENKTAVIGVFYETGNIPDLFLKTLEPSIRRIGDTRDREEPIGVVDPNGARATGSVYYRYMGSLTTPPCTEGVVWTVFKTVCLNLNAWMAASRVA

SEQ ID NO: 103026 - protein, 283 aa, Setaria italica
  misc_feature (198)..(198): Xaa can be any naturally occurring amino acid
  Transcript Sequence Number=SeqID_37052
  Gene Ontology: Mol. function=carbonate dehydratase activity; Cellular component=extracellular region; Biological process=one-carbon compound metabolic process
  Homolog annotation: Hit_ID=B6T9W3; Match level="QueryCoverage=83%, HitCoverage=81%, E-value=1e-97, Identity=70%"; Hit description =Carbonic anhydrase
  Pfam annotation: Domain name=Carb_anhydrase; Domain location=47-275; Score=92.4; E_value=1.6e-24; Accession=PF00194.13; Description =Eukaryotic-type carbonic anhydrase
MGPARRHLHHAVGAALLAAALLLSAAVPGATAQQETEDEHGFSYVPGSPNGPDRWGKINTLWAECSNGEMQSPIDLSDDRVTLVRSLGFLNYSYRPAEASIVNRGHDIQVKFSGDAGRLVINGTVYHLRQLHWHTPSEHTVDGRRYVMELHLVHQTTENKTAVIGVFYETGNIPDLFLKTLEPSIRRIGDTRDREEPXIGVVDPNGARATGSVYYRYMGSLTTPPCTEGVVWTVFKTVRHVAKYQLDILREAVADGYEDNARPLQEVNNRDISIFRPKPFIWK

SEQ ID NO: 103027 - protein, 131 aa, Setaria italica
  Transcript Sequence Number=SeqID_37053
FIEWKDDKCLAMFQEVAANIWEVVDNFKKKADDLQVDLLAEIQLRNEMYEEKEALMSEKEDWARQKENLIMEKERLERELTMRTLLAQTTCSTLENRIRSDGYDKKMLYGFILCLLGLMVAILFGLILKNK

SEQ ID NO: 103028 - protein, 81 aa, Setaria italica
  Transcript Sequence Number=SeqID_37054
  Gene Ontology: Mol. function=electron carrier activity; Cellular component=cytoplasm; Biological process=peptidyl-diphthamide biosynthetic process from peptidyl-histidine
  Homolog annotation: Hit_ID=B9RZF9; Match level="QueryCoverage=97%, HitCoverage=98%, E-value=2e-28, Identity=73%"; Hit description =Diphthamide biosynthesis protein, putative
  Pfam annotation: Domain name=zf-CSL; Domain location=5-59; Score =107.2; E_value=5.7e-29; Accession=PF05207.5; Description=CSL zinc finger
MSAYDEVEIEDMEWNAELKAYTYPCPCGDLFQITLEDLRLGEEIARCPSCSLFLTVVYNAEDFADAKEPAHKPGPSPVAVA

SEQ ID NO: 103029 - protein, 65 aa, Setaria italica
  Transcript Sequence Number=SeqID_37055
DQSNAFCKQYKIMSTGFKYETSVVLPKNMITLQDYTCSKDVEYNVWCEPIGLKANTKFHGVNQAI

SEQ ID NO: 103030 - protein, 84 aa, Setaria italica
  Transcript Sequence Number=SeqID_37056
HCQTSYYNKISLMPNCGENTSINFILSPFHGRSSVFRMAFQQQVINLHLQISLLKDTDLHIPLSAHFMTVQCYYQKVKGAKGQP

SEQ ID NO: 103031 - protein, 203 aa, Setaria italica
  Transcript Sequence Number=SeqID_37057
  Gene Ontology: Mol. function=nucleotide binding; Cellular component =plasma membrane; Biological process=small GTPase mediated signal transduction
  Homolog annotation: Hit_ID=Q05737; Match level="QueryCoverage=100%, HitCoverage=100%, E-value=1e-115, Identity=98%"; Hit description=GTP- binding protein YPTM2
  Pfam annotation: Domain name=Arf; Domain location=1-169; Score=-51.8; E_value=1.6e-05; Accession=PF00025.13; Description=ADP-ribosylation factor family
  Pfam annotation: Domain name=GTP_EFTU; Domain location=10-171; Score=- 85.3; E_value=0.011; Accession=PF00009.19; Description=Elongation factor Tu GTP binding domain
  Pfam annotation: Domain name=MMR_HSR1; Domain location=9-124; Score =0.5; E_value=0.00089; Accession=PF01926.15; Description=GTPase of unknown function
  Pfam annotation: Domain name=Miro; Domain location=10-124; Score =87.0; E_value=6.5e-23; Accession=PF08477.5; Description=Miro-like protein
  Pfam annotation: Domain name=Ras; Domain location=10-171; Score =356.3; E_value=5.6e-104; Accession=PF00071.14; Description=Ras family
  Pfam module annotation: Pfam domain module=Arf::GTP_EFTU::MMR _HSR1::Miro::Ras; Domain location=1-169::10-171::9-124::10-124::10-171
MNPEYDYLFKLLLIGDSGVGKSCLLLRFADDSYLDSYISTIGVDFKIRTVEQDGKTIKLQIWDTAGQERFRTITSSYYRGAHGIIIVYDVTDQESFNNVKQWLNEIDRYASDSVNKLLVGNKSDLTANKVVATETAKAFADEMGIPFMETSAKNAINVEQAFMAMAASIKDRMASQPAASNARPATVQIRGQPVNQKTSCCSS

SEQ ID NO: 103032 - protein, 89 aa, Setaria italica
  Transcript Sequence Number=SeqID_37058
  Homolog annotation: Hit_ID=B6UDJ0; Match level="QueryCoverage=98%, HitCoverage=83%, E-value=3e-17, Identity=50%"; Hit description =SAUR40-auxin-responsive SAUR family member
  Pfam annotation: Domain name=Auxin_inducible; Domain location=21-89; Score=7.3; E_value=0.00033; Accession=PF02519.6; Description=Auxin responsive protein
RVKTATRDDDTCCSTSRVADKGHCTVYTADGRRFGVPLPYLRTIFERKKKLKRTYLRTMIFSELLRIYQEYGFAKDGRITMHCDVTIVE

SEQ ID NO: 103033 - protein, 60 aa, Setaria italica
  Transcript Sequence Number=SeqID_37059
PDYTTHIHHLSNNNNNNNIAFQSQASWGRLELKPNKSHKSGFRHMNSCFHIYHLSKITIK

SEQ ID NO: 103034 - protein, 82 aa, Setaria italica
  Transcript Sequence Number=SeqID_37060
  Gene Ontology: Mol. function=protein serine/threonine kinase activity; Biological process=protein amino acid phosphorylation
  Pfam annotation: Domain name=LRR_1; Domain location=29-51; Score=8.9; E_value=6; Accession=PF00560.25; Description=Leucine Rich Repeat
  Pfam annotation: Domain name=LRR_1; Domain location=5-27; Score=10.8; E_value=2.6; Accession=PF00560.25; Description=Leucine Rich Repeat
  Pfam annotation: Domain name=LRR_1; Domain location=53-75; Score=9.4; E_value=4.8; Accession=PF00560.25; Description=Leucine Rich Repeat
  Pfam module annotation: Pfam domain module=LRR_1::LRR_1::LRR_1; Domain location=29-51::5-27::53-75
AQLPHLTKLSMGANHLVGPIPAVLSNLTGLTLLDLGSDNLTGDIPTELGLMQKLSYLQIIDSMLTGPIPSSLGNLSELSFLD

SEQ ID NO: 103035 - protein, 127 aa, Setaria italica
  misc_feature (17)..(17): Xaa can be any naturally occurring amino acid
  Transcript Sequence Number=SeqID_37061
  Gene Ontology: Mol. function=protein serine/threonine kinase activity; Cellular component=plasma membrane; Biological process =protein amino acid phosphorylation
  Homolog annotation: Hit_ID=B6SWS1; Match level="QueryCoverage=88%, HitCoverage=17%, E-value=2e-32, Identity=63%"; Hit description =BRASSINOSTEROID INSENSITIVE 1-associated receptor kinase 1
  Pfam annotation: Domain name=LRRNT_2; Domain location=3-44; Score =55.0; E_value=2.8e-13; Accession=PF08263.4; Description=Leucine rich repeat N-terminal domain
  Pfam annotation: Domain name=LRR_1; Domain location=72-94; Score =14.9; E_value=0.34; Accession=PF00560.25; Description=Leucine Rich Repeat
  Pfam annotation: Domain name=LRR_1; Domain location=96-118; Score =13.2; E_value=0.89; Accession=PF00560.25; Description=Leucine Rich Repeat
  Pfam module annotation: Pfam domain module=LRRNT_2::LRR_1::LRR_1; Domain location=3-44::72-94::96-118
TGVNYEVQALMAIKNLXLKDPHGMLKSWDKDSADPCSWPTVTCSPDKLVTGLEAPSQSLSGMLSPIIGNLTNLQIVLLQNNNITGPIPAEIGKLANLKTLDLSNNHLYGEIPTYLLGPTFLEPAVLE

SEQ ID NO: 103036 - protein, 536 aa, Setaria italica
  misc_feature (206)..(206): Xaa can be any naturally occurring amino acid
  Transcript Sequence Number=SeqID_37062
  Gene Ontology: Mol. function=protein serine/threonine kinase activity; Cellular component=plasma membrane; Biological process =protein amino acid phosphorylation
  Homolog annotation: Hit_ID=B6SWS1; Match level="QueryCoverage=99%, HitCoverage=84%, E-value=0.0, Identity=79%"; Hit description =BRASSINOSTEROID INSENSITIVE 1-associated receptor kinase 1
  Pfam annotation: Domain name=LRR_1; Domain location=111-133; Score =14.4; E_value=0.49; Accession=PF00560.25; Description=Leucine Rich Repeat
  Pfam annotation: Domain name=LRR_1; Domain location=39-61; Score =14.9; E_value=0.34; Accession=PF00560.25; Description=Leucine Rich Repeat
  Pfam annotation: Domain name=LRR_1; Domain location=63-85; Score =15.6; E_value=0.21; Accession=PF00560.25; Description=Leucine Rich Repeat
  Pfam annotation: Domain name=LRR_1; Domain location=87-109; Score =14.0; E_value=0.62; Accession=PF00560.25; Description=Leucine Rich Repeat
  Pfam annotation: Domain name=Pkinase; Domain location=245-514; Score =112.7; E_value=1.2e-30; Accession=PF00069.17; Description=Protein kinase domain
  Pfam annotation: Domain name=Pkinase_Tyr; Domain location=245-514; Score=108.1; E_value=3.1e-29; Accession=PF07714.9; Description =Protein tyrosine kinase
  Pfam module annotation: Pfam domain module=LRR_1::LRR_1::LRR_1::LRR _1::Pkinase::Pkinase_Tyr; Domain location=111-133::39-61::63-85::87 -109::245-514::245-514
MLIPLCSYQCSVAVWLLRREAPSQSLSGMLSPIIGNLTNLQIVLLQNNNITGPIPAEIGKLANLKTLDLSNNHLYGEIPTTVGHLQNLQYLRLNNNTLSGPFPSASANLSQLVFLDLSYNNLSGPIPGSLARTFNIVGNPLICGANAEKDCYGTAPMPMSYNLNSSQGALPPAKSKSHKFAVAFGTAAGCISFLFLAAGFVFWWRXHRRNRQILFDVDDQHLENVSLGNVKRFQFRELQSATDNFSSKNILGKGGFGYVYRGQLPDGTLVAVKRLKDGNAAGGEAQFQTEVEMISLALHRNLLRLYGFCMTATERLLVYPYMSNGSVASRLKAKPPLDWATRKRIALGAGRGLLYLHEQCDPKIIHRDVKAANILLDDYCEAIVGDFGLAKLLDHRDSHVTTAVRGTVGHIAPEYLSTGQSSEKTDVFGFGILLLELITGQTALEFGKAANQKGAMLDWVKKMHQEKKLDVLVDKGLKGGYDRIELEEMVQVALLCTQYLPGHRPKMSEVVRMLEGDGLAERWEASQCADSHKFKV

SEQ ID NO: 103037 - protein, 111 aa, Setaria italica
  Transcript Sequence Number=SeqID_37063
VFVFLFVVVSSPLAWLAGRGADQAPDPDRPRIHQPWPTLRLLEVISSAVRRTTRTISNQLLPMDRTQGALLGTMGSSNHRRLVTRRKPASSATYFHASPAAERRASCGLRA

SEQ ID NO: 103038 - protein, 89 aa, Setaria italica
  Transcript Sequence Number=SeqID_37064
  Subcellular localization annotation: CTP_CleavageSite=78; ConfidenceScore=5.04e-01
VFLFVVVSSPLAWLAGRGADQAPDPDRPRIHQPWPTLRLLEVISSAVRRTTRTISNHRRLVTRRKPASSATDFHASPAAERRASCGLRA

SEQ ID NO: 103039 - protein, 180 aa, Setaria italica
  Transcript Sequence Number=SeqID_37065
MTNNVAMNRWKILTSAVGIRTVAALVLLWAIGLFYHSSSHAYNHIDVTITYALLWSALVMECAIPAVMESVDKIKRWRLNANRWPDQVAQYNLVGYLARNRKHSWLMKMATCLVGTDLLDQRWCMESSKSSHEITKLVHGHVAGGWTEGHIAEAEAFRAFNDCRGQWTLDKEEAQTTSKH

SEQ ID NO: 103040 - protein, 307 aa, Setaria italica
  Transcript Sequence Number=SeqID_37066
  Gene Ontology: Mol. function=hydrolase activity, hydrolyzing O -glycosyl compounds; Biological process=carbohydrate metabolic process
  Homolog annotation: Hit_ID=B6U7J7; Match level="QueryCoverage=90%, HitCoverage=90%, E-value=1e-136, Identity=87%"; Hit description =Chitinase 2
  Pfam annotation: Domain name=Glyco_hydro_18; Domain location=35-286; Score=27.5; E_value=5.8e-09; Accession=PF00704.20; Description =Glycosyl hydrolases family 18
MGSSKLLEAVLLPLALLALHAPMTTAANSNHFREYIGAIFNGVQFSDVPINPNVQFDYIFAFVIDYTTATQPPTPTNGQFNIFWQNTVLTASDVASIKQSNPNVRVAVSLGGATVNNRPVFFNITSVDSWVKNAVSSLTKIVQEYNLDGIDIDYEQFQVDPATFAECVGRLVTTLKSNGVIKMASIAPFDNADVQRHYQALWNSYGSVIDYINFQFYAYSASTTEAQYVSHFDNQIANYPGGNILASFTTAPTTTSVPINTSLNACQTLQSQGKLYGIFIWAADHSRSQGFRYDTQAQALLANAPSY

SEQ ID NO: 103041 - protein, 102 aa, Setaria italica
  Transcript Sequence Number=SeqID_37067
  Gene Ontology: Mol. function=hydrolase activity, acting on ester bonds; Biological process=nucleobase, nucleoside, nucleotide and nucleic acid metabolic process
  Pfam annotation: Domain name=UPF0081; Domain location=23-102; Score= -31.2; E_value=0.0024; Accession=PF03652.7; Description =Uncharacterised protein family (UPF0081)
GLVLQAEELFRKVLEGGSKKKAARLLGLDVGSKYVGLAVSDEKNRIALPLSVLSRTKTNINLMADDFKTLASKYSLAGFVVGYPFNLHGQHTSDGVQVRLLL

SEQ ID NO: 103042 - protein, 55 aa, Setaria italica
  Transcript Sequence Number=SeqID_37068
GISPWWYDSGIGRNSFPLFCCSYRDSLSVLNSYAACIFVLALPRWFTNELLNLFL

SEQ ID NO: 103043 - protein, 211 aa, Setaria italica
  Transcript Sequence Number=SeqID_37069
  Gene Ontology: Mol. function=histidine-tRNA ligase activity; Cellular component=cytoplasm; Biological process=tRNA aminoacylation for protein translation
  Homolog annotation: Hit_ID=Q9ZTW6; Match level="QueryCoverage=100%, HitCoverage=44%, E-value=1e-103, Identity=87%"; Hit description =Histidyl-tRNA synthetase (Fragment)
  Pfam annotation: Domain name=HGTP_anticodon; Domain location=119-207; Score=63.9; E_value=5.9e-16; Accession=PF03129.12; Description =Anticodon binding domain
LRKEGSKFMQNEGSVVALNELEILFKALEKANALDRIVFDLSLARGLDYYTGVIYEAVFKGATQVGSIAAGGRYDNLVGMFSGKQIPAVGVSLGIERVFAIMEQQEKERNETIRATETEVLVSILGKDLTLAAELVSELWSAGIKAEFKLTTRVTNHIKYALQSGIPWMVLVGESEMQKGSVKLKDVKANQEEEVDRKDFVQELKKRLSKP

SEQ ID NO: 103044 - protein, 541 aa, Setaria italica
  misc_feature (185)..(185): Xaa can be any naturally occurring amino acid
  Transcript Sequence Number=SeqID_37070
  Gene Ontology: Mol. function=histidine-tRNA ligase activity; Cellular component=cytoplasm; Biological process=tRNA aminoacylation for protein translation
  Homolog annotation: Hit_ID=P93422; Match level="QueryCoverage=100%, HitCoverage=68%, E-value=0.0, Identity=84%"; Hit description =Histidyl-tRNA synthetase
  Pfam annotation: Domain name=tRNA-synt_2b; Domain location=220-380; Score=118.8; E_value=1.8e-32; Accession=PF00587.17; Description=tRNA synthetase class II core domain (G, H, P, S and T)
KEEALVVLATQLARAVQALCKMSVARARLCAESIADAELREKLTGGVSIDDLKGMLDRVLIDSDAVSVLKGVYNHLLKFRDFLAWEAAVAMAVIEGDSSIEKPQAAVENEVGSSAEKPQAGGEKAKGDKKSKKKKTLGKGTSAVLMLLKDHLNNGGAIASVNSALVAEWGTSLSLLFDPKCPGLXCLVEKVKEIVESNEVRRLPKIPKGTRDFGKEQMAIRERAFSIITGVFKMHGATALDTPVFELRETLMGKYGEDSKLIYDLADQGGELCSLRYDLTVPFARYVAMNNISALKRYQIAKVYRRDNPSKGRYREFYQCDFDIAGVYEPMEPDFEVIKVLTELLNQLDIGTYEIKLNHRKLLDGMLEICGVPAQKFRTVCSSIDKLDKQTFEQVKKELVDEKGISNETADEIGNLVKTRGHPLEVLLELRKEGSKFMQNEGSVVALNELEILFKALEKANALDRIVFDLSLARGLDYYTGVIYEAVFKGATQVGSIAAGGRYDNLVGMFSGKQIPAVGVSLGIERVFAIMEQQEKERNEV

SEQ ID NO: 103045 - protein, 121 aa, Setaria italica
  Transcript Sequence Number=SeqID_37071
  Gene Ontology: Mol. function=nucleoside-triphosphatase activity
  Homolog annotation: Hit_ID=B9SAN5; Match level="QueryCoverage=81%, HitCoverage=8%, E-value=1e-24, Identity=54%"; Hit description=ATP binding protein, putative
ILKPLKNQSDPNPSATSSLSAWQAFKDGLKQGIVSPEDIDVTLDNFPYYLSESTKEMLLLSAFIHMEREFNKCLQKISSLNQRILLSGPSGSEMNQETLTKELAKHFDARLLILDSLMLCG

SEQ ID NO: 103046 - protein, 82 aa, Setaria italica
  misc_feature (15)..(15): Xaa can be any naturally occurring amino acid
  misc_feature (23)..(23): Xaa can be any naturally occurring amino acid
  Transcript Sequence Number=SeqID_37072
  Subcellular localization annotation: CTP_CleavageSite=2; ConfidenceScore=5.16e-01
APAPAGGGGGRRRRXPPGARLLXPPRRRTPWLCNGWGSSSRKSLWIWDGSKRSSSKLNQSIWYKFETNFEKGGEGERALTKP

SEQ ID NO: 103047 - protein, 92 aa, Setaria italica
  Transcript Sequence Number=SeqID_37073
  Gene Ontology: Mol. function=DNA binding; Cellular component=nucleus; Biological process=regulation of transcription
  Homolog annotation: Hit_ID=Q0PJD1; Match level="QueryCoverage=96%, HitCoverage=42%, E-value=1e-41, Identity=91%"; Hit description=MYB transcription factor MYB71 (Fragment)
  Pfam annotation: Domain name=Myb_DNA-binding; Domain location=34-79; Score=40.0; E_value=9.4e-09; Accession=PF00249.23; Description=Myb -like DNA-binding domain
PGNWIALPQKIGLKRCGKSCRLRWLNYLRPNIKHGDFTEEEEHIICSLYISIGSRWSIIAAQLPGRTDNDIKNYWNTKLKKKLLGKRAPSRR

SEQ ID NO: 103048 - protein, 45 aa, Setaria italica
  misc_feature (8)..(8): Xaa can be any naturally occurring amino acid
  Transcript Sequence Number=SeqID_37074
  Gene Ontology: Mol. function=binding
TEEAAGFXDRAGAYAIVSSTPNSPEYAEIETYKASLLKAFDQLKS

SEQ ID NO: 103049 - protein, 130 aa, Setaria italica
  misc_feature (101)..(101): Xaa can be any naturally occurring amino acid
  Transcript Sequence Number=SeqID_37075
  Gene Ontology: Mol. function=transferase activity; Biological process= isoprenoid biosynthetic process
  Homolog annotation: Hit_ID=Q9FET8; Match level="QueryCoverage=81%, HitCoverage=25%, E-value=3e-42, Identity=74%"; Hit description =Geranyl diphosphat synthase
CLYSMDYYLQKTYYKTAALISNSCKAIAVLAEQTTEVQALAYQYGRHLGIAYQLIDDILDFTGTSASLGKASLSDIHQGIVIARVLFAMEEFPELHEIVEXGFDDPLNVIRRFVLQVYFFERKVYFLCFQ

SEQ ID NO: 103050 - protein, 394 aa, Setaria italica
  misc_feature (59)..(59): Xaa can be any naturally occurring amino acid
  Transcript Sequence Number=SeqID_37076
  Gene Ontology: Mol. function=transferase activity; Cellular component= mitochondrion; Biological process=isoprenoid biosynthetic process
  Homolog annotation: Hit_ID=Q9FET8; Match level="QueryCoverage=91%, HitCoverage=88%, E-value=1e-126, Identity=62%"; Hit description =Geranyl diphosphat synthase
  Pfam annotation: Domain name=polyprenyl_synt; Domain location=90-354; Score=165.8; E_value=1.3e-46; Accession=PF00348.9; Description =Polyprenyl synthetase
MMLPGRLLLAGLLRSASTASSAPRMPTNMCYWDRFTWSSCYFHCTSDHSSRKAGLTAKXEQLDPFVLIKDEVSEVTDRLRSMVVAEVPELTSAAGYFFRAGAEGKRTCPTVLLLMASAISMDIADGLENKPRARHMHLAEITEMIHISSLIHDDVLDDADTRRGMDSLNFKVGKKLAVLAGNFLLFRAFSAAVSLDNTEVVSLLATAVNNLVTGELMQMSITPAQRCSMDYYLQKTYYKTAALISNSCKAIAVLAEQTTEVQALAYQYGRHLGIAYQLIDDILDFTGTSASLGKASLSDIHQGIVTAPILFAMEEFPELHEIVEQGFDDPLNVKTALKYLSKSQGIERTRSVAAEHAKLAAGAIDDLPDSEDQVVLNSRQALKDLTQKFMRRTK

SEQ ID NO: 103051 - protein, 161 aa, Setaria italica
  misc_feature (128)..(128): Xaa can be any naturally occurring amino acid
  Transcript Sequence Number=SeqID_37077
  Homolog annotation: Hit_ID=Q8W0Y1; Match level="QueryCoverage=84%, HitCoverage=18%, E-value=6e-33, Identity=49%"; Hit description =Putative transposase
MLAVYTQDFYRCQEGFEARAASVIEQAAKKLVKDMHYEARVQAIIDFYAEYKRMRIKKGEARTMNLTKEEFMAVPPWWCRSFTRCWEKMVDVWLQPGWLENHNACWERRLQMPYASHHQGSLSLDEYXEKWTSSHDGQECSRFKGMGYGPKRARPTAGHRL

SEQ ID NO: 103052 - protein, 253 aa, Setaria italica
  misc_feature (31)..(31): Xaa can be any naturally occurring amino acid
  Transcript Sequence Number=SeqID_37078
  Gene Ontology: Mol. function=structural molecule activity; Cellular component=clathrin coat of trans-Golgi network vesicle; Biological process=intracellular protein transport
EEVEEEITVESDGVPIRHVSGGYSPSPFSPXLDSNGGDGPILPPPTEMGREEGFLLREWRRQNAIELEKKEQREKELRAQIIAEAEEFKIAFYEKRIQNCETNKVHNREREKIFVASQEKFHASADKQYWKSISELIPHEIATIEKRGGKKDKDKKPSITVIQGPKPGKPTDLSRMRQVLVKLKHAPPPHMLQPPPAPAAKEGAKDGAKEGAKDGAKEGAAAPANGTKQPAESKETPANGPSEAEKEQPAASE

SEQ ID NO: 103053 - protein, 110 aa, Setaria italica
  Transcript Sequence Number=SeqID_37079
  Gene Ontology: Mol. function=structural constituent of ribosome; Cellular component=ribonucleoprotein complex; Biological process =protein modification process
  Homolog annotation: Hit_ID=P51431; Match level="QueryCoverage=50%, HitCoverage=70%, E-value=3e-26, Identity=98%"; Hit description=40S ribosomal protein S27a
  Pfam annotation: Domain name=Ribosomal_S27; Domain location=56-103; Score=108.6; E_value=2.1e-29; Accession=PF01599.11; Description =Ribosomal protein S27a
CDASLILVPFSILLDDYITWTFHLVLRLRGGAKKRKKKTYTKPKKIKHKHKKVKLAVLQFYKVDDATGKVTRLRKECPNADCGAGTFMANHFDRHYCGKCGLTYVYNQKA

SEQ ID NO: 103054 - protein, 140 aa, Setaria italica
  Transcript Sequence Number=SeqID_37080
  Gene Ontology: Mol. function=structural constituent of ribosome; Cellular component=intracellular; Biological process=protein modification process
  Homolog annotation: Hit_ID=Q09JW5; Match level="QueryCoverage=98%, HitCoverage=91%, E-value=1e-48, Identity=79%"; Hit description =Ubiquitin/40S ribosomal protein S27a fusion protein
  Pfam annotation: Domain name=Ribosomal_S27; Domain location=86-133; Score=108.6; E_value=2.1e-29; Accession=PF01599.11; Description =Ribosomal protein S27a
  Pfam annotation: Domain name=ubiquitin; Domain location=1-59; Score =95.3; E_value=2.1e-25; Accession=PF00240.15; Description=Ubiquitin family
  Pfam module annotation: Pfam domain module=Ribosomal_S27::ubiquitin; Domain location=86-133::1-59
EVESSDTIDNVKAKIQDKEGIPPDQQRLIFAGKQLEDGRTLADYNIQKESTLHLVLRLRGGAKKRKKKTYTKPKKIKHKHKKVKLAVLQFYKVDDATGKVTRLRKECPNADCGAGTFMANHFDRHYCGKCGLTYVYNQKA

SEQ ID NO: 103055 - protein, 155 aa, Setaria italica
  Transcript Sequence Number=SeqID_37081
  Gene Ontology: Mol. function=structural constituent of ribosome; Cellular component=intracellular; Biological process=protein modification process
  Homolog annotation: Hit_ID=A8N901; Match level="QueryCoverage=98%, HitCoverage=94%, E-value=1e-57, Identity=72%"; Hit description =Ubiquitin
  Pfam annotation: Domain name=Ribosomal_S27; Domain location=101-148; Score=110.1; E_value=7.7e-30; Accession=PF01599.11; Description =Ribosomal protein S27a
  Pfam annotation: Domain name=ubiquitin; Domain location=6-74; Score =138.0; E_value=2.9e-38; Accession=PF00240.15; Description=Ubiquitin family
  Pfam module annotation: Pfam domain module=Ribosomal_S27::ubiquitin; Domain location=101-148::6-74
MQIFVKTLTGKTITLEVESSDTIDNVKAKIQDKEGIPPDQQRLIFAGKQLEDGRTLADYNIQKESTLHLVLRLRGGAKKRKKKTYTKPKKIKHKHKKVKLAVLQFYKVDDATGKVTRLRKECPNAECGAGTFMANHFDRHYCGKCGLTYVYNQQA

SEQ ID NO: 103056 - protein, 107 aa, Setaria italica
  Transcript Sequence Number=SeqID_37082
  Gene Ontology: Mol. function=metal ion binding; Cellular component =integral to membrane; Biological process=ubiquitin-dependent protein catabolic process
  Homolog annotation: Hit_ID=B6U0R9; Match level="QueryCoverage=94%, HitCoverage=38%, E-value=6e-33, Identity=66%"; Hit description=RING -H2 finger protein ATL2B
  Pfam annotation: Domain name=zf-C3HC4; Domain location=62-103; Score =18.4; E_value=0.00082; Accession=PF00097.17; Description=Zinc finger, C3HC4 type (RING finger)
GPAVQSAVQSQISAISSPFAETSDLFETGGSRGITADALRRLPAMEIAEDSAVDTAGEALCCSVCLQDFRVGEPARRLPGCRHVFHVPCIDCWLVRHGSCPLCRRDI

SEQ ID NO: 103057 - protein, 94 aa, Setaria italica
  Transcript Sequence Number=SeqID_37083
FENEEAPHPPWQCTGTQQDPSRHSHLEQEAAATRREKKAGRGARPVNRTGKKYSMLNWFPHLAIFLCYVKLCSPCVLQEITAAILLHAVVKVLV

SEQ ID NO: 103058 - protein, 87 aa, Setaria italica
  Transcript Sequence Number=SeqID_37084
  Homolog annotation: Hit_ID=B4FCR3; Match level="QueryCoverage=89%, HitCoverage=35%, E-value=2e-13, Identity=51%"; Hit description =Double-stranded RNA binding motif family protein
RVSEVADDLPVMLASGDGTLDVLTGCAMQSSGDANGCGKGNIRNISFTGNQPARLRLPKICAAIGWKEPSFDFEEQGPPHNNYHLQG

SEQ ID NO: 103059 - protein, 88 aa, Setaria italica
  Transcript Sequence Number=SeqID_37085
  Homolog annotation: Hit_ID=B4FCR3; Match level="QueryCoverage=100%, HitCoverage=46%, E-value=4e-20, Identity=60%"; Hit description =Double-stranded RNA binding motif family protein
MEPPMKHKPSAVPINTSLEKLELEDKSAVLVKRRRIEFLGSIVQPQQDIEVDMEHKVADDLPVEISTGDDPMDVLTGCAMQSSGDANG

SEQ ID NO: 103060 - protein, 101 aa, Setaria italica
  Transcript Sequence Number=SeqID_37086
  Homolog annotation: Hit_ID=B4FCR3; Match level="QueryCoverage=100%, HitCoverage=52%, E-value=1e-20, Identity=57%"; Hit description =Double-stranded RNA binding motif family protein
MEPPMKHKPSAVPINTSVEELELEDKSAVLVKRRRIEFLGSIVQPQQGIEVDMEHKVADDLPVEISTGDDPMDVLIDCAMQSSGDANGCGNQPARLRLPKI

SEQ ID NO: 103061 - protein, 102 aa, Setaria italica
  Transcript Sequence Number=SeqID_37087
  Homolog annotation: Hit_ID=B4FCR3; Match level="QueryCoverage=86%, HitCoverage=46%, E-value=5e-20, Identity=60%"; Hit description =Double-stranded RNA binding motif family protein
MEPPMKHKPSAVPINTSLEKLELEDKSAVLVKRRRIEFLGSIVQPQQDIEVDMEHKVADDLPVEISTGDDPMDVLTGCAMQSSGDANGCGKGNIRNISFTGD

SEQ ID NO: 103062 - protein, 172 aa, Setaria italica
  Transcript Sequence Number=SeqID_37088
  Homolog annotation: Hit_ID=B4FCR3; Match level="QueryCoverage=100%, HitCoverage=91%, E-value=8e-51, Identity=60%"; Hit description =Double-stranded RNA binding motif family protein
  Pfam annotation: Domain name=dsrm; Domain location=93-165; Score =30.9; E_value=5.3e-06; Accession=PF00035.17; Description=Double -stranded RNA binding motif
MEPPMKHKPSAVPINTSVEELELEDKSAVLVKRRRIEFLGSIVQPQQGIEVDMEHKVADDLPVEISTGDDPMDVLIDCAMQSSGDANGCNQPARLRLPKICAAIGWKEPSFDFEEQGPPHNKLFTCKVTVHLEGLVNTVMECFGDPKPKKKAAQDHAAQAALWCLERFGHAK

SEQ ID NO: 103063 - protein, 85 aa, Setaria italica
  misc_feature (4)..(4): Xaa can be any naturally occurring amino acid
  misc_feature (7)..(7): Xaa can be any naturally occurring amino acid
  misc_feature (23)..(23): Xaa can be any naturally occurring amino acid
  Transcript Sequence Number=SeqID_37089
  Subcellular localization annotation: CTP_CleavageSite=63; ConfidenceScore=5.09e-01
HQVXVNXKPRLRLDSLGPVVAVXGQLQNQMEKTVTGSIAPEFSAPVPSVNLWSSVFLLTFLSCSSMKGGCSVGRSDSLIPESVLY

SEQ ID NO: 103064 - protein, 447 aa, Setaria italica
  Transcript Sequence Number=SeqID_37090
  Gene Ontology: Cellular component=integral to membrane
  Homolog annotation: Hit_ID=B9S7D1; Match level="QueryCoverage=99%, HitCoverage=75%, E-value=0.0, Identity=75%"; Hit description =Transporter, putative
  Pfam annotation: Domain name=EMP70; Domain location=1-405; Score =664.0; E_value=1.4e-196; Accession=PF02990.8; Description =Endomembrane protein 70
REQGDAKYLLFKHIHFDIMYNDNRVIEINVQTDPNVAVDITEDKEVPIEFSYSVTWKKTDISFEKRMEKYSKSSSMPQHLEIHWFSIINSCVTVLLLTGFLATILMRVLKNDFIKYSHEDESLEDQEESGWKYIHGDVFRFPKQKSLFAAIIGSGTQLLALAIFIFLLALVGVFYPYNRGALFTALVVIYALTSGIAGYTATSFYLQLEGTNWVRNLIFTGCLFCGPLFLTFCFLNTVAIAYSATAALPFGTIIVIILIWALVTSPLLVLGGIAGKNSNTEFQAPCRTTKYPREIPQLPWYRSTIPQMAMAGFLPFSAIYIELYYIFASIWGHKIYTIYSILFIVFIILIIVTAFVTVALTYFQLAVEDHQWWWRSVLCGGSTGIFIFFYCIYYYHARSDMSGFMQTSFFFGYMTCVCYGFFLMLGTVGFRASLFFVRHIYRSIKCE

SEQ ID NO: 103065 - protein, 244 aa, Setaria italica
  Transcript Sequence Number=SeqID_37091
  Gene Ontology: Cellular component=integral to membrane
  Homolog annotation: Hit_ID=B9S7D1; Match level="QueryCoverage=96%, HitCoverage=39%, E-value=8e-96, Identity=67%"; Hit description =Transporter, putative
  Pfam annotation: Domain name=EMP70; Domain location=51-244; Score= -131.7; E_value=1.7e-10; Accession=PF02990.8; Description =Endomembrane protein 70
GKGGGRGVVLAVLILSCAMGARADGSDHKYKEGDHVPLYANKVGPFHNPSETYRYYDLPFCAPEHPKDKKEALGEVLNGDRLVDAPYELNFKEDKNSKILCEKTLTKEQVAKLRDAVAKDYYFQMYYDDLPLWGFLGKMDKDREQGDAKYLLFKHIHFDIMYNDNRVIEINVQTDPNVAVDITEDKEVPIEFSYSVTWKKTDISFEKRMEKYSKSSSMPQHLEIHWFSIINSCVTVLLLTGFLD

SEQ ID NO: 103066 - protein, 241 aa, Setaria italica
  misc_feature (37)..(37): Xaa can be any naturally occurring amino acid
  Transcript Sequence Number=SeqID_37092
  Gene Ontology: Mol. function=metal ion binding; Cellular component =integral to membrane; Biological process=ubiquitin-dependent protein catabolic process
  Homolog annotation: Hit_ID=Q6Z5I2; Match level="QueryCoverage=34%, HitCoverage=26%, E-value=1e-35, Identity=82%"; Hit description=Zinc finger (C3HC4-type RING finger)-like protein
  Pfam annotation: Domain name=zf-C3HC4; Domain location=49-90; Score =35.1; E_value=2.7e-07; Accession=PF00097.17; Description=Zinc finger, C3HC4 type (RING finger)
TTAAPIPPGTEEVVHHAWHIRTVGLDEAAIESIALTXYRAGGALGASDCTVCLGEFQDGELLRLLPKCAHAFHVQCIDTWLRAHVSCPLCRANVMDPAAAAAEQPDPTHPAPGADADAEQEQDAGNTGAPEHEQPGQHANGQPDISSEQPRQRPGPRGRNFRRVASMDSPPSPIASAGEPRDPGHEQAGGEKQGTGSAVCCEVSPGSDHLNRAAMKRSLSAGSRWTLLSRPCRSRSSLLPL

SEQ ID NO: 103067 - protein, 154 aa, Setaria italica
  Transcript Sequence Number=SeqID_37093
  Gene Ontology: Mol. function=protein phosphatase type 2A regulator activity; Cellular component=protein phosphatase type 2A complex; Biological process=signal transduction
  Homolog annotation: Hit_ID=B9SH46; Match level="QueryCoverage=73%, HitCoverage=20%, E-value=1e-56, Identity=92%"; Hit description =Protein phosphatase 2a, regulatory subunit, putative
  Pfam annotation: Domain name=B56; Domain location=1-154; Score=-75.0; E_value=3.3e-06; Accession=PF01603.12; Description=Protein phosphatase 2A regulatory B subunit (B56 family)
YCPGSPTAPQYHYAFALPLKEEHKLFLVRALIPLHKPKCVSMYHQQLSYCITQFVEKDCKLADTVIRGLLKYWPVTNSSKEVMFLGELEEVLEATQLAEFQRCMVPLFCQIARSMNSSHFQVAERATNLLLGNKLEPINLVKTLNLKLLKNFNL

SEQ ID NO: 103068 - protein, 112 aa, Setaria italica
  Transcript Sequence Number=SeqID_37094
TNNPKISQTQADESTARPAKNPHPSSDPPAQPSKQSGRPDHLNQYESDLVREPLQRPGLNGSGHASMARKNPVFPSSRNRRRRRPSKSRIPAPQRTIGCGRMGGEGEGREGG

SEQ ID NO: 103069 - protein, 514 aa, Setaria italica
  misc_feature (231)..(231): Xaa can be any naturally occurring amino acid
  Transcript Sequence Number=SeqID_37095
  Gene Ontology: Mol. function=protein phosphatase type 2A regulator activity; Cellular component=protein phosphatase type 2A complex; Biological process=signal transduction
  Homolog annotation: Hit_ID=B9RMK6; Match level="QueryCoverage=100%, HitCoverage=99%, E-value=0.0, Identity=69%"; Hit description=Protein phosphatase 2a, regulatory subunit, putative
  Pfam annotation: Domain name=B56; Domain location=79-493; Score =861.2; E_value=5.8e-256; Accession=PF01603.12; Description=Protein phosphatase 2A regulatory B subunit (B56 family)
MIKNILGRLPRKPGKAGDSRDAAAATSAGNGMEPSNSYSVARSMDPGNKRAGNGDYAVPPGVAPNPVMNGAVVYHSNEPLPAFKDVAASEKQNLFVKKVNLCCAVYDFTDPTKNLKEKEVKRQTLMELVDYVTSANGKFSEVVMQEITKMVSINLFRSSNPTPRENKVIEGVDLEEDEPLMDPAWSHLQIVYEVFLRFVASQETDAKLAKRYIDHSFILRLLDLFDSEDPXRERDYLKTILHRIYGKFMVHRPFIRKAINNIFYRFIFETEKHNGIAELLEILGSIINGFALPLKEEHKLFLVRALIPLHKPKCVSMYHQQLSYCITQFVEKDCKLADTVIRGLLKYWPVTNSSKEVMFLGELEEVLEATQLAEFQRCMVPLFCQIARSMNSSHFQVAERALFLWNNDHIENLIKQNYKVLLPIIYPALERNTRDHWNQAVRSLTLNVRKIFSDHDSAFFGECVQRFNDEELKQEESDLKREALWKRLEEMATSKPGENNPLGTPNGKSSQTAG

SEQ ID NO: 103070 - protein, 125 aa, Setaria italica
  Transcript Sequence Number=SeqID_37096
  Gene Ontology: Mol. function=protein phosphatase type 2A regulator activity; Cellular component=protein phosphatase type 2A complex; Biological process=signal transduction
  Homolog annotation: Hit_ID=B9SH46; Match level="QueryCoverage=64%, HitCoverage=14%, E-value=1e-23, Identity=64%"; Hit description =Protein phosphatase 2a, regulatory subunit, putative
AGRTCLVSSELYDQNVHIQKDFREIWHVYKVLLPIIYPALERNTRDHWNQAVRSLTLNVRKIFSDHDSAFFGECVQRFNDEELKQEESDLKREALWKRLEEMATSKPGENNPLGTPNGKSSQTAG

SEQ ID NO: 103071 - protein, 65 aa, Setaria italica
  Transcript Sequence Number=SeqID_37097
  Subcellular localization annotation: CTP_CleavageSite=33; ConfidenceScore=5.43e-01
FRSTKTTALLPSPANAPLGSEPPRFSGNKEIVMAEAGRAAASSARGPSASSSGCRRGARVRAGAG

SEQ ID NO: 103072 - protein, 134 aa, Setaria italica
  Transcript Sequence Number=SeqID_37098
  Gene Ontology: Mol. function=peptide-methionine-(S)-S-oxide reductase activity
  Homolog annotation: Hit_ID=A7U629; Match level="QueryCoverage=100%, HitCoverage=67%, E-value=6e-64, Identity=84%"; Hit description =Chloroplast methionine sulfoxide reductase B2
  Pfam annotation: Domain name=SelR; Domain location=12-133; Score =285.8; E_value=9.9e-83; Accession=PF01641.10; Description=SelR domain
MASGGSSKQRSEEEWRAILSPEQFRILRQKGTELPGTGEYNKFKADGVYNCAGCGTPLYKSDTKFDSGCGWPAFFEGLPGAINRTPDPDGRRVEITCAACGGHLGHVFKGEGFKTPTDERHCVNSVSIKFTPAS

SEQ ID NO: 103073 - protein, 49 aa, Setaria italica
  Transcript Sequence Number=SeqID_37099
AFFFLVASITVNISAKLITSYNFVSCNTVFLAPLLVCKLQVCLLHVTHM

SEQ ID NO: 103074 - protein, 53 aa, Setaria italica
  Transcript Sequence Number=SeqID_37100
KIKMLLIFFKMIVGNHMMVLSAVSDVGHKRIHSFLLQSALINQTQITISYILD

SEQ ID NO: 103075 - protein, 274 aa, Setaria italica
  Transcript Sequence Number=SeqID_37101
  Gene Ontology: Mol. function=sequence-specific DNA binding; Cellular component=nucleus; Biological process=regulation of transcription, DNA-dependent
  Homolog annotation: Hit_ID=Q8W0T5; Match level="QueryCoverage=100%, HitCoverage=34%, E-value=1e-101, Identity=72%"; Hit description=OCL5 protein
  Pfam annotation: Domain name=Homeobox; Domain location=92-148; Score =78.3; E_value=2.9e-20; Accession=PF00046.21; Description=Homeobox domain
MIGGLASYAASLGQNMMDGQHQLAVMQQQHQHQNHGQQQQPVTSESDMHGSRHDELLMESKSGSDNMEGGAGSGSGGEELQEEDLSLQQPRKKRYHRHTQHQIQELEAFFKEFPHPDDKQRKELSRELGLEPLQVKFWFQNKRTQMKTQQERQENTQLRAENEKLRAENARYKDALANAACPNCGGPATAVIGEMSFDEHHLRIENARLHDEIDRISAIAAKYVGKPVASLLPNSSNISSVVATAAPYPQPLSTHHIIPGAADMFGGLHHRGAA

SEQ ID NO: 103076 - protein, 59 aa, Setaria italica
  Transcript Sequence Number=SeqID_37102
HPQGPIRQGHLAPSTQPHGQLHRHDRERDREVSLQTSDISSLAVAAASPHLLGGLQPKL

SEQ ID NO: 103077 - protein, 403 aa, Setaria italica
  misc_feature (14)..(14): Xaa can be any naturally occurring amino acid
  Transcript Sequence Number=SeqID_37103
  Gene Ontology: Mol. function=DNA binding; Cellular component=nucleus; Biological process=regulation of transcription, DNA-dependent
  Homolog annotation: Hit_ID=B6U1E7; Match level="QueryCoverage=99%, HitCoverage=71%, E-value=1e-175, Identity=78%"; Hit description =ATSWI3A
  Pfam annotation: Domain name=Myb_DNA-binding; Domain location=85-130; Score=42.7; E_value=1.4e-09; Accession=PF00249.23; Description=Myb -like DNA-binding domain
AGEERENGFRLPPXLTSYSDVFGEWTPGKVPICGFCGEECNDEKFETLQDGFKVCSKCSKSNNDNKEEGNKCPGDKKESVDNHASSAWTDAETLLLLEGVLKHGDDWDLIAQHVRTKNKSECIARLIQLPFGEHMLGTINGKSVSRLHMNQATDGKMNQHITKESSSHSTEMVDGMQIDGNEDSADKSVEEHPPTKRRRLFSSMDATASLMEKLALLTTSSSPDVVAAAADAAIKALGNENPQARKAFRLSEREFKTKAFASNHAQQIDHKVGNKDVEMHGRTGSDKKQEKKFIANAYQVRAAVATAIGVAAARAKMLADQEEREMELLMASIIETQLRKMQYKIKHYEELELVMEQEHATSQQVKGSLVNEWLKVLEQAFRTGVSLPRDELLIKLFLNQSTA

SEQ ID NO: 103078 - protein, 154 aa, Setaria italica
  Transcript Sequence Number=SeqID_37104
AVSGVGRRRSNRWSRVWDRSITSPLKEFVRKGEHVLERSLSESRKEIRRGKNAESADISGEFHSGRNGHVSGRASQGASRSSQAASNGDVQNFRTDWLKNSKIGRSRSVHYTSPGNLDNGMLRFYLTPMRSTRTANKGRRRSSRLFARGLFGFM

SEQ ID NO: 103079 - protein, 240 aa, Setaria italica
  Transcript Sequence Number=SeqID_37105
  Gene Ontology: Mol. function=binding; Cellular component =intracellular; Biological process=RNA processing
  Homolog annotation: Hit_ID=Q10MH5; Match level="QueryCoverage=87%, HitCoverage=38%, E-value=1e-109, Identity=89%"; Hit description=TPR Domain containing protein, expressed
  Pfam annotation: Domain name=TPR_1; Domain location=125-158; Score =10.2; E_value=0.35; Accession=PF00515.20; Description=Tetratricopepti de repeat
  Pfam annotation: Domain name=TPR_1; Domain location=159-192; Score =14.1; E_value=0.12; Accession=PF00515.20; Description=Tetratricopepti de repeat
  Pfam annotation: Domain name=TPR_1; Domain location=193-226; Score =11.5; E_value=0.24; Accession=PF00515.20; Description=Tetratricopepti de repeat
  Pfam annotation: Domain name=TPR_1; Domain location=22-55; Score=3.3; E_value=2.4; Accession=PF00515.20; Description=Tetratricopeptide repeat
  Pfam annotation: Domain name=TPR_1; Domain location=56-89; Score=8.9; E_value=0.5; Accession=PF00515.20; Description=Tetratricopeptide repeat
  Pfam annotation: Domain name=TPR_1; Domain location=91-124; Score =0.8; E_value=4.7; Accession=PF00515.20; Description=Tetratricopeptide repeat
  Pfam annotation: Domain name=TPR_2; Domain location=125-158; Score =22.1; E_value=0.0023; Accession=PF07719.9; Description =Tetratricopeptide repeat
  Pfam annotation: Domain name=TPR_2; Domain location=159-192; Score =21.1; E_value=0.0046; Accession=PF07719.9; Description =Tetratricopeptide repeat
  Pfam annotation: Domain name=TPR_2; Domain location=193-226; Score =23.7; E_value=0.00078; Accession=PF07719.9; Description =Tetratricopeptide repeat
  Pfam annotation: Domain name=TPR_2; Domain location=22-55; Score=2.2; E_value=18; Accession=PF07719.9; Description=Tetratricopeptide repeat
  Pfam annotation: Domain name=TPR_2; Domain location=56-89; Score =16.4; E_value=0.12; Accession=PF07719.9; Description=Tetratricopeptid e repeat
  Pfam annotation: Domain name=TPR_2; Domain location=91-124; Score =10.7; E_value=1.6; Accession=PF07719.9; Description=Tetratricopeptide repeat
  Pfam module annotation: Pfam domain module=TPR_1::TPR_1::TPR_1::TPR _1::TPR_1::TPR_1::TPR_2::TPR_2::TPR_2::TPR_2::TPR_2::TPR_2; Domain location=125-158::159-192::193-226::22-55::56-89::91-124::125 -158::159-192::193-226::22-55::56-89::91-124
SRAGDGRELAAAAGERPLPINLELWLYRVKVHTRKFEFPEAEKLLDKCISFWPEDGRPYVALGKLYSKQSRYDKARAVYERGCQATQGENPYIWQCWAVLESKGGNIRRARELFDAATVADAKHIAAWHGWAILEIKQGNVKKARNLLGKALKYCGGNEYIYQTLALLEAKAERFEQARTLFQQATQSNPKSCASWLAWAQVEMRAGNNTMARKLFEKAVQASPKNRFSWQLLLGLLYFC

SEQ ID NO: 103080 - protein, 220 aa, Setaria italica
  misc_feature (176)..(176): Xaa can be any naturally occurring amino acid
  Transcript Sequence Number=SeqID_37106
  Gene Ontology: Mol. function=binding; Cellular component =intracellular; Biological process=RNA processing
  Homolog annotation: Hit_ID=Q10MH5; Match level="QueryCoverage=92%, HitCoverage=37%, E-value=8e-70, Identity=68%"; Hit description=TPR Domain containing protein, expressed
  Pfam annotation: Domain name=TPR_2; Domain location=14-47; Score =16.9; E_value=0.085; Accession=PF07719.9; Description=Tetratricopepti de repeat
QRALSVNSTNECAARCLQAWGVLEQRAGNYTAARRLLRSSLSINSQSEVTWMTWAALEEEQGDPVRAEEIRNLYFQQRIEVVDDASWVMGFLDIIDPALDSVKKLLNLDQPSGPVKQDTVKSTTESNLPTTRSSADESSESSATGGTSGFSSNDADNSSSEAAETPGSDFDLDGFXIKKRLGLDPSELDAVLEGSDPRGVVSQRRNRRLPRKPLPLLPVP

SEQ ID NO: 103081 - protein, 276 aa, Setaria italica
  Transcript Sequence Number=SeqID_37107
  Gene Ontology: Mol. function=binding; Cellular component =intracellular; Biological process=RNA processing
  Homolog annotation: Hit_ID=B9RZQ3; Match level="QueryCoverage=94%, HitCoverage=55%, E-value=1e-114, Identity=56%"; Hit description=Pre -mRNA splicing factor, putative
  Pfam annotation: Domain name=TPR_1; Domain location=141-174; Score =7.0; E_value=0.86; Accession=PF00515.20; Description=Tetratricopeptid e repeat
  Pfam annotation: Domain name=TPR_1; Domain location=178-211; Score =8.2; E_value=0.61; Accession=PF00515.20; Description=Tetratricopeptid e repeat
  Pfam annotation: Domain name=TPR_1; Domain location=39-72; Score =11.5; E_value=0.24; Accession=PF00515.20; Description=Tetratricopepti de repeat
  Pfam annotation: Domain name=TPR_2; Domain location=107-140; Score =5.3; E_value=7.5; Accession=PF07719.9; Description=Tetratricopeptide repeat
  Pfam annotation: Domain name=TPR_2; Domain location=141-174; Score =16.8; E_value=0.092; Accession=PF07719.9; Description=Tetratricopepti de repeat
  Pfam annotation: Domain name=TPR_2; Domain location=178-211; Score =16.9; E_value=0.085; Accession=PF07719.9; Description=Tetratricopepti de repeat
  Pfam annotation: Domain name=TPR_2; Domain location=39-72; Score =23.7; E_value=0.00078; Accession=PF07719.9; Description =Tetratricopeptide repeat
  Pfam annotation: Domain name=TPR_2; Domain location=73-106; Score =7.5; E_value=3.9; Accession=PF07719.9; Description=Tetratricopeptide repeat
  Pfam module annotation: Pfam domain module=TPR_1::TPR_1::TPR_1::TPR _2::TPR_2::TPR_2::TPR_2::TPR_2; Domain location=141-174::178-211::39 -72::107-140::141-174::178-211::39-72::73-106
INKEKKKQITNKELEAKAERFEQARTLFQQATQSNPKSCASWLAWAQVEMRAGNNTMARKLFEKAVQASPKNRFSWHVWALFEANEGNIDRARKLLKIGHAVNPRDPVILQSLALLEYNYSSANVARVLFRKASQIDPRHQPVWIAWGWMEWKEGNARTARALYQRALSVNSTNECAARCLQAWGVLEQRAGNYTAARRLLRSSLSINSQSEVTWMTWAALEEEQGDPVRAEEIRNLYFQQRIEVVDDASWVMGFLDIIDPALDSVKKLLNLDQFP

SEQ ID NO: 103082 - protein, 152 aa, Setaria italica
  Transcript Sequence Number=SeqID_37108
  Gene Ontology: Mol. function=binding; Cellular component =intracellular; Biological process=RNA processing
  Homolog annotation: Hit_ID=Q10MH5; Match level="QueryCoverage=79%, HitCoverage=22%, E-value=1e-52, Identity=80%"; Hit description=TPR Domain containing protein, expressed
  Pfam annotation: Domain name=TPR_2; Domain location=65-98; Score=2.2; E_value=18; Accession=PF07719.9; Description=Tetratricopeptide repeat
  Pfam annotation: Domain name=TPR_2; Domain location=99-132; Score =16.4; E_value=0.12; Accession=PF07719.9; Description=Tetratricopeptid e repeat
  Pfam module annotation: Pfam domain module=TPR_2::TPR_2; Domain location=65-98::99-132
RAAAAAGAAAAGGPERDGGRFEGETMGGAFDRGLAEIAKKVPLFEPATDGELAAAAGERPLPINLELWLYRVKVHTRKFEFPEAEKLLDKCISFWPEDGRPYVALGKLYSKQSRYDKARAVYERGCQATQGENPYIWQCCSPRNAHDHFTTL

SEQ ID NO: 103083 - protein, 158 aa, Setaria italica
  misc_feature (84)..(84): Xaa can be any naturally occurring amino acid
  misc_feature (125)..(125): Xaa can be any naturally occurring amino acid
  misc_feature (149)..(149): Xaa can be any naturally occurring amino acid
  Transcript Sequence Number=SeqID_37109
  Homolog annotation: Hit_ID=B9S9T4; Match level="QueryCoverage=64%, HitCoverage=14%, E-value=3e-22, Identity=50%"; Hit description =Transporter, putative
DGEAVEEVGESNKNMEENKDEAPKRKKARIVREEDHKKDKKQSSSKSRDAKDLLNTPSPYSLDRPARTRKTVERLVEVIEKEPXRKFIVEKGRGTPLKNIPGVAYRIARKKQTDLKFLHQILLGXGKAADFKSHILEFSGFVWHESDEXHRAKAKEKL

SEQ ID NO: 103084 - protein, 230 aa, Setaria italica
  misc_feature (77)..(77): Xaa can be any naturally occurring amino acid
  misc_feature (106)..(106): Xaa can be any naturally occurring amino acid
  Transcript Sequence Number=SeqID_37110
  Gene Ontology: Mol. function=nucleic acid binding; Cellular component= nucleus; Biological process=regulation of transcription from RNA polymerase II promoter
  Homolog annotation: Hit_ID=B9S9T4; Match level="QueryCoverage=63%, HitCoverage=19%, E-value=3e-37, Identity=49%"; Hit description =Transporter, putative
KQPKRKKARIVREEDHKKDKKQSSSKSRDAKDLLNTPSPYSLDRPARTRKTVERLVEVIEKEPSGSLFVEKGRGTPXSNIPGVAYRIARKKQTDLKFLHQILFGRXGKAADFKSHILEFSGFVWHESDEKHRAKAKEKLDKCSKETLFDLCKLFAIPVSRVNSKKEDIIMKLLDFIAEPRANDDSTLSDDQGSNSRKRKREGGSAAKNSEGTHKRSRKVTSYVCQTQSFL

SEQ ID NO: 103085 - protein, 71 aa, Setaria italica
  Transcript Sequence Number=SeqID_37111
LFWPEKNIVRYLRQTSTSFLSKKTSQEMQLLLYTLFRNHYSDFKKTVFQRQESNPSMQCRVLFCFQHSCES

SEQ ID NO: 103086 - protein, 434 aa, Setaria italica
  misc_feature (168)..(168): Xaa can be any naturally occurring amino acid
  Transcript Sequence Number=SeqID_37112
  Homolog annotation: Hit_ID=Q7XVZ2; Match level="QueryCoverage=97%, HitCoverage=61%, E-value=0.0, Identity=82%"; Hit description =OSJNBa0020I02.8 protein
ERSALSHKQRQLKTQLRVLCGYDKLSDVLDYGDKLLLAPPPMHGEWLPRAAVFVLVDLMVVMVGRPKGIFKECGKRIDSGLRLIHDELVKLGIVDGVTEVNLEHSTIWTAGLYLMLLLQFLENKVAVELTRSEFVEAQEALAQMKSWFSRFPTILQGCESTIVNVKGXKYAHSVGCFNEAAFHFLEAMKLTESKSMQSMCQVYAAVSYICKGDAESSSQALELVGPAYRTMDSFVGVREKTCIIFVYGLLLMRQHNPQEARNRLASGLRIAHQQLGNIQLVSQYLTMLGTLALQLHDAGQAREILKSSLTLAKTLFDIPTQIWILSVFTELYRELEERSNEMENSEYERKKEDDLERRLSEAYSHAFHQELVEQSRIQIQPLHDMSRMQSEMAGPTANDDLDIPESVGLSAPQPSVKRLVEQGSGRRSTRRRQS

SEQ ID NO: 103087 - protein, 128 aa, Setaria italica
  Transcript Sequence Number=SeqID_37113
  Gene Ontology: Mol. function=methyltransferase activity; Biological process=rRNA processing
  Homolog annotation: Hit_ID=Q852A4; Match level="QueryCoverage=98%, HitCoverage=31%, E-value=2e-43, Identity=70%"; Hit description =Putative FtsJ cell division protein
RAMSPQERGFSVILSDMCPRISGITTKDEAISCELGMRALSLALGKIKLKESDYSDTIEKYLSSTDPDPDEDGVLRRGGNLVLKFLENEDVSGFGKFCKVKFKKVSLLRPKATRPSSREIYMICEGLR

SEQ ID NO: 103088 - protein, 86 aa, Setaria italica
  misc_feature (19)..(19): Xaa can be any naturally occurring amino acid
  Transcript Sequence Number=SeqID_37114
  Gene Ontology: Mol. function=argininosuccinate lyase activity; Cellular component=cytoplasm; Biological process=arginine biosynthetic process via ornithine
  Homolog annotation: Hit_ID=B9RJX6; Match level="QueryCoverage=98%, HitCoverage=17%, E-value=3e-21, Identity=62%"; Hit description =Argininosuccinate lyase, putative
KGVPFRTSHEIVGKSVALXCVSKNNCQLADLQLDDLKAIHPVFEADVYEYLGVENAVNKFISYGSTGSNQVKKQLEDWRVQLGISS

SEQ ID NO: 103089 - protein, 241 aa, Setaria italica
  Transcript Sequence Number=SeqID_37115
  Homolog annotation: Hit_ID=B6TWU0; Match level="QueryCoverage=96%, HitCoverage=95%, E-value=1e-50, Identity=54%"; Hit description=DNA -binding WRKY
  Pfam annotation: Domain name=VQ; Domain location=61-91; Score=46.3; E_ value=1.2e-10; Accession=PF05678.6; Description=VQ motif
  Subcellular localization annotation: CTP_CleavageSite=79; ConfidenceScore=5.73e-01
MEVSTKQLLPVPHRQDPNSPSSSTSSSSSSSTSPSHPHHHRAQPHNLPPSPRPIPRTIDTTPFPTTFVQADTTSFKQVVQMLTGAEQPAKNDATTAAAAAGSSGSAGTSGGGQAAGGPCRPKKPSFKLYERRSSMKNLKMIAPLAMGPPPSPRRATPEILSPSVLDFPSLRLSSPVTPLTGDPFNRSPASTSSSEEAERAAIAERGFFLHPSPRGAEPPRLLPLFPVTSPRMAAPAAAPSE

SEQ ID NO: 103090 - protein, 44 aa, Setaria italica
  misc_feature (26)..(26): Xaa can be any naturally occurring amino acid
  Transcript Sequence Number=SeqID_37116
  Gene Ontology: Mol. function=ATP-dependent DNA helicase activity; Cellular component=DNA-dependent protein kinase complex; Biological process=double-strand break repair via nonhomologous end joining
  Homolog annotation: Hit_ID=Q7F1L9; Match level="QueryCoverage=100%, HitCoverage=12%, E-value=3e-10, Identity=75%"; Hit description =Putative DNA-dependent protein kinase 70 kDa DNA-binding subunit Ku70
MDLDPEGIFRDDSDEDDDNVQEREAXNKEMVVYLVDASPKMFTP

SEQ ID NO: 103091 - protein, 83 aa, Setaria italica
  Transcript Sequence Number=SeqID_37117
  Subcellular localization annotation: CTP_CleavageSite=31; ConfidenceScore=5.24e-01
LPCMYNRIFLYTRNLVSTKLYSPLLLKLKIQSSKKSHLCSVRCQRMRVSQRSFFLGLTPVSCLWDGEAHYCRMEVLYFCLLLL

SEQ ID NO: 103092 - protein, 86 aa, Setaria italica
  Transcript Sequence Number=SeqID_37118
SLNSCKVFIVALYFSRNYKKNKAYLPEVKKCCFILPFYPQINSLNSIKNVWLCIDVSHICINFFLWSLLHFFFYTILSLHAPSDST

SEQ ID NO: 103093 - protein, 118 aa, Setaria italica
  misc_feature (11)..(11): Xaa can be any naturally occurring amino acid
  misc_feature (33)..(33): Xaa can be any naturally occurring amino acid
  Transcript Sequence Number=SeqID_37119
GFRFQHAHYPXPYAGYPTPTGAYHQPAPAPATXPSALAAGSSSYYYPVPAATASVAAQYDPYAAYQYYAPPSGGASDAGLSVYYFTAGEASQQAAATTSTTQVAQAATGKEAGKHFGF

SEQ ID NO: 103094 - protein, 144 aa, Setaria italica
  misc_feature (133)..(133): Xaa can be any naturally occurring amino acid
  Transcript Sequence Number=SeqID_37120
  Gene Ontology: Mol. function=transferase activity, transferring glycosyl groups; Cellular component=integral to membrane; Biological process=protein amino acid glycosylation
  Homolog annotation: Hit_ID=Q5QLP3; Match level="QueryCoverage=98%, HitCoverage=32%, E-value=5e-61, Identity=77%"; Hit description =Galactosyltransferase-like
  Pfam annotation: Domain name=Gal-bind_lectin; Domain location=4-112; Score=6.8; E_value=0.00012; Accession=PF00337.14; Description =Galactoside-binding lectin
SVARGFASRPGEDTVDGELKCEKWIRDDYSKSEESRMKLWLNRLIGRPSIDWPYPFAEGKQFVLTITAGLEGYHVNVDGRHVTSFPYRTGYNLEDATELSLKGDLDIESVFADYLPNSPPSFAPQSYLEMSEXWKASPLPTEPV

SEQ ID NO: 103095 - protein, 80 aa, Setaria italica
  Transcript Sequence Number=SeqID_37121
  Gene Ontology: Biological process=cell redox homeostasis
  Homolog annotation: Hit_ID=B6TIJ3; Match level="QueryCoverage=95%, HitCoverage=29%, E-value=1e-36, Identity=92%"; Hit description =Thioredoxin
  Pfam annotation: Domain name=DUF862; Domain location=6-80; Score =31.4; E_value=8.8e-07; Accession=PF05903.6; Description=Eukaryotic protein of unknown function (DUF862)
WRQEGYKVTLNVYDLSNGLARQLSTSFLGKPIEAIWHTGVVVYGNEYFFGGGIQSTPAGSTPYGRPMRVVELGVTHVPSS

SEQ ID NO: 103096 - protein, 263 aa, Setaria italica
  Transcript Sequence Number=SeqID_37122
  Gene Ontology: Biological process=cell redox homeostasis
  Homolog annotation: Hit_ID=B6TIJ3; Match level="QueryCoverage=100%, HitCoverage=100%, E-value=1e-112, Identity=76%"; Hit description =Thioredoxin
  Pfam annotation: Domain name=DUF862; Domain location=6-146; Score =255.9; E_value=9.6e-74; Accession=PF05903.6; Description=Eukaryotic protein of unknown function (DUF862)
MAEEGYKVTLNVYDLSNGLARQLSTSFLGKPIEAIWHTGVVVYGNEYFFGGGIQSTPAGSTPYGRPMRVVELGVTHVPREVFEDYLRDIAPRFTAETYRLLTHNCNNFSNEVAQFLVGAGIPEYILNLPSEVMSSPMGPLIMPMIQNLESTLRNNAAPQATQFVPTPASVSVPSAPDKAAVKREEPAPPPAAAEASKEAAAPASAPAPAADPLGSARGKVQEEVMREFAAIMASGTLRASEAAALAMRRVMERHGDGATMQQG

SEQ ID NO: 103097 - protein, 164 aa, Setaria italica
  Transcript Sequence Number=SeqID_37123
  Gene Ontology: Mol. function=phospholipase A2 activity; Biological process=phospholipid metabolic process
  Homolog annotation: Hit_ID=B6SZI0; Match level="QueryCoverage=95%, HitCoverage=99%, E-value=2e-70, Identity=80%"; Hit description =Phospholipase A2
  Subcellular localization annotation: CTP_CleavageSite=26; ConfidenceScore=5.16e-01
MQTSTARMASVVLAFSRWSLLLLFLLATASPSRALKIGDLLGTPPAGSQGCSRKCESSFCAVPPLLRYGKYCGILYSGCPGEKPCDALDACCMVHDHCVDTHNNDYLNTRCNENLLSCLDSVSPAGPTFPGNECDVGQTTSVIRGVIETAVLAGKILHKRDDGQ

SEQ ID NO: 103098 - protein, 45 aa, Setaria italica
  Transcript Sequence Number=SeqID_37124
IYDTLILSNWHRTRVLVQKNRSTIAYTSQQAITLFFAVGLPEIDI

SEQ ID NO: 103099 - protein, 99 aa, Setaria italica
  Transcript Sequence Number=SeqID_37125
  Gene Ontology: Mol. function=aspartic-type endopeptidase activity; Biological process=DNA integration
  Homolog annotation: Hit_ID=Q01L83; Match level="QueryCoverage=96%, HitCoverage=7%, E-value=1e-23, Identity=55%"; Hit description =OSIGBa0076I14.9 protein
  Subcellular localization annotation: CTP_CleavageSite=26; ConfidenceScore=5.08e-01
GRGWRASTPGLLGPPPQTHTAFAPLQASPLAPTWDQAGLVAALNQMVLQNGGWVVDSGASSHMASSDGILLSRLPPSHSFIPVGNGQTLPITCRGNSTL

SEQ ID NO: 103100 - protein, 338 aa, Setaria italica
  Transcript Sequence Number=SeqID_37126
  Gene Ontology: Mol. function=transferase activity; Cellular component= cytoplasm; Biological process='de novo' pyrimidine base biosynthetic process
  Homolog annotation: Hit_ID=B6TC37; Match level="QueryCoverage=82%, HitCoverage=81%, E-value=1e-148, Identity=92%"; Hit description =Uridylate kinase
  Pfam annotation: Domain name=AA_kinase; Domain location=85-295; Score= 205.1; E_value=1.9e-58; Accession=PF00696.20; Description=Amino acid kinase family
  Subcellular localization annotation: CTP_CleavageSite=92; ConfidenceScore=5.83e-01
MAASAAVVPALSSPPSLSPLLPSRPRALRINTPLSLSAKPRARATAAAAAGSDSSNFGNQTSLLPPFSFTLDEGSSRSKRPYRWQRVLLKVSGEALAGDRTENIDPKITMAIAREVASVTKLGVEVAIVVGGGNIFRGASWAGCSGLDRSSADYIGMLATVMNAIFLQATMESIGIPTRVQTAFRMSEVAEPYIRRRAVRHLEKGRVVIFAAGTGNPFFTTDTAAALRCAEINAEVVLKATNVDGVYDADPRHNPNAHLLETVSYHEVTTRDLSVMDMTAITLCQENNIPVVVFNLQKPGNIAKAIVGEKVGTFIGCTRNQEQNGNAMGEERRLVNEV

SEQ ID NO: 103101 - protein, 258 aa, Setaria italica
  Transcript Sequence Number=SeqID_37127
  Gene Ontology: Mol. function=binding
  Homolog annotation: Hit_ID=Q7XIC0; Match level="QueryCoverage=95%, HitCoverage=28%, E-value=3e-29, Identity=34%"; Hit description =Putative BLE2 protein
AAVQILHSLLLPREASNKLPDSDRTTCTKAVVTLISMLRWTGPDDQIIRFFAAKIAAELAGDLLIVGIPGTIQMVSSLLDSDAKNSLVKQSNSAQIVDNNEQSNDNGQLIISHDSATTVDMKGVEVPYQTVKIIKDYSAHAEANSKWWCKTWKFLLSVKGMLSVPKEGKEPWTDEDSFPVQGMIILEKLTHNPDNCAEINRAAGLIPKIIGFMSYTNTNATNISKARQKLCITSALKLIAKLVSTEGNWFGSPAEDLR

SEQ ID NO: 103102 - protein, 391 aa, Setaria italica
  Transcript Sequence Number=SeqID_37128
  Gene Ontology: Mol. function=peroxidase activity
  Homolog annotation: Hit_ID=Q9LNU7; Match level="QueryCoverage=80%, HitCoverage=97%, E-value=8e-36, Identity=31%"; Hit description =F22G5.38
  Pfam annotation: Domain name=TPR_2; Domain location=298-332; Score =8.2; E_value=3.2; Accession=PF07719.9; Description=Tetratricopeptide repeat
  Pfam annotation: Domain name=TPR_2; Domain location=333-367; Score =9.0; E_value=2.6; Accession=PF07719.9; Description=Tetratricopeptide repeat
  Pfam module annotation: Pfam domain module=TPR_2::TPR_2; Domain location=298-332::333-367
LSLRMLKRRKQQQQQLEQGRRDERLVDRAGESARAAVGRAFASMVLIIRELQSFTLQMREALFYEDLQGVLARVHAEMHASFVWLFQHIFSGTPALMVSLMLLLANFTVYSMGDSVATAATIPPPQAAVAAVEMVDTQQPEQSHSSQQRFDPAALKTFSIGRTASVGGNGDGGGKVRPVAGSTGDGQSDESSYRQSGTVLPQDASQQATPLGAGSEASVSDSMAVEDVQDELVIWKRISDEATRMQASARAEELMDPEILEQLVAPVEAPKLDVEYSAEHAATAQRYEQAVSEEPSNSLLLANFAQFLYQVQGDHDRAEHFFKRAVRAEPADAEAMGRYAAFLWQARNDLAAAEETYQEAIAADPGNAHHAAAYAHFLWNTGGEDTCYPLD

SEQ ID NO: 103103 - protein, 61 aa, Setaria italica
  Transcript Sequence Number=SeqID_37129
EAEETSKSSAPAVVENSWFKRSLPSKTWKIRYNPIPFLPLITSSLLYFCMLCGCFLGFYVR

SEQ ID NO: 103104 - protein, 237 aa, Setaria italica
  Transcript Sequence Number=SeqID_37130
  Gene Ontology: Mol. function=zinc ion binding; Cellular component =intracellular
  Homolog annotation: Hit_ID=B4FRH9; Match level="QueryCoverage=100%, HitCoverage=100%, E-value=1e-82, Identity=63%"; Hit description =Fiber protein Fb2
  Pfam annotation: Domain name=Di19; Domain location=18-234; Score =161.5; E_value=2.5e-45; Accession=PF05605.4; Description=Drought induced 19 protein (Di19)
MDSDLWISRLMAAKRQFALQRAQRQHATPASHHERFGYDDIEPEDEGRSDFSCPYCYEDHDITSLCTHLEDEHPFESKVVACPVCSARISKDLLDHITLQHGYLFKLQRHHRLRRVAGSGNHTLSYAGRDLQETYLKVLLGNSGRSSSTNTSSSVTDSLLSSLVLNLSSTEAEETSKSSAPAVVENSWFKRSLPSKTWKISAADSNLSHEEREQRRRRAAVRSAFVQHILVTTLFDD

SEQ ID NO: 103105 - protein, 104 aa, Setaria italica
  Transcript Sequence Number=SeqID_37131
AEDGNLSLSAALIPIVATLHTIERGPRAIKEPPRGASSPAYVKNPPRTTGRGDRLASTQCIVSTSLATASPTRGAANALYKRELARRMSAPNRKAIRRNPRLTR

SEQ ID NO: 103106 - protein, 580 aa, Setaria italica
  Transcript Sequence Number=SeqID_37132
  Gene Ontology: Mol. function=nucleic acid binding
  Homolog annotation: Hit_ID=Q00RM7; Match level="QueryCoverage=32%, HitCoverage=35%, E-value=1e-46, Identity=48%"; Hit description =H0814G11.13 protein
  Pfam annotation: Domain name=RRM_1; Domain location=400-471; Score =14.3; E_value=0.0093; Accession=PF00076.14; Description=RNA recognition motif. (a.k.a. RRM, RBD, o
AVGGSTGCLPPAPPPPLSESPPFAATAGSLDVSFPERLLPHHLLLLPLVPAIPGSILCSKGIPASKNQVAEASKDTNAKKIGPPGNKIRIRLRKRLAEGVQTTSTVVPEETKNHLAKEVFEHTDNDTPSTIFVDTEAKAEEVFSKATGEGQCQEANSNSLIKTMSKDTLPEEANLIVLSLNQTTATEVQVKEEISYPERKELCEEGHKNIMSKVLPHEDSSNTPRKESYVGAINNTPCKNQSIISVHGEVEKNNSSNITRSKRLLYETNSNPSSKEVTEEAKVNNPRKNVTSAVKGEEANDNSLGNNLFEEARKNISTAKLSTEAINCAPSRRPADPVNDKKTIKKLRTSAVHATGTSHNPSGMKLSTSAAPAVGRSTSSAFLEATKEYKEFEEKVKRTVYLDNLSLLATDAVIRMALNQFGNVKNVNFVTNYTVPFDIPQSALVEMETEKDAEHVVNMLDEFPFMMSGMPRPVRAKRATAEMFNDRPWKPGRKLEFCWVGPTDPDCQNVRKFKIMSKRHEVENLSLIKNQLHEEALLAKHHQENLNCNYRKLESIESVILTGWVNRLTRIYNLNFDEVY

SEQ ID NO: 103107 - protein, 142 aa, Setaria italica
  misc_feature (20)..(20): Xaa can be any naturally occurring amino acid
  misc_feature (34)..(34): Xaa can be any naturally occurring amino acid
  misc_feature (47)..(47): Xaa can be any naturally occurring amino acid
  Transcript Sequence Number=SeqID_37133
  Gene Ontology: Mol. function=transferase activity; Cellular component= membrane
  Homolog annotation: Hit_ID=Q7XR50; Match level="QueryCoverage=100%, HitCoverage=30%, E-value=1e-69, Identity=88%"; Hit description =OSJNBa0043A12.35 protein
DVVFVPFFATLSAEMELGWXTKGAFRKEDGNEGXRRQREVVDRVTAXPAWRRSGGRDHIFVLTDPVAMWHVRTEIAPAILLVVDFGGWYKLDSKTASRNSSHMIQHTQVSLLKDVIVPYTHLLPTLPLSENKDRPTLLYFKG

SEQ ID NO: 103108 - protein, 128 aa, Setaria italica
  misc_feature (68)..(68): Xaa can be any naturally occurring amino acid
  Transcript Sequence Number=SeqID_37134
  Gene Ontology: Mol. function=oxidoreductase activity; Cellular component=anchored to membrane
  Homolog annotation: Hit_ID=B9SMP3; Match level="QueryCoverage=100%, HitCoverage=21%, E-value=6e-58, Identity=83%"; Hit description =Multicopper oxidase, putative
  Pfam annotation: Domain name=Cu-oxidase_2; Domain location=9-128; Score=100.4; E_value=6.2e-27; Accession=PF07731.6; Description =Multicopper oxidase
NEISYIAPSTPLVLAQLFNVPGVYKLDFPNHPMNRLPKVDTSIINGTYKGFMEIIFQNNATTVQSYHXDGYAFFVVGMDYGLWTENSRGTYNKWDGVARSTIQVFPGAWTAILVFLDNAGIWNLRVQN

SEQ ID NO: 103109 - protein, 89 aa, Setaria italica
  Transcript Sequence Number=SeqID_37135
PKFRLGGLLSPPQTSRSSPRLVACRRQERRHLVTHLPEIHHGFQLLQWPPNNPTGNEARTAGPRRCAESIEHANSWIKRQLLQRSPEDS

SEQ ID NO: 103110 - protein, 45 aa, Setaria italica
  Transcript Sequence Number=SeqID_37136
SNYENGYLISPPVICDKWLIYPVLDTRINIGITLIEITGHFYVLS

SEQ ID NO: 103111 - protein, 124 aa, Setaria italica
  Transcript Sequence Number=SeqID_37137
ASCSLRLSDLAKSYDLLAASHMDMDCHSSSSLARLAFMCSLLAFCTAYSVDFSRACSDVESCKLPKRFSYALVLQDLHGRVDGLDRQIVSKLQQFMPTSFDAQVCLQSSGRMNCSGDLERIHIL

SEQ ID NO: 103112 - protein, 90 aa, Setaria italica
  misc_feature (11)..(11): Xaa can be any naturally occurring amino acid
  Transcript Sequence Number=SeqID_37138
  Subcellular localization annotation: CTP_CleavageSite=46; ConfidenceScore=5.58e-01
QGGGPASSKSXGPRYACSRPASSGPRSSSCGPAAQQATRPHVHGPHARQLWSSSSGLDALKVLVVLHRLIQRITTASRQSVPESMLASVY

SEQ ID NO: 103113 - protein, 188 aa, Setaria italica
  misc_feature (143)..(143): Xaa can be any naturally occurring amino acid
  Transcript Sequence Number=SeqID_37139
  Gene Ontology: Mol. function=lipid binding; Cellular component=plasma membrane
  Homolog annotation: Hit_ID=B6SYE1; Match level="QueryCoverage=99%, HitCoverage=35%, E-value=1e-75, Identity=74%"; Hit description=Lipid binding protein
  Pfam annotation: Domain name=LBP_BPI_CETP; Domain location=1-157; Score=41.2; E_value=4.2e-09; Accession=PF01273.17; Description=LBP BPI  CETP family, N-terminal domain
  Subcellular localization annotation: CTP_CleavageSite=43; ConfidenceScore=5.01e-01
PDIEKSASIPLVGTVRMTASGIVLHGLAVTNSTVAVGDTGVVVAATLARANLTMEWSYSYNAWVVTITDRGNASIQVEGMEVGVSMGMKNQNGSLKLSVMECGCYMKELDITLNGGASWFYQVFIDAFSNHIRTSVENAITKXMEGALKLDSFLGNLPKKSNLDSSCCNECYFVNDPIFKRSSVEFDR

SEQ ID NO: 103114 - protein, 46 aa, Setaria italica
  Transcript Sequence Number=SeqID_37140
LYRQAHANNYCIMQIVDARIHDMRRTIPDDKRMFTNGLKKNPFKDY

SEQ ID NO: 103115 - protein, 65 aa, Setaria italica
  Transcript Sequence Number=SeqID_37141
GTGLLICNQLLELDGGFMKNTSCYLKALAARHHSFGIEVAATQNQDNNASEASSLYVDASTKSVF

SEQ ID NO: 103116 - protein, 293 aa, Setaria italica
  misc_feature (4)..(4): Xaa can be any naturally occurring amino acid
  Transcript Sequence Number=SeqID_37142
  Homolog annotation: Hit_ID=B6TCH2; Match level="QueryCoverage=100%, HitCoverage=72%, E-value=1e-110, Identity=71%"; Hit description=BSD domain containing protein
  Pfam annotation: Domain name=BSD; Domain location=79-139; Score=64.2; E_value=4.7e-16; Accession=PF03909.9; Description=BSD domain
DLAXIGGRVRTGISMLSNAGAVACISRIASSLLPFGSGEEEGQEEGEAVGVTEEVVVFVSHISKHPKTWLDFPLFADDRHADDFELSEAQYGHAVAIEHLVPSLSYLRTELCSTIMSEACFWKIYFVLLHSKLNKQDAEILSTPQILEAREELLQSSPTKNNPSSENMSAPSTQPEDSTLSPSSIQNESSMSEAPSVQEPTSDPVPNVEAEKHPISTTDTEVIDKSVIQEELVVKTEVKSLPTEKSNPNLVEDDDEKEVDDWLQDMDPVPSKTGNTAPAGEEEDVSFSDLEDD

SEQ ID NO: 103117 - protein, 81 aa, Setaria italica
  Transcript Sequence Number=SeqID_37143
LRADAAAHSEPRSDGWGFDGSNRIKSNRSRPNSSGIETEDAGPGELDRLHPMEEFVSWKLGGGFPSGDSERQMASRAKRNL

SEQ ID NO: 103118 - protein, 62 aa, Setaria italica
  Transcript Sequence Number=SeqID_37144
  Subcellular localization annotation: CTP_CleavageSite=38; ConfidenceScore=5.07e-01
KSRHKLVKQGTHCKVCYDQSQKTVTEQTKRFRNDSHSRASSKDTPFQRGFPPLNSPLAPSPP

SEQ ID NO: 103119 - protein, 150 aa, Setaria italica
  Transcript Sequence Number=SeqID_37145
  Gene Ontology: Mol. function=binding
  Homolog annotation: Hit_ID=B9RT64; Match level="QueryCoverage=94%, HitCoverage=11%, E-value=2e-27, Identity=45%"; Hit description =Condensin, putative
HKCFPANPVSLQENICDGEVAPCIKKICASLGKKKKLKPLLANSLQNIITISESLWLRNRMPIENWTAPIGSWWLLSEVSSFAPKSVNWKFLSHHWKLLDNVGQDDRGKACSQVEPNSALWAVNRVSLLQTISNVSMELPVEPAASNFRL

SEQ ID NO: 103120 - protein, 104 aa, Setaria italica
  Transcript Sequence Number=SeqID_37146
  Gene Ontology: Mol. function=protein serine/threonine kinase activity; Biological process=protein amino acid phosphorylation
  Homolog annotation: Hit_ID=Q84ZH4; Match level="QueryCoverage=98%, HitCoverage=15%, E-value=8e-31, Identity=58%"; Hit description =Putative receptor kinase Lecrk
  Pfam annotation: Domain name=Lectin_legB; Domain location=1-72; Score= -107.6; E_value=0.0049; Accession=PF00139.11; Description=Legume lectin domain
DGEVMQVWVDYDGEAKQINVTLAPMGVVKPSKPLISNTSDLSAVITEKAYVGFSAATGPIKSRHYVLAWSFAMNGPAPAIDFKKMPKLPNPDHKTPAKALEIAL

SEQ ID NO: 103121 - protein, 58 aa, Setaria italica
  Transcript Sequence Number=SeqID_37147
  Gene Ontology: Mol. function=transporter activity; Cellular component= integral to membrane; Biological process=transport
  Homolog annotation: Hit_ID=Q9ATN1; Match level="QueryCoverage=100%, HitCoverage=20%, E-value=1e-12, Identity=63%"; Hit description =Aquaporin NIP3-1
  Subcellular localization annotation: CTP_CleavageSite=46; ConfidenceScore=5.29e-01
MEPGSTPPNGSAPATPGTPAPLFSGGPRVDSLSYERKSMPRCRCLPAVEGWGLATHTC

SEQ ID NO: 103122 - protein, 83 aa, Setaria italica
  Transcript Sequence Number=SeqID_37148
  Gene Ontology: Mol. function=transporter activity; Cellular component= integral to membrane; Biological process=transport
  Homolog annotation: Hit_ID=Q0IWF3; Match level="QueryCoverage=98%, HitCoverage=26%, E-value=2e-37, Identity=93%"; Hit description =Aquaporin NIP3-1
LQLGAEFMGTFILIFFATAAPIVNQKYGGVISPFGNAACAGLAVTIIILSTGHISGAHLNPSLTIAFAALRHFPWLQVPAYVS

SEQ ID NO: 103123 - protein, 299 aa, Setaria italica
  misc_feature (33)..(33): Xaa can be any naturally occurring amino acid
  Transcript Sequence Number=SeqID_37149
  Gene Ontology: Mol. function=transporter activity; Cellular component= integral to membrane; Biological process=transport
  Homolog annotation: Hit_ID=Q9ATN1; Match level="QueryCoverage=100%, HitCoverage=100%, E-value=1e-130, Identity=78%"; Hit description =Aquaporin NIP3-1
  Pfam annotation: Domain name=MIP; Domain location=61-278; Score =183.9; E_value=4.5e-52; Accession=PF00230.12; Description=Major intrinsic protein
  Subcellular localization annotation: CTP_CleavageSite=46; ConfidenceScore=5.59e-01
MEPGSTPPNGSAPATPGTPAPLFSGGPRVDVTXSSRKAMPRCRCLPAVEGWGLATHTCVVEIPAPDVSLTRKLGAEFMGTFILIFFATAAPIVNQKYGGVISPFGNAACAGLAVTIIILSTGHISGAHLNPSLTIAFAALRHFPWLQVPAYVSVQVLGSICASFALKGVFHPFLSGGVTVPDVTISTAQAFFTEFIITFNLLFVVTAVATDTRAVGELAGIAVGAAVTLNILVAGPTTGGSMNPVRTLGPAVAAGNYRQLWIYLLAPTLGAVAGAGVYTAVKLRDENGETPRTQRSFRR

SEQ ID NO: 103124 - protein, 257 aa, Setaria italica
  misc_feature (7)..(7): Xaa can be any naturally occurring amino acid
  misc_feature (17)..(17): Xaa can be any naturally occurring amino acid
  Transcript Sequence Number=SeqID_37150
  Gene Ontology: Mol. function=protein binding; Cellular component =endosome membrane; Biological process=protein transport
  Homolog annotation: Hit_ID=B9T2R8; Match level="QueryCoverage=99%, HitCoverage=31%, E-value=1e-125, Identity=87%"; Hit description =Vacuolar protein sorting protein, putative
  Pfam annotation: Domain name=Vps53_N; Domain location=1-257; Score =300.7; E_value=3e-87; Accession=PF04100.4; Description=Vps53-like, N- terminal
MDKSSAXRVHQPDVPHXASLSGVEPLMQKIQSEIRRVDASILAAVRQQSNSGTKAKEELAAATNAVQELMHKIHEIKTKAEQSETMVQEICRDIKKLDCAKRHITTTITALHRLTMLVSAVEQLQVMASKRQYKEAAAQLEAVNQLCSHFEAYRDVPKITELREKFKNIKKILKSHVFSDFSSLGTGKETEDPMLLQQLSDACLVVDALEPSVREELVKNFCSKELTSYRQIFEGAELAKLDKTERRYAWIKRRLRF

SEQ ID NO: 103125 - protein, 626 aa, Setaria italica
  Transcript Sequence Number=SeqID_37151
  Gene Ontology: Mol. function=protein binding; Cellular component =endosome membrane; Biological process=protein transport
  Homolog annotation: Hit_ID=B9T2R8; Match level="QueryCoverage=93%, HitCoverage=69%, E-value=0.0, Identity=65%"; Hit description =Vacuolar protein sorting protein, putative
  Pfam annotation: Domain name=Vps53_N; Domain location=1-234; Score =72.1; E_value=2.1e-18; Accession=PF04100.4; Description=Vps53-like, N-terminal
SVLSQLQIYAYDQSLSSILQINYNTVREELVKNFCSKELTSYRQIFEGAELAKLDKTERRYAWIKRRLRSNEDTWKIFPPSWHVDYLLCIQFCKITRTQLVGILNNLKEKPDVATLLLAFQRTLEFEEELAEKFSGGTATARNKESASDDEDESGEHNKIVSDIRKKYEKKLAAPNDEVGHDKDKQKDLSVPGAGFNFHGIISSCFEPYMNVYIELEEKSLVDQLEKLVQEERWEIEEGSQTNILSSSMQVFLVIRKSLKRCSALTKNQTLFNLFQVFQRILKAYAAKLYARLPKGGTGIVAAATGTDGQIRTSDRDERMICYIVNTAEYCHQTSGELAENVSKMINPQFADKVDMSEVQDEFSAVITKALMTLVHGLETKFDAEMVAMTRVPWATLESVGDQSEYVNGISSILSSSIPVLGSLLSPTYFQYFLDKLAASLGPRFYLNIYKCKHISETGAQQMLLDTQAVKTILLDIPALGKQSTGAASYSKFVSREMSKAEALLKVILSPVDSVANTYRALLPEGTPLEFQRILDLKGLKKADQQAILEDFNKHAPAPAPTIKHPAVAPSVAPPVATTSIQMAPSVATPAVSMTPSMAALTGALANREDVLARAAALGRGAATTG

SEQ ID NO: 103126 - protein, 76 aa, Setaria italica
  misc_feature (56)..(56): Xaa can be any naturally occurring amino acid
  Transcript Sequence Number=SeqID_37152
THYINHALHLNLVSLDEPQSMFLCADSLHDGYSANHTLASGDCWDMSAYLCLHSIXKIYKVNKIKKKKTKSKTKTK

SEQ ID NO: 103127 - protein, 139 aa, Setaria italica
  misc_feature (47)..(47): Xaa can be any naturally occurring amino acid
  Transcript Sequence Number=SeqID_37153
FFSYNEDSKISSQPIFSYNQHVGEEPLHFHVEPPETVSSHKLEYYEXQNNVDNLESLGQLYEIQPYMHMPYDQLEPCTPSWSLNPGYYRACTEGMAMTPEYDNHTLASGDCWDMSSLFMPPFYPQDIQVYEQSHGDENV

SEQ ID NO: 103128 - protein, 69 aa, Setaria italica
  Transcript Sequence Number=SeqID_37154
RSYIFCLTVARMEWILQWSELAISIDTFPWSKSGLRIQVSLFFPFDMLLPFLCWSAIWLHFCVTNWLNV

SEQ ID NO: 103129 - protein, 368 aa, Setaria italica
  Transcript Sequence Number=SeqID_37155
MFLCADSLHDGYSANHPQPRSPLPHQPSPRPQPPAPAQPRPSSPPPPVAEPYYWPKPYDYGDAPRYQPAYATPEVFRGWPFLPGAPCRSACGRDYWRQCMRGLDYLFGHSDGYGERRIGVDCLGVPVYANRKGGVEDAVVVEVAPPATGTVEWHDTSEEQYYQSNRLSWYGNTEEETYAYAQPTYPSYDSSYEQSYGVSDETTWFPNQSYQEVYNEEESQYQEFFSYNEDSKISSQPIFSYNQHVGEEPLHFHVEPPETVSSHKLEYYENFSIYNSQNNVDNLESLGQLYEIQPYMHMPYDQLEPCTPSWSLNPGYYRACTEGMAMTPEYDNHTLASGDCWDMSSLFMPPFYPQDIQVYEQSHGDENV

SEQ ID NO: 103130 - protein, 102 aa, Setaria italica
  Transcript Sequence Number=SeqID_37156
RAKVSALYSLQEREKHTAEDKHENTAKLLLKIDKRMNYKNPLNCGWGNQLFTTNTILFNSFEILEYSRINTKRTNKMLDGGSKCWPKLIFSINHSYKRILGY

SEQ ID NO: 103131 - protein, 85 aa, Setaria italica
  misc_feature (36)..(36): Xaa can be any naturally occurring amino acid
  Transcript Sequence Number=SeqID_37157
  Subcellular localization annotation: CTP_CleavageSite=51; ConfidenceScore=5.89e-01
AGHPPPPPPWRLLPSVQWPPSRAASAPSRRTPSPPXSTASSPPPPRPPPPSSSTRSSVPQLPPSSSRVSKPSPIVMPPSPTPLRS

SEQ ID NO: 103132 - protein, 127 aa, Setaria italica
  Transcript Sequence Number=SeqID_37158
  Homolog annotation: Hit_ID=B6TVP3; Match level="QueryCoverage=100%, HitCoverage=45%, E-value=6e-24, Identity=44%"; Hit description =Phloem-specific lectin
WRWMHPPESSHRFMEVAELQYVWWLEIRGMIHSKMLSQDSTYAAYIVFKTTDRRDGLDYPPQEASITVAGSTSTHKVCLQSYDNEHEDGAVPLTWRYSRRHRRVFPGNLVIPQRRTDDWMELEMGQF

SEQ ID NO: 103133 - protein, 60 aa, Setaria italica
  Transcript Sequence Number=SeqID_37159
  Gene Ontology: Mol. function=ribonuclease H activity
  Homolog annotation: Hit_ID=B9RUE6; Match level="QueryCoverage=96%, HitCoverage=22%, E-value=1e-13, Identity=63%"; Hit description =Nuclease, putative
LWRCRSDNMAVLCKKAKELKGTFLTFQINHVLRELNSDADVQANFAVGLAVDQVEELCVC

SEQ ID NO: 103134 - protein, 66 aa, Setaria italica
  Transcript Sequence Number=SeqID_37160
DVESPCHDVYSGSLFQLNVPRPCFLRSKMTSSAAAHSGGDGIYAAAGAAAAPLLSRPLRLHLLHEI

SEQ ID NO: 103135 - protein, 98 aa, Setaria italica
  misc_feature (72)..(72): Xaa can be any naturally occurring amino acid
  Transcript Sequence Number=SeqID_37161
  Subcellular localization annotation: CTP_CleavageSite=49; ConfidenceScore=5.68e-01
MASLQLGLYTGGSNSRRRSGGRSAAAVKQLLSRLRSTWRRRRAARPRRRAAVSFGYDLQSYSQNFDDGLASXRPPPVVARAAIIPSLSSLVMCVNDCA

SEQ ID NO: 103136 - protein, 48 aa, Setaria italica
  Transcript Sequence Number=SeqID_37162
TYNIIKCDSFSFYSEKAGMIFWIFYIYLLRIKLYLFFLNSSSIIYYST

SEQ ID NO: 103137 - protein, 276 aa, Setaria italica
  Transcript Sequence Number=SeqID_37163
  Gene Ontology: Mol. function=metal ion binding
  Homolog annotation: Hit_ID=Q9M622; Match level="QueryCoverage=89%, HitCoverage=80%, E-value=2e-45, Identity=39%"; Hit description =ReMembR-H2 protein JR700
  Pfam annotation: Domain name=PA; Domain location=43-143; Score=49.8; E_value=1.1e-11; Accession=PF02225.14; Description=PA domain
  Pfam annotation: Domain name=zf-C3HC4; Domain location=228-269; Score= 35.5; E_value=2.1e-07; Accession=PF00097.17; Description=Zinc finger, C3HC4 type (RING finger)
  Pfam module annotation: Pfam domain module=PA::zf-C3HC4; Domain location=43-143::228-269
  Subcellular localization annotation: CTP_CleavageSite=10; ConfidenceScore=5.15e-01
MSPRVVLLFLAAALRPCAALVRLHSNSFSFTFLDAPARFGPRVGSDGICGSLRAAEPAEACEPIKDSGGRRGAGRKAFVLIARGNCSFEGKVRAAQKAGFDAAVVYDDEEKASLYSMVGDSEGIHIPAIFVSKMAGETLKKFARGEDDECCINSSMDETAGTVLVMSFVSLVVIISVLASFLFARNCRLLRHGVDNHPPYVKKHVVEKLPCSAYSAPCSSEDIFQEACAICLEDYNNGDMLRHLPCKHEFHKICIDSWLTKWGTFCPICKLEVTSS

SEQ ID NO: 103138 - protein, 403 aa, Setaria italica
  Transcript Sequence Number=SeqID_37164
  Gene Ontology: Mol. function=phosphoribosylaminoimidazolecarboxamide formyltransferase activity; Cellular component=chloroplast; Biological process=purine nucleotide biosynthetic process
  Homolog annotation: Hit_ID=B9SXJ1; Match level="QueryCoverage=99%, HitCoverage=64%, E-value=0.0, Identity=81%"; Hit description =Bifunctional purine biosynthesis protein, putative
  Pfam annotation: Domain name=AICARFT_IMPCHas; Domain location=11-336; Score=657.3; E_value=1.4e-194; Accession=PF01808.10; Description =AICARFTIMPCHase bienzyme
LFGGPTLIRAAAKNHKDVLVVVDHEDYPALLEYLEGKQDDQDFRRRLAWKAFQHVASYDSAVSEWLWKQSNKGDTFPPSFTVPLTLKSTLRYGENPHQNAAFYGDKSLSLVNAGGIATAIQHHGKEMSYNNYLDADAAWNCVSEFESPTCVVVKHTNPCGVASRQDILEAYRLAVKADPVSAFGGIVAFNTTIDEDLAREIREFMSPTDGKTRMFYEIVVAPRYTEKGLEILKGKSKMLRILEAKPSGKSMLSLRQVSGGWLAQESDDLTPEDITFTKMSERAPEDSELSDAKFAWLCVKHVKSNAIVIAKNNRMLGMGSGQPNRLESLRIAFRKAGEEAKGAALASDAFFPFAWNDAVEEACQSGIAVIAEPGGSIRDQDAVDCCNKYGVSLLFTGVRHFRH

SEQ ID NO: 103139 - protein, 58 aa, Setaria italica
  Transcript Sequence Number=SeqID_37165
  Gene Ontology: Mol. function=phosphoribosylaminoimidazolecarboxamide formyltransferase activity; Cellular component=chloroplast; Biological process=purine nucleotide biosynthetic process
  Homolog annotation: Hit_ID=Q84XA4; Match level="QueryCoverage=91%, HitCoverage=8%, E-value=6e-19, Identity=79%"; Hit description =Aminoimidazolecarboximide ribonucleotide transformylase/inosine monophosphate cyclohydrolase
SFLSRFVFGNVRRLEEACQSGIAVIAEPGGSIRDQDAVDCCNKYGVSLLFTGVRHFRH

SEQ ID NO: 103140 - protein, 300 aa, Setaria italica
  Transcript Sequence Number=SeqID_37166
  Gene Ontology: Mol. function=phosphoribosylaminoimidazolecarboxamide formyltransferase activity; Cellular component=chloroplast; Biological process=purine nucleotide biosynthetic process
  Homolog annotation: Hit_ID=B9SXJ1; Match level="QueryCoverage=73%, HitCoverage=35%, E-value=1e-105, Identity=83%"; Hit description =Bifunctional purine biosynthesis protein, putative
  Pfam annotation: Domain name=AICARFT_IMPCHas; Domain location=210 -300; Score=-184.9; E_value=0.026; Accession=PF01808.10; Description =AICARFTIMPCHase bienzyme
  Pfam annotation: Domain name=MGS; Domain location=90-205; Score =188.7; E_value=1.6e-53; Accession=PF02142.14; Description=MGS-like domain
  Pfam module annotation: Pfam domain module=AICARFT_IMPCHas::MGS; Domain location=210-300::90-205
  Subcellular localization annotation: CTP_CleavageSite=49; ConfidenceScore=5.50e-01
MPLYLVSSPAAAAKLAAGTRAYPRRRRQLLFPARHCLGRRGSLSSLSSSAERLAGRAMDAAEAGTSTAPEASFSATGVKQALISLSDKTDLANLGNGLQRLGFSIISTGGTASSLEAAGVSVTKVEEITHFPEMLDGRVKTLHPSIHGGILARRDQKHHLQALNEHGIGTFDVVVVNLYPFYNKVTSSAISFEDGIENIDIGGPTLIRAAAKNHKDVLVVVDHEDYPALLEYLEGKQDDQDFRRRLAWKAFQHVASYDSAVSEWLWKQSNKGDTFPPSFTVPLTLKSTLRYGENTTTRKY

SEQ ID NO: 103141 - protein, 146 aa, Setaria italica
  misc_feature (32)..(32): Xaa can be any naturally occurring amino acid
  Transcript Sequence Number=SeqID_37167
  Gene Ontology: Mol. function=nucleic acid binding; Cellular component= chromatin; Biological process=DNA integration
  Homolog annotation: Hit_ID=Q2QMU2; Match level="QueryCoverage=76%, HitCoverage=29%, E-value=2e-34, Identity=63%"; Hit description =Retrotransposon protein, putative, unclassified
  Pfam annotation: Domain name=Retrotrans_gag; Domain location=7-79; Score=2.8; E_value=0.032; Accession=PF03732.9; Description =Retrotransposon gag protein
GECGATARATWLAIETQFLGNRETRALYLDAXFHNFVQGDLSITDYCRRFKGMADALGDLGEQVSDRTLILNIIRGLNEKFAAVGHDISCSRPLRTFMEARDDLLLEELTMVNPTLTPSTTLLTGTGPGLSSSSSHALGSSHQSTS

SEQ ID NO: 103142 - protein, 231 aa, Setaria italica
  misc_feature (13)..(13): Xaa can be any naturally occurring amino acid
  Transcript Sequence Number=SeqID_37168
  Homolog annotation: Hit_ID=Q9LMU3; Match level="QueryCoverage=90%, HitCoverage=41%, E-value=2e-57, Identity=56%"; Hit description =F2H15.8 protein
  Pfam annotation: Domain name=Rhodanese; Domain location=89-188; Score= 30.1; E_value=9.3e-06; Accession=PF00581.12; Description=Rhodanese -like domain
SVKDALAYADWVXKDYRFCDMLVQTSPALTGHAFPRLKLRYKPSLVQLEGGSLHLPLLDPSMRATPLTPSKWKERLKAKACLDVPSSETPGDTSGRRLLLLDVRNGYEWDVGHFEGAERPNVDCFRSTSFGLSEEMSDPLNGVDKEKTDILMYCTGGIRCDVYSTILRKKGFRNLYTLEGGVSNYLKAEGPAGWVGNLFVFDGRLSLPPATFRRQLSQEEEAAGAAAVEIV

SEQ ID NO: 103143 - protein, 168 aa, Setaria italica
  misc_feature (149)..(149): Xaa can be any naturally occurring amino acid
  Transcript Sequence Number=SeqID_37169
  Subcellular localization annotation: CTP_CleavageSite=35; ConfidenceScore=5.44e-01
ASSPLSGPRPAPAASQNPSVPQAPPRPPPPPPPVSAAARAREEGELSSGADDDEALQTRRAASSILRKFAEAASQVPSATLLGKGGNSLSVSNAMAHKSAAPSYKKVMRGNQGQFKPGTNRNLSWQKPVPSDNLVITFSDDDSGTDSGXAKQDTVRGRKATPQGTQGI

SEQ ID NO: 103144 - protein, 175 aa, Setaria italica
  misc_feature (157)..(157): Xaa can be any naturally occurring amino acid
  Transcript Sequence Number=SeqID_37170
  Gene Ontology: Cellular component=plasma membrane
  Homolog annotation: Hit_ID=Q9XI89; Match level="QueryCoverage=94%, HitCoverage=32%, E-value=3e-65, Identity=69%"; Hit description =F7A19.6 protein
  Pfam annotation: Domain name=DUF1336; Domain location=1-159; Score =188.8; E_value=1.6e-53; Accession=PF07059.4; Description=Protein of unknown function (DUF1336)
RIGNKDLVLYFKLSDSFDKEISPQLQDSIKRLMNDEMEKVKGFPVDSTVPYTERLKILAGLANPDDLQLSTAERKLVQTYNQKPVLSRPQHKFYKGPNYFEIDLDVHRFSFISRKGLETFRERLKHGVLDLGLTIQAATQKTEELPEHVLCCMRLNXIDFADNGQIPTLITAADE

SEQ ID NO: 103145 - protein, 315 aa, Setaria italica
  misc_feature (8)..(8): Xaa can be any naturally occurring amino acid
  misc_feature (177)..(177): Xaa can be any naturally occurring amino acid
  misc_feature (194)..(194): Xaa can be any naturally occurring amino acid
  misc_feature (207)..(207): Xaa can be any naturally occurring amino acid
  misc_feature (287)..(287): Xaa can be any naturally occurring amino acid
  Transcript Sequence Number=SeqID_37171
  Gene Ontology: Cellular component=plasma membrane
  Homolog annotation: Hit_ID=Q9XI89; Match level="QueryCoverage=98%, HitCoverage=62%, E-value=4e-93, Identity=54%"; Hit description =F7A19.6 protein
  Pfam annotation: Domain name=DUF1336; Domain location=57-299; Score =374.7; E_value=1.6e-109; Accession=PF07059.4; Description=Protein of unknown function (DUF1336)
QQQKKKTXAVVRLSFRRRSYEGDEMTELTGSANYLYRPRAGFTVPCSTNEKISDGCWSVLEPSNFKVRGESFFKDKRKSPAPDCSPYTPIGADMFAYTRKIHHIAQHLSLPSLKTHETFPSLLIVNIQLPTYPATVFGDNDGDGISLVLYFKLSDSFDKEISPQLQDSIKRLMNDEXSTSLRFPLLLVVGLVKXSKLGFGLNPCVDXLQLSTAERKLVQTYNQKPVLSRPQHKFYKGPNYFEIDLDVHRFSFISRKGLETFRERLKHGVLDLGLTIQAQKTEELPEXHVLCCMRLNKIDFADNGQIPTLITAADE

SEQ ID NO: 103146 - protein, 239 aa, Setaria italica
  Transcript Sequence Number=SeqID_37172
  Gene Ontology: Mol. function=transporter activity; Cellular component= membrane; Biological process=oligopeptide transport
  Homolog annotation: Hit_ID=B6SVA1; Match level="QueryCoverage=81%, HitCoverage=33%, E-value=4e-93, Identity=85%"; Hit description=LigA
MMDKAATGDKPEDEHKAYAFAVVADGDNMKKRHLSDDDDGAAGDYRGWKSMPYVIGNETCEKLGTIGTTANLLVYLTTVYGMKSASAATLLSLWDGTVNLAPILGAFLSDSYLGRYTTIGLASIASFVGMILLTLTAAVPSLHPHGMGPSATQMAVLLVSFGLLAVGAGGIRPCNLAFGADQFDPRTPAGRRGITSFFNWYYFTFTIAMMISATFIIYLQSSVSWALGLAVPATLMGLS

SEQ ID NO: 103147 - protein, 146 aa, Setaria italica
  Transcript Sequence Number=SeqID_37173
  Gene Ontology: Mol. function=methyltransferase activity; Biological process=tRNA processing
  Homolog annotation: Hit_ID=Q8H4D4; Match level="QueryCoverage=97%, HitCoverage=13%, E-value=7e-36, Identity=54%"; Hit description=tRNA wybutosine synthesizing protein 2 homolog
IVIEDHLVILGGGASCYAFGTKFNQPIIVDLHSVDSMFKHDDKKDGTPVQSCDAIPTVDLSRDEKKGHDKSQNDSHSGGFTDSGPLVLQLEKKYAKLAKDILKKFGWLDLARKVRVSHDNSHVLFPVNEVFHVLNTDDHMMMEHKS

SEQ ID NO: 103148 - protein, 68 aa, Setaria italica
  misc_feature (65)..(68): Xaa can be any naturally occurring amino acid
  Transcript Sequence Number=SeqID_37174
CPTICQYLTKSFMTVVESPRDSFSLFLCFCLEQFHMALYESPLKFSDFIWKYNGVPCLVNLKKKXXXX

SEQ ID NO: 103149 - protein, 194 aa, Setaria italica
  misc_feature (107)..(107): Xaa can be any naturally occurring amino acid
  misc_feature (186)..(186): Xaa can be any naturally occurring amino acid
  Transcript Sequence Number=SeqID_37175
  Gene Ontology: Mol. function=small protein activating enzyme activity; Cellular component=dendrite; Biological process=ubiquitin -dependent protein catabolic process
  Homolog annotation: Hit_ID=B9FV11; Match level="QueryCoverage=100%, HitCoverage=30%, E-value=8e-92, Identity=84%"; Hit description =Ubiquitin-activating enzyme E1
PFSFCIEDDTSTYGVYTKGGIVTQVKEPKVLRFKALRDAMRDPGDFLLSDFSKFERSPVLHLAFQALDNFKKAHGRYPTAGCEQDAQSFLKFAADINEASVDSKLEXIDEKLLRHFASGSRAVLNPMGARLGGIVGQEVVKACSGKFHPLFQFFYFDSVESLPKYQLDPQDLKPSNSRYDAQISVXFGSKLQKK

SEQ ID NO: 103150 - protein, 119 aa, Setaria italica
  Transcript Sequence Number=SeqID_37176
  Subcellular localization annotation: CTP_CleavageSite=61; ConfidenceScore=5.16e-01
SVSSVIVSTISACFWVILAVTNPPKAIKTSLWAAPVFALACGVVILLVANSAALGIGVLVVVFVVGAGLYSCWASGPRLRHASELLSASVTGAHLPPSTSCFVIFVLLAMFGYMAFWTV

SEQ ID NO: 103151 - protein, 198 aa, Setaria italica
  misc_feature (142)..(142): Xaa can be any naturally occurring amino acid
  Transcript Sequence Number=SeqID_37177
  Gene Ontology: Mol. function=hydrolase activity
  Homolog annotation: Hit_ID=Q8VZV6; Match level="QueryCoverage=97%, HitCoverage=58%, E-value=2e-54, Identity=54%"; Hit description =Putative phospholipase
MVHPIAEADERSPFGRLTPDEFYARHGVTHTTSSFVNPRGLRIFTQRWTPATTPVLGAVAVVHGFTGESSWMVQLTAVHLAASGFAVAALDHQGHGFSEGLQGHIPDIGPVLDDCDAAFAAFRADHPPPLPCFLYGESLGGXAIALLLHLRRKDLWRDGAVLNGAMCGVSPRFKPPWPLEHLLAAAAAVIPTWRVAYT

SEQ ID NO: 103152 - protein, 93 aa, Setaria italica
  Transcript Sequence Number=SeqID_37178
  Gene Ontology: Cellular component=integral to membrane; Biological process=protein transport
  Homolog annotation: Hit_ID=Q6Z8F5; Match level="QueryCoverage=91%, HitCoverage=30%, E-value=9e-42, Identity=95%"; Hit description =Secretory carrier-associated membrane protein 5
  Pfam annotation: Domain name=SCAMP; Domain location=7-93; Score=26.7; E_value=7.2e-09; Accession=PF04144.5; Description=SCAMP family
RNYSNQFFPIIHHDIANEIPANAQKLQYLAFASWLGIVLCLFWNFIAVIVCWIRGGDSKLFFLATIYGMLGIPLSYLMWYRPLYRAMRYATIG

SEQ ID NO: 103153 - protein, 275 aa, Setaria italica
  Transcript Sequence Number=SeqID_37179
  Gene Ontology: Cellular component=integral to membrane; Biological process=protein transport
  Homolog annotation: Hit_ID=Q0JAI9; Match level="QueryCoverage=100%, HitCoverage=100%, E-value=1e-121, Identity=76%"; Hit description =Secretory carrier-associated membrane protein 6
  Pfam annotation: Domain name=SCAMP; Domain location=101-275; Score =352.4; E_value=8.5e-103; Accession=PF04144.5; Description=SCAMP family
MNHDPNPFDEGADDNPFSNGGGGGGGARGGGGKSQFGFRPAEPVGFGGGRGDATVDIPLDTMNDSKGKAKELSQWESDLRRRDADIRRREEALRSAGVPMEDKNWPPFFPIIHHDIANEIPANAQKLQYLAFASWLGIVLCLFWNFIAVIVCWIRGGDSKLFFLATIYGMLGIPLSYLMWYRPLYRAMRTDSAFSFGWFFLCYLLHIGFCVFAAIAPPIIFRGKSLTGILAAIDTFSDHAIVGIFYFVGFALFCLETLVSIWVLQKVYMYFRGHK

SEQ ID NO: 103154 - protein, 123 aa, Setaria italica
  Transcript Sequence Number=SeqID_37180
  Subcellular localization annotation: CTP_CleavageSite=44; ConfidenceScore=5.18e-01
ALTKHRRMAMVSSTLLCFQEAQEIVLRSRSQSQQMSNGAPPQPSSASRAHVRRVDRSALDEDSNLSGERRRRPPLHPTTNRRRIFLAPRDWASLTVMLRPSSSLPFIPSMASRIACSLANVVR

SEQ ID NO: 103155 - protein, 34 aa, Setaria italica
  Transcript Sequence Number=SeqID_37181
DVSTVVTSSSVNRLLRVDRRSYTRSLDRAGCHYL

SEQ ID NO: 103156 - protein, 233 aa, Setaria italica
  Transcript Sequence Number=SeqID_37182
  Gene Ontology: Mol. function=protein binding; Cellular component =nucleolus; Biological process=RNA metabolic process
  Homolog annotation: Hit_ID=Q00V28; Match level="QueryCoverage=81%, HitCoverage=18%, E-value=5e-28, Identity=35%"; Hit description =Protein involved in high osmolarity signaling pathway (ISS)
  Pfam annotation: Domain name=MIF4G; Domain location=77-231; Score= -0.5; E_value=0.015; Accession=PF02854.11; Description=MIF4G domain
EEPDYVKKKKKVKKDDTEVEDPDDGGVDMDEENDGAVLESEDGEANVIAPTESKGKYVPPSLRAASNSESEEIAQMRRRVRGLLNRLSESNVESITQEIATLFRSVPRSVGSQIIGDEVLASCSRGPRGNEQYAAVFAAFVAGMSCLVGIDFSAKILASIAKTFEDEYSKEDGLSLRNLTLLFCYLCIFGVISSDLVYDLLSTLSKRLTELDVSTVVTILQCCGMKLRGDDPG

SEQ ID NO: 103157 - protein, 384 aa, Setaria italica
  Transcript Sequence Number=SeqID_37183
  Gene Ontology: Mol. function=protein binding; Cellular component =nucleolus; Biological process=RNA metabolic process
  Homolog annotation: Hit_ID=B9SI94; Match level="QueryCoverage=98%, HitCoverage=49%, E-value=1e-145, Identity=65%"; Hit description =Sgd1p, putative
  Pfam annotation: Domain name=MA3; Domain location=184-290; Score =90.9; E_value=4.5e-24; Accession=PF02847.9; Description=MA3 domain
PKFISSDLVYDLLSTLSKRLTELDVSTVVTILQCCGMKLRGDDPGAMKDFVLGIQNSANQLKLHSGVREDGETERHGKRMEFMLNTICDIKNNKKRPKDDPSHSSNHTRIKKWLQKLKAEDVLLRGLTWSRLLDPDKKGQWWLSGDVPSTAGNIEDVAAVISKDVAETQKLLQLAAAQRMNTDIRRAIFCIIMSAEDYVDAFEKLLRLGLSGKQDREIIRVIVDCCLQEKMFNKYYTVLVSKLCSHEKNHKFSLQYCIWDHFKELDNMEPNRTMNLAKLVAEMLSNFTLSLATLKVVNLSNPVEMTPERITHFQMLFETLLRKDDALVWNVFTRIAGLPELEILRDGIVLFIKRHVIAEDSGKDLASKFKIAKKALDNAAGVLM

SEQ ID NO: 103158 - protein, 123 aa, Setaria italica
  Transcript Sequence Number=SeqID_37184
  Gene Ontology: Mol. function=metal ion binding
  Homolog annotation: Hit_ID=B6SW07; Match level="QueryCoverage=100%, HitCoverage=18%, E-value=1e-54, Identity=83%"; Hit description=Zinc finger, C3HC4 type family protein
QSSNANCASQDPEQYGGCNRNGINAQPSNLRLHPYRTFLLGAEQTDSFTLNPSENPLGDFSLMQEGIDQRPGSSLDGRRLACKRKNIEGANGQGSAGASTSYSHRNDNAFHNIASSSYNPAPI

SEQ ID NO: 103159 - protein, 661 aa, Setaria italica
  misc_feature (181)..(181): Xaa can be any naturally occurring amino acid
  Transcript Sequence Number=SeqID_37185
  Gene Ontology: Mol. function=metal ion binding
  Homolog annotation: Hit_ID=B6SW07; Match level="QueryCoverage=99%, HitCoverage=99%, E-value=0.0, Identity=82%"; Hit description=Zinc finger, C3HC4 type family protein
  Pfam annotation: Domain name=zf-C3HC4; Domain location=614-654; Score= 39.7; E_value=1.1e-08; Accession=PF00097.17; Description=Zinc finger, C3HC4 type (RING finger)
MQGQRNSMEHFADVFGFDVASSSGNPVMDQQAYWNNVLGSVESQNLQGYQMNHSDATIPYGNEPQQDGTFLGFWEAGEASSSGSALNYGSSSNAKTEHLNIGGGLRIGERRLVADNDLSLDVDINLNANVNDLCGQSSNANCASQDPEQYGGCNRNGINAQPSNLRLHPYRTFLLGAEQTXSFTLNPSHARNYGDFSLMQEGIDQRPGSSLDGRRLACKRKNIEGANGQGSAGASTSYSHRNDNAFHNIASSSYNPAPIRNSSSPNCLLVPSSIEDQLPRYGTNAGLSSGSYDLNGGINNAGNSQRSFRARTTTAQQIAPCTVWPSSNAVRLSNSWNHQPPHLQSTFDDPQEVIPVVSSLNLQYQHPVNVPGAPQAANRFTGHGASSSRAGSLENRVIGSEEVLRRNVVPTNYSDLVPPAAVDLRRLVPEPSNWSSDGRGTAVSGTIPPVSRANTSSAVNPPAGFSHQNLNRRHPRNLSEEIGRLSGALRGHQPPRLRSGFLLERQGDGVWGVPLSMRGREGRRLMEIRNALEMIERGENVRLESIIYGGVDTHDRHRDMRLDIDNMSYEELLALEERIGNVSTGLSEEAVIKLLKQRKFSSWRLKASLDHEPCCICQEEYVDGDNLGRLDCGHDFHVGCIKQWLVLKNVCPICKSTALKT

SEQ ID NO: 103160 - protein, 76 aa, Setaria italica
  Transcript Sequence Number=SeqID_37186
TLRGRPGAVATHPALVADLDLRWRICNVESHAGDRGALARCSGDYAVVISQNTTAPPVPRGPNLLGEGSHVHIDSV

SEQ ID NO: 103161 - protein, 72 aa, Setaria italica
  Transcript Sequence Number=SeqID_37187
RSCKLSSQVIFILPSRDIYPQEIFILPSYLKFNDESQVIFILPSRDTAINIDYSNEQIQYLSPSYRFSVRQM

SEQ ID NO: 103162 - protein, 433 aa, Setaria italica
  Transcript Sequence Number=SeqID_37188
  Gene Ontology: Mol. function=metal ion binding
  Homolog annotation: Hit_ID=Q9M4C5; Match level="QueryCoverage=92%, HitCoverage=93%, E-value=1e-180, Identity=78%"; Hit description=VIP2 protein
  Pfam annotation: Domain name=zf-C3HC4; Domain location=35-80; Score =31.7; E_value=2.9e-06; Accession=PF00097.17; Description=Zinc finger, C3HC4 type (RING finger)
  Pfam annotation: Domain name=zf-RING-like; Domain location=35-80; Score=1.6; E_value=0.099; Accession=PF08746.3; Description=RING-like domain
  Pfam module annotation: Pfam domain module=zf-C3HC4::zf-RING-like; Domain location=35-80::35-80
MGVGAEPKEEAAAAGAAAAEEGAGGKEEKAAAVSCSICLDAVLAAGGERATARLQCGHEFHLDCIGSAFNAKGVMQCPNCRKIEKGNWLYANGSRSAHDVNMEEWAHDEDLYDVSYSEMPFRFHWCPFGRLAQLPSLFEEGESSPPVTFHDFMGQHVFTEQVAVSAAPGTTHPCPYVAYLHPLPPLTSSSSSHVPERTMDRPAYHDHWNPLAGPSDVRPMQSVQPADFHHNHWAHMPHSYAQPNSNNEQPGIPFGTRAARVDGDSQRRASVVSPSYFSNGSGSRSRAPNVPPLMPQFMRAHGSINEQYQQNSSSSLFAGAHRSGGMRPAPAPLPENPTFSLFPPGSSGHNSMETDDVGGSRFYAWERDRFAPYPLMPVDCETSWWTSQQSHSTSEPASAPRRLFGQWLGVGRSSPENRSPEGSSYRQLHSPRM

SEQ ID NO: 103163 - protein, 73 aa, Setaria italica
  Transcript Sequence Number=SeqID_37189
  Pfam annotation: Domain name=DUF623; Domain location=1-39; Score =29.6; E_value=9.8e-07; Accession=PF04844.5; Description=Protein of unknown function, DUF623
KDWFWLEEMLGWYLRANGKSTHGLIVGAFVDLLVALSTAASPADSSSPATPAAANCYSASDCSCSFSSSPPCS

SEQ ID NO: 103164 - protein, 77 aa, Setaria italica
  misc_feature (52)..(52): Xaa can be any naturally occurring amino acid
  Transcript Sequence Number=SeqID_37190
  Gene Ontology: Mol. function=protein binding; Cellular component =cytoplasm; Biological process=protein transport
  Homolog annotation: Hit_ID=B9RXZ5; Match level="QueryCoverage=100%, HitCoverage=32%, E-value=3e-26, Identity=72%"; Hit description =Charged multivesicular body protein, putative
MKKIFGAKKDKGPPPSIQDATERINKRGETVDEKIKKLDEELARYKEQIRKXTRPGPSQEAIKARAIRLLKHKRMYE

SEQ ID NO: 103165 - protein, 81 aa, Setaria italica
  Transcript Sequence Number=SeqID_37191
  Subcellular localization annotation: CTP_CleavageSite=36; ConfidenceScore=5.35e-01
IKIQLKLVSNSRISLAFCSNIFDFSRFRMLLQTLVRTAQIFNVFIVCIWSPLLPFFSNRLYTNKSYTLWCTDECNVAVLNC

SEQ ID NO: 103166 - protein, 86 aa, Setaria italica
  Transcript Sequence Number=SeqID_37192
  Subcellular localization annotation: CTP_CleavageSite=28; ConfidenceScore=5.65e-01
KINPTLKRSKSLAVSLAPRRRDGRPTRRGSSPAGRPPGGLRLYPPLQRFDNSSCRFCSTHGEPRRRRRGARALQAVRVPRQLQPRP

SEQ ID NO: 103167 - protein, 137 aa, Setaria italica
  Transcript Sequence Number=SeqID_37193
  Gene Ontology: Mol. function=nucleoside-triphosphatase activity; Cellular component=nucleolus
  Homolog annotation: Hit_ID=Q9SYP1; Match level="QueryCoverage=98%, HitCoverage=5%, E-value=2e-31, Identity=53%"; Hit description =F9H16.5 protein
MANLGGGAEAHARFKQYEYRANSSLVLTTDSRPRDTHEPTGEPETLYGRIDPRSFGDRAVQNRPPELEEKLTKARTKKTKRDAADPDIPRRDAKRRRRAASTQDVSVLSLTDDVVYKPQTKETRAAYEALLSVIQLV

SEQ ID NO: 103168 - protein, 181 aa, Setaria italica
  Transcript Sequence Number=SeqID_37194
  Gene Ontology: Mol. function=protein domain specific binding; Cellular component=endosome membrane; Biological process=protein transport
  Homolog annotation: Hit_ID=B3TM11; Match level="QueryCoverage=100%, HitCoverage=81%, E-value=3e-65, Identity=71%"; Hit description =Breast adenocarcinoma marker-like
  Pfam annotation: Domain name=Snf7; Domain location=1-145; Score =150.0; E_value=7.1e-42; Accession=PF03357.13; Description=Snf7
LITEIKKTAKEGQMGAVKVMAKDLIRTRHQITKFYQLKSQLQGVSLRVQTLKSTQAMGDAMKGVTKAMAQMNRQLNLPGLQKIMQEFERQNERMEMVSEVMGDAIDDALEGDEEEEETEELVNQVLDEIGIDINQELVGAPSAAVAQPASAGKVAQAESAGAADGGIDADLQARLDNLRRM

SEQ ID NO: 103169 - protein, 131 aa, Setaria italica
  misc_feature (55)..(55): Xaa can be any naturally occurring amino acid
  Transcript Sequence Number=SeqID_37195
  Gene Ontology: Mol. function=protein domain specific binding; Cellular component=endosome membrane; Biological process=protein transport
  Homolog annotation: Hit_ID=B3TM11; Match level="QueryCoverage=98%, HitCoverage=57%, E-value=1e-59, Identity=89%"; Hit description =Breast adenocarcinoma marker-like
  Pfam annotation: Domain name=Snf7; Domain location=17-131; Score =31.6; E_value=2.2e-07; Accession=PF03357.13; Description=Snf7
MSFLFGKRKTPAELLRENKRMLDRSIREIERERQGLQAQEKKLITEIKKTAKEGXQMGAVKVMAKDLIRTRHQITKFYQLKSQLQGVSLRVQTLKSTQAMGDAMKGVTKAMAQMNRQLNLPGLQKIMHKEV

SEQ ID NO: 103170 - protein, 157 aa, Setaria italica
  misc_feature (40)..(40): Xaa can be any naturally occurring amino acid
  misc_feature (103)..(103): Xaa can be any naturally occurring amino acid
  Transcript Sequence Number=SeqID_37196
  Gene Ontology: Mol. function=peptidase activity; Cellular component =nucleus
VETHAKTIIRSSKRNAHLKGAKASTELNSKNGTSWSDELXDALVCGEAFPDGIDHSKDDLCNMFGCWKCLLVKSLKSGCIRNILQFRLDCVRRRQLVPLLLKXTRALGSHRGGYVDHEVHSIYWRCISLLYFRSLPQDCYRTYEPHLVGLIVDGSTG

SEQ ID NO: 103171 - protein, 84 aa, Setaria italica
  Transcript Sequence Number=SeqID_37197
  Gene Ontology: Mol. function=catalytic activity
  Homolog annotation: Hit_ID=B6TMM7; Match level="QueryCoverage=100%, HitCoverage=27%, E-value=3e-28, Identity=76%"; Hit description=HAD -superfamily hydrolase, subfamily IIA
MASAPSAPVFERVAGIRAIAESGRFKAWFLDQFGVLHDGKKPYPGAILALEKLAGNGAKMVIISNSSRRSSVTIEKLQSLGFDT

SEQ ID NO: 103172 - protein, 219 aa, Setaria italica
  Transcript Sequence Number=SeqID_37198
  Gene Ontology: Mol. function=transporter activity; Cellular component= membrane; Biological process=oligopeptide transport
  Homolog annotation: Hit_ID=B9T1Z5; Match level="QueryCoverage=100%, HitCoverage=39%, E-value=9e-63, Identity=52%"; Hit description =Peptide transporter, putative
LSIAIGVQINFTILQALAMDRAAGRFTIPAGSMIVGCLIAVVISLGLLDRVLLPLWRRVTRHDLTPLQRIGAGHVVTIASMAASAVIERRRMDTVRAHGEEGNPAWVSPLSAMWLLLPFALSGAGEALHFPGQVTLYYQEFPPSLKNTATGMVAMIVALGFYLSTALIGVVRRATAWLPDNMNASRLENLYWLLTVLVAVNFGYYVLCARLYKYQNIGK

SEQ ID NO: 103173 - protein, 88 aa, Setaria italica
  Transcript Sequence Number=SeqID_37199
KIIMSKLANPTLHTKQTNPTVPNLHRMIVLDIPNPWNCKKVTLMIHFTSESRVQDFLTNYATKSIQTLWHPLTCKLTPVIKITGTENR

SEQ ID NO: 103174 - protein, 56 aa, Setaria italica
  Transcript Sequence Number=SeqID_37200
LTLEKCTIKVPIPSTHQTTKYPLRTFAKDNNLIRVTLLLTATATSILFRPINNSYR

SEQ ID NO: 103175 - protein, 98 aa, Setaria italica
  misc_feature (24)..(24): Xaa can be any naturally occurring amino acid
  Transcript Sequence Number=SeqID_37201
  Gene Ontology: Mol. function=receptor activity
  Homolog annotation: Hit_ID=A9NIN1; Match level="QueryCoverage=100%, HitCoverage=20%, E-value=2e-29, Identity=68%"; Hit description=HS1 -like protein
  Pfam annotation: Domain name=Hs1pro-1_N; Domain location=3-98; Score=- 18.0; E_value=0.00026; Accession=PF07231.4; Description=Hs1pro-1 N -terminus
PFARCGGTDKPCAQSPSSSSSAVXRVQDASAAEAYEQYLRLPELSALWKPRCFPDWAGEGLVKPALQALEITFRFASLALSDPRGYASRRELARRLES

SEQ ID NO: 103176 - protein, 87 aa, Setaria italica
  Transcript Sequence Number=SeqID_37202
RELDAVTIVEFEDGGMPKLERLQAAGWSKLNEFLGLGYLKRLKEIQLDPKFSDEFIGNVRRQKEEHPNNFSLKLKSEQSTMVRDLED

SEQ ID NO: 103177 - protein, 85 aa, Setaria italica
  Transcript Sequence Number=SeqID_37203
  Gene Ontology: Mol. function=nucleoside-triphosphatase activity; Cellular component=cell soma; Biological process=regulation of transcription, DNA-dependent
  Homolog annotation: Hit_ID=O81047; Match level="QueryCoverage=96%, HitCoverage=12%, E-value=4e-18, Identity=57%"; Hit description =Putative helicase
LRLKRRGWERHSLNGLLKPNGEEITSMLTVQYRMHEHIMNWSSKELYNNKIKAHSSVAGHMLCDLEEVTTSSSTEPTIILIDTTG

SEQ ID NO: 103178 - protein, 278 aa, Setaria italica
  Transcript Sequence Number=SeqID_37204
  Gene Ontology: Mol. function=nucleoside-triphosphatase activity; Cellular component=cell soma; Biological process=regulation of transcription, DNA-dependent
  Homolog annotation: Hit_ID=O81047; Match level="QueryCoverage=98%, HitCoverage=43%, E-value=1e-122, Identity=78%"; Hit description =Putative helicase
FDLVVIDEAAQALEVACWIALLKGPRCILAGDHLQLPPTIQSVEAEKKGMGKTLFERLTEAYGEEITSMLTVQYRMHEHIMNWSSKELYNNKIKAHSSVAGHMLCDLEEVTTSSSTEPTIILIDTTGCDMEEVKDEEESTMNEGEAAVSIAHAKLLVESGVHASDIGIITPYSAQVTCLKMMRNKDAKLKDLEISTVDGFQGREKEAIIISMVRSNSKKEVGFLRDHRRMNVAVTRARRQCCLVCDVETVSSDKFLKRLVEYFEENGEYLSASEYQSS

SEQ ID NO: 103179 - protein, 74 aa, Setaria italica
  Transcript Sequence Number=SeqID_37205
  Gene Ontology: Mol. function=nucleoside-triphosphatase activity
  Homolog annotation: Hit_ID=O81047; Match level="QueryCoverage=83%, HitCoverage=9%, E-value=2e-09, Identity=67%"; Hit description =Putative helicase
NPSICFSYNASNVFSNTLRCDMEEVKDEEESTMNEGEAAVSIAHAKLLVESGVHASDIGIITPYSAQVFGPHAP

SEQ ID NO: 103180 - protein, 117 aa, Setaria italica
  Transcript Sequence Number=SeqID_37206
  Gene Ontology: Mol. function=metal ion binding
  Homolog annotation: Hit_ID=Q9ZSB7; Match level="QueryCoverage=47%, HitCoverage=24%, E-value=5e-15, Identity=67%"; Hit description =F3H7.8 protein
  Pfam annotation: Domain name=PHD; Domain location=42-88; Score=25.8; E_value=3.9e-05; Accession=PF00628.21; Description=PHD-finger
KGGRLRRPEPPQAHLATAAAAATPAPAGFPADDWVAGSWTVDCSCGVTFDDGEEMVSCDECSVWVHTRCARYVRGVHTSFSCHRCRRSKQAPSSADEAEVAELLAELPTHRPPPLYR

SEQ ID NO: 103181 - protein, 106 aa, Setaria italica
  misc_feature (50)..(50): Xaa can be any naturally occurring amino acid
  Transcript Sequence Number=SeqID_37207
  Gene Ontology: Mol. function=nucleic acid binding; Cellular component= intracellular
  Homolog annotation: Hit_ID=Q69IN3; Match level="QueryCoverage=95%, HitCoverage=19%, E-value=3e-44, Identity=82%"; Hit description =ARIADNE-like protein
MLQYDETEARRERAKNSLERYMHYYERWASNQTSRQKAQADLHKAERNNXAKLTDIFGIPETQLKFIVEAWSQIIECRRVLKWTYAYGYYLDDKVKSEFFEYLKVL

SEQ ID NO: 103182 - protein, 176 aa, Setaria italica
  Transcript Sequence Number=SeqID_37208
  Gene Ontology: Mol. function=nucleic acid binding; Cellular component= intracellular; Biological process=ubiquitin-dependent protein catabolic process
  Homolog annotation: Hit_ID=Q69IN3; Match level="QueryCoverage=92%, HitCoverage=31%, E-value=1e-68, Identity=74%"; Hit description =ARIADNE-like protein
  Pfam annotation: Domain name=IBR; Domain location=87-148; Score=82.8; E_value=1.3e-21; Accession=PF01485.13; Description=IBR domain
  Pfam annotation: Domain name=zf-C3HC4; Domain location=18-58; Score =5.4; E_value=0.025; Accession=PF00097.17; Description=Zinc finger, C3HC4 type (RING finger)
  Pfam module annotation: Pfam domain module=IBR::zf-C3HC4; Domain location=87-148::18-58
DLTFRNGNDRPRSRKLTCGICFEGYSSDMMSSAGCAHFYCHECWEGYISAAISGGPGCLSLRCPDPSCGAMVLQRMINKLAKEEDKEKYARFLLRTYVEGSKKTKWCPAPDCTCAVEFLGDENYDVSCNCKFNFCWNCTEEAHRPVNCETVSKWILKNSAESENMNWILANSLIIL

SEQ ID NO: 103183 - protein, 63 aa, Setaria italica
  Transcript Sequence Number=SeqID_37209
  Gene Ontology: Mol. function=nucleic acid binding; Cellular component= intracellular
  Homolog annotation: Hit_ID=Q84RR0; Match level="QueryCoverage=71%, HitCoverage=8%, E-value=8e-20, Identity=86%"; Hit description =Probable E3 ubiquitin-protein ligase ARI7
MFDLFRILANSKPCPKCKRPIEKNQGCMHMTCTPPCKFEFCWLCLGALVQYSIGSSSNLVGLL

SEQ ID NO: 103184 - protein, 599 aa, Setaria italica
  Transcript Sequence Number=SeqID_37210
  Gene Ontology: Mol. function=nucleic acid binding; Cellular component= intracellular
  Homolog annotation: Hit_ID=Q69IN3; Match level="QueryCoverage=85%, HitCoverage=99%, E-value=0.0, Identity=69%"; Hit description=ARIADNE- like protein
  Pfam annotation: Domain name=IBR; Domain location=215-276; Score =82.8; E_value=1.3e-21; Accession=PF01485.13; Description=IBR domain
  Pfam annotation: Domain name=zf-C3HC4; Domain location=146-186; Score= 5.4; E_value=0.025; Accession=PF00097.17; Description=Zinc finger, C3HC4 type (RING finger)
  Pfam annotation: Domain name=zf-RanBP; Domain location=569-598; Score= 14.4; E_value=0.02; Accession=PF00641.10; Description=Zn-finger in Ran binding protein and others
  Pfam module annotation: Pfam domain module=IBR::zf-C3HC4::zf-RanBP; Domain location=215-276::146-186::569-598
MDSDVEMNAASDEEVMDDEDYYDYCYSDVGDDEDDGGGGDSDGELVGADYDEGLEAEGSDVVVSRREQTFAVLREEDISERQEEDISKVSSVLSIAREEACVLLHHYKWNISKLSDEWFADEEKVRHTVGLLLNGNDRPRSRKLTCGICFEGYSSDMMSSAGCAHFYCHECWEGYISAAISGGPGCLSLRCPDPSCGAMVLQRMINKLAKEEDKEKYARFLLRTYVEGSKKTKWCPAPDCTCAVEFLGDENYDVSCNCKFNFCWNCTEEAHRPVNCETVSKWILKNSAESENMNWILANSKPCPKCKRPIEKNQGCMHMTCTPPCKFEFCWLCLGAWSDHGERTGGFYACNRYESAKKEGVYDETEARRERAKNSLERYMHYYERWASNQTSRQKAQADLHKAEKEQLAKLTDIFGIPETQLKFIVEAWSQIIECRRVLKWTYAYGYYLDDKVKSEFFEYLQGEAESGLERLHQCAEKDLLAFLPSLKPDSNETTAPSVAEFGDFRVKLAGLTSVTRNYFENLVQALEAGLEDVHATGQAAATSSTATSSKKGGTKSKKKHAKPSSDHTDDGWPCERCTYLNPPSVDVCSICEKSRYQT

SEQ ID NO: 103185 - protein, 62 aa, Setaria italica
  Transcript Sequence Number=SeqID_37211
MASEAARRRQELAAEGQRHLEETIAAAFQILVSMNDELCNAGLWSSSSVSAAAAAAAAVGPT

SEQ ID NO: 103186 - protein, 390 aa, Setaria italica
  Transcript Sequence Number=SeqID_37212
  Gene Ontology: Mol. function=protein serine/threonine kinase activity; Cellular component=integral to membrane; Biological process=protein amino acid phosphorylation
  Homolog annotation: Hit_ID=Q0ZA03; Match level="QueryCoverage=86%, HitCoverage=41%, E-value=1e-106, Identity=53%"; Hit description =Brassinosteroid-insensitive 1
  Pfam annotation: Domain name=LRR_1; Domain location=113-135; Score =10.1; E_value=3.5; Accession=PF00560.25; Description=Leucine Rich Repeat
  Pfam annotation: Domain name=LRR_1; Domain location=166-189; Score =5.0; E_value=34; Accession=PF00560.25; Description=Leucine Rich Repeat
  Pfam annotation: Domain name=LRR_1; Domain location=193-213; Score =13.8; E_value=0.7; Accession=PF00560.25; Description=Leucine Rich Repeat
  Pfam annotation: Domain name=LRR_1; Domain location=215-238; Score =15.8; E_value=0.19; Accession=PF00560.25; Description=Leucine Rich Repeat
  Pfam annotation: Domain name=LRR_1; Domain location=240-262; Score =13.4; E_value=0.84; Accession=PF00560.25; Description=Leucine Rich Repeat
  Pfam annotation: Domain name=LRR_1; Domain location=264-287; Score =16.0; E_value=0.16; Accession=PF00560.25; Description=Leucine Rich Repeat
  Pfam annotation: Domain name=LRR_1; Domain location=289-311; Score =12.6; E_value=1.2; Accession=PF00560.25; Description=Leucine Rich Repeat
  Pfam annotation: Domain name=LRR_1; Domain location=313-336; Score =12.7; E_value=1.1; Accession=PF00560.25; Description=Leucine Rich Repeat
  Pfam annotation: Domain name=LRR_1; Domain location=339-361; Score =16.4; E_value=0.12; Accession=PF00560.25; Description=Leucine Rich Repeat
  Pfam annotation: Domain name=LRR_1; Domain location=363-386; Score =10.5; E_value=3; Accession=PF00560.25; Description=Leucine Rich Repeat
  Pfam annotation: Domain name=LRR_1; Domain location=89-110; Score =5.2; E_value=30; Accession=PF00560.25; Description=Leucine Rich Repeat
  Pfam module annotation: Pfam domain module=LRR_1::LRR_1::LRR_1::LRR _1::LRR_1::LRR_1::LRR_1::LRR_1::LRR_1::LRR_1::LRR_1; Domain location =113-135::166-189::193-213::215-238::240-262::264-287::289-311::313 -336::339-361::363-386::89-110
MESPGLLAVLALLVVAVVAAADDAQLLEQFKSEAQSPAAGVRGWSAADGACRFPGAACRGGRLTSLSLAGVPLNADFRAVAATLLQLGSLETLSLRGANVSGALAAAPRCGAKLQSLDLSGNAGLRGSVADVEALAASCGGLKALNLSGDSVGGPRSGGGGGSGFGLDALDLSDNKISGDGDLRWMVGAGVGAVRRLDLSGNKISGLPEFTNCSGLEYLDLSGNLITGEVAGGTLSDCRGLSTLNLSGNHLVGAFPPDVAGLTSLAALNLSNNNFSSELPADAFTGLQQLKVLALSFNHFNGTIPDSLAALPELDVLDLSSNAFSGTIPSSLCQDPNSSLRMLYLQNNYLSGTIPESITNCTRLESLDLSLNNINGTLPALPSGSVGESR

SEQ ID NO: 103187 - protein, 206 aa, Setaria italica
  misc_feature (28)..(28): Xaa can be any naturally occurring amino acid
  Transcript Sequence Number=SeqID_37213
  Gene Ontology: Mol. function=4 iron, 4 sulfur cluster binding; Cellular component=nucleus; Biological process=base-excision repair
  Homolog annotation: Hit_ID=B3W6G6; Match level="QueryCoverage=96%, HitCoverage=10%, E-value=4e-36, Identity=43%"; Hit description =Putative transcriptional activator DEMETER
  Subcellular localization annotation: CTP_CleavageSite=44; ConfidenceScore=5.01e-01
NLVPAVNSNVCTLADAQRLIAHEKSRAXQRMISVGSAQNSMAKSMEMVQQQSLLHGTAFRGSIEVPEKQFSLVTEECTQLPVQRHNVTARLGSHQLQSLGGNMVSGSDLPAKLHEHCISPQDETQNSVCIAPPDELGRSINVEHFRSPGTQINSSTGKSTPRTEIHHPEISAEIIRTPTNPTNPITSNDVLRTENNQVKENLCKLK

SEQ ID NO: 103188 - protein, 74 aa, Setaria italica
  Transcript Sequence Number=SeqID_37214
  Gene Ontology: Mol. function=transferase activity; Cellular component= cytoplasm
  Homolog annotation: Hit_ID=A6N0E3; Match level="QueryCoverage=83%, HitCoverage=28%, E-value=2e-17, Identity=66%"; Hit description =Glutathione s-transferase gstf2
  Pfam annotation: Domain name=GST_N; Domain location=4-70; Score=34.0; E_value=6e-07; Accession=PF02798.12; Description=Glutathione S -transferase, N-terminal domain
MAGGVVKVYGATASPFVATVLVCLEEVGAAYEVVPLDMAACEQKAPHHLARNPFGRIPALEDGDLTLFGKSYQN

SEQ ID NO: 103189 - protein, 221 aa, Setaria italica
  Transcript Sequence Number=SeqID_37215
  Gene Ontology: Mol. function=transferase activity
  Homolog annotation: Hit_ID=O65857; Match level="QueryCoverage=95%, HitCoverage=96%, E-value=4e-69, Identity=61%"; Hit description =Probable glutathione S-transferase GSTF1
  Pfam annotation: Domain name=GST_C; Domain location=113-208; Score =83.9; E_value=5.7e-22; Accession=PF00043.17; Description=Glutathione S-transferase, C-terminal domain
  Pfam annotation: Domain name=GST_N; Domain location=4-79; Score=79.0; E_value=1.7e-20; Accession=PF02798.12; Description=Glutathione S -transferase, N-terminal domain
  Pfam module annotation: Pfam domain module=GST_C::GST_N; Domain location=113-208::4-79
MAGGVVKVYGATASPFVATVLVCLEEVGAAYEVVPLDMAACEQKAPHHLARNPFGRIPALEDGDLTLFESRAISRYVLRKYSNAAGGADLLREGNLEEAAMVDAWVEAEAHQYQPAISHIVRQCVILPMIGGARDQRVVDEHATKLREVLRVYDARLGERAYLAGEFVSLADLAHFGFTHYLMRTEYAALVEERPNVRAWWGRLSARPAVKKVAALMPTDW

SEQ ID NO: 103190 - protein, 132 aa, Setaria italica
  misc_feature (90)..(90): Xaa can be any naturally occurring amino acid
  Transcript Sequence Number=SeqID_37216
  Gene Ontology: Mol. function=protein dimerization activity; Biological process=regulation of RNA metabolic process
  Homolog annotation: Hit_ID=B6SRN0; Match level="QueryCoverage=99%, HitCoverage=18%, E-value=5e-48, Identity=71%"; Hit description =Transposon protein
IGWWTTSQTLGYVSIAGQYIDSDWKLHRRMLNFVMAPWSCSGNAVSEAISRSLSQWNMTDKLFTITGDYESSHDIYSVNLRDDLSKKEHXMLRGQFLVVRCYAHILNAAASDVTASVQSVIYKIRESIKFIN

SEQ ID NO: 103191 - protein, 43 aa, Setaria italica
  Transcript Sequence Number=SeqID_37217
DFKESSKGIILKSLNILTAAQLPEALDSCINPCLSAGLKIFMQ

SEQ ID NO: 103192 - protein, 126 aa, Setaria italica
  Transcript Sequence Number=SeqID_37218
  Gene Ontology: Mol. function=hydrolase activity, acting on ester bonds; Biological process=lipid metabolic process
  Homolog annotation: Hit_ID=B6SZZ2; Match level="QueryCoverage=100%, HitCoverage=33%, E-value=1e-61, Identity=91%"; Hit description =Anther-specific proline-rich protein APG
RFTNGRTIADIIGEMLGQADYSPPFLAPNTTGGAILNGVNYASGGAGILNATGKIFVNRIGMDIQVDYFNITRKQLDDLLGRDKAKEFLRRKAIFSVTVGSNDFLNNYLMPVLSTGTRISESPDGF

SEQ ID NO: 103193 - protein, 74 aa, Setaria italica
  Transcript Sequence Number=SeqID_37219
VVEEGRQPEIPQPLHLHSCACSKTRCCSHSRVYLEIIHSKPRKINTHHRIPSQVWVERAGSQDSRWLTQGMPYA

SEQ ID NO: 103194 - protein, 65 aa, Setaria italica
  misc_feature (7)..(7): Xaa can be any naturally occurring amino acid
  Transcript Sequence Number=SeqID_37220
PLSSRWXATERGSVLGWDLAVRHWNVMSMAKEHSSSGEEEDDDDEEYEDEEEYEDDDEEYEDDEE

SEQ ID NO: 103195 - protein, 109 aa, Setaria italica
  Transcript Sequence Number=SeqID_37221
ISFSLRESGRMKAPKSYEPSMFSTIQTVLSKPAKITGDHPFPPNPLEVTRNSQEERLKLRNRWATNQEGADEPLECEPASDRLTAGRRNKARFLPLSFSMIQEQGTPTP

SEQ ID NO: 103196 - protein, 84 aa, Setaria italica
  Transcript Sequence Number=SeqID_37222
  Gene Ontology: Mol. function=protein serine/threonine kinase activity; Biological process=protein amino acid phosphorylation
RGQVKLIDFGAATDLRIGKNYVPDRALLDPDYCPPELYVLPEETPEPPPEPIAAILSPILWQVIAGHHRHSSSCSASLIRHLQT

SEQ ID NO: 103197 - protein, 80 aa, Setaria italica
  Transcript Sequence Number=SeqID_37223
  Gene Ontology: Mol. function=protein serine/threonine kinase activity; Biological process=protein amino acid phosphorylation
ELRSAGYDLNRWRQSTRRRPDLQILDLDSGRGWDLATKLISERGANGGGRLSAAAALRHPYFLLGGDQAAAVLSKLSLIK

SEQ ID NO: 103198 - protein, 465 aa, Setaria italica
  misc_feature (41)..(41): Xaa can be any naturally occurring amino acid
  Transcript Sequence Number=SeqID_37224
  Gene Ontology: Mol. function=protein serine/threonine kinase activity; Cellular component=chloroplast; Biological process=protein amino acid phosphorylation
  Homolog annotation: Hit_ID=B9SEI7; Match level="QueryCoverage=93%, HitCoverage=69%, E-value=2e-68, Identity=36%"; Hit description =Serine/threonine protein kinase, putative
  Pfam annotation: Domain name=Pkinase; Domain location=105-447; Score =15.1; E_value=2.2e-09; Accession=PF00069.17; Description=Protein kinase domain
  Pfam annotation: Domain name=Pkinase_Tyr; Domain location=105-348; Score=-159.5; E_value=0.004; Accession=PF07714.9; Description =Protein tyrosine kinase
  Pfam module annotation: Pfam domain module=Pkinase::Pkinase_Tyr; Domain location=105-447::105-348
GVDASGAAASSDSIPDGLLSVLHLDASNPAVRAAGGALSRXLDALTAGLSDAQRWALLGFLGVTWLYLTARPGVLSGAVDTYVLAPLQLALDSVLGRRSLKMSDFVVGERIGEGSFGVVYAGAVVPKNGAVVEERSGRARTSLQNDDRYKEKVILKKIKVGTVGAKECGDYEEWFNYRMARAAPESCADFLGSFVADKTKSEFIKGGKWLVWKFEGDRTLADYLGDRAFPSNLEQLMFGRALRGLGTLERDALVVKQVMRQLVTSLKRIHGTGIVHRDIKPSNLVVTRRGQVKLIDFGAATDLRIGKNYVPDRALLDPDYCPPELYVLPEETPEPPPEPIAAILSPILWQLNNPDLFDMYSAGIVLMQMAIPTLRTQSGLKNFNAELRSAGYDLNRWRQSTRRRPDLQILDLDSGRGWDLATKLISERGANGGGRLSAAAALRHPYFLLGGDQAAAVLSKLSLIK

SEQ ID NO: 103199 - protein, 59 aa, Setaria italica
  Transcript Sequence Number=SeqID_37225
MNASQIQTADITNAQITQLQRSVKCLFFKIKGPYQGFCYQEPSNTDNKCPVSTSSSLAV

SEQ ID NO: 103200 - protein, 77 aa, Setaria italica
  Transcript Sequence Number=SeqID_37226
  Subcellular localization annotation: CTP_CleavageSite=40; ConfidenceScore=5.25e-01
RLGEKCTPVILIHPLQISLHQSTSSKASPSMGVAASNLPLAFSKGAKARISAGPGVIKVALLSEICSISPALAFCFP

SEQ ID NO: 103201 - protein, 124 aa, Setaria italica
  Transcript Sequence Number=SeqID_37227
AIKVLIKHSVSFVEELFIYSSDENCLLSQTVGPLGGLVRKSRGKLFNSGTFRGFELGGPGFELGQPVHFLIMNLILGWLILMILGLASGLLVCSTNCSRFLSRAPSTLTSGCDLAGAWCTTNKI

SEQ ID NO: 103202 - protein, 255 aa, Setaria italica
  misc_feature (21)..(21): Xaa can be any naturally occurring amino acid
  misc_feature (26)..(26): Xaa can be any naturally occurring amino acid
  Transcript Sequence Number=SeqID_37228
  Gene Ontology: Mol. function=transporter activity; Cellular component= mitochondrial inner membrane; Biological process=transport
  Homolog annotation: Hit_ID=Q6H6J3; Match level="QueryCoverage=100%, HitCoverage=69%, E-value=1e-120, Identity=60%"; Hit description =Putative mitochondrial solute carrier protein
  Pfam annotation: Domain name=Mito_carr; Domain location=140-233; Score=88.7; E_value=2.1e-23; Accession=PF00153.19; Description =Mitochondrial carrier protein
  Pfam annotation: Domain name=Mito_carr; Domain location=34-137; Score= 117.8; E_value=3.5e-32; Accession=PF00153.19; Description =Mitochondrial carrier protein
  Pfam module annotation: Pfam domain module=Mito_carr::Mito_carr; Domain location=140-233::34-137
ASVARIVPYAALHYMAYEEYXRWIIXGFPNVEQGPVLDLMAGSIAGGTAVICTYPLDLVRTKLAYQVKGAVNVGFSECMPSEQVYKGIRDCVKTIYRQNGLKGLYRGMAPSLYGIFPYSGLKFYFYETMKSHVPEEHRKAIIAKLGCGSVAGLLGQTITYPIDVVRRQMQVQALSSSSLVGRGTFESLVMIVKQQGWRQLFSGLSINYLKVVPSVAIGFTVYDSMKVWLKVPSREETAVAVLTEERSNSAPIPSS

SEQ ID NO: 103203 - protein, 50 aa, Setaria italica
  Transcript Sequence Number=SeqID_37229
IHLPLLKEIWTGPIISEVYICHCSKKYLQVTELSRSGSAFGCFVCTSRRA

SEQ ID NO: 103204 - protein, 202 aa, Setaria italica
  Transcript Sequence Number=SeqID_37230
  Gene Ontology: Mol. function=protein binding; Cellular component =signalosome; Biological process=red or far red light signaling pathway
  Homolog annotation: Hit_ID=B6TDB7; Match level="QueryCoverage=94%, HitCoverage=44%, E-value=3e-85, Identity=80%"; Hit description=COP9 signalosome complex subunit 3
  Pfam annotation: Domain name=PCI; Domain location=33-137; Score=99.4; E_value=1.2e-26; Accession=PF01399.19; Description=PCI domain
EGLRSYIYTLDKVPSFPKYTSATAQRNMKNHAQIYVELSTCYGNGRYTDLETFVESNAAVFQSDNNLGLAKQVLSSMYKRNIQRLTQTYLTLSLEDIARSVQLDTPRDAEMHVLRMIEDGEIHATINQKDGMVSFHEDPEQYKSVEMVEHIDTSIQRLTALSKKLASIDENMACDPAYLLKTGRDNRRFDYDDFDSVPHKYF

SEQ ID NO: 103205 - protein, 352 aa, Setaria italica
  Transcript Sequence Number=SeqID_37231
  Gene Ontology: Mol. function=protein binding; Cellular component =signalosome; Biological process=red or far red light signaling pathway
  Homolog annotation: Hit_ID=B6TDB7; Match level="QueryCoverage=100%, HitCoverage=83%, E-value=0.0, Identity=87%"; Hit description=COP9 signalosome complex subunit 3
  Pfam annotation: Domain name=PCI; Domain location=252-352; Score =77.0; E_value=6.8e-20; Accession=PF01399.19; Description=PCI domain
MESLEALVAHIQGLSGSPEEVAHLHSLLKQADGDSLRSHAAALVPFLAHLSPEAHSLGYLYLLEACATSGANLGADFLVTVADFLTACSADQIRLAPDKFLNVCRVFKDQVMLLNTPIRGIAPLRAAVRKIQASPEQLTPVHAEYLLLCLLAKQYKAGLSVLEDDIFEVDQPKDLFLYCYYGGMIYIGLKKFPKASELLHNAVTAPMSSLNAIAVEAYKKYILVSLIQNGQVPSFPKYTSATAQRNMKNHAQIYVELSTCYGNGRYTDLETFVESNAAVFQSDNNLGLAKQVLSSMYKRNIQRLTQTYLTLSLEDIARSVQLDTPRDAEMHVLRMIEDKEIHATINQKDGMV

SEQ ID NO: 103206 - protein, 220 aa, Setaria italica
  misc_feature (36)..(36): Xaa can be any naturally occurring amino acid
  misc_feature (43)..(43): Xaa can be any naturally occurring amino acid
  misc_feature (63)..(63): Xaa can be any naturally occurring amino acid
  misc_feature (90)..(90): Xaa can be any naturally occurring amino acid
  Transcript Sequence Number=SeqID_37232
  Gene Ontology: Mol. function=tRNA (guanine-N7-)-methyltransferase activity; Biological process=glycolysis
  Homolog annotation: Hit_ID=C0PGS2; Match level="QueryCoverage=89%, HitCoverage=37%, E-value=7e-94, Identity=86%"; Hit description =Phosphoglycerate kinase
  Pfam annotation: Domain name=Methyltransf_4; Domain location=22-220; Score=46.2; E_value=6.3e-11; Accession=PF02390.9; Description =Putative methyltransferase
FYGVSFSSSDIDIFGSSYRNFLQRYPYQIPWSTVFXCDPTLPXLVVDIGSGNGLFLFQMAKKXESSNFLGLEMNEKLVIRCLQGMAWDEXRNLHFVATNATSTFHSIVSSYPGRLTLVTIQCPNPDFNKEQNRWRMVRRMLIEAVADLLQTNGQVYLQSDVESVLLGMKEQFLSYGKGQLVVDGDDCGHGMDNPFGVVSDWERHVLARGAPMYRTMLRKV

SEQ ID NO: 103207 - protein, 256 aa, Setaria italica
  misc_feature (222)..(222): Xaa can be any naturally occurring amino acid
  Transcript Sequence Number=SeqID_37233
  Homolog annotation: Hit_ID=B9RP29; Match level="QueryCoverage=98%, HitCoverage=32%, E-value=4e-25, Identity=35%"; Hit description =Ubiquitin-protein ligase BRE1A, putative
KEEKERDLWDAEKKVSIDRSRLNQTKQDLDQREEDIIKAYSRQHEMEKSLMKASRDLSLQVRQINNLKLLVEEQDKKIISSQDALSKKVIEVDKLKQDMLKKNEEADLMRSEIESKEQELLVANQALARQEATIRELQSEIKRKETEIASSNELRKANEEKLKVVEKELEKQNLGWIAAQQELKELAQMASKDKDNIKDTIDDFKRVRSLLDAVRSELMASXGGLHFSCRQIEDQAAQLSKQVQELADQKHCLFLI

SEQ ID NO: 103208 - protein, 125 aa, Setaria italica
  misc_feature (96)..(96): Xaa can be any naturally occurring amino acid
  Transcript Sequence Number=SeqID_37234
  Gene Ontology: Mol. function=binding
  Homolog annotation: Hit_ID=UPI0001A7B3D0; Match level="QueryCoverage =100%, HitCoverage=6%, E-value=7e-46, Identity=68%"; Hit description =binding
  Pfam annotation: Domain name=TPR_1; Domain location=81-116; Score =16.6; E_value=0.059; Accession=PF00515.20; Description =Tetratricopeptide repeat
MFSIAAINESDTGGQWEPLAPTKEAQEFALSQKYHEGLLKLQQKDYSKARELLEDVLKDPLISNIQVDNIGSDQHLLQLRFLTLKNLASVFLQQGXGVYDNALHCYLQAVELDSNDSVVWNHLGT

SEQ ID NO: 103209 - protein, 67 aa, Setaria italica
  misc_feature (26)..(26): Xaa can be any naturally occurring amino acid
  Transcript Sequence Number=SeqID_37235
MGLVTVAEMRTRNMGGDISGWSARQXMPVTTNETNRYDLHCPQPNRQTKSPTGEGKNQTKRKGRIKT

SEQ ID NO: 103210 - protein, 290 aa, Setaria italica
  Transcript Sequence Number=SeqID_37236
  Gene Ontology: Mol. function=ubiquitin-protein ligase activity; Cellular component=ubiquitin ligase complex; Biological process =ubiquitin-dependent protein catabolic process
  Homolog annotation: Hit_ID=Q8VZ40; Match level="QueryCoverage=99%, HitCoverage=46%, E-value=3e-88, Identity=54%"; Hit description=U-box domain-containing protein 14
  Pfam annotation: Domain name=U-box; Domain location=151-224; Score =108.6; E_value=2.1e-29; Accession=PF04564.7; Description=U-box domain
GDGMLDRFASVNSQIQLALDALPYHTFDMPEEVQEQVALVHSQFKRAATRMDPPDAQLSKDISSALADKTFDPLVFTRISEKLQLQTMADIKKESVALHEMVISSGGEPDGCVEEMSSLLKKLKDCVITEPPAPEALGASFASINHRSPIIPDEFRCPISLELMQDPVIVSSGQTYERPCIQKWLDSGHKTCPKTQQPLSHTSLTPNFVLKSLIAQWCEANGIELPKNKANSQDKKAAKSSDYDHAGLVSLMTRLRGGNQDEQRAAAGEIRLLAKRNVNNRICIAEAGAI

SEQ ID NO: 103211 - protein, 300 aa, Setaria italica
  Transcript Sequence Number=SeqID_37237
  Gene Ontology: Mol. function=ubiquitin-protein ligase activity; Cellular component=ubiquitin ligase complex; Biological process =ubiquitin-dependent protein catabolic process
  Homolog annotation: Hit_ID=Q8VZ40; Match level="QueryCoverage=97%, HitCoverage=46%, E-value=1e-99, Identity=67%"; Hit description=U-box domain-containing protein 14
  Pfam annotation: Domain name=Arm; Domain location=132-172; Score =40.4; E_value=7.3e-09; Accession=PF00514.15; Description =Armadillobeta-catenin-like repeat
  Pfam annotation: Domain name=Arm; Domain location=173-213; Score=4.4; E_value=3.4; Accession=PF00514.15; Description=Armadillobeta-catenin -like repeat
  Pfam annotation: Domain name=Arm; Domain location=214-254; Score =28.9; E_value=2e-05; Accession=PF00514.15; Description=Armadillobeta- catenin-like repeat
  Pfam annotation: Domain name=Arm; Domain location=50-90; Score=50.5; E_value=6.4e-12; Accession=PF00514.15; Description=Armadillobeta -catenin-like repeat
  Pfam annotation: Domain name=Arm; Domain location=91-131; Score=27.3; E_value=6.3e-05; Accession=PF00514.15; Description=Armadillobeta -catenin-like repeat
  Pfam module annotation: Pfam domain module=Arm::Arm::Arm::Arm::Arm; Domain location=132-172::173-213::214-254::50-90::91-131
FFYLYCTKVSAKSSDYDHAGLVSLMTRLRGGNQDEQRAAAGEIRLLAKRNVNNRICIAEAGAIPLLVNLLSSSDPRTQEHAVTALLNLSIHENNKASIVGSHAIPKIVEVLKTGSMEARENAAATLFSLSVVDENKVTIGGAGAIPPLINLLCDGSPRGKKDAATAIFNLCIYQGNKIRAVKAGIVIHLMNFLVDPTGGMTDEALTLLAILAGNPEARAVIAQSDPIPPLVEVIKTESPRNRENAAAILWSLCCADVEQTKAAKVAGAEDALKELSESGTDRAKRKSSSILELMRQAEEA

SEQ ID NO: 103212 - protein, 96 aa, Setaria italica
  Transcript Sequence Number=SeqID_37238
  Gene Ontology: Mol. function=signal transducer activity; Cellular component=plasma membrane; Biological process=response to light stimulus
  Homolog annotation: Hit_ID=B9T0N5; Match level="QueryCoverage=75%, HitCoverage=11%, E-value=2e-17, Identity=56%"; Hit description=Root phototropism protein, putative
  Subcellular localization annotation: CTP_CleavageSite=25; ConfidenceScore=5.03e-01
ERKRRKKNRRQSNGEWGSDNAVFPFATTTTSPRFRNPISHRRIFSDVAEDVTVSVDGQTFLLHKFPLVSRCGRVRKLVVDSKDPDLLKLELVNVPG

SEQ ID NO: 103213 - protein, 124 aa, Setaria italica
  Transcript Sequence Number=SeqID_37239
  Gene Ontology: Mol. function=signal transducer activity; Cellular component=plasma membrane; Biological process=response to light stimulus
  Homolog annotation: Hit_ID=B9T0N5; Match level="QueryCoverage=95%, HitCoverage=21%, E-value=2e-29, Identity=51%"; Hit description=Root phototropism protein, putative
MVEEVGLVDRCVDAIAMNASKEQLVSGLAHLECNVGSGKLRMHSQDWWVEDLSALRIDHYRRVIAAMRRNGVRPESIGTSITHYAQTLLKGVERRHVWDSGPFVGDDQRMIVETLIDLLAAVNI

SEQ ID NO: 103214 - protein, 331 aa, Setaria italica
  misc_feature (166)..(166): Xaa can be any naturally occurring amino acid
  Transcript Sequence Number=SeqID_37240
  Gene Ontology: Mol. function=signal transducer activity; Cellular component=plasma membrane; Biological process=response to light stimulus
  Homolog annotation: Hit_ID=B9T0N5; Match level="QueryCoverage=95%, HitCoverage=47%, E-value=1e-93, Identity=57%"; Hit description=Root phototropism protein, putative
  Pfam annotation: Domain name=NPH3; Domain location=4-193; Score =170.5; E_value=4.9e-48; Accession=PF03000.6; Description=NPH3 family
RPFCTENRPLSACDCLSFLFGMLRMAIEVDASLDCRIEVEKRIGLQLEMASLDDLLIPSTQTSDSMFDVDTVHRILVNFLQRIDEDDSGELSPCGYNSDGLKSPSHSSVLKVGRLMDGYLAEIAPDPYLKLQKFMALIELLPDYARIVDDGLYRAIDIYLTISSVXAHPSLTESECKKLCKLIDCQKLSQDASSHAAQNDRLPIQMVVRVLYFEQLRLKSSFSGGGSGGCGDGGLSQRFICSSGVPSSCVSPQRDNYASLRRENRELKLEISRMRVRLTELEREQGLMKQQGIRGGDGRPGEHGRAFLASLSRGFGRITMFGGPTAAEKRQ

SEQ ID NO: 103215 - protein, 524 aa, Setaria italica
  misc_feature (177)..(177): Xaa can be any naturally occurring amino acid
  Transcript Sequence Number=SeqID_37241
  Gene Ontology: Mol. function=nucleotide binding
  Homolog annotation: Hit_ID=B6SVC7; Match level="QueryCoverage=100%, HitCoverage=91%, E-value=0.0, Identity=91%"; Hit description=Auxin -independent growth promoter
  Pfam annotation: Domain name=DUF246; Domain location=76-417; Score =766.6; E_value=1.8e-227; Accession=PF03138.6; Description=Plant protein family
GARVVRRPNPPFLLNKPAEVARSVIGAVDFAVPSGGSKLGEELWESKAAGNFFGCSNATKKFADAKAVTKSDRYLMIATSGGLNQQRTGIIDAVVAARILNATLVIPKLDEESFWKDASDFAEIFDVDSFISSLSNDVKVIRQLPDRNGKTRSPYKMRIPRKCTPKCYENRVLPALXKKHVVQLTKFDYRVSNRLETDLQKLRCRVNYHALQFTDPILKMGELLVRRMRARSGRFIALHLRFEPDMLAFSGCYYGGGDIERRELGEIRKRWKTLHASNPDRERRHGKCPLTPEEVGLMLRALGFGKDVHVYVASGDVYGGEETLAPLKALFPNFHSKETLASKEELAPFLPYSSRMAALDFIVCDRSDVFVTNNNGNMARMLAGRRRYFGHRRTIRPNAKKLYSLFLNRTSMSWDRFASKVQTFQKGFMGEPNEIKPGRGEFHEHPMDCICAKSKGKTGQSRPHQSKRAGEAVENLSSDGDLDWRDLDYVEHTPLGKDTSNESESDDIRVGGSDIPELEDMMSD

SEQ ID NO: 103216 - protein, 116 aa, Setaria italica
  Transcript Sequence Number=SeqID_37242
  Gene Ontology: Mol. function=nucleic acid binding; Cellular component= intracellular
  Homolog annotation: Hit_ID=Q10B98; Match level="QueryCoverage=97%, HitCoverage=36%, E-value=7e-60, Identity=96%"; Hit description=Zinc finger CCCH domain-containing protein 25
  Pfam annotation: Domain name=RRM_1; Domain location=38-108; Score =102.1; E_value=1.9e-27; Accession=PF00076.14; Description=RNA recognition motif. (a.k.a. RRM, RBD, o
MNPLTQVKRTQVINQKEALLGIGEDASWHAKFKDSAYVFVGGIPFDLTEGDLLAIFAQYGEVVDVNLVRDKGTGKSKGFAFLAYEDQRSTILAVDNLNGAKVLGRIIRVDHVSKYK

SEQ ID NO: 103217 - protein, 78 aa, Setaria italica
  Transcript Sequence Number=SeqID_37243
VKPYGALLEDEHRRLREHWLNMSCNDLPAAFEVLKDRKALMEKSRKLLGLELEEKNVSVLRKVIMVYLCLFMMRRQTS

SEQ ID NO: 103218 - protein, 140 aa, Setaria italica
  misc_feature (125)..(125): Xaa can be any naturally occurring amino acid
  Transcript Sequence Number=SeqID_37244
NGSSSSGRVVPEKEQVGILWSDLAPFIENQEHCSGLADVTYVPPETFSLESLRGVLSYEVWSTCLTETERKFLKQFLPSETDAEENVHLLLTGKNHHFGNPFLSWSSSLCYGDIHPDAILIKEKXTIKKDEKAYRVNLLN

SEQ ID NO: 103219 - protein, 189 aa, Setaria italica
  Transcript Sequence Number=SeqID_37245
WRNQGKLLGLELEEKNVSVLRKADQLTDITNELGQPGASENDGSPILQNGQVEHSPQSMFQGGDGQSTTLQDQDDEQTKYMETCIFNIDSRNVEDHDLMVVRGTDITSESEQNSDVQDRNGVSCVDESTSCCANNPDKQNEDLTDIKLRKDGLGVNSEDIQEISCKGTTINNNNSSESQGINSINNTSH

SEQ ID NO: 103220 - protein, 282 aa, Setaria italica
  misc_feature (21)..(21): Xaa can be any naturally occurring amino acid
  misc_feature (273)..(273): Xaa can be any naturally occurring amino acid
  Transcript Sequence Number=SeqID_37246
ADVTYVPPETFSLERNRGSRXLRGVLSYEVWSTCLTETERKFLKQFLPSETDAEENVHLLLTGKNHHFGNPFLSWSSSLCYGDIHPDAILNKEKHIKKDEKAYRVNLLNYHSNMVDTLKKWKKRWLNCGDIENLFRDNPGNQKQVAMQQKATKGGMPMKVAQRVDVSKFMSYIKVSRTQLNHIKRLKQSGDGIQTKHVSRVIGGLDKSHVKPYGALLEDEHRRLREHWLNMSCNDLPAAFEVLKDRKALMEKSRKLLGLELEEKNVSVLRKVXCDLSFSSYS

SEQ ID NO: 103221 - protein, 66 aa, Setaria italica
  Transcript Sequence Number=SeqID_37247
  Gene Ontology: Mol. function=5'-3' exonuclease activity; Cellular component=nucleus
  Homolog annotation: Hit_ID=B4FJZ1; Match level="QueryCoverage=92%, HitCoverage=14%, E-value=1e-25, Identity=90%"; Hit description=DNA polymerase I
NPTDGVTRADPSKGRIMLVDGTSVMYRSYYKILAQLQHGQLEHADGNGDWVLTIFKALSLVSRIVP

SEQ ID NO: 103222 - protein, 136 aa, Setaria italica
  Transcript Sequence Number=SeqID_37248
  Gene Ontology: Mol. function=5'-3' exonuclease activity; Cellular component=nucleus
  Homolog annotation: Hit_ID=B4FJZ1; Match level="QueryCoverage=86%, HitCoverage=27%, E-value=7e-57, Identity=90%"; Hit description=DNA polymerase I
LTKERDVYKGQVQVLPLTDSIESFQGPSVQNTPRIPLYDDSIPSGILDTLSNPTDGVTRADPSKGRIMLVDGTSVMYRSYYKILAQLQHGQLEHADGNGDWVLTIFKALSLLLDMLEFIPSHAAVVFDHDGKLCPG

SEQ ID NO: 103223 - protein, 419 aa, Setaria italica
  Transcript Sequence Number=SeqID_37249
  Gene Ontology: Mol. function=DNA binding; Cellular component=nucleus; Biological process=regulation of transcription
  Homolog annotation: Hit_ID=B9RJX9; Match level="QueryCoverage=64%, HitCoverage=44%, E-value=3e-40, Identity=40%"; Hit description=DNA binding protein, putative
  Pfam annotation: Domain name=Myb_DNA-binding; Domain location=206 -253; Score=29.1; E_value=1.9e-05; Accession=PF00249.23; Description =Myb-like DNA-binding domain
MAAAAAPAAGAGKGKRKRPLSEDDVYLLLHRYAPGTILTALQEVAQHAEGGRRIDWKAVVGKSATGITSAREYQMLWRHFAYNHDLDETVDAGDQPLGDDSDLELEPEPVPNPSKEALSEASALAKALISGSSREQASGQRVNLDAPVLNSPNEKIVRVPSEKQLAQGHRITNVTGPVSNSKQASHLGPSPGSLDPNGPSKKKKKPKAWSKEEDADLAAGVQKFGEGNWDYISNKCKFDRTPDQLSQRWALICKRPGGSTKPASTKHGTVASSEERKDALKALSMAVGPIRRSSMLRPGAYQQGIQHKSAVFAPKIPEVRPAAAPSPALALPVPVPVPVPVPVPLPVKVQVNSPLPQGQQAPVQRAPPKLANASNKARKKQPAQPNPPVGPSSIKEAAFAAGGRLAPAEAAADFLKVTQ

SEQ ID NO: 103224 - protein, 61 aa, Setaria italica
  Transcript Sequence Number=SeqID_37250
  Gene Ontology: Mol. function=hydrolase activity, acting on ester bonds; Cellular component=intrinsic to endoplasmic reticulum membrane; Biological process=intracellular protein transport
MGGGGGGFRGSCRVGAVLLFSAWVALAALSRLLRPVPNGCVMTYMYPTYIPIAGAPGCLLR

SEQ ID NO: 103225 - protein, 133 aa, Setaria italica
  misc_feature (94)..(94): Xaa can be any naturally occurring amino acid
  misc_feature (119)..(119): Xaa can be any naturally occurring amino acid
  Transcript Sequence Number=SeqID_37251
  Gene Ontology: Mol. function=glucose-6-phosphate dehydrogenase activity; Cellular component=chloroplast; Biological process =carbohydrate metabolic process
  Homolog annotation: Hit_ID=B6SWV1; Match level="QueryCoverage=82%, HitCoverage=18%, E-value=5e-58, Identity=97%"; Hit description =Glucose-6-phosphate 1-dehydrogenase
  Pfam annotation: Domain name=G6PD_N; Domain location=33-133; Score =52.9; E_value=1.2e-12; Accession=PF00479.14; Description=Glucose-6 -phosphate dehydrogenase, NAD bindi
GLPLSSKFYFRYCNCSLSLSLLSKNDDSTVSITVVGASGDLAKKKIFPALFALYYEDCLPKHFTIFGYARSKMTDSELRNMVSKTLTCRIDKRXNCSEKMEEFLKRCFYHSGQYDSEEXFIDLDKKLKQHEGS

SEQ ID NO: 103226 - protein, 87 aa, Setaria italica
  Transcript Sequence Number=SeqID_37252
  Gene Ontology: Mol. function=glucose-6-phosphate dehydrogenase activity; Cellular component=chloroplast; Biological process =carbohydrate metabolic process
  Homolog annotation: Hit_ID=B6SWV1; Match level="QueryCoverage=87%, HitCoverage=13%, E-value=4e-25, Identity=74%"; Hit description =Glucose-6-phosphate 1-dehydrogenase
MLVFVTPCLKWLVSCHSIPKLPIKCSITCLRYSKEIPDAYERLLLDAIEGERRLFIRSDELDAAWSLFTPLLKELEEKRIAPELYPI

SEQ ID NO: 103227 - protein, 598 aa, Setaria italica
  misc_feature (137)..(137): Xaa can be any naturally occurring amino acid
  Transcript Sequence Number=SeqID_37253
  Gene Ontology: Mol. function=glucose-6-phosphate dehydrogenase activity; Cellular component=chloroplast; Biological process =carbohydrate metabolic process
  Homolog annotation: Hit_ID=B6SWV1; Match level="QueryCoverage=100%, HitCoverage=100%, E-value=0.0, Identity=90%"; Hit description =Glucose-6-phosphate 1-dehydrogenase
  Pfam annotation: Domain name=G6PD_C; Domain location=294-591; Score =537.0; E_value=2.3e-158; Accession=PF02781.8; Description=Glucose-6 -phosphate dehydrogenase, C-terminal domain
  Pfam annotation: Domain name=G6PD_N; Domain location=107-291; Score =293.6; E_value=4.2e-85; Accession=PF00479.14; Description=Glucose-6 -phosphate dehydrogenase, NAD bindi
  Pfam module annotation: Pfam domain module=G6PD_C::G6PD_N; Domain location=294-591::107-291
  Subcellular localization annotation: CTP_CleavageSite=50; ConfidenceScore=5.26e-01
MALSCMRCPAGAAAVSTRRAAAPPQAPAAAVSFARCGFGKSAAVECWRIQAVAPQGVKAPIDADVKNAVTLTTPPKVENGSPSEITPDEFEDLSLLSKNDDSTVSITVVGASGDLAKKKIFPALFALYYEDCPSQVXCPKHFTIFGYARSKMTDSELRNMVSKTLTCRIDKRENCSEKMEEFLKRCFYHSGQYDSEEHFIDLDKKLKQHEGSRVSNRLFYLSIPPNIFLDVVKCASKSASSLNGWTRVIVEKPFGRDSESSAALTRGLKQYLVEDQIFRIDHYLGKELVENLSVLRFSNLVFEPLWSRQYIRNVQLIFSEDFGTEGRGGYFDGYGIIRDIMQNHLLQILALFAMETPISLEAEDIRNEKVKVLRSMKPLQLEDVVIGQYKSHTKGGTTYPGYTDDNTVPKDSVTPTFAAAALFINNARWDGVPFLMKAGKALHTKRAEIRVQFRHVPGNLYKGSFGTDLDRATNELVIRVQPDEAIYLKINNKIPGLGMRLDRSNLNLHYAARYSKEIPDAYERLLLDAIEGERRLFIRSDELDAAWSLFTPLLKELEEKRIAPELYPYGSRGPVGAHYLAAKYNVRWGDLSAEHYKA

SEQ ID NO: 103228 - protein, 71 aa, Setaria italica
  misc_feature (16)..(16): Xaa can be any naturally occurring amino acid
  Transcript Sequence Number=SeqID_37254
  Gene Ontology: Mol. function=oxidoreductase activity, acting on the CH-CH group of donors; Cellular component=integral to membrane; Biological process=steroid metabolic process
  Homolog annotation: Hit_ID=B6TIF9; Match level="QueryCoverage=97%, HitCoverage=25%, E-value=2e-27, Identity=86%"; Hit description =Steroid reductase DET2
  Pfam annotation: Domain name=Steroid_dh; Domain location=1-71; Score=- 7.6; E_value=8.9e-06; Accession=PF02544.8; Description=3-oxo-5-alpha -steroid 4-dehydrogenase
SYLVTCPNYFGETVEXWLGFAVVAWTPAAWAFFLYTCSNLGPRARDHRRWYLQKFGSEYPASLKAFVPTIY

SEQ ID NO: 103229 - protein, 57 aa, Setaria italica
  Transcript Sequence Number=SeqID_37255
SDVVLEYSFFFIRCIFELQNYRILGVYRVLKYRCCIYPQCCKACLLCCRDSQIFGHP

SEQ ID NO: 103230 - protein, 63 aa, Setaria italica
  Transcript Sequence Number=SeqID_37256
  Gene Ontology: Mol. function=protein serine/threonine kinase activity; Biological process=protein amino acid phosphorylation
  Homolog annotation: Hit_ID=Q7XI53; Match level="QueryCoverage=79%, HitCoverage=10%, E-value=9e-23, Identity=96%"; Hit description =Putative ankyrin-kinase
LIFNCFDFRTKIDRYMAPEVFKHRKYDKKVDIFSFAMILYEMLEGDPPFSNYEPYEAAKYVAE

SEQ ID NO: 103231 - protein, 79 aa, Setaria italica
  Transcript Sequence Number=SeqID_37257
  Gene Ontology: Cellular component=integral to membrane
  Subcellular localization annotation: CTP_CleavageSite=38; ConfidenceScore=5.04e-01
MAARRPGSPASMWPRPSALLLLVAFALLSAPRPARALRFDLESGHTKCISDEIKVNSMAVGKYHVVGPDPNFPDAQPPR

SEQ ID NO: 103232 - protein, 94 aa, Setaria italica
  misc_feature (48)..(48): Xaa can be any naturally occurring amino acid
  Transcript Sequence Number=SeqID_37258
  Gene Ontology: Cellular component=integral to membrane
  Homolog annotation: Hit_ID=B6U439; Match level="QueryCoverage=57%, HitCoverage=23%, E-value=5e-18, Identity=83%"; Hit description =Transmembrane emp24 domain-containing protein 10
MLFLIASTSVYACVVACMLQMMELELKKLEEIIKNIHEEIFYLRESRXEEMQDLNRRTHSRMAWLGFLSLGICLSVAGLQLWHLKTYFERKKLL

SEQ ID NO: 103233 - protein, 96 aa, Setaria italica
  misc_feature (34)..(34): Xaa can be any naturally occurring amino acid
  Transcript Sequence Number=SeqID_37259
  Gene Ontology: Cellular component=integral to membrane
  Homolog annotation: Hit_ID=B6U439; Match level="QueryCoverage=57%, HitCoverage=23%, E-value=5e-18, Identity=81%"; Hit description =Transmembrane emp24 domain-containing protein 10
MLFLIASTSVYACVVACMLQMMELELKKLEEIIXKNIHEEIFYLRESSTEEEMQDLNRRTHSRMAWLGFLSLGICLSVAGLQLWHLKTYFERKKLL

SEQ ID NO: 103234 - protein, 248 aa, Setaria italica
  Transcript Sequence Number=SeqID_37260
  Gene Ontology: Mol. function=protein serine/threonine kinase activity; Biological process=protein amino acid phosphorylation
  Homolog annotation: Hit_ID=Q7XI53; Match level="QueryCoverage=100%, HitCoverage=55%, E-value=1e-134, Identity=91%"; Hit description =Putative ankyrin-kinase
  Pfam annotation: Domain name=Ank; Domain location=15-47; Score=41.7; E_value=2.9e-09; Accession=PF00023.22; Description=Ankyrin repeat
  Pfam annotation: Domain name=Pkinase; Domain location=107-246; Score=- 18.2; E_value=2.1e-07; Accession=PF00069.17; Description=Protein kinase domain
  Pfam annotation: Domain name=Pkinase_Tyr; Domain location=107-248; Score=-19.4; E_value=1.9e-12; Accession=PF07714.9; Description =Protein tyrosine kinase
  Pfam module annotation: Pfam domain module=Ank::Pkinase::Pkinase_Tyr; Domain location=15-47::107-246::107-248
LLEEDATLVNAHDYDSRTPLHVAALHGWHDVAECLIAKGVDVNAQDRWQNTPLADAEGAKRQAMIELLKEHGGLTYGKTGSHFEPKTIPPPLTNKADWEINPLELDFTKAVVIGKGSFGEILKANWRGTPIAVKRILPSLSDDRLVIQDFKHEVNLLIKLRHPNIVQFLGAVTETKPLMLVTEFLRGGDLHQYLKEKGALGPLVAVNFALDIARGMAYLHNEPNVVIHRDLKPRNILLVNSAANHLKV

SEQ ID NO: 103235 - protein, 407 aa, Setaria italica
  misc_feature (191)..(191): Xaa can be any naturally occurring amino acid
  Transcript Sequence Number=SeqID_37261
  Gene Ontology: Mol. function=protein serine/threonine kinase activity; Biological process=protein amino acid phosphorylation
  Homolog annotation: Hit_ID=Q7XI53; Match level="QueryCoverage=93%, HitCoverage=90%, E-value=0.0, Identity=81%"; Hit description =Putative ankyrin-kinase
  Pfam annotation: Domain name=Ank; Domain location=67-99; Score=45.4; E_value=2.3e-10; Accession=PF00023.22; Description=Ankyrin repeat
  Pfam annotation: Domain name=Pkinase; Domain location=159-390; Score =184.3; E_value=3.4e-52; Accession=PF00069.17; Description=Protein kinase domain
  Pfam annotation: Domain name=Pkinase_Tyr; Domain location=159-390; Score=163.2; E_value=7.6e-46; Accession=PF07714.9; Description =Protein tyrosine kinase
  Pfam module annotation: Pfam domain module=Ank::Pkinase::Pkinase_Tyr; Domain location=67-99::159-390::159-390
GGGRQRRGVVGGAGSGGGGGARRGRFDDKGLVARTSLILWHTHQNDVGAVRKLLEEDATLVNAHDYDSRTPLHVAALHGWHDVAECLIANGADVNAQDRWQNTPLADAEGAKRQAMIELLKEHGGLTYGKTGSHFEPKTIPPPLTNKADWEINPLELDFTKAVVIGKGSFGEILKANWRGTPIAVKPHSNXVQFLGAVTETKPLMLVTEFLRGGDLHQYLKEKGALGPLVAVNFALDIARGMAYLHNEPNVVIHRDLKPRNILLVNSAANHLKVGDFGLSKIIKAQHANDVYKMTGETGSYRYMAPEVFKHRKYDKKVDIFSFAMILYEMLEGDPPFSNYEPYEAAKYVAEGHRPAFRKGHTNELKDLVELCWSGDINLRPSFLEILKRLEKLKEQFSHETHWHLFQ

SEQ ID NO: 103236 - protein, 213 aa, Setaria italica
  Transcript Sequence Number=SeqID_37262
  Gene Ontology: Cellular component=integral to membrane; Biological process=transport
  Homolog annotation: Hit_ID=B6U439; Match level="QueryCoverage=89%, HitCoverage=87%, E-value=4e-74, Identity=69%"; Hit description =Transmembrane emp24 domain-containing protein 10
  Pfam annotation: Domain name=EMP24_GP25L; Domain location=20-208; Score=203.5; E_value=5.5e-58; Accession=PF01105.16; Description =emp24gp25Lp24 family
SALLLLVAFALLSAPRPARALRFDLESGHTKCISDEIKVNSMAVGKYHVVGPDPNFPDAQLPESHRISLRVTSPYGNSMHYAENVQSGHFAFTATEAGDYLACFWAPDHKPPVTIGFEFDWRSGVSAKDWPSVAKKGKVDMMELELKKLEETIKNIHEEMFYLREREEEMQDLNRRTNSRMAWLGFLSLGICLSVAGLQLWHLKTFFERKKLL

SEQ ID NO: 103237 - protein, 109 aa, Setaria italica
  Transcript Sequence Number=SeqID_37263
  Gene Ontology: Mol. function=DNA binding; Cellular component=nucleus; Biological process=regulation of transcription
  Homolog annotation: Hit_ID=Q5N7Y8; Match level="QueryCoverage=98%, HitCoverage=11%, E-value=1e-42, Identity=76%"; Hit description =Putative Myb-like protein
KGEGALFYEPPRFPGVDVPFISCDLVTSADLQEFSPLGIRQWMRSTMNVPTPLRLWGSPTHDESPDALKTAAESFPCTPSIMKKRHRGLLSPTPDKRIEKKSGIAKEMT

SEQ ID NO: 103238 - protein, 56 aa, Setaria italica
  Transcript Sequence Number=SeqID_37264
DKILLGFPKGVITYHLITWCKAQCHHKMNKKGNRLLNQNCSDNDFIRPHQRKISNV

SEQ ID NO: 103239 - protein, 92 aa, Setaria italica
  Transcript Sequence Number=SeqID_37265
TEGSTIYCHKLSSMQEWAEWQQAQMSEPQYQFKEPDGASYDQEVLEALRDDSEDDFEVSSEDEDDDFFERMLEVGQSSGMAIDYNADNDDAC

SEQ ID NO: 103240 - protein, 103 aa, Setaria italica
  Transcript Sequence Number=SeqID_37266
VRGCHLGPPNWHPAEDGDLRVCNTFTGHVTSLPPPSGLSVGRDDGCYIYRCAFLAIDVADASFVLLVMDVKLRPRTFWLEDGEWGPLRRLSSPWDIFTDEDWT

SEQ ID NO: 103241 - protein, 43 aa, Setaria italica
  Transcript Sequence Number=SeqID_37267
PNGRSLSFYLWITKGTYAGHSMDHQIYIFTKIQFIKKNQKLLL

SEQ ID NO: 103242 - protein, 124 aa, Setaria italica
  Transcript Sequence Number=SeqID_37268
  Gene Ontology: Mol. function=microtubule motor activity; Cellular component=microtubule associated complex; Biological process =microtubule-based movement
  Homolog annotation: Hit_ID=Q6K990; Match level="QueryCoverage=97%, HitCoverage=13%, E-value=2e-47, Identity=80%"; Hit description =Putative phragmoplast-associated kinesin
SKAKLLPNSCLSELRKLIEAHFEEAGSKQQQQFTFLLLGDPSGGPVSREKEASVQISKLPHWNNQPNSYLACLRAAKKPTVDHMPFSPLESKLNSVVKDAHLAGMLSPKAANQMSPNYIRELRA

SEQ ID NO: 103243 - protein, 278 aa, Setaria italica
  Transcript Sequence Number=SeqID_37269
  Gene Ontology: Mol. function=microtubule motor activity; Cellular component=microtubule associated complex; Biological process =microtubule-based movement
  Homolog annotation: Hit_ID=Q6K990; Match level="QueryCoverage=96%, HitCoverage=28%, E-value=2e-94, Identity=65%"; Hit description =Putative phragmoplast-associated kinesin
PQDVKVIKEDTRHQGHIWNHTATAGVCTGAVVQEDDVRLSGYPEKVVLSTVFEEGDDEDAEGGNGLEEEVCKEVVEESFKVDITQDALADPDDPATRKHRIENIFRLCGNHRELAKKPKVQSPAKEVFGDQNKSPAKKVFGDVKKSPAKQVFGDENKEPSAWGTMDTPMCDVKVTDSPVSSQLSPIVCQVVDEPLSEQLKLCSTVQESDQNKENSVAGQKEQDGLLEVYIKWESGNLIKGLKLLPNSCLSELRKLIEAHFEEAGSKQQQLRLPNLLLS

SEQ ID NO: 103244 - protein, 225 aa, Setaria italica
  Transcript Sequence Number=SeqID_37270
  Gene Ontology: Mol. function=zinc ion binding; Cellular component =nucleus; Biological process=regulation of transcription
  Homolog annotation: Hit_ID=P38564; Match level="QueryCoverage=96%, HitCoverage=81%, E-value=3e-26, Identity=79%"; Hit description=Dof zinc finger protein MNB1A
  Pfam annotation: Domain name=zf-Dof; Domain location=5-67; Score =133.6; E_value=6.1e-37; Accession=PF02701.7; Description=Dof domain, zinc finger
YAVPAPAEGDPCPRCESRDTKFCYYNNYNTSQPRHFCKGCRRYWTKGGTLRNVPVGGGTRKKPSSSPPSSYAAAANANKPKKPSKKKRRVVVVAPQDPVAAPVAAPTLVAAPAADSAKTTTNETTTTTTNETTATTATPTTTDAASEITTELVVPAAEEEDSLAHLLQPDVALGLGTSDFPAAGKALDLEPDSFEWPAAFDLGGACWGSAGFADPDPAGLFLNLP

SEQ ID NO: 103245 - protein, 111 aa, Setaria italica
  Transcript Sequence Number=SeqID_37271
  Gene Ontology: Mol. function=electron carrier activity; Cellular component=integral to membrane; Biological process=oxidation reduction
  Homolog annotation: Hit_ID=Q2QP56; Match level="QueryCoverage=100%, HitCoverage=12%, E-value=4e-56, Identity=89%"; Hit description =Respiratory burst oxidase, putative, expressed
  Pfam annotation: Domain name=FAD_binding_8; Domain location=42-111; Score=53.5; E_value=8.1e-13; Accession=PF08022.4; Description=FAD -binding domain
VHGVCLYINRTWYKQTTWMYLAIPLLLYAGERLLRALRSHGLTTVRIEKVAVYPGNVIAIHMSKPCGFSYKSGQYIYVNCGEVSPFEWHPFTFTSAPGDDYLSMHIRCRGD

SEQ ID NO: 103246 - protein, 120 aa, Setaria italica
  misc_feature (102)..(102): Xaa can be any naturally occurring amino acid
  Transcript Sequence Number=SeqID_37272
  Gene Ontology: Mol. function=DNA binding
  Homolog annotation: Hit_ID=Q01IQ4; Match level="QueryCoverage=50%, HitCoverage=24%, E-value=2e-22, Identity=80%"; Hit description =OSIGBa0159F11.10 protein
  Subcellular localization annotation: CTP_CleavageSite=8; ConfidenceScore=5.10e-01
MGANADPSGSLGGPHRRLSSPVPAPAPLPLPQHQHGVAANTVAALRHDPGLAARWSPEEQVLLDKGLAKFVADAPVVRYAKIAMTLPDKTVRDVALRCRWMXKKECSKKRKEELSKKAKK

SEQ ID NO: 103247 - protein, 130 aa, Setaria italica
  Transcript Sequence Number=SeqID_37273
  Gene Ontology: Mol. function=hydrolase activity; Biological process =metabolic process
  Homolog annotation: Hit_ID=B6THR7; Match level="QueryCoverage=88%, HitCoverage=30%, E-value=2e-38, Identity=73%"; Hit description=prMC3
PTAAAGGGGKNGHGAVVEEIHGLIRVYKDGHVERLPAIPDVPCTWGATAPGAPGGVVARDAVVDRATGVWARLYAPMAAATTGARLPVVVYFHGGGFCVGSAAWSCYHEFLAQLAARAGCAVMSVDYRLA

SEQ ID NO: 103248 - protein, 133 aa, Setaria italica
  Transcript Sequence Number=SeqID_37274
  Homolog annotation: Hit_ID=A5A153; Match level="QueryCoverage=94%, HitCoverage=97%, E-value=4e-19, Identity=45%"; Hit description =Apomixis-related protein Pca21
  Subcellular localization annotation: CTP_CleavageSite=38; ConfidenceScore=5.15e-01
MALRSPSSTPPRVLGPGDSPPADSPPPTSQCGCGNGARADVARKTKEVEHMLANLEKEGVEIDGKIASIIDDEVARIKAEAAREKLRMNKLKRKGVMLLISIISVAYGFLLGVDWYEDQLYTKVARIICYGEE

SEQ ID NO: 103249 - protein, 56 aa, Setaria italica
  Transcript Sequence Number=SeqID_37275
  Gene Ontology: Mol. function=endopeptidase activity; Cellular component=protein complex; Biological process=ubiquitin-dependent protein catabolic process
  Homolog annotation: Hit_ID=Q9LT08; Match level="QueryCoverage=100%, HitCoverage=18%, E-value=9e-14, Identity=73%"; Hit description=26S proteasome non-ATPase regulatory subunit 14
MERLQRIFGASGMGQPPSDSPLLDSSEQVYISSLALLKMLKHGRAGVPMEVMGLML

SEQ ID NO: 103250 - protein, 139 aa, Setaria italica
  Transcript Sequence Number=SeqID_37276
  Gene Ontology: Mol. function=protein binding; Cellular component =protein complex; Biological process=anaphase-promoting complex -dependent proteasomal ubiquitin-dependent protein catabolic process
  Homolog annotation: Hit_ID=Q1M303; Match level="QueryCoverage=100%, HitCoverage=60%, E-value=5e-64, Identity=85%"; Hit description=26S proteasome subunit 11 (Fragment)
GQEPRQTTSNVGHLNKPSIQALIHGLNRHYYSIAINYRKNELEEKMLLNLHKKKWTDGLILKRFDTHSKTNEQTVQEMLNLAVKYNKAVQEEDELPPEKLAIANVGRQDAKKHLEEHVSNLMSSNIVQTLGTMLDTVVF

SEQ ID NO: 103251 - protein, 307 aa, Setaria italica
  Transcript Sequence Number=SeqID_37277
  Gene Ontology: Mol. function=protein binding; Cellular component =protein complex; Biological process=anaphase-promoting complex -dependent proteasomal ubiquitin-dependent protein catabolic process
  Homolog annotation: Hit_ID=Q9LT08; Match level="QueryCoverage=100%, HitCoverage=100%, E-value=1e-157, Identity=87%"; Hit description=26S proteasome non-ATPase regulatory subunit 14
  Pfam annotation: Domain name=Mov34; Domain location=24-137; Score =184.9; E_value=2.3e-52; Accession=PF01398.13; Description =Mov34MPNPAD-1 family
MERLQRIFGASGMGQPPTDSPLLDSSEQVYISSLALLKMLKHGRAGVPMEVMGLMLGEFVDDYTVRVVDVFAMPQSGTGVSVEAVDHVFQTNMLDMLKQTGRPEMVVGWYHSHPGFGCWLSGVDINTQQSFEALNPRAVAVVIDPIQSVKGKVVIDAFRLINPQTMMLGQEPRQTTSNVGHLNKPSIQALIHGLNRHYYSIAINYRKNELEEKMLLNLHKKKWTDGLILKRFDTHSKTNEQTVQEMLNLAVKYNKAVQEEDELPPEKLAIANVGRQDAKKHLEEHVSNLMSSNIVQTLGTMLDTVVF

SEQ ID NO: 103252 - protein, 456 aa, Setaria italica
  Transcript Sequence Number=SeqID_37278
  Gene Ontology: Mol. function=structural constituent of ribosome; Cellular component=intracellular; Biological process=translation
  Homolog annotation: Hit_ID=B9S7A4; Match level="QueryCoverage=97%, HitCoverage=98%, E-value=1e-123, Identity=52%"; Hit description=UBX domain-containing protein, putative
  Pfam annotation: Domain name=UBX; Domain location=374-455; Score =39.4; E_value=1.5e-08; Accession=PF00789.12; Description=UBX domain
  Pfam annotation: Domain name=UIM; Domain location=315-332; Score =20.8; E_value=0.0058; Accession=PF02809.12; Description=Ubiquitin interaction motif
  Pfam module annotation: Pfam domain module=UBX::UIM; Domain location =374-455::315-332
MAGDPPTAAEKEALVSSFLEIAAGQTPETATQFLQMTSWHLEEALQLFYIDGESALAARPAAPSAAAAMAAAAGVEEALRFAPPPAAALGDPMLQGLGVGEDDDVRAPLPVKRETLYGDGPVSVLRPSTTVAFRNFEQEARQSAVWDSDQNATSSSRDNLASLYRPPFSLMFNGPFDKAKLEASCLDKWLLINLQSTEEFSSHMLNRDTWGNEAVAQLIRSNFIFWQVYHDTSEGRKVCTYYNLVSVPAILLIDPITGQKMRGWNGMVHPDRLLEDLLPYLDKGPKEHHAAQPQKRPRKVDQESSMAKQGKPTVEDEDEELARAVAASLEGSKEVAEESGATDDMAEAEPEEDNEPSLNIKLDYPPLPEEPTGSRDLLCRVAIRLPNNRRIQRNFLHTDPIKLLWSFCAPEVEEGEKRAFHFVQPIPGASQKLEFASDLTFKEARLANSMINLLWD

SEQ ID NO: 103253 - protein, 187 aa, Setaria italica
  Transcript Sequence Number=SeqID_37279
  Homolog annotation: Hit_ID=Q6YYY2; Match level="QueryCoverage=87%, HitCoverage=42%, E-value=7e-44, Identity=58%"; Hit description =Myosin heavy chain-related-like
GRPLTNPEFLFNRSDCDHFQLLAAERAQKINNLEPYIKDLEKRESFLVHSVEDLTLEMKAVEQEATRWREACEQEVEAGKSAIKELNQEIALLREELGRVKADLETANSKLQLKEKLAASAMVAQAAADACLKLADRRSAGLQRRIEELTRQIEQEDAHGRKERGSTRRRLRLGAASTEPNAGKGGK

SEQ ID NO: 103254 - protein, 51 aa, Setaria italica
  Transcript Sequence Number=SeqID_37280
GNISSNGGGNNPLLPNIRSEMQGEDAASECSDFTNPAVCRENGHIPTLTCM

SEQ ID NO: 103255 - protein, 415 aa, Setaria italica
  misc_feature (147)..(147): Xaa can be any naturally occurring amino acid
  Transcript Sequence Number=SeqID_37281
  Gene Ontology: Cellular component=integral to membrane
  Homolog annotation: Hit_ID=A2Q5Z3; Match level="QueryCoverage=74%, HitCoverage=100%, E-value=1e-118, Identity=66%"; Hit description =Fibronectin, type III-like fold
KSNLYRQFLTSKVTQVNYLGFRLYRALPFLYELRCVLDWSCTTTSLTMYDWLKLEDIYASLFLVKCDAILNRANHRQGEKQTKLTKFCSGICLFFVLICVIWAPMLIYSSGNPTNIANPVIDVSIKIDIKALGGRLTLFKTTACEKXPWKYLKAYGDVDPLGYLGAYNVDDIQLICCQPDASTMWLIPPPVQSRFIQSLGRETLFEKMELILNWDFLRARPKGKELVRYESPIEHCPSVDDVKQVLNGTTNSFSIIDAYPRYFRVTGSGEVRRLEAAIDSVSGELLLNNGTSWWSFYTNPSDLAGCQGLNGPMAIVVSEETPQGIIGETLSKFSIWSLYITFVLAVARFIRLQCSDLRMRIPYENLPSCDRLLDICEGIYAARAEGELEVEEVLYWTLVNIYRSPHMLLEYTKPD

SEQ ID NO: 103256 - protein, 58 aa, Setaria italica
  Transcript Sequence Number=SeqID_37282
QEYLPCVCDQTNTNVFCICCKTMCETMKLLHLPELFLLFITCNALKFVVSLFFYYVRT

SEQ ID NO: 103257 - protein, 283 aa, Setaria italica
  Transcript Sequence Number=SeqID_37283
  Gene Ontology: Mol. function=signal transducer activity; Biological process=response to light stimulus
  Homolog annotation: Hit_ID=B9S8R5; Match level="QueryCoverage=97%, HitCoverage=38%, E-value=2e-72, Identity=52%"; Hit description =Protein binding protein, putative
  Pfam annotation: Domain name=NPH3; Domain location=1-238; Score =188.1; E_value=2.5e-53; Accession=PF03000.6; Description=NPH3 family
SIPGLSRTGRHVGGGGAAAAAAASAPASSDGDQKALLETVIANLPEETVKSSAHTGTAVGATAARVLFGLLRTASILHASEASRDTLERRIAARLPDAAVDDLLVPSYSYLVETLYDVDCVERVVRYFLEGRGVAEEGNEDDEGSEAETPGREASRRAMLAVGRLVDAYLGEIATDANLKPDKFCDLAWALPDGARVYDDGLYRAVDIYLKAHPGLTEEEKEKVSGVVDGRKLTLEACTHAAQNERLPLRTVVQVLFFEQLQLRRAIARTIMANQNVGYGVRG

SEQ ID NO: 103258 - protein, 79 aa, Setaria italica
  Transcript Sequence Number=SeqID_37284
  Gene Ontology: Mol. function=binding
  Homolog annotation: Hit_ID=B9RP02; Match level="QueryCoverage=59%, HitCoverage=6%, E-value=2e-09, Identity=61%"; Hit description=Heat shock protein 70 (HSP70)-interacting protein, putative
MGKPSLKKKRASSGGGGKSGEHGGKPALERSGSKVLDGDETIFTDMAQEHKEEGNKLFQRRDYDRALLNYDKAINLLPR

SEQ ID NO: 103259 - protein, 72 aa, Setaria italica
  Transcript Sequence Number=SeqID_37285
RNKIHEKESQNAQVFIADLEKNRKPYARNTIWEKLKIRPNPCGIWREIISEMLPKVVATFLFNQNHEIRAQT

SEQ ID NO: 103260 - protein, 165 aa, Setaria italica
  misc_feature (8)..(8): Xaa can be any naturally occurring amino acid
  misc_feature (10)..(10): Xaa can be any naturally occurring amino acid
  Transcript Sequence Number=SeqID_37286
  Gene Ontology: Mol. function=transferase activity, transferring groups other than amino-acyl groups; Cellular component=cellular _component; Biological process=biosynthetic process
  Homolog annotation: Hit_ID=Q2R3A4; Match level="QueryCoverage=89%, HitCoverage=38%, E-value=4e-40, Identity=54%"; Hit description =Chalcone and stilbene synthases, N-terminal domain containing protein
  Pfam annotation: Domain name=ACP_syn_III_C; Domain location=61-158; Score=-23.7; E_value=0.0047; Accession=PF08541.2; Description=3 -Oxoacyl-[acyl-carrier-protein (ACP)
  Pfam annotation: Domain name=Chal_sti_synt_C; Domain location=12-160; Score=211.6; E_value=2e-60; Accession=PF02797.7; Description=Chalcone and stilbene synthases, C-te
  Pfam module annotation: Pfam domain module=ACP_syn_III_C::Chal_sti _synt_C; Domain location=61-158::12-160
PRRPPSEXPXFEMAFASQTTIPGTEDDISMEINKVGMEYHISNKVPRLLGCNVERCLIDAFGALGVSAKWNELFWAIHPGGRAILDHIEGVLGLDDGKLAASRHVLSEFGNMSGTTVIFVLDELRHRRVAKLDGEAPEWGVMMAFGPGITIETMVLHAPASLEGN

SEQ ID NO: 103261 - protein, 56 aa, Setaria italica
  Transcript Sequence Number=SeqID_37287
ISKIRCITSLQLCKLITIFHDKVLRTNLQLDFHIQAIVHELFVNKKLLDMNANPIA

SEQ ID NO: 103262 - protein, 332 aa, Setaria italica
  Transcript Sequence Number=SeqID_37288
  Homolog annotation: Hit_ID=Q9SJF2; Match level="QueryCoverage=90%, HitCoverage=36%, E-value=7e-52, Identity=37%"; Hit description =T27G7.8
IASVIPWYPAILGAGEEVEVGTEQMQFEQLPALASEVARVEMVREYAEMALKLDSLVGDVEDAVSSSVTGKLKSVRDNSEKTHHVTIGYLKNIEDLLALVTATRPQWTHLLSAVDHRVDRSLAILRPQAIVDHRALLSSLGWPPSLSGSKFSSIDSGKQAEIVNPLFSMAGDLKSKYSESFLSLCNLQELQKRRKARQLKGHNVGNQLRQPLWVIEELVNPISTAAQHHFSKWNDKPEFVFALAYKIIRDFVDSMDEILQPLVDMAKLIGYSCREEWISGIVIALSTYLAKEIFPKQIELLQESNSSDTGCTPYQARVSWLSLVDLMISLTS

SEQ ID NO: 103263 - protein, 81 aa, Setaria italica
  Transcript Sequence Number=SeqID_37289
  Gene Ontology: Mol. function=mismatched DNA binding; Biological process=mismatch repair
NVSSPDNSDDKEETDSEDQVSPENKKKPSSVTKVAIDATSREVSPLSRGTATQADRSAWLPSFSYEQPKRFPKEGKGYAPG

SEQ ID NO: 103264 - protein, 62 aa, Setaria italica
  Transcript Sequence Number=SeqID_37290
ALVEAAAVIFKLYLVLKRSRWLTFDNVLVLLISYRTIRFNCAFVLSCCDFLTQLCIFLLAYG

SEQ ID NO: 103265 - protein, 222 aa, Setaria italica
  Transcript Sequence Number=SeqID_37291
  Homolog annotation: Hit_ID=A8I426; Match level="QueryCoverage=98%, HitCoverage=14%, E-value=1e-49, Identity=52%"; Hit description =Required to maintain repression 1
SCVAWRTRSSWGISQDRLSYNTYFEELSDEPKEDDDDTEVELDEEDNNDDGSSETYDKDEEDEEEEEEEEEAERRKLKNRIYSSDDDMIDSTVPASRYEDNTVRSSRYEDNTVPTSRYDIEWEEVEDANVDIFQPISFKKATRWNPVVVDNDTFTEQQKQSRFTWELERRKKLKLGIVKTHPLYEKDLDSDSSSSGSEQIKRNGFKRDGDQKVGRKKKHPLS

SEQ ID NO: 103266 - protein, 89 aa, Setaria italica
  Transcript Sequence Number=SeqID_37292
  Gene Ontology: Mol. function=metal ion binding
  Homolog annotation: Hit_ID=B6T085; Match level="QueryCoverage=67%, HitCoverage=24%, E-value=5e-19, Identity=81%"; Hit description=RING -H2 finger protein ATL2K
  Subcellular localization annotation: CTP_CleavageSite=67; ConfidenceScore=5.56e-01
MSMSSMKASDPGSAWFGSGARTPPAGMGGGHNVRLITTAVAAFVSVLGLALFLHLYVCHVRRRNRRRAAAAAAVLPTTTAAAAKCGLDP

SEQ ID NO: 103267 - protein, 91 aa, Setaria italica
  Transcript Sequence Number=SeqID_37293
  Subcellular localization annotation: CTP_CleavageSite=79; ConfidenceScore=5.87e-01
PGRQARTHPSQSHHRPSSSYCRHRHGRPPPSHGRRRQATAVFSRTPASSKSSTATVSAPSAMGGDGWNGRSTPATEAVRAVGATGRTGVAG

SEQ ID NO: 103268 - protein, 81 aa, Setaria italica
  Transcript Sequence Number=SeqID_37294
  Gene Ontology: Mol. function=ATPase activity, coupled to transmembrane movement of substances; Cellular component=integral to membrane; Biological process=transport
  Homolog annotation: Hit_ID=Q6YUU5; Match level="QueryCoverage=100%, HitCoverage=6%, E-value=4e-22, Identity=64%"; Hit description =Putative multidrug resistance protein
  Subcellular localization annotation: CTP_CleavageSite=59; ConfidenceScore=5.10e-01
NVTLFVSSYAVAFALLWRLTMVSLPSVLLLVVPGFLYGRVQVGLARRMREQHARPGAIAEQAVSSVRTVYSFVAERATAAR

SEQ ID NO: 103269 - protein, 166 aa, Setaria italica
  misc_feature (95)..(95): Xaa can be any naturally occurring amino acid
  Transcript Sequence Number=SeqID_37295
  Gene Ontology: Mol. function=protein serine/threonine kinase activity; Cellular component=integral to membrane; Biological process=protein amino acid phosphorylation
  Homolog annotation: Hit_ID=B0ZEQ1; Match level="QueryCoverage=100%, HitCoverage=89%, E-value=8e-36, Identity=43%"; Hit description =Putative leucine-rich repeat receptor protein kinase EXS (Fragment)
  Pfam annotation: Domain name=LRR_1; Domain location=21-43; Score =13.1; E_value=0.93; Accession=PF00560.25; Description=Leucine Rich Repeat
  Pfam annotation: Domain name=LRR_1; Domain location=45-67; Score =16.6; E_value=0.1; Accession=PF00560.25; Description=Leucine Rich Repeat
  Pfam annotation: Domain name=LRR_1; Domain location=69-91; Score =17.4; E_value=0.061; Accession=PF00560.25; Description=Leucine Rich Repeat
  Pfam annotation: Domain name=LRR_1; Domain location=93-116; Score =12.7; E_value=1.1; Accession=PF00560.25; Description=Leucine Rich Repeat
  Pfam module annotation: Pfam domain module=LRR_1::LRR_1::LRR_1::LRR _1; Domain location=21-43::45-67::69-91::93-116
IALSYNQLTGPIPESIGRLSSLQRLQIDSNYLEGSIPRSIGALRNLTTLSLHGNRLSGNIPLELFNCTNLVTLDLSSNNLSGHIPRAISQLTFLXTLNLSSNQLSGAIPAEICVGFGNAAHPDSEFTQHHGLLDLSYNRLTSHIPSAIKNCAMVTVLNLQGNMLSG

SEQ ID NO: 103270 - protein, 120 aa, Setaria italica
  Transcript Sequence Number=SeqID_37296
MARSNAATNEASAVASEEATVSLEFGAERSLQEPVQTSKTSILEAEPCSPEMAPPGFEDFKSQWLPLSSPTLAESTHNVVQVAAINPVGMTPDAATESLPASEAMDVEIKHYSTLVLTSL

SEQ ID NO: 103271 - protein, 158 aa, Setaria italica
  misc_feature (59)..(59): Xaa can be any naturally occurring amino acid
  Transcript Sequence Number=SeqID_37297
  Gene Ontology: Mol. function=nucleotide binding; Biological process =defense response
  Homolog annotation: Hit_ID=Q69KF7; Match level="QueryCoverage=98%, HitCoverage=13%, E-value=4e-20, Identity=40%"; Hit description =Pollen signalling protein with adenylyl cyclase activity-like
PRQQKEIIRRHLTGSKLLLVIDNVRDKEGWEFLGELGEGFLERDVRVILTASHRDRTRXSGVNRWFGCHHVRALDEDDGWLLLRRTAQLREHEAVGKFQNAGIRIVSKCSGLPLALKAVGSSLRQQDQLGPWMAELSADFFVTQVMQREIQRSIDTSY

SEQ ID NO: 103272 - protein, 62 aa, Setaria italica
  Transcript Sequence Number=SeqID_37298
CLRLAGVVRSRYRGASCGDHDDVEEFASAAACGSFFFGTQGMLSLARVVFTTGKQEACSDQQ

SEQ ID NO: 103273 - protein, 231 aa, Setaria italica
  misc_feature (222)..(222): Xaa can be any naturally occurring amino acid
  Transcript Sequence Number=SeqID_37299
  Homolog annotation: Hit_ID=Q10BK1; Match level="QueryCoverage=56%, HitCoverage=23%, E-value=6e-19, Identity=44%"; Hit description =Transposon protein, putative, CACTA, En/Spm sub-class
  Subcellular localization annotation: CTP_CleavageSite=15; ConfidenceScore=5.06e-01
LRRAFLVCQKTNLPQAAALANSSTSSWSPHEAPRYLLRTTPARRKHNEENEANKHFRGKAFPFYDELTTLFGTTDTEGGPMLCVGGIGDRTPSCGSEDTPDPMADENVDWLEDTVGRSSVGRVSQRSGKEHVVDSPLPKRTKSMEYYVERISESMIQRTMTERNLISREEEEVTEMLHLVEQDGVPNGSELYFIATELFRSPARRASYRSITASENRIAWLXWTWDNVKRK

SEQ ID NO: 103274 - protein, 124 aa, Setaria italica
  misc_feature (83)..(83): Xaa can be any naturally occurring amino acid
  misc_feature (97)..(97): Xaa can be any naturally occurring amino acid
  misc_feature (109)..(109): Xaa can be any naturally occurring amino acid
  Transcript Sequence Number=SeqID_37300
  Gene Ontology: Mol. function=double-stranded RNA binding; Cellular component=intracellular; Biological process=RNA processing
  Homolog annotation: Hit_ID=B6TB30; Match level="QueryCoverage=95%, HitCoverage=35%, E-value=2e-51, Identity=83%"; Hit description =Endoribonuclease Dicer
GHLQIHVFIEEMCKYPVHSNGLLDPPKVLSDIVESLIGAIYFDSNFDQEEVWRVFRNLADPLISLETLGKHPVSELFEFCQKXRRGVKIVKDEWDKXLKVEVLIDGELXGSATYAQKKDIATEP

SEQ ID NO: 103275 - protein, 132 aa, Setaria italica
  Transcript Sequence Number=SeqID_37301
  Gene Ontology: Mol. function=intramolecular transferase activity, phosphotransferases; Cellular component=chloroplast; Biological process=carbohydrate metabolic process
  Homolog annotation: Hit_ID=Q69TT1; Match level="QueryCoverage=93%, HitCoverage=25%, E-value=1e-55, Identity=85%"; Hit description =Putative phosphomannomutase
  Pfam annotation: Domain name=PGM_PMM_I; Domain location=6-132; Score =79.2; E_value=1.5e-20; Accession=PF02878.8; Description =Phosphoglucomutasephosphomannomutase, alphabetaalpha domain I
LQRHAPHVRPVDLTPLAVEVIAESFGEWLHEELQRPEGEELRVSVGRDPRLSGARLSAALFAGLARAGCSVFDVGLATTPACFMSTVLPRFNYDASVMMTASHLPYTRNGLKFFTKRGGLTSGDVEKICYRA

SEQ ID NO: 103276 - protein, 85 aa, Setaria italica
  Transcript Sequence Number=SeqID_37302
ENNTGESFSNDVEKNDCKKNCHDLLSYVEKVTARFSVTRKMTYCRGHCSRNCCQLIWDKSCVLLPCLECSIGKGSLAKRKWEKFL

SEQ ID NO: 103277 - protein, 116 aa, Setaria italica
  Transcript Sequence Number=SeqID_37303
MRPCSGNCDPVVQAACNTRSASIHAWTETLMEASAFANISEETTRDDKLQGQQEATSVISSPIIKKDVATQMSPEDSISSSPKARHSCSSLPSGHLLKEGHNNYNNNLKPRNYKGT

SEQ ID NO: 103278 - protein, 47 aa, Setaria italica
  misc_feature (25)..(25): Xaa can be any naturally occurring amino acid
  Transcript Sequence Number=SeqID_37304
LCSEKAEDMRSAVSSNEDQCGVRAXKKASSFVKTGKPFSCCFTYRAC

SEQ ID NO: 103279 - protein, 516 aa, Setaria italica
  Transcript Sequence Number=SeqID_37305
  Homolog annotation: Hit_ID=B9R7B1; Match level="QueryCoverage=93%, HitCoverage=74%, E-value=3e-79, Identity=42%"; Hit description=DNA binding protein, putative
  Pfam annotation: Domain name=Remorin_C; Domain location=400-510; Score=85.7; E_value=1.6e-22; Accession=PF03763.5; Description =Remorin, C-terminal region
SSGSGFATRGTAAPEEGTDGASSARSEEEAEAINDSFSYSLRECRKRRWLKSEGSGLVRPPASHELNGGGGIELLVLSPRCLIGGNAGGMSKSSTASSRSRSGTGTGTFPSPGTPNYNRHCAGNMQYSKGWSSERVPLGAGSNRRYGGSGVVLPFNNGRKLPSKWEDAEKWILSPVSCDGIGRMSAPAPHHRRPKSKSGPLGHPAGIPGAYAAVSPLVPCFDGVLAAANFAAHSPFSAGVLIPEHGRIGDFSSGRGRSGDDGSSRSYSAEKEPYILRSASIHAWTETLMEASAFANISEETTRDDKLQGQQEATSVISSPIIKKDVATQMSPEDSISSSPKARHSCSSLPSGHLLKEANTHIPKPEIRDVQVDDQVTVTRWSKRHVTRGSDKRSTNIIEWRKKTIETRAPSFDEKERERCMSKCKREEAKITAWENLQKAKAEAAIRKLEMKLEKKRSSSMDKILGKLRSAQKKAEDMRSAVSSNEDQCGVRAKKKASSFVKTGKPFSCCFTYRAC

SEQ ID NO: 103280 - protein, 120 aa, Setaria italica
  misc_feature (39)..(39): Xaa can be any naturally occurring amino acid
  Transcript Sequence Number=SeqID_37306
LFSADASGEVAAAADSQNDPFLKSSSEGLAYGRFYSNIXGNRIEKNMLKTDILHHLDRCGLSLDDVKIDYNRGFTPLGAYGSSCVSNLFPQHALYIQPFYILFLLEFGPLTHFMFSSQSH

SEQ ID NO: 103281 - protein, 234 aa, Setaria italica
  Transcript Sequence Number=SeqID_37307
  Subcellular localization annotation: CTP_CleavageSite=44; ConfidenceScore=5.29e-01
MSRLAAAALRRSVVASRDPFSSLLAATAPASARLFSADASGEVAASAADSQNDPFLKSSSEGLAYGRFYSNIGGGNRIEKNMLKTDILHHLDRCGLSLDDVKIDYNRGFTPLGALLRFPSKAAFTTAIRQTSQIRLYKMDMISRDVWDLKQSFDGKAVLLQGVPRNALPEDIERFLCGTNFEPPPFESFLRPGVPEPIKMVLVKFRTKTDAMNAFITKNKSFCLNNQVSMRVLQ

SEQ ID NO: 103282 - protein, 49 aa, Setaria italica
  Transcript Sequence Number=SeqID_37308
  Subcellular localization annotation: CTP_CleavageSite=21; ConfidenceScore=5.00e-01
SSKSSRPKSIRHPPKNLRNISVNVYTNWNPRAQNMLTETPNKYFKLMRW

SEQ ID NO: 103283 - protein, 85 aa, Setaria italica
  Transcript Sequence Number=SeqID_37309
  Gene Ontology: Mol. function=protein tyrosine/serine/threonine phosphatase activity; Biological process=protein amino acid dephosphorylation
  Homolog annotation: Hit_ID=Q3S4H5; Match level="QueryCoverage=91%, HitCoverage=27%, E-value=5e-21, Identity=65%"; Hit description=Dual -specificity protein-like phosphatase 3
  Subcellular localization annotation: CTP_CleavageSite=59; ConfidenceScore=5.69e-01
LRDPAITAAMASTARLSTSCSLATGSITIRCRRATMTAIGCAPRGSRTHRRSVGISLCRSSSTAGAEGGRKMEDYNIAMKRMMRN

SEQ ID NO: 103284 - protein, 88 aa, Setaria italica
  Transcript Sequence Number=SeqID_37310
  Gene Ontology: Mol. function=phospholipase D activity; Cellular component=cytoplasmic vesicle; Biological process=phosphatidylcholine metabolic process
  Homolog annotation: Hit_ID=B9RP49; Match level="QueryCoverage=97%, HitCoverage=10%, E-value=5e-24, Identity=59%"; Hit description =Phopholipase d alpha, putative
LIRRGERFAAYVVTPMWPEGVPAGEAVQAILLWNRRTVEMMYGIVMEAIDDAGLRGQAHPCDYLNFFCLGNREAPLPGEYSPPETPEE

SEQ ID NO: 103285 - protein, 368 aa, Setaria italica
  Transcript Sequence Number=SeqID_37311
  Gene Ontology: Mol. function=aspartic-type endopeptidase activity; Biological process=proteolysis
  Homolog annotation: Hit_ID=Q94D20; Match level="QueryCoverage=100%, HitCoverage=72%, E-value=1e-166, Identity=81%"; Hit description =Nucleoid DNA-binding protein cnd41-like
  Pfam annotation: Domain name=Asp; Domain location=8-366; Score=-45.7; E_value=7.5e-11; Accession=PF00026.15; Description=Eukaryotic aspartyl protease
GLAEGSGEYFTKIGVGTPATPALMVLDTGSDVVWLQCAPCRRCYDQSGPVFDPRRSSSYGAVDCAAPLCRRLDSGGCDLRRRACMYQVAYGDGSVTAGDFATETLTFAGGARVARVALGCGHDNEGLFVAAAGLLGLGRGSLSFPTQISRRYGRSFSYCLVDRTSSASSASSGNQAGSRSSTVTFGPGAVGPSASASFTPMVRNPRMETFYYVQLVGISVGGARVPGVAESDLRLDPSTGRGGVIVDSGTSVTRLARPAYSALRDAFRGAAAGLRLSPSGFSLFDTCYDLGGRKVVKVPTVSMHFAGGAEAALPPENYLIPVDSKGTFCFAFAGTDGGVSIIGNIQQQGFRVVFDGDGQRVGFAPKGC

SEQ ID NO: 103286 - protein, 178 aa, Setaria italica
  Transcript Sequence Number=SeqID_37312
  Gene Ontology: Mol. function=nucleic acid binding; Cellular component= intracellular
ETTRRITFTKKTKGFWCKRKADVISASTKPTELQNGISATTEPAELQNGVSTSTEPAELQNGISATTEPAELQNAARHWNCALCQVSATSRTNLNKHLRGRRHLAKLIQSRGIEVICDNKSDKGAGPSDAPKKIHILVKGAIHEVVQKSDFLTFATTEPTEQQNAISGTAETAELTKC

SEQ ID NO: 103287 - protein, 66 aa, Setaria italica
  Transcript Sequence Number=SeqID_37313
QVSLLNGSNFILLFLLLFLFLYFLAMTVCLNQSKYKACRKVILVNHTRQSFTSIYFVLQLELSIRN

SEQ ID NO: 103288 - protein, 155 aa, Setaria italica
  Transcript Sequence Number=SeqID_37314
  Gene Ontology: Mol. function=transcription factor activity; Cellular component=nucleus; Biological process=regulation of transcription, DNA-dependent
  Homolog annotation: Hit_ID=A6BLV2; Match level="QueryCoverage=65%, HitCoverage=35%, E-value=1e-12, Identity=41%"; Hit description=HAP2 subunit of HAP complex
  Pfam annotation: Domain name=CBFB_NFYA; Domain location=15-60; Score =25.9; E_value=0.00017; Accession=PF02045.7; Description=CCAAT -binding transcription factor (CBF-BNF-YA) subunit B
FPHTIILGQLCFATYYAVRTFSWDIIYQSAWKFFFSSQPYLHESRHCHAMKRVRGPGGRFLNKKELQEQQQREKAPPSLHTPTGGVGKMAFGRNLCPENSTSHSPSTSSGISSVSNGGGMMAHQEHISFSSPNFLPSMNFRRENGSEKMAVNGVR

SEQ ID NO: 103289 - protein, 96 aa, Setaria italica
  Transcript Sequence Number=SeqID_37315
AERGGGREGGERWVGGGGGGLRVSGDLGNLQALDHEELSEESFESCPSEEIFLLRLLKSSSFKNNKDNSLLEFVEEALACHHLATVTLMKSLQEAI

SEQ ID NO: 103290 - protein, 58 aa, Setaria italica
  Transcript Sequence Number=SeqID_37316
SEGESFRPEKEQSVRPFPRFLVLVLLNRHHSPRPQRTSGARIAANKREGISRRTDTQR

SEQ ID NO: 103291 - protein, 71 aa, Setaria italica
  Transcript Sequence Number=SeqID_37317
  Gene Ontology: Mol. function=transcription factor activity; Cellular component=nucleus; Biological process=regulation of transcription, DNA-dependent
  Homolog annotation: Hit_ID=Q3T5P2; Match level="QueryCoverage=100%, HitCoverage=32%, E-value=2e-30, Identity=91%"; Hit description=HvCBF7
  Pfam annotation: Domain name=AP2; Domain location=1-49; Score=62.3; E_ value=1.9e-15; Accession=PF00847.12; Description=AP2 domain
RGVRMRSWGKWVSEIREPRKKSRIWLGTFATAEMAARAHDVAALAIKGRGAHLNFPEHAHLLPRPASASPK

SEQ ID NO: 103292 - protein, 560 aa, Setaria italica
  misc_feature (13)..(13): Xaa can be any naturally occurring amino acid
  misc_feature (28)..(28): Xaa can be any naturally occurring amino acid
  misc_feature (36)..(36): Xaa can be any naturally occurring amino acid
  misc_feature (419)..(419): Xaa can be any naturally occurring amino acid
  misc_feature (446)..(446): Xaa can be any naturally occurring amino acid
  Transcript Sequence Number=SeqID_37318
  Gene Ontology: Cellular component=plasma membrane
  Homolog annotation: Hit_ID=B9S9G0; Match level="QueryCoverage=39%, HitCoverage=13%, E-value=3e-41, Identity=38%"; Hit description =Disease resistance protein RPS5, putative
LNSNAIWKQDLLXKVKEHEEEIAQLRRXLSDYSVEXTQILNEKHLLEKRIAYMRMAFDQQQQDLVDAASKALSYRQDIIEENIRLTYALQAAHQERSTFVQSLLPLLSEYNLQPSVLDAQSIVSNLKVLFKHLQEKLIITEEKLKESQYQITPWRAESSNNTSAAAQSPSHPTGNALVKANLDIVPQQAYPHVRSPASSPVRARRDWDLLGNESRQAIQSEVATTNAEHDNIGRTSPSTSNHNMKDVPQGTEHDSRAVRFNIESKDQNPSFKDLIRSDASENLEGAEAQIPQEPSAQWESEGSPNLASGLDDANPQYPYLPTVLEEPSSSFSEVAEDDPLPAIDGLRITGEAFPGRELQASGYSINGTTSCNFEWVRHLDDGSVNFIEGARQPTYLVTADDVDSVLAIEVQPLDDRKRXGEIVKVYANDQRKITCDPETKELIKKXILSMGHVSYEVLLPVRFLDMWEPAVLAIKREGYSIKCNGQRGVVVTEKFQQSMTINVPYGRPTEFSIVSADGAEYNLKPAENAPSRDAIVLILRLFRMKAVEKSKGRRKGIFFK

SEQ ID NO: 103293 - protein, 128 aa, Setaria italica
  Transcript Sequence Number=SeqID_37319
  Subcellular localization annotation: CTP_CleavageSite=46; ConfidenceScore=5.53e-01
DKSQPRRPDLARVQGRPPPPRRSPQGSSGFVVLCGWRTGSRPSDFRSALSEGFWFRWPRIFSFSGQLTGLQLLFIVYRLYVCWKELFIGNSTGFQIYSLYRGLIDFREEELVFSLVWRLVADCRGLLT

SEQ ID NO: 103294 - protein, 100 aa, Setaria italica
  Transcript Sequence Number=SeqID_37320
SGDWRRDAARGAGGCDLRGRPVSWSEMQGPGDVVTPAAPSPLSVSHSTTSGRLCPHAWFGFCHSDSICLSFGGAGLGGTACRCSCWCGPASDLLSVMAQD

SEQ ID NO: 103295 - protein, 142 aa, Setaria italica
  Transcript Sequence Number=SeqID_37321
  Homolog annotation: Hit_ID=B9RFQ7; Match level="QueryCoverage=100%, HitCoverage=19%, E-value=1e-17, Identity=35%"; Hit description =Pentatricopeptide repeat-containing protein, putative
  Pfam annotation: Domain name=PPR; Domain location=109-142; Score=4.8; E_value=2.4; Accession=PF01535.12; Description=PPR repeat
  Pfam annotation: Domain name=PPR; Domain location=3-37; Score=12.0; E_ value=0.34; Accession=PF01535.12; Description=PPR repeat
  Pfam annotation: Domain name=PPR; Domain location=38-72; Score=2.8; E_ value=4.1; Accession=PF01535.12; Description=PPR repeat
  Pfam module annotation: Pfam domain module=PPR::PPR::PPR; Domain location=109-142::3-37::38-72
TVDTYSCMISKLTAAENRDDMDSLLGEMVRFRIPALEQALNELVQSLSSKNQFDEALLVIQHATSAKLKLSVSACNGVLRGLVKQGSGLRSFMLVYMEIVKSGLLPDVETLNWLIQALCESGRVDLALIQFDRMSKKRCSPN

SEQ ID NO: 103296 - protein, 72 aa, Setaria italica
  Transcript Sequence Number=SeqID_37322
DLLQGSPAVAKTNHRVNSRRQKGICPKDTDFQQQRRCMTEFKLIAAVFKRHLRSKIFIIYCHPEVLSNTFDN

SEQ ID NO: 103297 - protein, 102 aa, Setaria italica
  Transcript Sequence Number=SeqID_37323
  Gene Ontology: Mol. function=catalytic activity; Cellular component =membrane; Biological process=plant-type hypersensitive response
  Homolog annotation: Hit_ID=B4FH50; Match level="QueryCoverage=96%, HitCoverage=32%, E-value=9e-37, Identity=72%"; Hit description=Lipid phosphate phosphatase 3
MQGAHTQLGSHTIQTHGVRLVRKHTHDWVVLILLAALVIGLHYAPPFKRFVGEDMMTGIRYPVKPSTVPGWAVPIISMLCPWVIFICIYFARRDVYDLHHAT

SEQ ID NO: 103298 - protein, 72 aa, Setaria italica
  Transcript Sequence Number=SeqID_37324
MSAAATMTWHEDLATLVGDTGARFPGAGGDAPAAANVAAAGAGWYGEEEEGRTEEGWAQQAKGFAESTAEML

SEQ ID NO: 103299 - protein, 55 aa, Setaria italica
  Transcript Sequence Number=SeqID_37325
DYTQPPANPPSYDQSAAAPAQTGYTAPAANPQPAPAKGVSPQPAAAGYGGGQWTG

SEQ ID NO: 103300 - protein, 242 aa, Setaria italica
  Transcript Sequence Number=SeqID_37326
  Gene Ontology: Mol. function=RNA binding
  Homolog annotation: Hit_ID=B9SHQ3; Match level="QueryCoverage=68%, HitCoverage=20%, E-value=4e-46, Identity=58%"; Hit description =Nucleic acid binding protein, putative
  Pfam annotation: Domain name=KH_1; Domain location=62-128; Score =78.8; E_value=1.9e-20; Accession=PF00013.21; Description=KH domain
  Pfam annotation: Domain name=KH_2; Domain location=62-107; Score=4.9; E_value=0.098; Accession=PF07650.9; Description=KH domain
  Pfam module annotation: Pfam domain module=KH_1::KH_2; Domain location=62-128::62-107
QITKDVDADSNALTRSVELVGTLGSVDKAEQLIKSVIAEAEAGGSPALIARGFGSGQSGSEQFEMTVPDNKVGLIIGKGGETIKGLQTRSGARIQLIPQHPPEGVTLTERTVRVTGNKKQIEAAKDLIKQAMNQNFSKHTNQSGGYGSQGYRPQGHGAASQWGPRSQSQPGYGYPPRGMPPPQNYNPPYGGYPPQGPPRGGMGWDQRQGPPPHPSYQGGGSDYYKQGSQPYDSQPPSYPPGP

SEQ ID NO: 103301 - protein, 419 aa, Setaria italica
  Transcript Sequence Number=SeqID_37327
LVRLPIAERKQKLYGIGRQQQVYPCHEKATASPCNFSKHTNQSGGYGSQGYRPQGHGAASQWGPRSQSQPGYGYPPRGMPPPQNYNPPYGGYPPQGPPRGGMGWDQRQGPPPHPSYQGGGSDYYKQGSQPYDSQPPSYPPGPGNFNSYGQSQAPGYGQPPYPQHAPQQNYGHGYGDPRYNAPPPNQYYGQPPMGPQQGYPQQPDPYARPPYSGPGQWAPPRGAPAADGSYQAPPPASYGPPSQQPPAYGQTYGAATGPDGYAQQGYPQQGGQAPAPYGQSAPAAQGYPQQGAQQGGYVQYPQTQPAYGDQAAQANANYGYQGAPADPNYGNAYPQSGYGPAPAVGQAGYASAPAAGQPAAYGQAGYTQPPANPPSYDQSAAAPAQTGYTAPAANPQPAPAKGVSPQPAAAGYGGGQWTG

SEQ ID NO: 103302 - protein, 377 aa, Setaria italica
  misc_feature (95)..(95): Xaa can be any naturally occurring amino acid
  Transcript Sequence Number=SeqID_37328
MMVTKGLVDIHVILMMSHTHIMLSTEVCVSFCVVLMEFCSRTIFLNDLMISVGLSLRSTVPSIFTSLFLFNCNVNSVLLPLDNILINAFCFTLAXICYYILSTFPFWFLTGFPVQNFSKHTNQSGGYGSQGYRPQGHGAASQWGPRSQSQPGYGYPPRGMPPPQNYNPPYGGYPPQGPPRGGMGWDQRQGPPPHPSYQGGGSDYYKQGSQPYDSQPPSYPPGPGNFNSYGQSQAPGYGQPPYPQHAPQQNYGHGYGDPRYNAPPPNQYYGQPPMGPQQGYPRAARSVMARPPYSGPGQWAPPRGAPAADGSYQAPPPASYGPPSQQPPAYGQTYGAATGPDGYAQQGYPQQGGQAPAPYGQSAPAAQGYPQQGTQGI

SEQ ID NO: 103303 - protein, 142 aa, Setaria italica
  misc_feature (54)..(54): Xaa can be any naturally occurring amino acid
  misc_feature (98)..(98): Xaa can be any naturally occurring amino acid
  Transcript Sequence Number=SeqID_37329
  Gene Ontology: Mol. function=hydrogen ion transmembrane transporter activity; Cellular component=integral to membrane; Biological process=proton transport
  Homolog annotation: Hit_ID=P12212; Match level="QueryCoverage=100%, HitCoverage=61%, E-value=9e-59, Identity=80%"; Hit description =Chloroplast envelope membrane protein
  Pfam annotation: Domain name=CemA; Domain location=1-142; Score =134.1; E_value=4.5e-37; Accession=PF03040.6; Description=CemA family
MKKKKALPSFLYLVFIVLLPWGISFSFNKCLELWIKNWWNTRQSETFLTDIQEXRILEGFIELEELFLLDEMIKEKPKTHVQKPPIGIHKEIIQLAKXDNEDHLHTILHFSTNIICLAILSGSFFLGKEELVILNSWVQEFF

SEQ ID NO: 103304 - protein, 196 aa, Setaria italica
  Transcript Sequence Number=SeqID_37330
  Gene Ontology: Cellular component=anchored to membrane
  Homolog annotation: Hit_ID=Q5YLM2; Match level="QueryCoverage=99%, HitCoverage=29%, E-value=2e-99, Identity=90%"; Hit description =Roothairless 3
HGEILVGVDGAVLTGGGEMPYNTTEDAGNATSFSGYPQTDLLTPIATAGDLSQIQASVGIVGTVFAGPVPFVPLPAKLSLDNPDYACEAARNVTAGILSTCCVLTPEAEANATVIDANATDPTKNFLPRGTGDLVITYDVLQAYPSSYLALVTLENNAKLGRLDNWRLSWEWRRGEFIYSMKGAHPSKVDTSGCIY

SEQ ID NO: 103305 - protein, 176 aa, Setaria italica
  misc_feature (152)..(152): Xaa can be any naturally occurring amino acid
  Transcript Sequence Number=SeqID_37331
  Gene Ontology: Mol. function=iron-sulfur cluster binding
TPQKLPPVPAAAFDMPKPNLRGLNKPKCIQCGNVARSRCPFQCCKACCYKAQNPCHIHVLKQTNTLPDKPSPTTAPVTEQASTNLPATGSSSRLACLQKLPHHFLNSLRTKKSLGKKDVASINKWMFMKLKEHMQGDVDAENEAYERYTQNXVGLLEETFCPMEDAAAEPEPEATS

SEQ ID NO: 103306 - protein, 106 aa, Setaria italica
  Transcript Sequence Number=SeqID_37332
RGGKLTPIKRQMDLPRREGEKRKRQQLAGEKAAAVVAVVAVEDVPRHHAVTSRRHVALPLCRLTRRHLVPPRVASCVRRLDRNWGVRPVEAFRAVERVESSFRAVI

SEQ ID NO: 103307 - protein, 317 aa, Setaria italica
  misc_feature (8)..(8): Xaa can be any naturally occurring amino acid
  Transcript Sequence Number=SeqID_37333
  Gene Ontology: Mol. function=aminopeptidase activity; Cellular component=endoplasmic reticulum; Biological process=proteolysis
  Homolog annotation: Hit_ID=Q8RXP6; Match level="QueryCoverage=88%, HitCoverage=90%, E-value=1e-128, Identity=73%"; Hit description =Bem46-like protein
  Pfam annotation: Domain name=AXE1; Domain location=19-271; Score= -212.2; E_value=0.017; Accession=PF05448.4; Description=Acetyl xylan esterase (AXE1)
  Pfam annotation: Domain name=Abhydrolase_1; Domain location=106-289; Score=-3.6; E_value=0.011; Accession=PF00561.12; Description =alphabeta hydrolase fold
  Pfam annotation: Domain name=Abhydrolase_3; Domain location=87-276; Score=-83.6; E_value=0.034; Accession=PF07859.5; Description =alphabeta hydrolase fold
  Pfam annotation: Domain name=BAAT_C; Domain location=133-297; Score= -73.4; E_value=0.012; Accession=PF08840.3; Description=BAAT  Acyl-CoA thioester hydrolase C t
  Pfam annotation: Domain name=Peptidase_S9; Domain location=92-301; Score=-14.6; E_value=5.5e-06; Accession=PF00326.13; Description =Prolyl oligopeptidase family
  Pfam module annotation: Pfam domain module=AXE1::Abhydrolase _1::Abhydrolase_3::BAAT_C::Peptidase_S9; Domain location=19-271::106 -289::87-276::133-297::92-301
WLKALAYXCGGVAVAGLAALVALQERLVYVPVLPGLARAYPITPARLRLAYEDVWLRAADGVRLHSWFIRHSPTCRGPTILFFQENAGNIAHRLEFVRLMMQRLQCNVFMLSYRGYGESDGYPSQKGITYDAQAALDHLAQRKDIDTSRIVIFGRSLGGAVGAVLAKNNPDKVAALILENTFTSILDMAGIMLPFLRWFIGGSSSKGPKLLNCVVRSPWSTLDIVGEVNQPILFLSGLQDELVPPSHMKMLYDKAVEHNRTCRFIDFPSGMHMDTWMSGGDRYWRAIQLFLDQYAPEVQSHDASFKSEIAEDGEAAG

SEQ ID NO: 103308 - protein, 688 aa, Setaria italica
  Transcript Sequence Number=SeqID_37334
  Homolog annotation: Hit_ID=Q9XIC8; Match level="QueryCoverage=26%, HitCoverage=30%, E-value=3e-17, Identity=30%"; Hit description =F23M19.10
  Pfam annotation: Domain name=DUF292; Domain location=20-138; Score =201.6; E_value=2.1e-57; Accession=PF03398.6; Description=Eukaryotic protein of unknown function, DUF292
MFDSLLNSKFYNKCKQAIKCTRTRLDLLRRKKQAMVKFLKKDVADLLLNGLESHAFARMEGLIVEMNQASCYDMIEQYCEYIVKQLNNLQKESDCPQEALEAVSTLIFAAARFPDLPELCDLRHIFTERYGSSVEPFVNSEFVQNLQNKSFTNEEKLQVMKTVAEEFSVPFDSKALEWKITCGPQNKHDLQKKSSTKREVEASARNGGKVDRHAVNERKSNPVPEGYGQKQEMKTKPKDIHVIPDGIGLLGEKSRKNYSDKLSEKGHMDNSLPPLDKKERNVQKEMKKYDKKDDHPRRELRNAEELDLNGLKKQDGGVVKPSGGPDRSWGHADLGLKTLGLEKQEIDSSRTLNGKTVNKAPPYSKPYRAMGEMSAEENSNSLYDRRKHAGEFGQPMRDRQHVPEKAASMRPPYVKPSFEKHIGAEEIGHLKGEQVYEPVSVRSRKPPARVDDYAGMAYEEKMANQAPDGRRRHSSKRNGSYDDYDQKVGHVVPLEGMGVNDINNARPFHQIPSERRKHRSRRHGSTSGSDYNGAIDDRESDEDEANTAIDFGNLLPRAPSSHRKHRSRSADPRKGGRDDEERMMDKLLMHYSKKGLDREERKERVKCRIPRPRADQHADGAGELSNKEGASAHRPERAVSLPPESASPKAKPKAPVRSLSMQPEMSRGNVHPPDFDELAARISALRNA

SEQ ID NO: 103309 - protein, 314 aa, Setaria italica
  misc_feature (57)..(57): Xaa can be any naturally occurring amino acid
  Transcript Sequence Number=SeqID_37335
  Gene Ontology: Mol. function=protein binding; Cellular component =nucleus; Biological process=regulation of transcription, DNA -dependent
  Homolog annotation: Hit_ID=Q7XCD7; Match level="QueryCoverage=87%, HitCoverage=40%, E-value=1e-117, Identity=78%"; Hit description=GRAS family transcription factor containing protein, expressed
  Pfam annotation: Domain name=GRAS; Domain location=19-314; Score =210.5; E_value=4.5e-60; Accession=PF03514.6; Description=GRAS family transcription factor
GRAAMKPKAEAANDEAAAAVDQLLEAAKLADAGDAFGAREILARLNYRLPAAPTAGXPLLRSAFYFKEALRLALSPTGETPAPAVATPYDVVLKLGAYKAFSEVSPVLQFAHLTCVQAVLDELGGAGRIHVLDFDIGMGEQWASLMQELAQRCPAATLKVTALVSSASHHPLELQLIHENLSGFAAELGVFLQFAPFNIDTLDPAELVAITGGDAVAVHLPVGSAHVAAMPAILRLVKRLGAKVVVSVDHGCDRTELPFAAHLFQALQSCVSLLESVDAARPDGDAVAKIERFLVQPGVEQRVVASPPRRRPWT

SEQ ID NO: 103310 - protein, 88 aa, Setaria italica
  Transcript Sequence Number=SeqID_37336
SLCYSPSCERCFSILLCGLSEEIRRSTKLTCLKCIIVCQATSMHFNQVNLGGSATEHLPLPRFTGLVLSAILPPRKRTRVTSSTYGPG

SEQ ID NO: 103311 - protein, 83 aa, Setaria italica
  Transcript Sequence Number=SeqID_37337
  Gene Ontology: Mol. function=transcription regulator activity; Cellular component=nucleus; Biological process=regulation of transcription
PKIGSSGGGYDYDHCCYGYDQNYAGKSAYYGCGDDGGAASIRQKEDTDEIDALMSTEDGEDEDDVLSTGRTPGCRAGGSPDST

SEQ ID NO: 103312 - protein, 55 aa, Setaria italica
  Transcript Sequence Number=SeqID_37338
NYNLPEAPCGDLTTHLFCHLCAICQEYREIRERTGSSSSSAPNVTPPPVQTMDEL

SEQ ID NO: 103313 - protein, 190 aa, Setaria italica
  misc_feature (53)..(53): Xaa can be any naturally occurring amino acid
  Transcript Sequence Number=SeqID_37339
  Homolog annotation: Hit_ID=Q9LKV7; Match level="QueryCoverage=86%, HitCoverage=74%, E-value=1e-15, Identity=35%"; Hit description=Fw2.2
  Pfam annotation: Domain name=PLAC8; Domain location=47-165; Score =120.9; E_value=4.3e-33; Accession=PF04749.9; Description=PLAC8 family
MAGKGSYVPPQYIPLYGLDTEEDRVPAVEENHATSHNNKLSRDPTQWSSGTLXCDLLCFDDPQSCCIGATCPCFLFGKNAQFLGSGTLAGSCTTHCMLWGLLTSLCCVFTGGLVLAVPGSAVACYACGYRSALRTKYNLPEAPCGDLTTHLFCHLCAICQEYREIRERTGSSSSSAPNVTPPPVQTMDEL

SEQ ID NO: 103314 - protein, 145 aa, Setaria italica
  Transcript Sequence Number=SeqID_37340
  Gene Ontology: Mol. function=transferase activity, transferring glycosyl groups; Cellular component=integral to membrane; Biological process=cellulose biosynthetic process
  Homolog annotation: Hit_ID=Q0DXZ1; Match level="QueryCoverage=88%, HitCoverage=17%, E-value=3e-51, Identity=76%"; Hit description =Cellulose synthase-like protein E2
AVAMAGSSVSSGGRPPLFATEKPARVAAYAYRLFAGTVLAGLLLVWLYRATHLPPRSSGARWWAWIGLSAAELWFGFYWVLTLSVRWSPVYRRAFPDRLTRRYKEEELPGVDIFVCTADPTLEPPMLVISTVLSVMAYDYPPPDP

SEQ ID NO: 103315 - protein, 376 aa, Setaria italica
  misc_feature (338)..(338): Xaa can be any naturally occurring amino acid
  Transcript Sequence Number=SeqID_37341
  Homolog annotation: Hit_ID=B6U8B2; Match level="QueryCoverage=80%, HitCoverage=81%, E-value=8e-87, Identity=62%"; Hit description=WDL1
  Pfam annotation: Domain name=TPX2; Domain location=178-234; Score =98.9; E_value=1.7e-26; Accession=PF06886.3; Description=Targeting protein for Xklp2 (TPX2)
GPAVAVEDGASGKPALPSLGVHGEEEHEGKGNEDNSGESEVINPPEEAGGEATSPPESRKPRLSNGNKGHGPKAVKSKSPRSGDEGQARRRTPNTSLPKAAVARVSNGDAGVGSNKAVKNESHPSSKDAALLDDSKEKSKTQKSSGQHSSIKRDEEESNCESTKPRKVGSTPSYGFTFKCDERSEKRREFYSKLEEKIHARELEISNLQAKSKENEEAELKMLRKSLNFKATPMPSFYKEPTPAKVELKKIPPTRAKSPKLGRSKNKSTSEAEENTTPDQPARLSLEEKVSQNGVKKSTPSHSAKKPQRKSLPRLPSEETGTLDAAASSSPARQLKSXNQLKRQSAAGQLQGAEMKTDSVQGPIQSGANPDEQIAV

SEQ ID NO: 103316 - protein, 82 aa, Setaria italica
  misc_feature (6)..(6): Xaa can be any naturally occurring amino acid
  Transcript Sequence Number=SeqID_37342
  Gene Ontology: Mol. function=nucleotidyltransferase activity
  Homolog annotation: Hit_ID=B9RD63; Match level="QueryCoverage=100%, HitCoverage=5%, E-value=2e-28, Identity=71%"; Hit description =Nucleotidyltransferase, putative
PDMLNXSSHKTSLSSMHNALHEEIDQFCKQVAAGNLVRRPYINWAVKRVTRCLQVLWPRSRTNLFGSNATGLALPTSDVDLV

SEQ ID NO: 103317 - protein, 63 aa, Setaria italica
  Transcript Sequence Number=SeqID_37343
  Gene Ontology: Cellular component=intracellular
MDGQPGNGGGAGGSDAVARAFVEYYYNTFDASRGALAALYGHTSMLSFEGHAVAGAEAIGRKL

SEQ ID NO: 103318 - protein, 174 aa, Setaria italica
  misc_feature (64)..(64): Xaa can be any naturally occurring amino acid
  Transcript Sequence Number=SeqID_37344
  Gene Ontology: Cellular component=Golgi apparatus
  Homolog annotation: Hit_ID=B9SB27; Match level="QueryCoverage=81%, HitCoverage=15%, E-value=6e-16, Identity=36%"; Hit description=Early endosome antigen, putative
HIRITPYSSSEQNKNSATQKSISLSEVISEKSDFRHLKGMPRQEMLNYFRSEISKLRRLHELDXKRKTEELFKFKREKWSLALKYDVEFEPLRKKFSRTSLRFDQIMSNGMAAPTICSASDALDERSRLNSRIDSLYRDNQHLRCLLAEKTKNVQELSCQISDASRKMSLQYSL

SEQ ID NO: 103319 - protein, 198 aa, Setaria italica
  Transcript Sequence Number=SeqID_37345
  Gene Ontology: Mol. function=receptor activity
  Homolog annotation: Hit_ID=Q32Y71; Match level="QueryCoverage=100%, HitCoverage=26%, E-value=4e-80, Identity=75%"; Hit description =Peroxisomal targeting signal 1 receptor long form
SFEQQYGPNGWASEFEQHQSQMAMGQMGGANMASLAAMEQSRMLAQTLASNNDPKFQNSKFFQFVSKMSRGELIIEDNQVKQGSASQSNGWADEFQTQYNANANTWADQFAHEELSQGADKWASEFSSQHNQGALNESWVDEFSKLNVTDEWAEEFSGGGFGESSADPWADEFQEQLSSLKQSSGASRGVYVFSEMNP

SEQ ID NO: 103320 - protein, 157 aa, Setaria italica
  misc_feature (16)..(16): Xaa can be any naturally occurring amino acid
  misc_feature (30)..(30): Xaa can be any naturally occurring amino acid
  Transcript Sequence Number=SeqID_37346
  Gene Ontology: Mol. function=receptor activity; Cellular component =peroxisomal membrane; Biological process=positive regulation of multicellular organism growth
  Homolog annotation: Hit_ID=Q32Y71; Match level="QueryCoverage=68%, HitCoverage=14%, E-value=5e-52, Identity=90%"; Hit description =Peroxisomal targeting signal 1 receptor long form
  Pfam annotation: Domain name=TPR_1; Domain location=62-95; Score =35.2; E_value=2.6e-07; Accession=PF00515.20; Description =Tetratricopeptide repeat
  Pfam annotation: Domain name=TPR_2; Domain location=62-95; Score =27.4; E_value=5.9e-05; Accession=PF07719.9; Description =Tetratricopeptide repeat
  Pfam module annotation: Pfam domain module=TPR_1::TPR_2; Domain location=62-95::62-95
KGLIFCAISAELEQGXALRYLYRWLQNHPXWGLAPPQSTDSLYGPDVVRLFNEAAQMSPEDADVHIVLGVLYNLSREYDKAIASFKTALQLKPQDYSLWNKLGATQANSIQSADAILASRLRASHAAIMSARDALLREILKYCQALSAFGFIATALT

SEQ ID NO: 103321 - protein, 677 aa, Setaria italica
  Transcript Sequence Number=SeqID_37347
  Gene Ontology: Mol. function=receptor activity; Cellular component =peroxisomal membrane; Biological process=positive regulation of multicellular organism growth
  Homolog annotation: Hit_ID=Q32Y70; Match level="QueryCoverage=100%, HitCoverage=100%, E-value=0.0, Identity=81%"; Hit description =Peroxisomal targeting signal 1 receptor short form
  Pfam annotation: Domain name=TPR_1; Domain location=440-473; Score =18.6; E_value=0.027; Accession=PF00515.20; Description =Tetratricopeptide repeat
  Pfam annotation: Domain name=TPR_1; Domain location=474-507; Score =0.2; E_value=5.5; Accession=PF00515.20; Description=Tetratricopeptide repeat
  Pfam annotation: Domain name=TPR_1; Domain location=539-572; Score =35.2; E_value=2.6e-07; Accession=PF00515.20; Description =Tetratricopeptide repeat
  Pfam annotation: Domain name=TPR_1; Domain location=573-606; Score =21.2; E_value=0.0043; Accession=PF00515.20; Description =Tetratricopeptide repeat
  Pfam annotation: Domain name=TPR_1; Domain location=607-640; Score =32.7; E_value=1.5e-06; Accession=PF00515.20; Description =Tetratricopeptide repeat
  Pfam annotation: Domain name=TPR_2; Domain location=440-473; Score =24.6; E_value=0.0004; Accession=PF07719.9; Description =Tetratricopeptide repeat
  Pfam annotation: Domain name=TPR_2; Domain location=539-572; Score =27.4; E_value=5.9e-05; Accession=PF07719.9; Description =Tetratricopeptide repeat
  Pfam annotation: Domain name=TPR_2; Domain location=573-606; Score =17.2; E_value=0.07; Accession=PF07719.9; Description=Tetratricopeptid e repeat
  Pfam annotation: Domain name=TPR_2; Domain location=607-640; Score =30.0; E_value=9.6e-06; Accession=PF07719.9; Description =Tetratricopeptide repeat
  Pfam module annotation: Pfam domain module=TPR_1::TPR_1::TPR_1::TPR _1::TPR_1::TPR_2::TPR_2::TPR_2::TPR_2; Domain location=440-473::474 -507::539-572::573-606::607-640::440-473::539-572::573-606::607-640
  Subcellular localization annotation: CTP_CleavageSite=29; ConfidenceScore=5.55e-01
MAMRHLITGQNSCAPDGASSSNPLNAFANAVLGQSSKTRSIKELPGSVSVPSTSDFGTAAPLSTIPGSDDEFKQDQRPLARGADFIRGGPANDWIESFRPPGVPEFGVTESQVAEFDQIYNNTGTTIGPPLDGPPQRVLSGVLHSFLASGRAGVPFQPVPVPALGLSESDKQCIRDRSCIMARHILADQPEEYIQAQVNTLLHSLDIDNRMRGPMHGQYPELEQYWNQSQSSMGPASMHNAADKWITEFGNQNNNPESWANSFEQQYGPNGWASEFEQHQSQMAMGQMGGANMASLAAMEQSRMLAQTLASNNDPKFQLSQGADKWASEFSSQHNQGALNESWVDEFSKLNVTDEWAEEFSGGGFGESSADPWADEFQEQLSSFKQSSGASRGVYVFSEMNPYVGHPNPMQEGQELFRKGLLSEAVLALEAEVLKNPDNAEGWRLLGVTHAENDDDQQAIAAMMRAQEANPTNLEVLLALGVSHTNELEQGEALRYLYRWLQNHPKYGGLAPPQSTDSLYGPDVVRLFNEAAQMSPEDADVHIVLGVLYNLSREYDKAIASFKTALQLKPQDYSLWNKLGATQANSIQSADAILAYQKALDLKPNYVRAWANMGISYANQGLYEDSIRYYVRAVAMNPKADNAWQYLRISLSNASRADMIAACDARNLDALQKEFPL

SEQ ID NO: 103322 - protein, 248 aa, Setaria italica
  Transcript Sequence Number=SeqID_37348
  Gene Ontology: Cellular component=chloroplast envelope
  Homolog annotation: Hit_ID=A8YFV2; Match level="QueryCoverage=82%, HitCoverage=81%, E-value=7e-50, Identity=49%"; Hit description =Similar to tr|Q8YWK1|Q8YWK1
  Pfam annotation: Domain name=CTP_transf_1; Domain location=24-210; Score=-66.9; E_value=0.088; Accession=PF01148.12; Description =Cytidylyltransferase family
  Pfam annotation: Domain name=DUF92; Domain location=8-236; Score =322.0; E_value=1.2e-93; Accession=PF01940.8; Description=Integral membrane protein DUF92
  Pfam module annotation: Pfam domain module=CTP_transf_1::DUF92; Domain location=24-210::8-236
RYRPTEEANLAVFVAGSPVLLSGLSASGVAASYLLGTLTWRAFGPPGFLLVVAYFVVGTAVTKLKIKQKEAQGVAEKRGGRRGPGSVIGSSAAGCVCALLSIYHVGGATFSELWRLGFVASFCTKLSDTVSSEIGKAFGRTTYLVTTFKVVPRGTEGAISIEGTLAGILGSVFLASVGYLLGQVNISQVAVCLLASQIANYGESYIGATLQDKEGFEWLNNDIVNVMNISIGAILAVLIQQLVVNWSS

SEQ ID NO: 103323 - protein, 67 aa, Setaria italica
  misc_feature (39)..(39): Xaa can be any naturally occurring amino acid
  Transcript Sequence Number=SeqID_37349
AAYEVLGDEDKRVRYDRGEDIDEMNMGGGGGGGFNPFGXGGQQYTFHFDGGFPGGGFPGGGGFQFNF

SEQ ID NO: 103324 - protein, 347 aa, Setaria italica
  Transcript Sequence Number=SeqID_37350
  Gene Ontology: Mol. function=heat shock protein binding; Cellular component=plasma membrane; Biological process=response to unfolded protein
  Homolog annotation: Hit_ID=B6T437; Match level="QueryCoverage=94%, HitCoverage=69%, E-value=1e-136, Identity=75%"; Hit description=DnaJ subfamily C member 7
  Pfam annotation: Domain name=TPR_1; Domain location=186-219; Score =23.9; E_value=0.00065; Accession=PF00515.20; Description =Tetratricopeptide repeat
  Pfam annotation: Domain name=TPR_1; Domain location=270-303; Score =12.5; E_value=0.18; Accession=PF00515.20; Description=Tetratricopepti de repeat
  Pfam annotation: Domain name=TPR_1; Domain location=304-337; Score =5.2; E_value=1.4; Accession=PF00515.20; Description=Tetratricopeptide repeat
  Pfam annotation: Domain name=TPR_1; Domain location=37-70; Score =15.4; E_value=0.084; Accession=PF00515.20; Description =Tetratricopeptide repeat
  Pfam annotation: Domain name=TPR_1; Domain location=71-104; Score =24.9; E_value=0.00034; Accession=PF00515.20; Description =Tetratricopeptide repeat
  Pfam annotation: Domain name=TPR_2; Domain location=186-219; Score =28.7; E_value=2.3e-05; Accession=PF07719.9; Description =Tetratricopeptide repeat
  Pfam annotation: Domain name=TPR_2; Domain location=232-265; Score =5.5; E_value=7.1; Accession=PF07719.9; Description=Tetratricopeptide repeat
  Pfam annotation: Domain name=TPR_2; Domain location=270-303; Score =11.7; E_value=1.2; Accession=PF07719.9; Description=Tetratricopeptide repeat
  Pfam annotation: Domain name=TPR_2; Domain location=304-337; Score =4.8; E_value=8.5; Accession=PF07719.9; Description=Tetratricopeptide repeat
  Pfam annotation: Domain name=TPR_2; Domain location=37-70; Score =23.2; E_value=0.0011; Accession=PF07719.9; Description =Tetratricopeptide repeat
  Pfam annotation: Domain name=TPR_2; Domain location=71-104; Score =27.1; E_value=7e-05; Accession=PF07719.9; Description=Tetratricopepti de repeat
  Pfam module annotation: Pfam domain module=TPR_1::TPR_1::TPR_1::TPR _1::TPR_1::TPR_2::TPR_2::TPR_2::TPR_2::TPR_2::TPR_2; Domain location =186-219::270-303::304-337::37-70::71-104::186-219::232-265::270 -303::304-337::37-70::71-104
MVRAWGRAALPPLLILCLLHLQYSPLVVAQEGQEKDPATLFARASEMMNLRKYDGALGLLNAVLEVDPNHSEAYRQRASVLRHKCRYKEAESDYNKYLELNPATASVEKELSQLLQAQNSLQSAYGQFDSGDFSKVLEYINKIVLVFSPGCLKAKLLKAKALLALKDYSSVISETGFILKEDEDNLDALLLRGRAYYYLADHDVASRHYQKGLRLDPEHSDLKKAYFGLKNLLKKTKSAEDNAARGKLRVSAEDYKAALAMDPDHTAYNVHLYLGLCKTLVKLGRGKEAISSCTEALNIDSDLVDALTQRGEAKLLSEDWEGAVQDLKEAAAAAAVPYGPGRAAPRG

SEQ ID NO: 103325 - protein, 255 aa, Setaria italica
  Transcript Sequence Number=SeqID_37351
  Gene Ontology: Mol. function=heat shock protein binding; Cellular component=plasma membrane; Biological process=protein folding
  Homolog annotation: Hit_ID=B6T437; Match level="QueryCoverage=91%, HitCoverage=49%, E-value=1e-111, Identity=85%"; Hit description=DnaJ subfamily C member 7
  Pfam annotation: Domain name=DnaJ; Domain location=141-204; Score =131.1; E_value=3.5e-36; Accession=PF00226.23; Description=DnaJ domain
  Pfam annotation: Domain name=TPR_1; Domain location=53-86; Score =12.5; E_value=0.18; Accession=PF00515.20; Description=Tetratricopepti de repeat
  Pfam annotation: Domain name=TPR_1; Domain location=87-120; Score =19.0; E_value=0.019; Accession=PF00515.20; Description =Tetratricopeptide repeat
  Pfam annotation: Domain name=TPR_2; Domain location=15-48; Score=5.5; E_value=7.1; Accession=PF07719.9; Description=Tetratricopeptide repeat
  Pfam annotation: Domain name=TPR_2; Domain location=53-86; Score =11.7; E_value=1.2; Accession=PF07719.9; Description=Tetratricopeptide repeat
  Pfam annotation: Domain name=TPR_2; Domain location=87-120; Score =20.1; E_value=0.0095; Accession=PF07719.9; Description =Tetratricopeptide repeat
  Pfam module annotation: Pfam domain module=DnaJ::TPR_1::TPR_1::TPR _2::TPR_2::TPR_2; Domain location=141-204::53-86::87-120::15-48::53 -86::87-120
ISLDLKKAYFGLKNLLKKTKSAEDNAARGKLRVSAEDYKAALAMDPDHTAYNVHLYLGLCKTLVKLGRGKEAISSCTEALNIDSDLVDALTQRGEAKLLSEDWEGAVQDLKEAAQKSPQDMGIREALMRAEKQLKLSKRRDWYKILGISKTASAAEIKRAYKKLALQWHPDKNVDNREEAENMFREIAAAYEVLGDEDKRVRYDRGEDIDEMNMGGGGGGGFNPFGGGGQQYTFHFDGGFPGGGFPGGGGFQFNF

SEQ ID NO: 103326 - protein, 36 aa, Setaria italica
  Transcript Sequence Number=SeqID_37352
MMVSSWAHIASVSSAYHHMYDRKLEKVIKSETSEDS

SEQ ID NO: 103327 - protein, 84 aa, Setaria italica
  misc_feature (60)..(60): Xaa can be any naturally occurring amino acid
  Transcript Sequence Number=SeqID_37353
  Gene Ontology: Mol. function=transposase activity; Biological process= transposition, DNA-mediated
  Homolog annotation: Hit_ID=Q10PZ8; Match level="QueryCoverage=90%, HitCoverage=9%, E-value=2e-25, Identity=64%"; Hit description =Transposon protein, putative, Mutator sub-class
NYGLMQLVNFIAVHYMWGSKQYISLWRELDNDSIKIKYDEHLSEWFELNLENGAQINDFXGPLQFSPMKRRCHPSLRKTTLLNC

SEQ ID NO: 103328 - protein, 81 aa, Setaria italica
  Transcript Sequence Number=SeqID_37354
  Subcellular localization annotation: CTP_CleavageSite=59; ConfidenceScore=5.59e-01
SNVSEFNFVAAPLSTLPKWYSTHQSFFLGRGKRNNLFSACFARTWNQRTSDNLSGARPVAGGGRAGDGNWITHSRADRRRE

SEQ ID NO: 103329 - protein, 124 aa, Setaria italica
  misc_feature (108)..(108): Xaa can be any naturally occurring amino acid
  misc_feature (121)..(121): Xaa can be any naturally occurring amino acid
  Transcript Sequence Number=SeqID_37355
  Gene Ontology: Mol. function=nucleotide binding; Biological process =defense response
  Homolog annotation: Hit_ID=Q9ZNV6; Match level="QueryCoverage=91%, HitCoverage=9%, E-value=2e-21, Identity=47%"; Hit description=Pib
GLSRSNKIPVVVSSSDESISTNVALKHQSKGGNEIKVFTKSLTHIKTMASALEESQLIGRQKEKTDIINLISNPSNQELAVISVWGMGGLGKTTLIKDVYESQKHVGXVEKHACVTVMRPXILK

SEQ ID NO: 103330 - protein, 69 aa, Setaria italica
  Transcript Sequence Number=SeqID_37356
LFCMVLKLGFWREVNKGLICYVPEDHHCIRTPSPQYDSVTVTAQSDMLWKNFRTQARFSNRGTACVRLN

SEQ ID NO: 103331 - protein, 74 aa, Setaria italica
  Transcript Sequence Number=SeqID_37357
GFFHQMMASRLHSSDAASSQEQLMHKRPFLNIGQMRRRLLQIYEDRWVLLTEKRRREPRVQKICGSWSAAASSS

SEQ ID NO: 103332 - protein, 81 aa, Setaria italica
  Transcript Sequence Number=SeqID_37358
SEHSLSSRSQEVGPGRRHPHRRAERCLSCRRRGRGGAPTLASKVGAGGGCHFLVIFWGIVVRKISVQFEANFIGKLVLGYF

SEQ ID NO: 103333 - protein, 66 aa, Setaria italica
  Transcript Sequence Number=SeqID_37359
LSKGMTITEVAAPADTSASPRSDPPGREQEMDRSAQPGGATSHVTHGWGGGRSGACIRGSDTETQN

SEQ ID NO: 103334 - protein, 127 aa, Setaria italica
  misc_feature (122)..(122): Xaa can be any naturally occurring amino acid
  Transcript Sequence Number=SeqID_37360
  Homolog annotation: Hit_ID=UPI000034EDDF; Match level="QueryCoverage =100%, HitCoverage=23%, E-value=2e-40, Identity=60%"; Hit description= emb1381 (embryo defective 1381)
IALGANEQCLPVILSTSDGYYSSQAFVDFGFPNIFISRETFGWTPQEAKLHMVSEFFSEQEWKVVDEVLGPNPRQLSEIYMLKQKANRPEAFHDRNIEEIIDTYLAHLQVSVVNPAMETALXMLQKF

SEQ ID NO: 103335 - protein, 50 aa, Setaria italica
  Transcript Sequence Number=SeqID_37361
  Subcellular localization annotation: CTP_CleavageSite=16; ConfidenceScore=5.26e-01
ILMHVTQQVDQIKSVGCSSSGNRRLSLISVSFSTKRVASCLPFQLKLRSQ

SEQ ID NO: 103336 - protein, 124 aa, Setaria italica
  Transcript Sequence Number=SeqID_37362
  Gene Ontology: Mol. function=3-beta-hydroxy-delta5-steroid dehydrogenase activity; Cellular component=endoplasmic reticulum; Biological process=steroid biosynthetic process
  Homolog annotation: Hit_ID=Q7Y0G5; Match level="QueryCoverage=73%, HitCoverage=18%, E-value=6e-13, Identity=41%"; Hit description=NAD dependent epimerase/dehydratase family protein, expressed
  Subcellular localization annotation: CTP_CleavageSite=38; ConfidenceScore=5.25e-01
AVFHVDATTAAASGSDGSFLSLHRLAAEGTRRLLAACRASGVGRVVYTGSADVVAAGARDVVNADEDSAPYPDKFGNAVSELRAQVEMMVLGADGVDGMRTCVLRPSNMFGPGDSSLLRFVAGY

SEQ ID NO: 103337 - protein, 66 aa, Setaria italica
  Transcript Sequence Number=SeqID_37363
IQENQNQPYPCYIRDFLLCLYLYAVYTIQTYYALVSSSKRKEWKRKHKDQVRTNYKTYHMNPRRSQ

SEQ ID NO: 103338 - protein, 178 aa, Setaria italica
  Transcript Sequence Number=SeqID_37364
  Gene Ontology: Mol. function=shikimate kinase activity; Cellular component=plastid; Biological process=aromatic amino acid family biosynthetic process
  Homolog annotation: Hit_ID=B6TNA7; Match level="QueryCoverage=100%, HitCoverage=60%, E-value=4e-94, Identity=94%"; Hit description =Shikimate kinase
  Pfam annotation: Domain name=AAA; Domain location=9-172; Score=-28.1; E_value=0.0072; Accession=PF00004.21; Description=ATPase family associated with various cellular activities (AAA)
  Pfam annotation: Domain name=SKI; Domain location=16-176; Score =198.8; E_value=1.5e-56; Accession=PF01202.14; Description=Shikimate kinase
  Pfam module annotation: Pfam domain module=AAA::SKI; Domain location =9-172::16-176
LPYLDGRLLFILVGMMGSGKTTVGKILAEVLGYSFFDSDKLVEKAVGISSVAEIFQLHSEAFFRDNESEVLRDLSSMHRLVVATGGGAVIRPINWSYMKRGLTVWLDVPLDALARRIAAVGTASRPLLHQESGDPYAKAYTKLTSLFEQRMDAYANADARVSLEHIALKQGHNDVTIL

SEQ ID NO: 103339 - protein, 134 aa, Setaria italica
  misc_feature (54)..(54): Xaa can be any naturally occurring amino acid
  misc_feature (103)..(103): Xaa can be any naturally occurring amino acid
  misc_feature (127)..(127): Xaa can be any naturally occurring amino acid
  Transcript Sequence Number=SeqID_37365
  Gene Ontology: Mol. function=shikimate kinase activity; Cellular component=plastid; Biological process=aromatic amino acid family biosynthetic process
  Homolog annotation: Hit_ID=B6TNA7; Match level="QueryCoverage=100%, HitCoverage=54%, E-value=3e-63, Identity=76%"; Hit description =Shikimate kinase
  Pfam annotation: Domain name=SKI; Domain location=2-129; Score=85.0; E_value=2.7e-22; Accession=PF01202.14; Description=Shikimate kinase
MMGSGKTTVGKILAEVLGYSFFDSDKLVEKAVGISSVAEIFQLHSEAFFRDNEXSYMKRGLTVWLDVPLDALARRIAAVGTASRPLLHQESGDPYAKAYTNLXITFEQRMDAYANADARVSLEHIAXKQGHNDV

SEQ ID NO: 103340 - protein, 164 aa, Setaria italica
  Transcript Sequence Number=SeqID_37366
  Gene Ontology: Mol. function=shikimate kinase activity; Cellular component=plastid; Biological process=aromatic amino acid family biosynthetic process
  Homolog annotation: Hit_ID=Q01HY3; Match level="QueryCoverage=100%, HitCoverage=52%, E-value=4e-77, Identity=88%"; Hit description =OSIGBa0138H21-OSIGBa0138E01.13 protein
  Pfam annotation: Domain name=SKI; Domain location=3-163; Score=148.0; E_value=2.9e-41; Accession=PF01202.14; Description=Shikimate kinase
GMMGSGKTTVGKILAEVLGYSFFDSLVMLLAYSYCSDKLVEKAVGISSVAEIFQLHSEAFFRDNESEVLRDLSSMHRLVVATGGGAVIRPINWLSYMKRGLTVWLDVPLDALARRIAAVGTASRPLLHQESGDPYAKAYTKLTSLFEQRMDAYANADARVSLEQ

SEQ ID NO: 103341 - protein, 293 aa, Setaria italica
  misc_feature (234)..(234): Xaa can be any naturally occurring amino acid
  Transcript Sequence Number=SeqID_37367
  Gene Ontology: Mol. function=shikimate kinase activity; Cellular component=plastid; Biological process=aromatic amino acid family biosynthetic process
  Homolog annotation: Hit_ID=B6TNA7; Match level="QueryCoverage=91%, HitCoverage=86%, E-value=1e-104, Identity=76%"; Hit description =Shikimate kinase
  Pfam annotation: Domain name=AAA; Domain location=103-277; Score= -20.4; E_value=0.0015; Accession=PF00004.21; Description=ATPase family associated with various cellular activities (AAA)
  Pfam annotation: Domain name=SKI; Domain location=110-279; Score =188.9; E_value=1.4e-53; Accession=PF01202.14; Description=Shikimate kinase
  Pfam module annotation: Pfam domain module=AAA::SKI; Domain location =103-277::110-279
MEASVGIGARPRIWAGLVEKPHGGAYSARAPALRFTAEKLPQRLVLGTDPWRGTDPGLIRAAKLKASCCKKSAGTEKVHYSADEALILQQKAQDVLPYLDGRCVYLVGMMGSGKTTVGKILAEVLGYSFFDSDKLVEKAVGISSVAEIFQLHSEAFFRDNESEVLRDLSSMHRLVVATGGGAVIRPINWSYMKRGLTVWLDVPLDALARRIAAVGTASRPLLHQESGDPYAKRXRIYCFLMQAYTKLTSLFEQRMDAYANADARVSLERRFLSFPITMPAMYTPDCASNALYY

SEQ ID NO: 103342 - protein, 77 aa, Setaria italica
  misc_feature (12)..(12): Xaa can be any naturally occurring amino acid
  Transcript Sequence Number=SeqID_37368
  Gene Ontology: Mol. function=sequence-specific DNA binding; Cellular component=nucleus; Biological process=regulation of transcription, DNA-dependent
  Homolog annotation: Hit_ID=B6T4L5; Match level="QueryCoverage=94%, HitCoverage=19%, E-value=9e-22, Identity=83%"; Hit description=GATA transcription factor 25
  Pfam annotation: Domain name=CCT; Domain location=46-77; Score=35.7; E_value=1.9e-07; Accession=PF06203.6; Description=CCT motif
  Pfam annotation: Domain name=CCT_2; Domain location=44-70; Score =33.6; E_value=7.9e-07; Accession=PF09425.2; Description=Divergent CCT motif
  Pfam module annotation: Pfam domain module=CCT::CCT_2; Domain location=46-77::44-70
TCLYSVSPDKVXAVLLLLGGRELNHPGLGAGSSSGAYNKRLNFPHRVASLMRFREKRKERNFDKKIRYSVRKEVALR

SEQ ID NO: 103343 - protein, 253 aa, Setaria italica
  Transcript Sequence Number=SeqID_37369
  Gene Ontology: Mol. function=sequence-specific DNA binding; Cellular component=nucleus; Biological process=regulation of transcription, DNA-dependent
  Homolog annotation: Hit_ID=B6T4L5; Match level="QueryCoverage=92%, HitCoverage=64%, E-value=1e-107, Identity=84%"; Hit description=GATA transcription factor 25
  Pfam annotation: Domain name=CCT; Domain location=92-136; Score=84.1; E_value=4.9e-22; Accession=PF06203.6; Description=CCT motif
  Pfam annotation: Domain name=CCT_2; Domain location=90-116; Score =33.6; E_value=7.9e-07; Accession=PF09425.2; Description=Divergent CCT motif
  Pfam annotation: Domain name=GATA; Domain location=168-205; Score =63.9; E_value=5.9e-16; Accession=PF00320.19; Description=GATA zinc finger
  Pfam annotation: Domain name=tify; Domain location=31-66; Score=59.0; E_value=1.8e-14; Accession=PF06200.6; Description=tify domain
  Pfam module annotation: Pfam domain module=CCT::CCT_2::GATA::tify; Domain location=92-136::90-116::168-205::31-66
  Subcellular localization annotation: CTP_CleavageSite=95; ConfidenceScore=5.00e-01
MDADAAAAAAAAAAAGAQMDPHGSMVPGAVPPMANNQLTLSFQGEVYVFDSVSPDKVQAVLLLLGGRELNHPGLGAGSSSGAYNKRLNFPHRVASLMRFREKRKERNFDKKIRYSVRKEVALRMQRNRGQFTSSKPKPDEIAASEMVTADGSPNWGSVEGRPPSAAECHHCGTSATATPMMRRGPDGPRTLCNACGLMWANKGLLRDLSKSPVPLQAVQSAPVLDGGQNGSVIAAPGSELENPAAAMANGHES

SEQ ID NO: 103344 - protein, 124 aa, Setaria italica
  Transcript Sequence Number=SeqID_37370
  Gene Ontology: Mol. function=catalytic activity; Cellular component =chloroplast; Biological process=folic acid and derivative biosynthetic process
  Homolog annotation: Hit_ID=B6SJR7; Match level="QueryCoverage=100%, HitCoverage=33%, E-value=3e-21, Identity=50%"; Hit description=C-1 -tetrahydrofolate synthase, cytoplasmic
  Pfam annotation: Domain name=THF_DHG_CYH; Domain location=79-124; Score=-41.3; E_value=0.0037; Accession=PF00763.15; Description =Tetrahydrofolate dehydrogenasecyclohydrolase, catalytic domain
  Subcellular localization annotation: CTP_CleavageSite=60; ConfidenceScore=5.52e-01
MASSILSDCSSARLLPLRRALLPQRVPRIRPCPALASSRRLFAAARPQLLPRPPRMDSVPAAAASSAESATVAADASAKVIDGKLVAKQVREEIAVEVTKMKDVIGIVPGLAVILVGSRKDSQT

SEQ ID NO: 103345 - protein, 309 aa, Setaria italica
  Transcript Sequence Number=SeqID_37371
  Gene Ontology: Mol. function=catalytic activity; Cellular component =chloroplast; Biological process=folic acid and derivative biosynthetic process
  Homolog annotation: Hit_ID=B6SJR7; Match level="QueryCoverage=92%, HitCoverage=77%, E-value=1e-159, Identity=95%"; Hit description=C-1 -tetrahydrofolate synthase, cytoplasmic
  Pfam annotation: Domain name=THF_DHG_CYH; Domain location=25-136; Score=204.0; E_value=4.1e-58; Accession=PF00763.15; Description =Tetrahydrofolate dehydrogenasecyclohydrolase, catalytic domain
  Pfam annotation: Domain name=THF_DHG_CYH_C; Domain location=139-306; Score=389.2; E_value=7.3e-114; Accession=PF02882.11; Description =Tetrahydrofolate dehydrogenasecyclohydrolase, NAD(P)-binding domain
  Pfam module annotation: Pfam domain module=THF_DHG_CYH::THF_DHG_CYH _C; Domain location=25-136::139-306
MWRSRPRGRGGRWRMRRGRRSGRGLVAKQVREEIAVEVTKMKDVIGIVPGLAVILVGSRKDSQTYVRNKKKACEAVGIKSYEVNLPEDSSEEEVIQHIASFNSDPSVHGILVQLPLPRHMNDENVLNAVSIEKDVDGFHPLNIGRLAMQGRDPFFVPCTPKGCMELLHRYGVEIKGKRAVVIGRSNIVGMPAALLLQKANATVSIVHSQTKNPEEITRQADIIIAAVGVANLVRGNWIKPGAAIIDVGINPVDDPESPRGYRLVGDVCYEEASKVAGAITPVPGGVGPMTIAMLLSNTLESAKRIHNFK

SEQ ID NO: 103346 - protein, 109 aa, Setaria italica
  Transcript Sequence Number=SeqID_37372
HHSRRSETPEPETSRFVAMASRLVAAAASSTSSPLARLVSRRGLAGAADGHGPAKVPLWKDPMSPSKWKEEHFVLASLSMWGAVIYGGIKFFTGGKKEDKAEAAPAQAA

SEQ ID NO: 103347 - protein, 144 aa, Setaria italica
  Transcript Sequence Number=SeqID_37373
  Gene Ontology: Mol. function=protein binding; Cellular component =anaphase-promoting complex; Biological process=regulation of mitotic metaphase/anaphase transition
  Homolog annotation: Hit_ID=B6T5J2; Match level="QueryCoverage=100%, HitCoverage=71%, E-value=1e-56, Identity=76%"; Hit description =Anaphase-promoting complex subunit 10
  Pfam annotation: Domain name=APC10; Domain location=7-144; Score =193.9; E_value=4.5e-55; Accession=PF03256.8; Description=Anaphase -promoting complex, subunit 10 (APC10)
MESDAEEEAAATPAAAAAPAAGRLKGSPELTVEADMREMAKTAAWSVSSCKAGNGVAALRDDNLDTYWQSDGAQPHLVSIQFQKKVQLQLVVLYVDFKLDESYTPSKISIRAGDGFHNLKEIKTVELAKPVGWVHISLSGADPR

SEQ ID NO: 103348 - protein, 65 aa, Setaria italica
  Transcript Sequence Number=SeqID_37374
  Gene Ontology: Mol. function=protein binding; Cellular component =anaphase-promoting complex; Biological process=regulation of mitotic metaphase/anaphase transition
  Homolog annotation: Hit_ID=B6T5J2; Match level="QueryCoverage=100%, HitCoverage=32%, E-value=1e-29, Identity=92%"; Hit description =Anaphase-promoting complex subunit 10
  Pfam annotation: Domain name=APC10; Domain location=1-65; Score= -47.3; E_value=0.00012; Accession=PF03256.8; Description=Anaphase -promoting complex, subunit 10 (APC10)
FQEIKTVELAKPVGWVHISLSGADPRETFIHTFMLQIAVLSNHLNGRDTHIRQIKIYGPRPNPVP

SEQ ID NO: 103349 - protein, 155 aa, Setaria italica
  misc_feature (13)..(13): Xaa can be any naturally occurring amino acid
  Transcript Sequence Number=SeqID_37375
  Gene Ontology: Mol. function=protein binding; Cellular component =anaphase-promoting complex; Biological process=regulation of mitotic metaphase/anaphase transition
  Homolog annotation: Hit_ID=B6T5J2; Match level="QueryCoverage=98%, HitCoverage=75%, E-value=1e-73, Identity=87%"; Hit description =Anaphase-promoting complex subunit 10
  Pfam annotation: Domain name=APC10; Domain location=3-154; Score =277.9; E_value=2.3e-80; Accession=PF03256.8; Description=Anaphase -promoting complex, subunit 10 (APC10)
LPCKAGNGVAALXRDDNLDTYWQSDGAQPHLVSIQFQKKVQLQLVVLYVDFKLDESYTPSKISIRAGDGFHNLKEIKTVELAKPVGWVHISLSGADPRETFIHTFMLQIAVLSNHLNGRDTHIRQIKIYGPRPNPVPLQPFHFISREFITYSTIR

SEQ ID NO: 103350 - protein, 56 aa, Setaria italica
  Transcript Sequence Number=SeqID_37376
  Gene Ontology: Mol. function=protein binding; Cellular component =anaphase-promoting complex; Biological process=regulation of mitotic metaphase/anaphase transition
  Homolog annotation: Hit_ID=B6T5J2; Match level="QueryCoverage=64%, HitCoverage=17%, E-value=1e-13, Identity=97%"; Hit description =Anaphase-promoting complex subunit 10
TLYYLILVTLLLTVCLSCVCRETFIHTFMLQIAVLSNHLNGRDTHIRQIKIYGPRP

SEQ ID NO: 103351 - protein, 99 aa, Setaria italica
  Transcript Sequence Number=SeqID_37377
  Gene Ontology: Mol. function=protein binding; Cellular component =anaphase-promoting complex; Biological process=regulation of mitotic metaphase/anaphase transition
  Homolog annotation: Hit_ID=B6T5J2; Match level="QueryCoverage=100%, HitCoverage=49%, E-value=2e-49, Identity=93%"; Hit description =Anaphase-promoting complex subunit 10
  Pfam annotation: Domain name=APC10; Domain location=1-98; Score=66.7; E_value=8.9e-17; Accession=PF03256.8; Description=Anaphase-promoting complex, subunit 10 (APC10)
YTPSKISIRAGDGFHNLKEIKTVELAKPVGWVHISLSGADPRETFIHTFMLQIAVLSNHLNGRDTHIRQIKIYGPRPNPVPLQPFHFISREFITYSTIR

SEQ ID NO: 103352 - protein, 70 aa, Setaria italica
  Transcript Sequence Number=SeqID_37378
  Subcellular localization annotation: CTP_CleavageSite=43; ConfidenceScore=5.09e-01
MQAAVGHRAANVGFPSRSRLRGGFLLPGRARFFSEGAEAAPLRVESLPQPRTHGGGDFVHLKAVDGEAQR

SEQ ID NO: 103353 - protein, 79 aa, Setaria italica
  Transcript Sequence Number=SeqID_37379
  Subcellular localization annotation: CTP_CleavageSite=67; ConfidenceScore=5.54e-01
QCNQNQIDDYSVFKNANQVVTTSLMNVTVAKGPQIGRRTNSPTTTCLGRVLFFMLFVGKQVQIGHAMATKRTNTTSTQV

SEQ ID NO: 103354 - protein, 64 aa, Setaria italica
  Transcript Sequence Number=SeqID_37380
LCGLGKKVIESCLLPRKLTQNRLGYPLLPLSRPLFPRVSIRNNECRASSYGSAVKRVVQSYDIG

SEQ ID NO: 103355 - protein, 73 aa, Setaria italica
  misc_feature (41)..(41): Xaa can be any naturally occurring amino acid
  Transcript Sequence Number=SeqID_37381
  Gene Ontology: Mol. function=cobalt ion transmembrane transporter activity
  Homolog annotation: Hit_ID=Q944H2; Match level="QueryCoverage=95%, HitCoverage=17%, E-value=1e-12, Identity=52%"; Hit description =Protein ABCI12, chloroplastic
LNLINYLSRKLFKNIFDHAEQISKAMIARGFRGDPSNHKIXFLRESSFGFADLFSLLCLFALMGLASYSDQLV

SEQ ID NO: 103356 - protein, 85 aa, Setaria italica
  misc_feature (81)..(81): Xaa can be any naturally occurring amino acid
  Transcript Sequence Number=SeqID_37382
NPKEKYRNLNTPIFCCAQIHLDYVGPSAATTHTSWTAAFRSPAHKAASQYHRRMVSCTEESGSGASPAAHPRCRPDRRRFXRGRR

SEQ ID NO: 103357 - protein, 121 aa, Setaria italica
  Transcript Sequence Number=SeqID_37383
  Gene Ontology: Cellular component=integral to membrane
  Homolog annotation: Hit_ID=Q8L7E5; Match level="QueryCoverage=76%, HitCoverage=14%, E-value=2e-09, Identity=38%"; Hit description=WPP domain-interacting tail-anchored protein 1
MDAHSFYHDDYLQENILLRGGERVVRASAGEILAGVDLEIAFGLEKLLNLEMLVMEIARRAADIEPLMRDPQSISAESIDKAFEFDVLYGIVDSEANELEKLVGSIRTDIANAESKVSEEG

SEQ ID NO: 103358 - protein, 48 aa, Setaria italica
  Transcript Sequence Number=SeqID_37384
MGRRCTGVVALIILLLSVASHGRELPVKKSDQSFVYNHTLAKTIVEYA

SEQ ID NO: 103359 - protein, 243 aa, Setaria italica
  Transcript Sequence Number=SeqID_37385
  Gene Ontology: Mol. function=oxidoreductase activity, acting on the CH-OH group of donors, NAD or NADP as acceptor; Cellular component =glycerol-3-phosphate dehydrogenase complex; Biological process =glycerol-3-phosphate catabolic process
  Homolog annotation: Hit_ID=B9S4F6; Match level="QueryCoverage=99%, HitCoverage=59%, E-value=1e-118, Identity=88%"; Hit description =Glycerol-3-phosphate dehydrogenase, putative
  Pfam annotation: Domain name=NAD_Gly3P_dh_C; Domain location=90-234; Score=204.5; E_value=2.8e-58; Accession=PF07479.6; Description=NAD -dependent glycerol-3-phosphate deh
  Pfam annotation: Domain name=NAD_Gly3P_dh_N; Domain location=1-73; Score=-38.8; E_value=0.0026; Accession=PF01210.15; Description=NAD -dependent glycerol-3-phosphate deh
  Pfam module annotation: Pfam domain module=NAD_Gly3P_dh_C::NAD_Gly3P _dh_N; Domain location=90-234::1-73
  Subcellular localization annotation: CTP_CleavageSite=60; ConfidenceScore=5.11e-01
SISTHVDPKLPFISLSKGLELNTLRTMSKIIPRALGNRRQPFIVLSGPSFAVELMNKLPTAMVVASKDKKLASSVQQLLASPNLRISTSSDVTGVEIAGALKNVLAIAAGIVEGMNLGNNCMAALVAQGCSEIRWLATKMGAKPITLSGLSGSGDIMLTCFVNLSRNRNVGLRLGSGEKLDQIMSSMNQVAEGVSTAGAVIALAQKYNVKMPVLTAVARIIDNELTPKKAVMELMNLPQVEEV

SEQ ID NO: 103360 - protein, 79 aa, Setaria italica
  Transcript Sequence Number=SeqID_37386
TNLSNFIFLGTVVTITIYLKCRTSDMVQHERTKPFWCFLMISSVQSSGQQFAPIKQRTFSIARAVDWQTFHLLDSNSTI

SEQ ID NO: 103361 - protein, 66 aa, Setaria italica
  Transcript Sequence Number=SeqID_37387
MDTTAMGALEEAHLAAAVAAACACEEEDDDLELLGGEAEPLAAVAAADAMEPAIRALLVGLGEDER

SEQ ID NO: 103362 - protein, 474 aa, Setaria italica
  Transcript Sequence Number=SeqID_37388
  Gene Ontology: Mol. function=GTP cyclohydrolase I activity; Cellular component=cytoplasm; Biological process=aromatic compound biosynthetic process
  Homolog annotation: Hit_ID=B6TEC8; Match level="QueryCoverage=85%, HitCoverage=87%, E-value=0.0, Identity=92%"; Hit description=GTP cyclohydrolase I 1
  Pfam annotation: Domain name=GTP_cyclohydroI; Domain location=113 -225; Score=41.0; E_value=4.9e-09; Accession=PF01227.14; Description =GTP cyclohydrolase I
  Pfam annotation: Domain name=GTP_cyclohydroI; Domain location=345 -450; Score=61.9; E_value=2.4e-15; Accession=PF01227.14; Description =GTP cyclohydrolase I
  Pfam module annotation: Pfam domain module=GTP_cyclohydroI::GTP _cyclohydroI; Domain location=113-225::345-450
MGALEEAHLAAAVAAACACEEEDDDLELLGGEAEPLAAVAAADAMEPAIRALLVGLGEDERREGLRRTPKRVAKAFRDGTRGYRQKVKDIVQGALFPEVGVDKRTGSAGGTGGQVVVRDIELFSYCESCLLPFSIQCHVGYVPSGGRVVGLSKLSRVSDVFAKRLQNPQRLANEVCGALHASIQPAGVAVALQCWHIPLPENLECKTLQGWIRTSHSSRSGVFEGENSTFWSDFLALLKLRGIDMEVDNHSASIPWCPLRSHEVPLSNGHCKKSSTNGMVSAVTSMLLSLGEDPLRKELLGTPQRYVQWLMKFRACNLDVKLNGFTLGNVSMYERPGGGKADHGAIHSELHLPFCAQCEHHLLPFYGVVHIGYFDDGSGEGIDRSHFQALVHFYGCKLQVQERMTRQIAEAVYSVSHNGVMVVVEANHICMISRGVEKIRSNTATIAVLGQFLTDPSAKACFLQNVLDTAGSAV

SEQ ID NO: 103363 - protein, 91 aa, Setaria italica
  Transcript Sequence Number=SeqID_37389
  Subcellular localization annotation: CTP_CleavageSite=79; ConfidenceScore=5.49e-01
INASSASAVCISDSIPGPAPFNRKGGTCFSAITAIYDSISTATDLVTRSLLKARRRRRLAGRGAAGPVPFLPLSSLSPLAGGVAVGPGHGG

SEQ ID NO: 103364 - protein, 61 aa, Setaria italica
  Transcript Sequence Number=SeqID_37390
  Gene Ontology: Mol. function=hydrolase activity; Biological process =lipid catabolic process
  Homolog annotation: Hit_ID=Q9XE79; Match level="QueryCoverage=67%, HitCoverage=9%, E-value=2e-14, Identity=92%"; Hit description =Patatin-like protein
MGSNGTATATAHASALTPPPSQGRLITVLSIDGGGIRGLIPATIIACLEAKLQELDGPEAR

SEQ ID NO: 103365 - protein, 84 aa, Setaria italica
  Transcript Sequence Number=SeqID_37391
  Gene Ontology: Mol. function=methyltransferase activity; Biological process=tRNA processing
  Homolog annotation: Hit_ID=Q8H4D4; Match level="QueryCoverage=67%, HitCoverage=5%, E-value=5e-10, Identity=59%"; Hit description=tRNA wybutosine synthesizing protein 2 homolog
MDFAHRKAAALAALSSPAPDKSPKGGVDAPIAPLLEVLNSHPDLFTTSSCSGRVSVLAQPQEGQGQGAAKPKKKARGGGWVYVS

SEQ ID NO: 103366 - protein, 345 aa, Setaria italica
  misc_feature (146)..(146): Xaa can be any naturally occurring amino acid
  Transcript Sequence Number=SeqID_37392
  Gene Ontology: Cellular component=membrane
MWESVALTLAGTAGNNIGKVLQKKGTHILPPLSLKLKVVKAYALNQLWISGFLMDMCGAALMLTALSQAPVSVVQPIAGCGLAILCVFSHFYLKEVMNGLDWVAITLAGLGTIGVGVGGEEQKVDQIPLLNIPWLVLSVVILFVGXLLNTWLHMYKKQRREQELTGPEVIEEIIYGLESGILFGISSVISKMGFVMSEMGFPKIVVPAAISCSVCCSAVGFVYQTRGLKHGRAIVVSTCTSVASIVSGVVAGMIALDEHLPKAPTARFFLLLGWFFIITGVILLVSSTRLIARLPRPVQKFLKSNMERSHSIRRPGSARGKDPIPTTTIHASSLHLLTSPTKEKA

SEQ ID NO: 103367 - protein, 54 aa, Setaria italica
  Transcript Sequence Number=SeqID_37393
WLGPATVFGLCYKFFLQRCRCMNMTSLHLQRCKCRDVIFIHASFFGEKKSEELC

SEQ ID NO: 103368 - protein, 112 aa, Setaria italica
  Transcript Sequence Number=SeqID_37394
  Gene Ontology: Mol. function=SNAP receptor activity; Cellular component=membrane; Biological process=intracellular protein transport
  Homolog annotation: Hit_ID=B7X6S7; Match level="QueryCoverage=80%, HitCoverage=27%, E-value=2e-31, Identity=73%"; Hit description =Syntaxin
  Pfam annotation: Domain name=SNARE; Domain location=27-89; Score =82.9; E_value=1.2e-21; Accession=PF05739.11; Description=SNARE domain
FILGFYYQGFTEVQMSKLKKSEAFTREREREIEQVVESVNELAQIMKDLSVLVIDQGTIIDRIDYNIQNVAASVEEGYKQLQKAERTQKKGGMVMCATVLVILIFIMIVLLI

SEQ ID NO: 103369 - protein, 242 aa, Setaria italica
  Transcript Sequence Number=SeqID_37395
  Gene Ontology: Mol. function=SNAP receptor activity; Cellular component=membrane; Biological process=intracellular protein transport
  Homolog annotation: Hit_ID=B9RFG2; Match level="QueryCoverage=91%, HitCoverage=68%, E-value=3e-90, Identity=75%"; Hit description =Syntaxin, putative
  Pfam annotation: Domain name=SNARE; Domain location=151-213; Score =82.9; E_value=1.2e-21; Accession=PF05739.11; Description=SNARE domain
  Pfam annotation: Domain name=Syntaxin; Domain location=1-88; Score =24.3; E_value=0.0005; Accession=PF00804.17; Description=Syntaxin
  Pfam module annotation: Pfam domain module=SNARE::Syntaxin; Domain location=151-213::1-88
EEISANMQRAKMKMGELAKAHAKALMPSFGDGRDDQRAIEVLTHEITDLLKRSEKRLQKLSMKDSSEDSNVRKNVQRSLATDLQNLSMEFRKKQSSYLKQLRQQKEGQDGVDLEMSINGTKSTFEDDEFEDVGFTEVQMSKLKKSEAFTREREREIEQVVESVNELAQIMKDLSVLVIDQGTIIDRIDYNIQNVAASVEEGYKQLQKAERTQKKGGMVMCATVLVILIFIMIVLLILKKIIF

SEQ ID NO: 103370 - protein, 184 aa, Setaria italica
  misc_feature (151)..(151): Xaa can be any naturally occurring amino acid
  Transcript Sequence Number=SeqID_37396
  Gene Ontology: Mol. function=DNA binding; Biological process =regulation of transcription
MSSKIMITYKRKRVTSQDHTADDTALDSSPAASSNVVASNLPPRFEAHAENTIVKEDNFVTPTKQQPLSMQQSIKEECEPERGKNELYGSLPQKEQPEICSATIPTAEAHNKLLQCSEDTNNQIPVSSSMCDPMHADGMADRTKDQNTSAXTEKNSHKGPENTMGSHQCKNRFSPLLTFRRRVK

SEQ ID NO: 103371 - protein, 186 aa, Setaria italica
  Transcript Sequence Number=SeqID_37397
  Gene Ontology: Cellular component=chloroplast envelope
  Homolog annotation: Hit_ID=Q8LDX3; Match level="QueryCoverage=94%, HitCoverage=94%, E-value=1e-54, Identity=66%"; Hit description =Complex interacting protein 9
  Pfam annotation: Domain name=DUF149; Domain location=86-178; Score =90.8; E_value=4.6e-24; Accession=PF02575.8; Description =Uncharacterised BCR, YbaB family COG0718
  Subcellular localization annotation: CTP_CleavageSite=38; ConfidenceScore=5.52e-01
MVPSAALAPVAFRSSFSPPLSSNPTRNRINIEGAFCSPCSTRKRANYRPFRVYSLFGGKKDKDENGDEAPSKAGIFGNMQNLYETVKKAQMVVQVEAVRVQKELAATEIDGYCEGELIKVTLSGNQQPIRVEITEAAMELGAEKLSELVNDAYKDAHSRSVQAMKERMADLAQSLGMPAGLGDGLK

SEQ ID NO: 103372 - protein, 60 aa, Setaria italica
  Transcript Sequence Number=SeqID_37398
PYLKLRCDFCVLIYMHINVATKLGCCLHCVYLQPFCDKLNKMDVPFFLLKCDLCGSALFF

SEQ ID NO: 103373 - protein, 216 aa, Setaria italica
  misc_feature (179)..(179): Xaa can be any naturally occurring amino acid
  Transcript Sequence Number=SeqID_37399
  Gene Ontology: Mol. function=transcription regulator activity; Cellular component=cytoplasm; Biological process=phagocytosis, engulfment
  Homolog annotation: Hit_ID=B9RZN7; Match level="QueryCoverage=100%, HitCoverage=14%, E-value=8e-89, Identity=72%"; Hit description=WD -repeat protein, putative
  Pfam annotation: Domain name=WD40; Domain location=124-165; Score =46.9; E_value=7.8e-11; Accession=PF00400.24; Description=WD domain, G-beta repeat
  Pfam annotation: Domain name=WD40; Domain location=40-78; Score=39.4; E_value=1.4e-08; Accession=PF00400.24; Description=WD domain, G-beta repeat
  Pfam annotation: Domain name=WD40; Domain location=82-120; Score =34.4; E_value=4.7e-07; Accession=PF00400.24; Description=WD domain, G-beta repeat
  Pfam module annotation: Pfam domain module=WD40::WD40::WD40; Domain location=124-165::40-78::82-120
DQVHGLGLREIGGFTKHRRAPSVRASCYAIAKPSTLVEKMQIIKRLRGHQNAVYCATFDRMGRYVITGSDDRLVKIWAMETAFCLASCRGHEGDITDLAVSSNNAVVASSSNDFIIRVWRMPDGMPVSVLKGHTGAVTAIAFSPRPGAAFQLLSSSDDGTCRIWDARYSQQPPRVYTPXPPDVATGKSGDASSSAAQVQPTNHQILCCAFNANGTV

SEQ ID NO: 103374 - protein, 108 aa, Setaria italica
  Transcript Sequence Number=SeqID_37400
HRQLSLSASPRQQQGQQDDGSGSGIGIGIGGDAAQAMAVGEDESASHSKADRARSAMREERAIHLIPLLTFVCFLLLFLCSHDPSASDMSSFAGGGGLRSGNRRLRML

SEQ ID NO: 103375 - protein, 230 aa, Setaria italica
  misc_feature (14)..(14): Xaa can be any naturally occurring amino acid
  Transcript Sequence Number=SeqID_37401
  Gene Ontology: Mol. function=hydrolase activity, hydrolyzing O -glycosyl compounds; Cellular component=extracellular region; Biological process=carbohydrate metabolic process
  Homolog annotation: Hit_ID=B6TTA1; Match level="QueryCoverage=99%, HitCoverage=42%, E-value=2e-90, Identity=70%"; Hit description =Cellulase containing protein
  Pfam annotation: Domain name=Cellulase; Domain location=4-216; Score=- 74.0; E_value=0.023; Accession=PF00150.10; Description=Cellulase (glycosyl hydrolase family
NLGVIVDLHAAPGXSQNPFEHSATRDGSQEWGTSDANIAQTVQVIDFLAKRYANSPSLLAIELLNEPLAPGATLPSLKKYYQDGYNAVRQHTSTAYVIMSNRLSADATELLQFAGGFSGAVLDVHYYNLFDSKFNSLTVDQNIDFVRNNRSADLAAVTNQNGLPLTFVGEWVAEWTIQGASKTDYQRFAQTQQEVYGRATFGWAYWTLKNVNNHWSMQWMIQNGYITLNS

SEQ ID NO: 103376 - protein, 121 aa, Setaria italica
  Transcript Sequence Number=SeqID_37402
  Gene Ontology: Biological process=response to stress
  Homolog annotation: Hit_ID=B6SJ28; Match level="QueryCoverage=78%, HitCoverage=46%, E-value=2e-30, Identity=77%"; Hit description=Late embryogenesis abundant protein, group 3
  Pfam annotation: Domain name=LEA_4; Domain location=5-48; Score=14.0; E_value=0.066; Accession=PF02987.8; Description=Late embryogenesis abundant protein
  Pfam annotation: Domain name=LEA_4; Domain location=56-99; Score =37.9; E_value=3.9e-08; Accession=PF02987.8; Description=Late embryogenesis abundant protein
  Pfam module annotation: Pfam domain module=LEA_4::LEA_4; Domain location=5-48::56-99
MASRQEQASYHAGETKARAEEKTGHVMGAAQEKGREAKSKAFNAADRAMGRGHDAKEATRDKAREAADRTMGMGHDAKEATRDKAYQAKDAASDTAGRAMDKGREARDNASESAGAAGDRA

SEQ ID NO: 103377 - protein, 128 aa, Setaria italica
  misc_feature (17)..(17): Xaa can be any naturally occurring amino acid
  misc_feature (47)..(47): Xaa can be any naturally occurring amino acid
  Transcript Sequence Number=SeqID_37403
  Gene Ontology: Mol. function=hydrolase activity, hydrolyzing O -glycosyl compounds; Cellular component=beta-galactosidase complex; Biological process=carbohydrate metabolic process
  Homolog annotation: Hit_ID=B9RGA7; Match level="QueryCoverage=51%, HitCoverage=5%, E-value=3e-25, Identity=80%"; Hit description=Beta -galactosidase, putative
WMAIDNTFGLQGGFIWXDWVDQGLLKEDSDGSKFWAYGGDFGDTPNXNFCLNGIVWPDRTIHPAVHGNWKYWEKCFCFLMYQFVKLMSLSPKPPDAKFSLPDLFWLQKLNTFTEPIKISSAFRYHLVL

SEQ ID NO: 103378 - protein, 743 aa, Setaria italica
  Transcript Sequence Number=SeqID_37404
  Gene Ontology: Mol. function=hydrolase activity, hydrolyzing O -glycosyl compounds; Cellular component=beta-galactosidase complex; Biological process=carbohydrate metabolic process
  Homolog annotation: Hit_ID=B9RGA7; Match level="QueryCoverage=99%, HitCoverage=66%, E-value=0.0, Identity=62%"; Hit description=Beta -galactosidase, putative
  Pfam annotation: Domain name=Bgal_small_N; Domain location=432-726; Score=255.8; E_value=1e-73; Accession=PF02929.9; Description=Beta galactosidase small chain, N terminal domain
  Pfam annotation: Domain name=Glyco_hydro_2_C; Domain location=19-305; Score=453.5; E_value=3.3e-133; Accession=PF02836.9; Description =Glycosyl hydrolases family 2, TIM barrel domain
  Pfam module annotation: Pfam domain module=Bgal_small_N::Glyco_hydro _2_C; Domain location=432-726::19-305
DANGKLIECESCQVGIRNVVRAHKQMLVNGCPVVLRGVNRHEHHPRLGKTNIEACMIKDLILMRQNNINAVRNSHYPQHSRWYELCDIFGLYVIDEANIETHGFDENSHFKHPTLEPIWANAMLDRVVGMVERDKNHACIIVWSLGNESSYGPNHASMSGWIRERDPTRLLHYEGGGSRTSSTDIVCPMYMRVWDIIKIAKDPSETRPLILCEYSHAMGNSNGNIDAYWMAIDNTFGLQGGFIWDWVDQGLLKEDSDGSKFWAYGGDFGDTPNDLNFCLNGIVWPDRTIHPAVHEVKYLYQPIKISSADNMLKIENGHFFDTTEALDFSWVLQGDGCILGSGSLNVPTLAPQTSHLINMESSPWFALWSTCAVKEVFLSVNVKQRYHTRWAKDGHLLASAQLCLPQKNGFVPHAVAFSSSPLVCERTGDSVIISKNDAWKIKVNSQLGTIDSWKVSNVELMSKGIFPCFWRAPTDNDKGGFYTKPYVSQWREASLDNVSFYSSQFSVKELPDNTVELSTVYYGLPGNLPKPDDAALSQAPESTLFQVNMLCRIYESGDVVLEYEVNPKADLPPLPRVGVVFNAEKSLSHVMWYGRGPFECYPDRKAAAHVGVYESSVEDLHVPYIVPGECGGRADVRWVALRNADGLGLQASVHGESPPMQMSASYYGTEELDRATHVHKLVKGDDIEVHLDHRHMGLGGDDSWTPCVHEQYLLPPTRYAFSMRLCPLLPSSSCHDIYKSQLP

SEQ ID NO: 103379 - protein, 50 aa, Setaria italica
  Transcript Sequence Number=SeqID_37405
YHFGVQQGKLVCWKKHTHLLIGKVMCVGCAIYLSMYLCAFYLFRCSLDVL

SEQ ID NO: 103380 - protein, 146 aa, Setaria italica
  misc_feature (93)..(93): Xaa can be any naturally occurring amino acid
  Transcript Sequence Number=SeqID_37406
  Gene Ontology: Mol. function=nucleotide binding; Cellular component =endoplasmic reticulum lumen
  Homolog annotation: Hit_ID=B6SP66; Match level="QueryCoverage=89%, HitCoverage=29%, E-value=5e-26, Identity=51%"; Hit description =Oxygen-regulated protein
MCYSVLNSVYLLVYLQIVKNWETNKPWLPKKRVDEVVSDAEKVRDWLEEKETLQKSTPAHSPPAFTSEEVVDKILDLQDKVASINRIPKPKPXIEKKPAKEEEPANKEKTANENESTGTSQESKATEGEPASPETGYSEPGSHDEL

SEQ ID NO: 103381 - protein, 159 aa, Setaria italica
  Transcript Sequence Number=SeqID_37407
  Gene Ontology: Mol. function=transporter activity; Cellular component= integral to membrane; Biological process=transport
  Homolog annotation: Hit_ID=Q8GX78; Match level="QueryCoverage=79%, HitCoverage=23%, E-value=4e-51, Identity=79%"; Hit description =Probable anion transporter 2, chloroplastic
KDIPHHCSYYVQHNSYLLTQILGGIWADRFGGKVVLGFGVVWWSLATILTPIAAKIGLPCLLTVRAFMGIGEGVAMPSMNNILSKWIPVSERSRSLALVYSGMYLGSVTGLAFSPMLISKFGWPSVFYAFVSLGSVWFALWQSKVRKPKCCSNSLHSVI

SEQ ID NO: 103382 - protein, 108 aa, Setaria italica
  misc_feature (32)..(32): Xaa can be any naturally occurring amino acid
  Transcript Sequence Number=SeqID_37408
  Gene Ontology: Mol. function=transporter activity; Cellular component= integral to membrane; Biological process=transport
  Homolog annotation: Hit_ID=B9RDT5; Match level="QueryCoverage=97%, HitCoverage=18%, E-value=1e-47, Identity=86%"; Hit description =Sialin, putative
WTCLVLTLLSKVRTPAMAVLCMACSQGSDAFXQSGLYSNHQDIGPRYAGVLLGLSNTAGVLAGVFGTAATGYILEKGSWDSVFKVSVVLYIVGTVVWNVFSTGEKVLE

SEQ ID NO: 103383 - protein, 490 aa, Setaria italica
  Transcript Sequence Number=SeqID_37409
  Gene Ontology: Mol. function=transporter activity; Cellular component= integral to membrane; Biological process=transport
  Homolog annotation: Hit_ID=Q8GX78; Match level="QueryCoverage=66%, HitCoverage=60%, E-value=1e-145, Identity=76%"; Hit description =Probable anion transporter 2, chloroplastic
  Pfam annotation: Domain name=MFS_1; Domain location=213-490; Score =112.2; E_value=1.7e-30; Accession=PF07690.8; Description=Major Facilitator Superfamily
MQGCGATWGGGVGVPSPARPTLPQVKCRTHWLWMPTTASYGTQHEMKYCTLPQNKCILLGGRFGRHVTRSTLFQFQNYSRNTAMATLEMSGQFQQPMLESSRDYLTRAFHGASMKRRVVSRVECFLSSDPINSGWLKPRRWENFNSLESACVQPEYKLPIRTRADCKAEQYEITGSPLSPSDVPAEAVRIGDTNEVSPWWQEFPKRWTIVLLCFFAFLLCNMDRVNMSIAILPMSSEFNWNPATVGLIQSSFFWGYLLTQILGGIWADRFGGKVVLGFGVVWWSLATILTPIAAKIGLPCLLTVRAFMGIGEGVAMPSMNNILSKWIPVSERSRSLALVYSGMYLGSVTGLAFSPMLISKFGWPSVFYAFGSLGSVWFALWQSKAHSSPDDDPNLSNAEKRHILGGGTFKQPVTSIPWRLILSKAPVWALIISHFCHNWGTFILLTWMPTYYNQVLKFNLTESGLLCVLPWLTMAVFANIGGWIADTSLF

SEQ ID NO: 103384 - protein, 227 aa, Setaria italica
  misc_feature (8)..(8): Xaa can be any naturally occurring amino acid
  misc_feature (17)..(17): Xaa can be any naturally occurring amino acid
  Transcript Sequence Number=SeqID_37410
  Gene Ontology: Mol. function=transporter activity; Cellular component= integral to membrane; Biological process=transport
  Homolog annotation: Hit_ID=Q8GX78; Match level="QueryCoverage=100%, HitCoverage=41%, E-value=1e-111, Identity=86%"; Hit description =Probable anion transporter 2, chloroplastic
DDPNLSKXAEKRHILGXGTFKQPVTSIPWRLILSKAPVWALIISHFCHNWGTFILLTWMPTYYNQVLKFNLTESGLLCVLPWLTMAVFANIGGWIADTLVQRGVSITNVRKIMQSIGFLGPALFLTLLSKVRTPAMAVLCMACSQGSDAFSQSGLYSNHQDIGPRYAGVLLGLSNTAGVLAGVFGTAATGYILQKGSWDSVFKVAVVLYIIGTVVWNVFSTGEKILE

SEQ ID NO: 103385 - protein, 140 aa, Setaria italica
  Transcript Sequence Number=SeqID_37411
  Gene Ontology: Mol. function=catalytic activity; Biological process =cellular metabolic process
  Homolog annotation: Hit_ID=Q25A24; Match level="QueryCoverage=100%, HitCoverage=21%, E-value=3e-40, Identity=60%"; Hit description =H0105C05.3 protein
  Pfam annotation: Domain name=DUF1731; Domain location=79-131; Score= -3.9; E_value=0.04; Accession=PF08338.3; Description=Domain of unknown function (DUF1731)
TVGASPVPKVYTSVPASLSMLSGDEAALGMLKGIEKTFGGVPIVDLDDLCRAEVFLAETETTASGRYICSSFTTTIVEIARFLARKYPQYSVNVGNDSSGELLEKPRVCLSSAKLVEEGFEFRYKTLDEIYQDVVEYGKA

SEQ ID NO: 103386 - protein, 133 aa, Setaria italica
  Transcript Sequence Number=SeqID_37412
  Gene Ontology: Mol. function=ATPase activity, coupled to transmembrane movement of ions, phosphorylative mechanism; Cellular component=membrane; Biological process=calcium ion transport
  Homolog annotation: Hit_ID=Q4PKC7; Match level="QueryCoverage=99%, HitCoverage=15%, E-value=1e-61, Identity=88%"; Hit description=Ca2+ -ATPase (Fragment)
LGDNKETAEAICREIGVFGRDEDLCSKSFTGREFISLLDKKSKLRQQGGLLFSRAEPKHKQEIVRLLKEDGEVVAMMGDGVNDAPALKLADIGIAMGIAGTEVAKEASDMVLADDNFRTIVAAVGEGRSIYNN

SEQ ID NO: 103387 - protein, 82 aa, Setaria italica
  Transcript Sequence Number=SeqID_37413
  Gene Ontology: Mol. function=transferase activity, transferring glycosyl groups; Biological process=metabolic process
SEQLTNSLYKRLEWGVALEVGGDARRDVVEERIREVMAGEKGKEMRKRAAEWKEAAARATRPGGSSFNNLDRLIKDVLLKRS

SEQ ID NO: 103388 - protein, 85 aa, Setaria italica
  Transcript Sequence Number=SeqID_37414
VKGYALISVCIAVLIRKQHSSMISMASWATCLVVASAAWLTWNGQRCRALWQSARDLGRRILVTIVVCHSGWRCLPPIYEPFNHM

SEQ ID NO: 103389 - protein, 80 aa, Setaria italica
  Transcript Sequence Number=SeqID_37415
KGSRAIPQVVVKWTGIPATSSMWEDFYVVKHRFPDAVAWGQATSAAGGDVMPGRGGVGAARGIRVQECVVCVYYRCVRVC

SEQ ID NO: 103390 - protein, 163 aa, Setaria italica
  Transcript Sequence Number=SeqID_37416
  Gene Ontology: Mol. function=protein serine/threonine kinase activity; Biological process=protein amino acid phosphorylation
  Homolog annotation: Hit_ID=B6SZ74; Match level="QueryCoverage=66%, HitCoverage=25%, E-value=5e-55, Identity=95%"; Hit description =Protein kinase APK1B
AAPEYDRSGQATMKSDVYSFGVVLVQLISGRRAVDTSKPVAEQNVVTWAMPMFKDQKRYHELVDPLIKTEYPAKALNQVVAMAAMCLQEEDSVRPLMADVVMTLGFLTSMPPDPPAPVAPPATAPEPKKDKGRSDDHSDSSSESSDDDEGNEDEEEEEEADEQ

SEQ ID NO: 103391 - protein, 50 aa, Setaria italica
  Transcript Sequence Number=SeqID_37417
  Homolog annotation: Hit_ID=Q01IQ0; Match level="QueryCoverage=96%, HitCoverage=13%, E-value=3e-16, Identity=83%"; Hit description =H0115B09.2 protein
NLLKALGTQVAEPLRAMVMGAPLEDARHLAQRYDRMRQEAEAQVTSLCIP

SEQ ID NO: 103392 - protein, 369 aa, Setaria italica
  Transcript Sequence Number=SeqID_37418
  Gene Ontology: Cellular component=plasma membrane
  Homolog annotation: Hit_ID=Q01IQ0; Match level="QueryCoverage=100%, HitCoverage=100%, E-value=1e-131, Identity=67%"; Hit description =H0115B09.2 protein
  Pfam annotation: Domain name=BAR; Domain location=11-258; Score= -56.1; E_value=0.014; Accession=PF03114.10; Description=BAR domain
  Pfam annotation: Domain name=SH3_1; Domain location=303-357; Score =40.0; E_value=9.2e-09; Accession=PF00018.20; Description=SH3 domain
  Pfam annotation: Domain name=SH3_2; Domain location=304-357; Score =40.6; E_value=6.1e-09; Accession=PF07653.9; Description=Variant SH3 domain
  Pfam module annotation: Pfam domain module=BAR::SH3_1::SH3_2; Domain location=11-258::303-357::304-357
MEAIRKQASKLREQVARQQQAVMKQFGGGYGADGAFADEADAQQHSKLEKLYISTRAAKHFQRDIVRGVEGYIVTGSKQVEIGNKLCEDGKKYGTENTCTSGSTLSKAALSFAKARSMMEKERGNLLKALGTQVAEPLRAMVMGAPLEDARHLAQRYDRMRQEAEAQAIEVSKRQMKLREASGNGDMISRLEAAETKLQELKSNMGVLGKEAVAAMTAVEAQQQRLTLQRLIALVESERNYHQRVLQILDQLEREMVSERQRIEGAPPPVVESSMPPPPAYEEVNGIFMRNTVAELVETVEYFLAEAIQSYRAESDTELNLAAGDYIVVRKVSNNGWAEGECRGKAGWFPYDYIEKRERVLASKVGQVF

SEQ ID NO: 103393 - protein, 147 aa, Setaria italica
  Transcript Sequence Number=SeqID_37419
  Gene Ontology: Mol. function=RNA binding; Cellular component=nucleus
  Homolog annotation: Hit_ID=Q32SG5; Match level="QueryCoverage=100%, HitCoverage=23%, E-value=2e-46, Identity=67%"; Hit description =Protein RIK
  Subcellular localization annotation: CTP_CleavageSite=65; ConfidenceScore=5.40e-01
MTCPIPSVNGGTFYSGYGDIYPQATPLQQVAFTLKHASSSTTQAVPVTSTSTSTVIKANSSSDVEADKRSRRKFQELPVSKGPTTENQNSQLGSKFIKTGLDSLCDITGSSIAPPKKVQPGPNGMLPPDQGDMPSHLSISYKIPPPP

SEQ ID NO: 103394 - protein, 399 aa, Setaria italica
  Transcript Sequence Number=SeqID_37420
  Gene Ontology: Mol. function=RNA binding; Cellular component=nucleus
  Homolog annotation: Hit_ID=B6SV11; Match level="QueryCoverage=99%, HitCoverage=99%, E-value=1e-123, Identity=60%"; Hit description =ROUGH SHEATH2-interacting KH-domain protein
MKETGATVVIRGKNSENLGGCLGEASQQPLHLYLTSMHLKSLEAAKVLAENLLDTIAAEFGASRISSSKVYGAVPPPQQLLAGVDTSGARSDVHSTLSPNVLAGPSHSFASTGVIAPIVAPEVTLQSVAPTYSGVPPPSNMTCPIPSVNGGTFYSGYGDIYPQATPLQQVAFTLKHASSSTTQAVPVTSTSTSTVIKANSSSDVEADKRSRRKFQELPVSKGPTTENQNSQLGSKFIKTGLDSLCDITGSSIAPPKKVQPGPNGMLPPDQGDMPSHLSISYKIPPPPPKSMLLPPTKNMPPPSPRSMPPPPPKFPSNEMLSRNKSKTFASKELMEPPKDTRSVSPEPKEEKPKGGPLSDTLLKLMDYGDDNDDDDIDVIDSVPKGNPTPCSEQKPFWAA

SEQ ID NO: 103395 - protein, 47 aa, Setaria italica
  Transcript Sequence Number=SeqID_37421
ELMLVHLLFCYFKSHMENHLHAQLSSAIENMWNAYRKYTWEILFVNV

SEQ ID NO: 103396 - protein, 68 aa, Setaria italica
  Transcript Sequence Number=SeqID_37422
PLSNIRLPQRSLHQSCSLTSSTPTMVQAAQLYHCIHHFVASTVGCAQRWQNYAFSSSVFHSIKQKNKK

SEQ ID NO: 103397 - protein, 89 aa, Setaria italica
  misc_feature (56)..(56): Xaa can be any naturally occurring amino acid
  Transcript Sequence Number=SeqID_37423
  Homolog annotation: Hit_ID=B6UHQ4; Match level="QueryCoverage=91%, HitCoverage=20%, E-value=6e-40, Identity=96%"; Hit description=Kelch motif family protein
LNNSIVIVGGTTEKHPITKKMILVGEVFRFDLETLTWSVIGRMPFRIKTALAGYWXGWLYFTSGQRDRGPDNPAPKKVVGSMWRTKLHL

SEQ ID NO: 103398 - protein, 78 aa, Setaria italica
  Transcript Sequence Number=SeqID_37424
  Subcellular localization annotation: CTP_CleavageSite=22; ConfidenceScore=5.38e-01
LASLLPPSPSSAALSDSHCSCRSKVRSEESLSCCRKTTSSEGSAALRARCCLGTQELHTFCKTTDTLEHSHPQDTTLE

SEQ ID NO: 103399 - protein, 91 aa, Setaria italica
  Transcript Sequence Number=SeqID_37425
  Subcellular localization annotation: CTP_CleavageSite=38; ConfidenceScore=5.24e-01
SCALASLLPFCLLPLPRLLSPILTVLAGARLGARRACRAAARLQAARGRRRCELAAAWCAALPKCQGKTPKSWKSAYCRMNRMQQPPSLPT

SEQ ID NO: 103400 - protein, 186 aa, Setaria italica
  Transcript Sequence Number=SeqID_37426
  Gene Ontology: Mol. function=phosphatase activity
  Homolog annotation: Hit_ID=B6TE36; Match level="QueryCoverage=93%, HitCoverage=37%, E-value=6e-63, Identity=71%"; Hit description=CTD -phosphatase-like protein
  Pfam annotation: Domain name=NIF; Domain location=88-186; Score=23.3; E_value=3.4e-10; Accession=PF03031.10; Description=NLI interacting factor-like phosphatase
TNLVGLRLSTTKIDTPESNNTSNEVPVDHTTLDPDETSLYLQTKPTDSETESSSSATGDVVETEYLDQKLLSRGLPDLMDVDSPSRLTKTPVRTKHVTLVLDLDETLVHSTLDHCDNADFTLEVFFNMKNHTVYVRKRPHLKMFLEKVAQMFEVVIFTASQRIYAEQLIDRLDPDGKYISKRIYRD

SEQ ID NO: 103401 - protein, 463 aa, Setaria italica
  Transcript Sequence Number=SeqID_37427
  Gene Ontology: Mol. function=phosphatase activity
  Homolog annotation: Hit_ID=B6TE36; Match level="QueryCoverage=99%, HitCoverage=100%, E-value=0.0, Identity=78%"; Hit description=CTD -phosphatase-like protein
  Pfam annotation: Domain name=NIF; Domain location=279-454; Score =250.3; E_value=4.6e-72; Accession=PF03031.10; Description=NLI interacting factor-like phosphatase
MNKMLSNDCLGTQELHTFCKTTDTLEHSHPQDTTLDKTAVGSTLISHQNVCCTAEVSGENTEIMEISLLQDESDAATTSLLPLPLLSCGPRSMGPSSSDLESILSPDPIYSDLQLKEINYNAAAMDESTEFLHLILSGNDEGYNTTTEFQVWDVLDFYVTENFSSLQFDSLMGFTNEVSTSYNYNDCMNLVDMVERPVARLSLDDTPESNNTSNEVPVDHTTLDPDETSLYLQTKPTDSETESSSSATGDVVETEYLDQKLLSRGLPDLMDVDSPSRLTKTPVRTKHVTLVLDLDETLVHSTLDHCDNADFTLEVFFNMKNHTVYVRKRPHLKMFLEKVAQMFEVVIFTASQRIYAEQLIDRLDPDGKYISKRIYRDSCLFSDGCYTKDLTILGVDLAKVAIVDNTPQVFQLQVDNGIPIKSWFDDPSDQELVELLPFLESLVDAEDVRPMISKTFHDNHEQN

SEQ ID NO: 103402 - protein, 119 aa, Setaria italica
  Transcript Sequence Number=SeqID_37428
  Gene Ontology: Mol. function=binding
  Homolog annotation: Hit_ID=B9RDF9; Match level="QueryCoverage=78%, HitCoverage=3%, E-value=7e-33, Identity=67%"; Hit description =Nucleotide binding protein, putative
SSAGLLAALLESAEKLFVEMDPGSSWDGAALLQCIEVLGGHSLSVKDLHSWLGLVRKALGTSWATPMTLALEKAMGSEEARGPAVTFEFDGESSGLLGPGDSRWPFLNGYGFATWIYIE

SEQ ID NO: 103403 - protein, 73 aa, Setaria italica
  Transcript Sequence Number=SeqID_37429
VLVVTLLYDVYIMRSVFIVHFVKFRNNMLPHHKCKGESLTINFLKLYLSQIGKMIYSEITFHDESSIISCKII

SEQ ID NO: 103404 - protein, 421 aa, Setaria italica
  Transcript Sequence Number=SeqID_37430
  Gene Ontology: Mol. function=transferase activity, transferring glycosyl groups; Cellular component=integral to membrane; Biological process=protein amino acid glycosylation
  Homolog annotation: Hit_ID=Q2WBM0; Match level="QueryCoverage=100%, HitCoverage=81%, E-value=0.0, Identity=90%"; Hit description=3-alpha- L-fucosyltransferase
  Pfam annotation: Domain name=Glyco_transf_10; Domain location=20-305; Score=-120.8; E_value=2.9e-06; Accession=PF00852.11; Description =Glycosyltransferase family 10 (fucosyltransferase)
GDEGDDEIRRCQERLEREDAVPYDRDFDREPVLVGGAAKDWNKCSVGCEFGFSASKTPDATFGIAPDRSVDSILRSMESSQYYSENNIDVARGRGYKIVMTTSLSSDVPVGYFSWAEYDIMAPVPPKTEEALAAAFISNCGARNFRLQALEMLENLDVKIDSYGSCHRNRDGKVDKVETLKRYKFSLAFENSNEEDYVTEKFFQSLVAGSIPVVVGAPNVQEFSPGEGAILHIKELDDVASVAKTMKNIASNPDAFNQSLRWKYDGPSDSFKALIDMAAVHSSCRLCIHIATKIHEKEERTPKFTNRPCSCSSKKGTVYHLFVRERGQFQSESIFLRSGQLTLGALESAVLAKFRSLNHVPVWKDERPPSIRGGDDLKVYRIYPVGLTQRQALYRFRFRDDSELEQYIKDHPCAKLEVIFV

SEQ ID NO: 103405 - protein, 348 aa, Setaria italica
  Transcript Sequence Number=SeqID_37431
  Gene Ontology: Mol. function=glycerophosphodiester phosphodiesterase activity; Cellular component=anchored to membrane; Biological process=glycerol metabolic process
  Homolog annotation: Hit_ID=Q9ZTU6; Match level="QueryCoverage=78%, HitCoverage=60%, E-value=6e-94, Identity=64%"; Hit description=S222
  Pfam annotation: Domain name=GDPD; Domain location=1-249; Score=25.3; E_value=2.2e-07; Accession=PF03009.9; Description=Glycerophosphoryl diester phosphodiesterase family
QFNLMDDTTVARSQFASQTAVIKEIQSARGVFTFNLTWDDIVKNLRPIISTPLSTYRMDRNPRYRNAGKFMRLSDFLDFTKNKDLSGIMISIEHAAFVAEELGFDMVDTVIKALGDAGYNNQTTQKVMIQSTNSSVLEKFKQQTKYDLVYMINEEVRDATPSSLVDIKKFASAVSVDTSSVFPEPHHFTMYKTNLVQTLQTAGLSVYVYTLMNEFVSQPYDFFADATVQINAYVKGAGVDGLITDFPATARRYKVNSCMNMGNSAPIFMAPPRAGDLMQIISKLAQPPALAPMPLLTDSDVAEPPLPPARSNSSTAPTHSGATRMHAHATHIPVLVTLAVLFAWCSLV

SEQ ID NO: 103406 - protein, 85 aa, Setaria italica
  Transcript Sequence Number=SeqID_37432
  Subcellular localization annotation: CTP_CleavageSite=45; ConfidenceScore=5.36e-01
REILTWQRCTSARHPASASPTPVPAPTRAAPAPISPPPPAPSPFSASIAPAPDPTLFLALLLAPSFAVLILLPCRGFLLPVPVSL

SEQ ID NO: 103407 - protein, 90 aa, Setaria italica
  Transcript Sequence Number=SeqID_37433
SRSPTSIRPLRLADRRLPHLPLPLTHAHGRIAAFISHLLVHLCSFPRLPQSARSTAAAAAAPFGGLPTGRGSSANLVARVPSSPATACCG

SEQ ID NO: 103408 - protein, 168 aa, Setaria italica
  Transcript Sequence Number=SeqID_37434
  Gene Ontology: Mol. function=cytochrome-c oxidase activity; Cellular component=mitochondrial envelope; Biological process=respiratory gaseous exchange
  Homolog annotation: Hit_ID=B6TWK5; Match level="QueryCoverage=63%, HitCoverage=63%, E-value=3e-44, Identity=93%"; Hit description =Cytochrome c oxidase polypeptide Vb
  Pfam annotation: Domain name=COX5B; Domain location=56-154; Score =90.6; E_value=5.6e-24; Accession=PF01215.11; Description=Cytochrome c oxidase subunit Vb
  Pfam annotation: Domain name=zf-CHCC; Domain location=109-151; Score =22.2; E_value=6.8e-05; Accession=PF10276.1; Description=Zinc-finger domain
  Pfam module annotation: Pfam domain module=COX5B::zf-CHCC; Domain location=56-154::109-151
  Subcellular localization annotation: CTP_CleavageSite=39; ConfidenceScore=5.29e-01
HFRRRRRRERAGPRPHPPPCGAASSPAAPASSAARAAPLSSAAAAFRRTSPLLSGDKPATVEDVMPIATGLEREELEAELQGKKRFDMDAPVGPFGTKEEPAVIESYYNKRIVGCPGGEGEDEHDVVWFWLKKDEPHECPVCSQYFVLKVIGDGGDPDGHDDDDEGHH

SEQ ID NO: 103409 - protein, 275 aa, Setaria italica
  misc_feature (77)..(77): Xaa can be any naturally occurring amino acid
  misc_feature (92)..(92): Xaa can be any naturally occurring amino acid
  Transcript Sequence Number=SeqID_37435
  Homolog annotation: Hit_ID=Q6YU47; Match level="QueryCoverage=45%, HitCoverage=33%, E-value=5e-26, Identity=54%"; Hit description=FAS1 -like protein
RKEKEEAELKRKASTKKQANFMEGLFIRKPGSNMESSGNHYLEKTINSKSSGTIEELPVAATLAMDCTLSQANHLRXGEFWVEHVSRWRKTXQHNRLHHWGVRRSPKVQLFLELKLQKSSATAPSDNMPIPIKEQSSQESTGSIDFSKLLDELKISSHGNKIHSRTVQNSISSSAFLVKKLLQFDRSFRPAYYGTWRKKSSTVSARQPFQRDPELNYDVESDEEWEEEDSGERLSDFEEDDETMNERDYVINVEEETENSFVVPPCIGDLSGDEV

SEQ ID NO: 103410 - protein, 153 aa, Setaria italica
  misc_feature (128)..(128): Xaa can be any naturally occurring amino acid
  Transcript Sequence Number=SeqID_37436
  Gene Ontology: Mol. function=transferase activity, transferring groups other than amino-acyl groups
  Homolog annotation: Hit_ID=Q5VMK3; Match level="QueryCoverage=96%, HitCoverage=31%, E-value=5e-30, Identity=49%"; Hit description =Putative anthranilate N-hydroxycinnamoyl/benzoyltransferase
YTSREASVAELMRAPLHDVAAAVRAAIAGVMTAARFQELADWMEERKAAFRDGGKWTEEVNLGLGSPALVISGLLPFPIDGDLGFGKPRLVMPWLRHGRLGSANVTVVPSPSGDGSWFFAATRMWPRXVEVVESDPLLKPAANLGQATPAGPR

SEQ ID NO: 103411 - protein, 135 aa, Setaria italica
  Transcript Sequence Number=SeqID_37437
  Pfam annotation: Domain name=DUF212; Domain location=81-135; Score= -23.6; E_value=2.3e-06; Accession=PF02681.6; Description=Divergent PAP2 family
  Subcellular localization annotation: CTP_CleavageSite=49; ConfidenceScore=5.35e-01
LSPSFVLGPTADALAPSPSSAWPPPSLSRLLAAALRGGRAGGELPDLVAAATGGAGIGTLLMSTTAAAVTKARESPYLLALAANPTFVSGLVAWAVAQAAKALLTSVVERRWDLRMLFSSGGMPSSHTALCTALT

SEQ ID NO: 103412 - protein, 128 aa, Setaria italica
  Transcript Sequence Number=SeqID_37438
  Gene Ontology: Mol. function=peroxidase activity
  Homolog annotation: Hit_ID=C1FDH6; Match level="QueryCoverage=85%, HitCoverage=34%, E-value=6e-37, Identity=64%"; Hit description =Phosphatidic acid phosphatase-related protein
  Pfam annotation: Domain name=DUF212; Domain location=1-117; Score =215.8; E_value=1.1e-61; Accession=PF02681.6; Description=Divergent PAP2 family
KVQPTVRRKRRWDLRMLFSSGGMPSSHTALCTALTASVALCHGVSDALFPVCLGFTLIVMYDATGVRRHAGMQAEVLNKIVEDLFEGHPISERKLKELLGHTPSQVFAGAILGILVAWYCCQGCIVPI

SEQ ID NO: 103413 - protein, 71 aa, Setaria italica
  Transcript Sequence Number=SeqID_37439
  Homolog annotation: Hit_ID=C1FDH6; Match level="QueryCoverage=63%, HitCoverage=14%, E-value=3e-12, Identity=73%"; Hit description =Phosphatidic acid phosphatase-related protein
  Pfam annotation: Domain name=DUF212; Domain location=1-60; Score= -23.1; E_value=2.1e-06; Accession=PF02681.6; Description=Divergent PAP2 family
VYFSSSTNLCFLIDTQAEVLNKIVEDLFEGHPISERKLKELLGHTPSQVFAGAILGILVAWYCCQGCIVPI

SEQ ID NO: 103414 - protein, 83 aa, Setaria italica
  Transcript Sequence Number=SeqID_37440
  Gene Ontology: Mol. function=transferase activity, transferring glycosyl groups; Biological process=metabolic process
  Homolog annotation: Hit_ID=A5I865; Match level="QueryCoverage=100%, HitCoverage=16%, E-value=6e-21, Identity=63%"; Hit description =Glucosyltransferase
ILNHRAVGGFLSHCGWNSTLEAVAAGVPMLAWPLFAEQRMNAVKLSSEGMGMALRVTAREEDGVVPREEVAAVATELMVGEEG

SEQ ID NO: 103415 - protein, 123 aa, Setaria italica
  misc_feature (89)..(89): Xaa can be any naturally occurring amino acid
  misc_feature (117)..(117): Xaa can be any naturally occurring amino acid
  Transcript Sequence Number=SeqID_37441
  Gene Ontology: Mol. function=helicase activity; Cellular component =plasma membrane
  Homolog annotation: Hit_ID=B9SVN3; Match level="QueryCoverage=95%, HitCoverage=21%, E-value=1e-29, Identity=54%"; Hit description =Pentatricopeptide repeat-containing protein, putative
  Pfam annotation: Domain name=PPR; Domain location=24-58; Score=40.6; E_value=6e-09; Accession=PF01535.12; Description=PPR repeat
  Pfam annotation: Domain name=PPR; Domain location=59-93; Score=41.6; E_value=3.1e-09; Accession=PF01535.12; Description=PPR repeat
  Pfam module annotation: Pfam domain module=PPR::PPR; Domain location =24-58::59-93
NDKVDEAFELALRMLSLDLELNVCIYNALISGFWRSGSISKAFKIISFMRKNGCEPDVVTYNIVLNHYCDAGMVKDAEDLMKKMEMSGXNPDRYSYNQMLKGLCKAHQLDKAFAFVXDHMEVG

SEQ ID NO: 103416 - protein, 68 aa, Setaria italica
  Transcript Sequence Number=SeqID_37442
MRRNTLLALFIWAMAAVIFAVAMPAAARRDGIHPQGCRCCYFTRNGIWIQCGKTCCGSDDENCCLGSH

SEQ ID NO: 103417 - protein, 148 aa, Setaria italica
  Transcript Sequence Number=SeqID_37443
  Gene Ontology: Mol. function=DNA-directed DNA polymerase activity; Cellular component=DNA polymerase III complex; Biological process =DNA replication
  Homolog annotation: Hit_ID=A6N174; Match level="QueryCoverage=100%, HitCoverage=79%, E-value=7e-29, Identity=54%"; Hit description =Nucleoside-triphosphatase/ nucleotide binding protein (Fragment)
EIIEVGSQMDWRAEPDNSIVTSKKRQEGDWGECLSSQNQEPPQGGSNANNEHGRQKNIVRGKVSLAHVINQAEACSQQGGWSRHKAVSIAEKLEQDNLRLEPRSSLLCWKASSTSRRKMSALKIRTRRSRALSRLALCGRCISVRSPR

SEQ ID NO: 103418 - protein, 806 aa, Setaria italica
  misc_feature (3)..(3): Xaa can be any naturally occurring amino acid
  misc_feature (7)..(7): Xaa can be any naturally occurring amino acid
  misc_feature (402)..(402): Xaa can be any naturally occurring amino acid
  Transcript Sequence Number=SeqID_37444
  Gene Ontology: Mol. function=DNA-directed DNA polymerase activity; Cellular component=DNA polymerase III complex; Biological process =DNA replication
  Homolog annotation: Hit_ID=B9S8E5; Match level="QueryCoverage=63%, HitCoverage=46%, E-value=1e-174, Identity=59%"; Hit description =Replication factor C / DNA polymerase III gamma-tau subunit, putative
  Pfam annotation: Domain name=AAA; Domain location=205-394; Score= -17.6; E_value=0.00087; Accession=PF00004.21; Description=ATPase family associated with various cellular activities (AAA)
  Pfam annotation: Domain name=DNA_pol3_delta; Domain location=243-514; Score=-64.7; E_value=0.0023; Accession=PF06144.5; Description=DNA polymerase III, delta subunit
  Pfam module annotation: Pfam domain module=AAA::DNA_pol3_delta; Domain location=205-394::243-514
AVXGNRXLFRAGGADGDGGGGDELMQQQVSQESRNVCGIPWNWSRIHHRGKSILDMAGRSLSCGLSDPKSASAARRSEAATSAASCGNMNGSRSHPHFPVTARLTSSTSSDSDSLPLLVDGARNGVGGISSSFSGELGIFSKSSELDSDLASEARSGQKSRGSHRGRHRSLAQKYAPRTFKDVVGQSLVVQALSNAILRKKIGLVYVFYGPHGTGKTSCARVFAKALNCHSAEHPRPCDSCASCIAHNLGKSRSLLEIGPVGNIDLDSIVDILDNVMLSPVPSQHRVFIIDDCNTLPPDTWSVISKVVERAPRRVVFILISPSLDLPHIIVSRCQKFFFPKLKECDIINTLQWISTSEGLDVDRDALKLIASRSDGSLRDAEMTLDQLSLLGQRISMSLVQXLVGLVSDDKLVDLLDLALSADTVNTVKTLRDITETGVEPLALMSQLATIITDILAGTYTFARERVRRKFFKRPTLSKDDMEKLRQALKTLSEAEKQLRVSNDKMTWLTAALLQLAPDKQYILPSSSPSTSLNQGLLTRPEGDIARNSGMDHREIYAGNHGLPRASDLGNQQYRDVNLAAGLSNNMASNYHAGRRPGEHTPDSHVLSTGATRVNEGSRYSKTDSEMIWQAVLDNVQSDSLRKLLAREGRLISVSLGTAPTVQLIFSSRVNKSKAEKYRGHILQAFESVLSSAIILEIRYESKDDLTAGHAPVVSPYPEDGSNMVLRRSFTKHSSVSSGGENLIRRLQKDSVVQGGSSNQTRWMQSDPHILTEGEIIEVGSQMDWRAEPDNSIVTSKKRQVRLYLG

SEQ ID NO: 103419 - protein, 94 aa, Setaria italica
  Transcript Sequence Number=SeqID_37445
  Pfam annotation: Domain name=DUF594; Domain location=2-60; Score= -4.6; E_value=0.0077; Accession=PF04578.5; Description=Protein of unknown function, DUF594
KSLIPRPQPGKEALEEMKDVWVQLTICTAAKSWPEMHAAQLARGGAPYFCLAAAVTHYNCGEFGFSRTELTRDRSFCIHLFRFVWYILSTALLK

SEQ ID NO: 103420 - protein, 203 aa, Setaria italica
  misc_feature (37)..(37): Xaa can be any naturally occurring amino acid
  Transcript Sequence Number=SeqID_37446
  Gene Ontology: Mol. function=translation elongation factor activity
  Homolog annotation: Hit_ID=B9RPP6; Match level="QueryCoverage=100%, HitCoverage=20%, E-value=4e-79, Identity=68%"; Hit description =Translation elongation factor, putative
MFAVPYKMLPLKGVNGELLNHHGASEPEECFMAFARXVFSGVLHAGQKVFVLSPLYDPLKGDAVQKHVQEVELQYLYEMLGQGLKPVASVGAGSVVAIQGLGHHILKSATLSSTKSCWPFSSMMFQASPMLKVAIEPSNPADLGALVKGLKLLNRADPFVEYTVTQRGEHVLAAAGEIHLERCIKDLEERFAKVKLVVSDPLV

SEQ ID NO: 103421 - protein, 119 aa, Setaria italica
  Transcript Sequence Number=SeqID_37447
  Gene Ontology: Mol. function=oxidoreductase activity, acting on single donors with incorporation of molecular oxygen, incorporation of two atoms of oxygen; Cellular component=cytoplasm; Biological process=fatty acid biosynthetic process
  Homolog annotation: Hit_ID=A1XCH8; Match level="QueryCoverage=100%, HitCoverage=14%, E-value=9e-53, Identity=82%"; Hit description =Lipoxygenase
MFGVKIPIIDDLTGGNKHGHLNGNVVLMRKNVLDVNSIAGSLIDGISEFLGRGVTCQLISSTVVDPNNGNRGKVGAEASLEQWLLNPPPLLAGENQFSVTFDWEVEKHGVPGAIIVTNN

SEQ ID NO: 103422 - protein, 415 aa, Setaria italica
  Transcript Sequence Number=SeqID_37448
  Homolog annotation: Hit_ID=Q7XPL9; Match level="QueryCoverage=86%, HitCoverage=41%, E-value=1e-136, Identity=65%"; Hit description =OSJNBa0085I10.7 protein
  Pfam annotation: Domain name=Transposase_24; Domain location=183-311; Score=11.9; E_value=4.7e-05; Accession=PF03004.6; Description=Plant transposase (PttaEnSpm family)
PQPTRLIQPRREVDRPVLTPNIIDKWDVNPPCPKVASTITILLKQKYPGSTYLPAGQRREVPPNGEVVLHWQQYPPETRDAILNEFLQRYKWAPGREAECLKLFERRAARQFAGILSEEKRKVRVKFAAVDKSTEATGTHRSNGHAESEDEDQEEEPEDQQALERHDDEDPLLWKPSPPAWMYPSWWERLCEHWAKEEVLKMSSQNRKNRYIGGRAHHTSGSRSIAMHRQIMVIENGGMPVSELEVFNKTHRRNAGTGEFVSERAKRTVEGFKKRMEEAGDKIHPHLAWVQEVGGRNRGRYYGLTGIIDKNKVDELAKSTPNCFGIKGHRQKFTQEQVQQMINQALQGLNETWEKKFKSLEQSVCGGIDPEHAPGSSAAREGGQEDQSGRHQDASDAQSEESREDDDEEVVSTSV

SEQ ID NO: 103423 - protein, 90 aa, Setaria italica
  Transcript Sequence Number=SeqID_37449
LLLFGKCSSCQKHFGYVTVESFFVVLVFQVHIGFSLVRLPDHQSIVVVCKIDILQQFSIILKSSYCRYVYIFDNFCEAFIVILEQSLALP

SEQ ID NO: 103424 - protein, 62 aa, Setaria italica
  misc_feature (58)..(58): Xaa can be any naturally occurring amino acid
  Transcript Sequence Number=SeqID_37450
PFQLATTVSSHRLIASLIKDEGVIVISLLRFLIHLLSCMALVGRERCDSTVAARPSLXAMHV

SEQ ID NO: 103425 - protein, 74 aa, Setaria italica
  misc_feature (61)..(61): Xaa can be any naturally occurring amino acid
  Transcript Sequence Number=SeqID_37451
EDLSAAALLRSAGASRPSAAAAVMLPAQAAAGDDGEASSDEIAFDGDGPEIVLSKDSDDCXFRFQHIGLPDSWL

SEQ ID NO: 103426 - protein, 109 aa, Setaria italica
  Transcript Sequence Number=SeqID_37452
  Gene Ontology: Mol. function=serine-type endopeptidase activity; Cellular component=chloroplast envelope; Biological process =proteolysis
  Homolog annotation: Hit_ID=B8AMH6; Match level="QueryCoverage=87%, HitCoverage=20%, E-value=2e-51, Identity=100%"; Hit description=ATP -dependent Clp protease proteolytic subunit
  Pfam annotation: Domain name=CLP_protease; Domain location=1-98; Score=81.4; E_value=3.3e-21; Accession=PF00574.15; Description=Clp protease
MLGCTSHITVKCNAGKRYSLPNSRIMIHQPLGGAQGQETDLEIQANEMLHHKANLNGYLAYHTGQPLDKINVDTDRDYFMSAKEAKEYGLIDGVIMNPLKALQPLPASS

SEQ ID NO: 103427 - protein, 304 aa, Setaria italica
  Transcript Sequence Number=SeqID_37453
  Gene Ontology: Mol. function=serine-type endopeptidase activity; Cellular component=chloroplast envelope; Biological process =proteolysis
  Homolog annotation: Hit_ID=Q0DSH2; Match level="QueryCoverage=73%, HitCoverage=71%, E-value=1e-127, Identity=98%"; Hit description=ATP -dependent Clp protease proteolytic subunit (Fragment)
  Pfam annotation: Domain name=CLP_protease; Domain location=112-293; Score=402.9; E_value=5.5e-118; Accession=PF00574.15; Description=Clp protease
  Subcellular localization annotation: CTP_CleavageSite=64; ConfidenceScore=5.44e-01
EELPKQSPLPPKTPLELPPPSMATATAASSSSLTAPLLRPNPNPNPAPRSLPLLRNKRCARGVTAAVSGGAGAYGAAQRRGIWSIRDDLVVPRSPYFPVEYAAGQERGPSPMVMERFQSVVSQLFQHRIIRCGGPVEDGMANIIVAQLLYLDAINPTKDIIMYVNSPGGSVTAGMAIFDTMKHIRPDVSTVCIGLAASMGAFLLSAGTKGKRYSLPNSRIMIHQPLGGAQGQETDLEIQANEMLHHKANLNGYLAYHTGQPLDKINVDTDRDYFMSAKEAKEYGLIDGVIMNPLKALQPLPASS

SEQ ID NO: 103428 - protein, 102 aa, Setaria italica
  Transcript Sequence Number=SeqID_37454
  Gene Ontology: Mol. function=superoxide dismutase activity; Cellular component=chloroplast; Biological process=cellular response to UV
  Homolog annotation: Hit_ID=B9SHL3; Match level="QueryCoverage=96%, HitCoverage=88%, E-value=7e-34, Identity=69%"; Hit description=UV -induced protein uvi31, putative
  Pfam annotation: Domain name=BolA; Domain location=21-100; Score =137.5; E_value=4.2e-38; Accession=PF01722.10; Description=BolA-like protein
MMASRGTGAVLSRAARMRQKLQSALEASALEIEDVSYQHAGHAAVKDNANETHFNIKVVSPKFEGQNLVKRHRMVYNLLSDELNSGLHAISIVAKTPKEFGS

SEQ ID NO: 103429 - protein, 104 aa, Setaria italica
  Transcript Sequence Number=SeqID_37455
KHTTNYKFIYNEVHISLIRSRTCVQIHYWYNNLWSQASFLHKYSYTLQYIRIHTSTATPPPAGRFTSPCASSTHAHPRHLTCRACQVVLMGAVEGYRIAGGPLG

SEQ ID NO: 103430 - protein, 115 aa, Setaria italica
  misc_feature (93)..(93): Xaa can be any naturally occurring amino acid
  Transcript Sequence Number=SeqID_37456
RHRQGAPGEPRRPPRRPRQQQRLGLRHQLRPRQVSERGWAWVDDAHGEVKRPAGGGVAVDVCIRMYYNEVHISLIRSRTCVQIHYWYNNLWSXGSFLTNTRTRCSTYEYIRLRRP

SEQ ID NO: 103431 - protein, 76 aa, Setaria italica
  Transcript Sequence Number=SeqID_37457
  Gene Ontology: Mol. function=magnesium ion binding; Cellular component=integral to membrane; Biological process=photosynthesis, light harvesting
  Homolog annotation: Hit_ID=P07371; Match level="QueryCoverage=100%, HitCoverage=28%, E-value=3e-37, Identity=98%"; Hit description =Chlorophyll a-b binding protein AB80, chloroplastic
  Pfam annotation: Domain name=Chloroa_b-bind; Domain location=1-43; Score=-42.3; E_value=0.032; Accession=PF00504.13; Description =Chlorophyll A-B binding protein
PGGSFDPLGLADDPEAFAELKVKELKNGRLAMFSMFGFFVQAIVTGKGPLENLADHLADPVNNNAWAYATNFVPGK

SEQ ID NO: 103432 - protein, 219 aa, Setaria italica
  Transcript Sequence Number=SeqID_37458
  Pfam annotation: Domain name=DUF581; Domain location=113-170; Score =74.5; E_value=4e-19; Accession=PF04570.6; Description=Protein of unknown function (DUF581)
  Pfam annotation: Domain name=zf-FCS; Domain location=124-162; Score =9.6; E_value=0.061; Accession=PF06467.6; Description=MYM-type Zinc finger with FCS sequence mot
  Pfam module annotation: Pfam domain module=DUF581::zf-FCS; Domain location=113-170::124-162
MVEKARTMARKLEIPQWKSGASSDGLPSPTSPLDRASPRGWRHRDAVGGVGLGILAALEAQPSASAAAVPKVSAPVSIARRARLEVSELGCSGRCATSLCGGGAQAQKASTSDGRPGSPGAAFRVAEFLSCCDMCRRALDGKDIFMYRGERAFCSMECRYHAIVSDEFQEEKERKRRAAAAVSPAAADGLPRKAAADMAGSPCSGGGGQIFFTTGIVAA

SEQ ID NO: 103433 - protein, 139 aa, Setaria italica
  misc_feature (39)..(39): Xaa can be any naturally occurring amino acid
  Transcript Sequence Number=SeqID_37459
  Gene Ontology: Mol. function=protein binding
  Homolog annotation: Hit_ID=Q8S9Z7; Match level="QueryCoverage=100%, HitCoverage=25%, E-value=2e-52, Identity=65%"; Hit description=F-box protein-like
EVEQISGNKYGNFLQEIGSTCCLEDVEMGWGFCPIQITXENVLHALPVICPFLESLTLRFQVISDSVVRNLLESATNLQVLCLHHCIGSLTSFSFQTKAPTLRVLRLQWVTPWITNDDLKILTDNCNLVELSLSGCKLL

SEQ ID NO: 103434 - protein, 136 aa, Setaria italica
  Transcript Sequence Number=SeqID_37460
YLQALWPFSALVREEDDLRASARLVRALSVPEETKQFVLALREPPRDRDGSGGVIYILAAQNLSEQSASDAERLIREVRPGAVVTQVSRAALDDVRIEEDCLSGSAGGGVLVPASPFQVIKRCVTEKRSKDQYVKA

SEQ ID NO: 103435 - protein, 49 aa, Setaria italica
  Transcript Sequence Number=SeqID_37461
FYLLRVVVHIGAVDKMFCCLVSISNNLLGPSCWPKKRSSLRTNAAPSTS

SEQ ID NO: 103436 - protein, 58 aa, Setaria italica
  Transcript Sequence Number=SeqID_37462
  Gene Ontology: Mol. function=receptor activity
  Homolog annotation: Hit_ID=A0EM54; Match level="QueryCoverage=91%, HitCoverage=35%, E-value=7e-16, Identity=75%"; Hit description =Truncated JUMONJIC (Fragment)
MLVLAGDPLCDIIPLHLDVFRGDTDLLREFLRSYQLPLLRGESNADIYKTSKNKKLTK

SEQ ID NO: 103437 - protein, 76 aa, Setaria italica
  Transcript Sequence Number=SeqID_37463
  Gene Ontology: Mol. function=receptor activity
NRPIWPYMVTRKCNGDIFAHIRDMLSKTDILPLASSLGVQMRNIHLLPLPHMEHVPKSGNMLHIWKGACLAINVDK

SEQ ID NO: 103438 - protein, 474 aa, Setaria italica
  misc_feature (234)..(234): Xaa can be any naturally occurring amino acid
  misc_feature (248)..(248): Xaa can be any naturally occurring amino acid
  misc_feature (314)..(314): Xaa can be any naturally occurring amino acid
  misc_feature (340)..(340): Xaa can be any naturally occurring amino acid
  misc_feature (352)..(352): Xaa can be any naturally occurring amino acid
  misc_feature (372)..(372): Xaa can be any naturally occurring amino acid
  Transcript Sequence Number=SeqID_37464
  Gene Ontology: Mol. function=receptor activity; Cellular component =nucleus; Biological process=multicellular organismal development
  Homolog annotation: Hit_ID=UPI0001A7B21B; Match level="QueryCoverage =96%, HitCoverage=47%, E-value=1e-161, Identity=62%"; Hit description= transferase, transferring glycosyl groups
  Pfam annotation: Domain name=F-box; Domain location=14-61; Score =31.9; E_value=2.5e-06; Accession=PF00646.25; Description=F-box domain
  Pfam annotation: Domain name=JmjC; Domain location=249-365; Score =15.5; E_value=3.3e-05; Accession=PF02373.14; Description=JmjC domain
  Pfam module annotation: Pfam domain module=F-box::JmjC; Domain location=14-61::249-365
MEAASGGRRGPALGALAVLPDEVLCAVVDLLPPADIGRLACVSSAMYILCNEEPLWMSKCLSIGGPLEYKGSWKKTTLSRLGLCSENDENWQKPRQFDGFSSLYLYRRWYRCVTSLSSFSFDDGHVERKDDLVLDQFRSQYDGKGPVLLTKLAETWPARTKWTLQQLTRDFGEVPFRISQRSPQKITMKLKDYVSYMELQHDEDPLYIFDDKFGESVPALLKDYSVPHLFQEDXFDILDYDQRPAFQXWFITRPERSGASWHVDPGLTSAWNTLLCGRKRWALYPPGRVPGGVTVHVNDEDGDVDIETPTSLQXWWLDIYPHLPEHEKPLECTQLPGETXIFVPSGWWHCVXLNLETTVAVTQNFVNQSNFXQHVCLDMAPGHRHKGVCRAGLLAVPGKSAKDNENHAPVPMSGWNHPDMSRKEKRLKGSEPLRTSNSINHCSAFEFSGVQESLENQDFSYDIDFLSQFLEKER

SEQ ID NO: 103439 - protein, 552 aa, Setaria italica
  Transcript Sequence Number=SeqID_37465
  Gene Ontology: Mol. function=receptor activity
  Homolog annotation: Hit_ID=UPI0001A7B21B; Match level="QueryCoverage =96%, HitCoverage=56%, E-value=1e-136, Identity=46%"; Hit description= transferase, transferring glycosyl groups
  Pfam annotation: Domain name=APH; Domain location=141-489; Score= -2.0; E_value=0.0023; Accession=PF01636.15; Description =Phosphotransferase enzyme family
LKDNENHAPVPMSGWNHPDMSRKEKRLKGSEPLRTSNSINHCSAFEFSGVQESLENQDFSYDIDFLSQFLEKERDHYSSIWSPTNSLGQREAREWLRRLWVLKPKLRELIWKGACLAINVDKWYSCLEEICACHSLPLPTEDEKLPVGTGSNPVFIVSGNVIKIYAEGGLDYSVHGLGTELEFYDLLQKSGSPLINHIPEIIASGFLEYKDDIYRTIPWDGKGIPDVLAKHYPMEVSYANSCFPLGLWSKQRFGTSSSPDDSNRPIWPYMVTRKCNGDIFAHIRDMLSKTDILPLASSLGVQMRNIHLLPLPHMEHVPKSGNNDVKDCGDDTVLPEWKQLVSTLNRRKQDVKKHLANWGNSVPQVLIEKAEGYLPPNMDFLIKFVKDDGDVVYPLPSWIHSDIMDDNILIEGITESSPSGNSKGSYETDPEKMNAIHIIDFSDLSIGDPLCDIIPLHLDVFRGDTDLLREFLRSYQLPLLRGESNADIYKTVQNSKFRRASYRAMCYCILHEDNVLGAIFSLWKELRAVTSWEDVENFVWGELNRYQESCTP

SEQ ID NO: 103440 - protein, 128 aa, Setaria italica
  Transcript Sequence Number=SeqID_37466
  Subcellular localization annotation: CTP_CleavageSite=67; ConfidenceScore=5.04e-01
GRARGEAPAQLPFSTSAAAASSASAPAPAPAVPHFFPQQMQSYLSASQQYQHQQHRHGAPPSPFDTAASYRYGHQPFPQADQAQLQRLVQLQQQQHQQMAAAAAAAAAASAAAATPGESPRAAAAPAG

SEQ ID NO: 103441 - protein, 291 aa, Setaria italica
  Transcript Sequence Number=SeqID_37467
  Gene Ontology: Mol. function=ATP binding; Biological process=apoptosis
  Homolog annotation: Hit_ID=Q2R8J8; Match level="QueryCoverage=98%, HitCoverage=29%, E-value=3e-95, Identity=60%"; Hit description=NB -ARC domain containing protein, expressed
NDVSSRVVVTTTIQSIANACSSSESYVHKMRRLDEECSKQLFSFKACPNEYSCYKQPDSAAILKKCGGQPLALVTIGEFLQTQGWPKGPSCEDICSKLHYHLKNDRTFEAMRRVLIRNYTSLPNHALKACLLYFGMFPCDYQIKRKSLLRLWLAEGFVELQPSTSTPDPATAFDALKDRNIIEPIYVSNNETVKTCQTYGMMHEFITHMSISQKFVTLLCDEMNNDKYVRRLSVHKSTATDGNNSDCNALSLVRSLTVFGKPSEAILDFSKYRLLRVLDLEKCDDLKDTHV

SEQ ID NO: 103442 - protein, 313 aa, Setaria italica
  misc_feature (262)..(262): Xaa can be any naturally occurring amino acid
  Transcript Sequence Number=SeqID_37468
  Gene Ontology: Mol. function=DNA binding; Biological process =reproduction
  Homolog annotation: Hit_ID=Q22557; Match level="QueryCoverage=45%, HitCoverage=35%, E-value=8e-11, Identity=33%"; Hit description =Protein T19B10.6, confirmed by transcript evidence
  Pfam annotation: Domain name=SprT-like; Domain location=1-140; Score =55.7; E_value=1.8e-13; Accession=PF10263.1; Description =Uncharacterized conserved protein (SprT-lik
DYYPGGGGCIILLSKSLCECHDESDLKNALLHEMIHAYICIKDNNSDHSDHGAKFRKLMNKINLSSVADPRRPVGGYSITLLHEIRKKYYHYKCQSCGDLIKSIMMKVPSGNDCIERKGADDPCQNSKCHWHRHKQQCSGSYCRVQESLPGGPKAEEALTEGKADEAVCKSWHFTHTSDQGRRSNKNEREDASAGFLHVTDNAVGCSGLDSSSRDRSNKKIKFSKDVCCDLQMAEAVHEAPKRPRTAVLENQECSRRKKRNXSKLDGSYSVIIEWLNYYCYSESDEDEVPLVNKRTERRRRPKIPEISIARNP

SEQ ID NO: 103443 - protein, 130 aa, Setaria italica
  Transcript Sequence Number=SeqID_37469
  Gene Ontology: Mol. function=structural constituent of ribosome; Cellular component=ribonucleoprotein complex; Biological process =translation
  Homolog annotation: Hit_ID=Q9LX88; Match level="QueryCoverage=100%, HitCoverage=100%, E-value=2e-68, Identity=96%"; Hit description=40S ribosomal protein S15a-4
  Pfam annotation: Domain name=Ribosomal_S8; Domain location=5-130; Score=219.3; E_value=9.9e-63; Accession=PF00410.11; Description =Ribosomal protein S8
MVRVSVLNDALKSMYNAEKRGKRQVMIRPSSKVIIKFLIVMQRHGYIGEFEYVDDHRAGKIVVELNGRLNKCGVISPRFDVGVKEIEGWTARLLPSRQFGYIVLTTSAGIMDHEEARRKNVGGKVLGFFY

SEQ ID NO: 103444 - protein, 116 aa, Setaria italica
  Transcript Sequence Number=SeqID_37470
  Homolog annotation: Hit_ID=B6UGJ4; Match level="QueryCoverage=100%, HitCoverage=100%, E-value=2e-29, Identity=66%"; Hit description=Seed maturation protein
  Pfam annotation: Domain name=LEA_1; Domain location=1-73; Score=63.3; E_value=9e-16; Accession=PF03760.7; Description=Late embryogenesis abundant (LEA) group 1
MQPAKVKAKDMVSSAKEKVKEGSAKMQGKTGEATAATHGEKEMAKEAARAKKDQATADMHQEKAEHRADATTGRHGTTGVPLTGPHGHHGATTGAAVDPAYPSAGTTYPASGNKYL

SEQ ID NO: 103445 - protein, 55 aa, Setaria italica
  Transcript Sequence Number=SeqID_37471
FLKLNLQQITLVKIVNRNYYISTANSNIMDDQCFFHLSIYPKLTYLLTYLSSSYA

SEQ ID NO: 103446 - protein, 92 aa, Setaria italica
  Transcript Sequence Number=SeqID_37472
PDRSHDSKGSFVFNRLRTDPPFSLRQMVQKFQKMFSQTLCEHCRMVDISDDLNILERILEGRQKPSKLSYPLLQFITRNFSDERKIGQNELG

SEQ ID NO: 103447 - protein, 100 aa, Setaria italica
  Transcript Sequence Number=SeqID_37473
ELIHRFHYGRWCKNSRKCSHKLFASIAEWSTYLMILIYWSVYLREDRSRGILRIVAVTRLSRSLSISDKIFHQEVKLMTMAQHGNIIRLLGNCSYAEEEM

SEQ ID NO: 103448 - protein, 93 aa, Setaria italica
  Transcript Sequence Number=SeqID_37474
  Subcellular localization annotation: CTP_CleavageSite=79; ConfidenceScore=5.10e-01
VYDSPFQMRKLTCHCKHIGPCHLTSWKLMSLISNGLTSNGQKLMSLSGCSQSRLFCCPKLPLCDFSKTKEQLCFRGFISLQTKVPGVFLAGTN

SEQ ID NO: 103449 - protein, 68 aa, Setaria italica
  Transcript Sequence Number=SeqID_37475
  Gene Ontology: Mol. function=substrate-specific transmembrane transporter activity; Cellular component=integral to membrane; Biological process=transmembrane transport
  Homolog annotation: Hit_ID=Q9FZK2; Match level="QueryCoverage=98%, HitCoverage=87%, E-value=4e-25, Identity=85%"; Hit description =F17L21.12
  Pfam annotation: Domain name=RAMP4; Domain location=1-64; Score =134.2; E_value=4.1e-37; Accession=PF06624.4; Description=Ribosome associated membrane protein RAMP4
MTTSRRLADRKSAKFQKNITKRGSVPETTVKKGNDYPVGPIVLGFFIFVVIGSSLFQIIRTATSGGMA

SEQ ID NO: 103450 - protein, 302 aa, Setaria italica
  misc_feature (175)..(175): Xaa can be any naturally occurring amino acid
  misc_feature (256)..(256): Xaa can be any naturally occurring amino acid
  Transcript Sequence Number=SeqID_37476
  Gene Ontology: Mol. function=protein serine/threonine kinase activity; Cellular component=ubiquitin ligase complex; Biological process=protein amino acid phosphorylation
  Homolog annotation: Hit_ID=Q2L3S6; Match level="QueryCoverage=80%, HitCoverage=89%, E-value=3e-50, Identity=45%"; Hit description =Putative serine/threonine kinase
  Pfam annotation: Domain name=Pkinase; Domain location=86-302; Score =82.9; E_value=1.1e-21; Accession=PF00069.17; Description=Protein kinase domain
  Pfam annotation: Domain name=Pkinase_Tyr; Domain location=84-301; Score=-18.8; E_value=1.8e-12; Accession=PF07714.9; Description =Protein tyrosine kinase
  Pfam module annotation: Pfam domain module=Pkinase::Pkinase_Tyr; Domain location=86-302::84-301
MEETLVIHDVSEEREAFKSERKKSIKTRHHNPVVAARKSSIVPQRTAMDRPEMRQASDVEDVERRLSDASAGPISIPYAVIKSITKNFAEVIGNGAFGVVYLGMLKHGGLQNGMVAVKKVTIMNDFSDKLFLDEVNCLKRVKHKNIVKFLGYCADIQGEVMEVDRKKQLLLRTDXRFLCFEYVPNGDLHHYLEEKFDGFQWNMRYRIIKGVCEALDYLQKAHIYHLDLKPANVLLGADMEPKITDFGLSRCNDEKXSTISISATDVKGTMGYIAPEMIDNKQISCKSDIYSLGIIMIRLLTG

SEQ ID NO: 103451 - protein, 438 aa, Setaria italica
  Transcript Sequence Number=SeqID_37477
  Gene Ontology: Mol. function=protein serine/threonine kinase activity; Biological process=protein amino acid phosphorylation
  Homolog annotation: Hit_ID=Q2L3S0; Match level="QueryCoverage=88%, HitCoverage=88%, E-value=1e-73, Identity=41%"; Hit description =Putative vesicle associated membrane protein
  Pfam annotation: Domain name=Motile_Sperm; Domain location=316-424; Score=42.3; E_value=1.9e-09; Accession=PF00635.18; Description=MSP (Major sperm protein) domain
  Pfam annotation: Domain name=Pkinase; Domain location=36-294; Score =57.6; E_value=4.7e-14; Accession=PF00069.17; Description=Protein kinase domain
  Pfam annotation: Domain name=Pkinase_Tyr; Domain location=36-294; Score=9.3; E_value=2.4e-14; Accession=PF07714.9; Description=Protein tyrosine kinase
  Pfam module annotation: Pfam domain module=Motile_Sperm::Pkinase::Pkin ase_Tyr; Domain location=316-424::36-294::36-294
MVDISDDLNILERILEGRQKPSKLSYPLLQFITRNFSDERKIGQNELGDFFKGILRIVAVTRLSRSLSISDKIFHQEVKLMTMAQHGNIIRLLGNCSYAEEENVGKDGESTNDEMERLLCFEYLSNGSLKKHLSDELRGLQWHTRYQIIRGICEGLRYLHKKREIVHMYLRPACILLDDFMVPKITEFGISSELVMTSTNHHQQREYSAPESMLNDSVSFKANVYSLGIIIRELVTGSKEAPCLTTVLRRWKHRWGKSAALWCLQIKKCLELAQSCLQKDPNKRPPISHIVGELNELDTNANVSTLDQINSCLEDMLEIEPLELHFRFEHNKAITRSVELINDTDDAFAFRITASSSLPYYTEPSKSIVGPRSRCRVIIALKALEMAPEQCEYGASRFYVQSTRVDESLTAEDITEDMFDEETADKVVDTVDLIVLLE

SEQ ID NO: 103452 - protein, 199 aa, Setaria italica
  Transcript Sequence Number=SeqID_37478
  Gene Ontology: Cellular component=nucleus; Biological process =ribosome biogenesis
  Homolog annotation: Hit_ID=B5X5A6; Match level="QueryCoverage=100%, HitCoverage=100%, E-value=2e-70, Identity=65%"; Hit description=rRNA- processing protein FCF1 homolog
  Pfam annotation: Domain name=Fcf1; Domain location=90-188; Score =246.9; E_value=4.8e-71; Accession=PF04900.4; Description=Fcf1
MGRSKSKGPKFAAVKKIISKKTINKYKQDVLNHNKKDAEKEKLGRNVPQVSSALFFSYNTALGPPYRVIVDTNFINFSIQNKLDLEKGMMDCLYAKCTPCITDCVMAELEKLGQKYRVALRIAKDPRFQRLACTHKGTYADDCIVDRVTQHKCYIVATCDRDLKRRIRKVPGVPIMYITQHRYSIERLPEATIGGAPRI

SEQ ID NO: 103453 - protein, 68 aa, Setaria italica; identical to SEQ ID NO: 103449
  Transcript Sequence Number=SeqID_37479
  Gene Ontology: Mol. function=substrate-specific transmembrane transporter activity; Cellular component=integral to membrane; Biological process=transmembrane transport
  Homolog annotation: Hit_ID=Q9FZK2; Match level="QueryCoverage=98%, HitCoverage=87%, E-value=4e-25, Identity=85%"; Hit description =F17L21.12
  Pfam annotation: Domain name=RAMP4; Domain location=1-64; Score =134.2; E_value=4.1e-37; Accession=PF06624.4; Description=Ribosome associated membrane protein RAMP4

SEQ ID NO: 103454 - protein, 152 aa, Setaria italica
  Transcript Sequence Number=SeqID_37480
RWDQGGELVERVEKVEESVRRMVAAVGVLSRTVEKLGVRFRVLRRTLRDPISETAALAQKNSEATCILAAQEVLLEKEIGAIQKVLYAMQEQQQKQLDLILAIGEASTILDGEQDMLDRDSARSSSVDPAPEIENKQAKISSGAVTCGNNKP

SEQ ID NO: 103455 - protein, 226 aa, Setaria italica
  Transcript Sequence Number=SeqID_37481
  Gene Ontology: Mol. function=transcription regulator activity; Cellular component=nucleus; Biological process=regulation of transcription
  Homolog annotation: Hit_ID=Q7F1Y1; Match level="QueryCoverage=51%, HitCoverage=49%, E-value=1e-36, Identity=61%"; Hit description =B1065G12.3 protein
  Pfam annotation: Domain name=HLH; Domain location=159-207; Score =42.6; E_value=1.6e-09; Accession=PF00010.18; Description=Helix-loop -helix DNA-binding domain
  Subcellular localization annotation: CTP_CleavageSite=16; ConfidenceScore=5.25e-01
ARHSSSPAGFFSNLVVDNGYPGSKGAGGSGGAEASGSGRKMKPSQFNFTRPQPGGAAGHLSQISEDGAFPPGLVGDRAGESSSSGGGAAAARSFSGGFSIVGPWEESRDIIATLGAYDSQFSGAMAGTALEMAGMDRYMQLQPDQMPFKVRAKRGCATHPRSIAERERRTRISEKLRKLQELVPHMDKQTSTADMLDLAVEHIKGLQSELQALKHEQEKCTCCRKR

SEQ ID NO: 103456 - protein, 34 aa, Setaria italica
  Transcript Sequence Number=SeqID_37482
KIVARRVILQNHKILAYNLLKCYCDYHTNGDLFM

SEQ ID NO: 103457 - protein, 103 aa, Setaria italica
  Transcript Sequence Number=SeqID_37483
  Homolog annotation: Hit_ID=B9SBF1; Match level="QueryCoverage=99%, HitCoverage=4%, E-value=5e-27, Identity=57%"; Hit description =Nucleotide binding protein, putative
SDTERTQILAISDLMVEITDQSRSSPYKSLDEAGRRFWVAVQFRQLHALRRSGYSSSSERLHVDSASIAWAFQSDCQDDLLNSVLPLEPTWPEMQKLGIGLWH

SEQ ID NO: 103458 - protein, 88 aa, Setaria italica
  Transcript Sequence Number=SeqID_37484
MEGKSRVPEVTIVPAPRPAAGAGSVDAAKAAGKEPISPGTPSSADAGRGRSGKERRAEEGVSLPGWKLDALCQESCPSPAMRARFLYF

SEQ ID NO: 103459 - protein, 479 aa, Setaria italica
  Transcript Sequence Number=SeqID_37485
  Gene Ontology: Mol. function=catalytic activity; Cellular component =nucleus; Biological process=ubiquitin-dependent protein catabolic process
  Homolog annotation: Hit_ID=B9SDW7; Match level="QueryCoverage=100%, HitCoverage=91%, E-value=0.0, Identity=69%"; Hit description=NEDD8 -activating enzyme E1 regulatory subunit, putative
  Pfam annotation: Domain name=ThiF; Domain location=2-116; Score= -22.0; E_value=0.00022; Accession=PF00899.13; Description=ThiF family
LLGGIGSVTVVDGSKVEASDLGNNFLLDEGCLGQPRAKSICSFLQELNDAVKAKFVEETPATLIDTNPSFFSQFTVVIATQLPESSLLKLDDICRKANIVLIAARSYGLTGLVRVSVKEHCVIESKPDHFLDDLRLHNPWAELKQFAKSIDINDKDPVVHKHTPYIVILVRLAEKWADAHDGNLPSTSQEKREFKDLIRAHMLNVDEENYKEAVESSYKVSATPGIRNEIQQIIDDNSAEVNSSSTDFWILVAALKEFVANEGNGELPLEGTIPDMTSLTEYYVSLQKIYQAKAEADCLAMENRVKDILKRIGRDPDSISRAYIKTFCKNARKLRVCRYRSIMEEFSSPIVSEVQRYFTDEDYSYAMNFYVLLRAVDRLAANYNRLPGIFDSEIDEDIPRLKTAAASVLSEMGLSGASLTEDLIAEMCRFGGAEIHAVAAFIGGVASQEVIKLVTKQFVPLRGTFIFNGIDLKSQVLEL

SEQ ID NO: 103460 - protein, 92 aa, Setaria italica
  Transcript Sequence Number=SeqID_37486
  Gene Ontology: Mol. function=ubiquitin-protein ligase activity; Cellular component=ubiquitin ligase complex; Biological process =ubiquitin-dependent protein catabolic process
LPDLPAAPAPFNFLAAAFGRAADEARKISTIRDAGLRARLAASIAHLRGLILSYARIVAGNPDTFPTPPGAPHPAAELLVFLLAEAADPLDP

SEQ ID NO: 103461 - protein, 103 aa, Setaria italica
  Transcript Sequence Number=SeqID_37487
LGRRPEPGASLPAAADFCLLNCSDGVSQSSLFSSGEARDRETPRSLLLPCSVDSQTEEYCVSNDAARQSMDEGISSSTNCMCRSAVSMHLIRKASPKVSSHCL

SEQ ID NO: 103462 - protein, 54 aa, Setaria italica
  Transcript Sequence Number=SeqID_37488
RMTAQISTASFSRALSDSCPATGDVAHLAHTVCRFLQSPLTAFLSILRQLAPTL

SEQ ID NO: 103463 - protein, 118 aa, Setaria italica
  misc_feature (108)..(108): Xaa can be any naturally occurring amino acid
  Transcript Sequence Number=SeqID_37489
  Gene Ontology: Mol. function=binding; Cellular component=nucleus; Biological process=regulation of transcription, DNA-dependent
  Homolog annotation: Hit_ID=Q6E438; Match level="QueryCoverage=89%, HitCoverage=11%, E-value=2e-35, Identity=60%"; Hit description =ACT11D09.4
  Pfam annotation: Domain name=PPR; Domain location=42-76; Score=21.7; E_value=0.0031; Accession=PF01535.12; Description=PPR repeat
  Pfam annotation: Domain name=PPR; Domain location=7-41; Score=14.2; E_ value=0.19; Accession=PF01535.12; Description=PPR repeat
  Pfam annotation: Domain name=PPR; Domain location=82-116; Score=29.8; E_value=1.1e-05; Accession=PF01535.12; Description=PPR repeat
  Pfam module annotation: Pfam domain module=PPR::PPR::PPR; Domain location=42-76::7-41::82-116
CAVYDGVVHTTFMEGYWKQGKDKEAMDNYQSLLQRGFKMTPATCNVLLETLFKHGKHKEANELWETMMDNHTPPTFIGINAESYNVMVNQCFKEGKFEEAIEVFHRQXRKNVQMDVGC

SEQ ID NO: 103464 - protein, 54 aa, Setaria italica
  misc_feature (20)..(20): Xaa can be any naturally occurring amino acid
  Transcript Sequence Number=SeqID_37490
RRLVLKTGLNIVLACNIPKXPMLEAAAERKLVEKLKGLGYMRPVAGEATTSTAH

SEQ ID NO: 103465 - protein, 161 aa, Setaria italica
  Transcript Sequence Number=SeqID_37491
  Homolog annotation: Hit_ID=B9RZY7; Match level="QueryCoverage=57%, HitCoverage=20%, E-value=7e-35, Identity=69%"; Hit description =Nucleic acid binding protein, putative
MSSEELRTSFADLVVGSPNQTAGQNNSSGVSSSEEGLQVTCFTEDLHDVTLHFQIVRLSKQIYVWVGCNTAKFGHLYAAATTRPDNRVSVTSVLGGTSDNTGSGMARRLVLKTGLNIVLACNIPKDSPMLEAAAERKLVEKLKGLGYMRPVAGEATTSTAH

SEQ ID NO: 103466 - protein, 55 aa, Setaria italica
  Transcript Sequence Number=SeqID_37492
FILIDSSSFYEQEVYQVTYIQSSHFLNILPPCVHNKMKTIWNNGEEEISYHEDDR

SEQ ID NO: 103467 - protein, 106 aa, Setaria italica
  Transcript Sequence Number=SeqID_37493
  Gene Ontology: Mol. function=ubiquitin-protein ligase activity; Cellular component=ubiquitin ligase complex; Biological process =ubiquitin-dependent protein catabolic process
  Homolog annotation: Hit_ID=Q6K5K9; Match level="QueryCoverage=99%, HitCoverage=22%, E-value=1e-51, Identity=89%"; Hit description =Avr9/Cf-9 rapidly elicited protein-like
  Pfam annotation: Domain name=U-box; Domain location=9-82; Score=82.3; E_value=1.7e-21; Accession=PF04564.7; Description=U-box domain
KGGAEAAVVPEQFLCPISSEIMRDPVVLASGQTYDRRFIQEWLGAGNRTCPQTQQVLSNTILIPNHLVRSMISQWCTDNGITLPPVENQEEDLVTNNERKTFSKIF

SEQ ID NO: 103468 - protein, 83 aa, Setaria italica
  Transcript Sequence Number=SeqID_37494
  Gene Ontology: Mol. function=nucleic acid binding
  Homolog annotation: Hit_ID=B9SBN6; Match level="QueryCoverage=100%, HitCoverage=4%, E-value=2e-28, Identity=61%"; Hit description =Helicase, putative
ARISIPCMSVKRVIVIKPERLKKKGIWSRDCASDSWTSEEDAVLCGTVHEYGPLWELASDFLHSLPGGAFYRGKYRHPVHCCE

SEQ ID NO: 103469 - protein, 224 aa, Setaria italica
  misc_feature (17)..(17): Xaa can be any naturally occurring amino acid
  misc_feature (145)..(145): Xaa can be any naturally occurring amino acid
  Transcript Sequence Number=SeqID_37495
IVARRQLDEILGQSAAXQVHKELKDAMTQLDSIRYEVQNLSRLTPGQFNMRQHNTGMAEARTSDASDVSVSKPEEFRHEIRSIIREEMESFLRTRSDSPQNFASTTEGRKVDVADHTSVKSKDMETVDTGLTNLHSQAMTYAPLXEAPGIKACSSLSGNYKEQFKESNGLLNVLPISAESAGLLPSRSGGPTGSDLVLEAVLEAEVAENAKFFVLQPHDQLPKE

SEQ ID NO: 103470 - protein, 109 aa, Setaria italica
  Transcript Sequence Number=SeqID_37496
  Subcellular localization annotation: CTP_CleavageSite=65; ConfidenceScore=5.59e-01
SASSAKGMDPAAVVTDSLRRSSDPGHPARMSTPGRSRPSPSFYGGRLVTTVLSGENRAHLDLLISTVARGEDGGTRLHGSRCWDPVAIATAGNSLCAAAAGSRREIGEG

SEQ ID NO: 103471 - protein, 57 aa, Setaria italica
  Transcript Sequence Number=SeqID_37497
CMYLLDHPQSHRRISCPRSVKALSFFTLKLQSKAKGGLRSSLTLTELASKASDGCYI

SEQ ID NO: 103472 - protein, 151 aa, Setaria italica
  misc_feature (136)..(136): Xaa can be any naturally occurring amino acid
  Transcript Sequence Number=SeqID_37498
  Gene Ontology: Biological process=biosynthetic process
  Homolog annotation: Hit_ID=B9T3U9; Match level="QueryCoverage=87%, HitCoverage=12%, E-value=1e-25, Identity=43%"; Hit description =Transferase, transferring glycosyl groups, putative
TVAKSLVGLGYEVEVLAFTDGEARDIWENICLVNIVNIDTLKSVDWSKYNAVLLSSLEGKRVVSILMQEPFRLIPVVWLIHEDTLGQHLRSYAELQESIPNVIEDWRAHFHACAYVVFPDSYLPFLYSPLDSGNFXVISGSPVDIWAAKRF

SEQ ID NO: 103473 - protein, 92 aa, Setaria italica
  Transcript Sequence Number=SeqID_37499
  Gene Ontology: Mol. function=nucleic acid binding; Cellular component= intracellular
  Homolog annotation: Hit_ID=B6T9I0; Match level="QueryCoverage=93%, HitCoverage=22%, E-value=2e-13, Identity=51%"; Hit description =Splicing factor 45
PALAPAASFQPAFVAVQSVVEEYDPARPNDYEDYRKDKLRRAKEAELSKELERRRREEQEREREREQREREAREREERDYQSRASSLNISGE

SEQ ID NO: 103474 - protein, 79 aa, Setaria italica
  Transcript Sequence Number=SeqID_37500
  Gene Ontology: Mol. function=DNA binding; Cellular component=nucleus; Biological process=regulation of transcription, DNA-dependent
  Homolog annotation: Hit_ID=Q53NK6; Match level="QueryCoverage=45%, HitCoverage=16%, E-value=2e-10, Identity=81%"; Hit description=Myb -related protein MYBAS1
HLLPMRLESIKDQNQNLPTITQRKKNTKTGSQPIQGRSEQRPWTEQEDMQLVCTVRLFGDRRWDFIAQVSGLRGWGTTT

SEQ ID NO: 103475 - protein, 93 aa, Setaria italica
  Transcript Sequence Number=SeqID_37501
  Gene Ontology: Mol. function=DNA binding; Cellular component=nucleus; Biological process=regulation of transcription, DNA-dependent
  Homolog annotation: Hit_ID=B6TJ14; Match level="QueryCoverage=95%, HitCoverage=39%, E-value=4e-45, Identity=96%"; Hit description=MYB59
  Pfam annotation: Domain name=Myb_DNA-binding; Domain location=14-61; Score=51.5; E_value=3.3e-12; Accession=PF00249.23; Description=Myb -like DNA-binding domain
CGSNMVTVREEMRKGPWTEQEDMQLVCTVRLFGDRRWDFIAQVSGLNRTGKSCRLRWVNYLHPGLKHGRMSPQEERLIIELHARWGNRWSRIA

SEQ ID NO: 103476 - protein, 100 aa, Setaria italica
  Transcript Sequence Number=SeqID_37502
  Gene Ontology: Mol. function=DNA binding; Cellular component=nucleus; Biological process=regulation of transcription, DNA-dependent
  Homolog annotation: Hit_ID=B6TJ14; Match level="QueryCoverage=79%, HitCoverage=34%, E-value=3e-35, Identity=88%"; Hit description=MYB59
  Pfam annotation: Domain name=Myb_DNA-binding; Domain location=43-88; Score=53.4; E_value=8.6e-13; Accession=PF00249.23; Description=Myb -like DNA-binding domain
SLCLTSLLDHTICSLCCFHVGLNRTGKSCRLRWVNYLHPGLKHGRMSPQEERLIIELHARWGNRWSRIARRLPGRTDNEIKNYWRTHMRKKHRRGRVSIS

SEQ ID NO: 103477 - protein, 237 aa, Setaria italica
  Transcript Sequence Number=SeqID_37503
  Gene Ontology: Mol. function=DNA binding; Cellular component=nucleus; Biological process=regulation of transcription, DNA-dependent
  Homolog annotation: Hit_ID=B6TJ14; Match level="QueryCoverage=96%, HitCoverage=100%, E-value=1e-111, Identity=85%"; Hit description =MYB59
  Pfam annotation: Domain name=Myb_DNA-binding; Domain location=10-57; Score=51.5; E_value=3.3e-12; Accession=PF00249.23; Description=Myb -like DNA-binding domain
  Pfam annotation: Domain name=Myb_DNA-binding; Domain location=63-108; Score=53.4; E_value=8.6e-13; Accession=PF00249.23; Description=Myb -like DNA-binding domain
  Pfam module annotation: Pfam domain module=Myb_DNA-binding::Myb_DNA -binding; Domain location=10-57::63-108
MVTVREEMRKGPWTEQEDMQLVCTVRLFGDRRWDFIAQVSGLNRTGKSCRLRWVNYLHPGLKHGRMSPQEERLIIELHARWGNRWSRIARRLPGRTDNEIKNYWRTHMRKKAQERKMSISPSSSSSSLTYQSCLLDTSPIIGMSSGDTHNGSSCVTSALDSTQSSMDAYPMDQIWREIEAPQAPALLGIAEGKEKTCSSIPCPLPSPAMWDYKCPEIFWKMEDEEIRMLAPSFGYGK

SEQ ID NO: 103478 - protein, 107 aa, Setaria italica
  Transcript Sequence Number=SeqID_37504
  Gene Ontology: Mol. function=transporter activity; Cellular component= membrane; Biological process=oligopeptide transport
  Homolog annotation: Hit_ID=B6U6P2; Match level="QueryCoverage=96%, HitCoverage=19%, E-value=2e-32, Identity=66%"; Hit description =Peptide transporter PTR2
LQRPQFFLLGVMDVTSFVGLLEFFYSEASAGMKSIGGAIVFCILGVASWLGSFLIQLVNRTTARHGGGHGWLDGANLNASRLDLFYWLLAMFGLVSFFLYLLCAWRY

SEQ ID NO: 103479 - protein, 211 aa, Setaria italica
  Transcript Sequence Number=SeqID_37505
MGQDAGLKREDHSRLGTGPGISQTSCCVNEENESRNRRYHQLKCSDSNSGELSLDYVPNFHCRSLPTRSRKTSTEQSIVGKRGSMYQSSSEISRIRKIQEGRRKIDSAFGGDAFLLFDIVDASSRPSTSGAYLHSHRNQRSGAKSSVETTHRINRASKDFLDLSFRELPDDNFKLDRPRLDSTMLKNDGGDGFLEISFEKEITDGGPCRGS

SEQ ID NO: 103480 - protein, 94 aa, Setaria italica
  Transcript Sequence Number=SeqID_37506
MQANTAGWFRHRTNRAQMFLCSAGSNDTFTRSVGEYPVLCPIYSAGLVCTFMCVFKAHNTRSKKTCDLNLTWVFVCDLWCLHKHVMMVVAPGSR

SEQ ID NO: 103481 - protein, 78 aa, Setaria italica
  Transcript Sequence Number=SeqID_37507
  Gene Ontology: Mol. function=cation transmembrane transporter activity; Cellular component=integral to membrane; Biological process=cation transport
  Homolog annotation: Hit_ID=B9SXJ6; Match level="QueryCoverage=97%, HitCoverage=23%, E-value=3e-14, Identity=53%"; Hit description =Cation efflux protein/ zinc transporter, putative
  Subcellular localization annotation: CTP_CleavageSite=23; ConfidenceScore=5.47e-01
SISMPMPMPPLYQAPKPSKKLLRLATASRPMRRLALLLALNVAYSATELAIGLFTGRVGLVSDAFHLTFGCGLLTFSL

SEQ ID NO: 103482 - protein, 278 aa, Setaria italica
  misc_feature (25)..(25): Xaa can be any naturally occurring amino acid
  Transcript Sequence Number=SeqID_37508
  Gene Ontology: Mol. function=cation transmembrane transporter activity; Cellular component=integral to membrane; Biological process=cation transport
  Homolog annotation: Hit_ID=Q6ICY4; Match level="QueryCoverage=99%, HitCoverage=70%, E-value=1e-111, Identity=69%"; Hit description =Metal tolerance protein C2
  Pfam annotation: Domain name=Cation_efflux; Domain location=1-278; Score=52.5; E_value=1.6e-12; Accession=PF01545.13; Description =Cation efflux family
  Subcellular localization annotation: CTP_CleavageSite=67; ConfidenceScore=5.00e-01
LRIAINSVSTTCYCVLFLVPGRAGXVSDAFHLTFGCGLLTFSLFAMAASRTKPDNLYTYGYKRLEVLAAFTNAVFLLFLSFSLAVEALHAFMQDESEHKHYLIVSAVTNLLVNLLGVWFFRSYARVNIVYRNAEDMNYHSVCLHVLADSIRSAGLILASWFLSLGIENAEVLCLGIVSVAVFMLVLPLFKATGNILLQIAPGNVPPSAFAKCSRQITACEDVSEVWQGRFWELVPGQAVGSLSIRVKSGADDRAVLEHAHGLYQDLGIQDLTVQTDES

SEQ ID NO: 103483 - protein, 195 aa, Setaria italica
  Transcript Sequence Number=SeqID_37509
  Gene Ontology: Cellular component=intracellular
  Homolog annotation: Hit_ID=B4G1L6; Match level="QueryCoverage=98%, HitCoverage=56%, E-value=2e-66, Identity=66%"; Hit description=DNA repair protein XRCC1
ETCQQNITLVSGPLHLRYLQAGHSDSGNKHFSPSKIKQWAMDDLTQTVSWLESQEEKPEPSELKAIAAEGVITCLQDAIESLEQGNDIKGVAEQWSFVPHVVNELLKLDGSGKDASLPKEQLSQLAIKCKKIYQAEFVRMDSDNKKGKKRQSSSPVTEHRRKTKSSDDHYDSDDTIEMTEEEIDLACRQLPGLCG

SEQ ID NO: 103484 - protein, 82 aa, Setaria italica
  Transcript Sequence Number=SeqID_37510
AGGRAGGRVVAREPAGFGQSLQGGFVMNAAWCSGRQMHVVYEMLLSGCKIMRGTFLFSVAVRDFVHSYDNAFLSYQKNADIG

SEQ ID NO: 103485 - protein, 195 aa, Setaria italica
  Transcript Sequence Number=SeqID_37511
  Pfam annotation: Domain name=RcbX; Domain location=86-190; Score= -39.8; E_value=0.00076; Accession=PF02341.7; Description=RbcX protein
  Subcellular localization annotation: CTP_CleavageSite=67; ConfidenceScore=5.69e-01
MAGVQMMPAAVDVAGLRKTRAGAAPSGGSSVSTTSLFAGDYRRRARRPSCSVRALRQSRSRGGLGIVCNLGGQYDDTFDDVQLQLMNYFTYKAVRTVLTQLYEMNPSNYRWFYNFVAVNKPTDGKLFLRALSKERQELAERVMITRLHLYGKWIKKCDHAKMYEMISDENLTLMRERLMETVIWPTDDTNTEKIG

SEQ ID NO: 103486 - protein, 119 aa, Setaria italica
  Transcript Sequence Number=SeqID_37512
  Gene Ontology: Mol. function=hydrolase activity, acting on glycosyl bonds; Cellular component=beta-galactosidase complex; Biological process=carbohydrate metabolic process
  Homolog annotation: Hit_ID=Q8W0A1; Match level="QueryCoverage=100%, HitCoverage=14%, E-value=4e-66, Identity=98%"; Hit description=Beta -galactosidase 2
  Pfam annotation: Domain name=Glyco_hydro_35; Domain location=1-118; Score=-127.3; E_value=5.7e-07; Accession=PF01301.11; Description =Glycosyl hydrolases family 35
MQKFTTKIVDMMKSEGLFEWQGGPIILSQIENEFGPLEWDQGEPAKAYASWAANMAVALNTGVPWIMCKEDDAPDPIINTCNGFYCDWFSPNKPHKPTMWTEAWTAWYTGFGIPVPHRP

SEQ ID NO: 103487 - protein, 91 aa, Setaria italica
  Transcript Sequence Number=SeqID_37513
  Subcellular localization annotation: CTP_CleavageSite=82; ConfidenceScore=5.08e-01
GTYARACTGCDSNKKLGATTSYAATTFFFSIKGSYIFTRACDHAPMMHTTLQRTGISGGGRGRPSSDPRLHQRRPARAPTVIAMERARLGR

SEQ ID NO: 103488 - protein, 97 aa, Setaria italica
  Transcript Sequence Number=SeqID_37514
  Gene Ontology: Mol. function=receptor activity
TLPACAVFWEKGGLNKTGKIALGASFGFVLLVILIVVYILCIRRGPYDYDFEFPQDLTSISAISAKRNRYQRAKSVMLAEMEAHSPDGFYTNGGSPR

SEQ ID NO: 103489 - protein, 306 aa, Setaria italica
  Transcript Sequence Number=SeqID_37515
  Gene Ontology: Mol. function=ATPase activity, coupled to transmembrane movement of substances; Cellular component=integral to membrane; Biological process=transport
  Homolog annotation: Hit_ID=Q8GU76; Match level="QueryCoverage=95%, HitCoverage=71%, E-value=1e-163, Identity=78%"; Hit description=MDR -like ABC transporter
  Pfam annotation: Domain name=ABC_tran; Domain location=92-276; Score =216.9; E_value=5.3e-62; Accession=PF00005.19; Description=ABC transporter
SKVIKVFVVLVVTANSVAETVSLAPEIVRGGESIRSIFGILNRATRIEPDDPESERVTTIRGDIELRHVDFAYPARPDIQIFKDFNLKIHAGRSQALVGASGSGKSTVIALIERFYDPTGGKVSIDGKDIRRLNLKSLRLKIGLVQQEPVLFAASILENIAYGKDGATEEEVIEAAKTANVHGFVSQLPDGYKTAVGERGVQLSGGQKQRIAIARAVLKDPAILLLDEATSALDAESECVLQEALERLMKGRTTVLVAHRLSTIRGVDRIAVVQDGRIVEHGSHNELLTRPEGAYSRLLQLQHHRV

SEQ ID NO: 103490 - protein, 69 aa, Setaria italica
  Transcript Sequence Number=SeqID_37516
  Subcellular localization annotation: CTP_CleavageSite=46; ConfidenceScore=5.72e-01
APPAGGGFAPPDGGFGTPPGFGPPGSFNGSGSFGPSGTLNPYGGARGAMSSGAGLTALSAVAVAVLLVP

SEQ ID NO: 103491 - protein, 390 aa, Setaria italica
  Transcript Sequence Number=SeqID_37517
  Gene Ontology: Mol. function=protein tyrosine kinase activity; Biological process=protein amino acid phosphorylation
  Homolog annotation: Hit_ID=B6SNZ9; Match level="QueryCoverage=99%, HitCoverage=70%, E-value=0.0, Identity=90%"; Hit description =Serine/threonine-protein kinase NAK
  Pfam annotation: Domain name=Pkinase; Domain location=59-329; Score =7.4; E_value=6.2e-09; Accession=PF00069.17; Description=Protein kinase domain
  Pfam annotation: Domain name=Pkinase_Tyr; Domain location=59-329; Score=-18.4; E_value=1.7e-12; Accession=PF07714.9; Description =Protein tyrosine kinase
  Pfam module annotation: Pfam domain module=Pkinase::Pkinase_Tyr; Domain location=59-329::59-329
LPSPEGHSLRNFGSFKASNVSGPLEISGPLPLPLEKYIGLRIFSYEEVSSACQWFSSDQCVSETLGSTSYKATFRDDFSGTKTTEATVARLLPSTQSLKEFKTQVNTLASLEHPNLCKLIGYYAKEDSNGRMLVYERLHHGSLDKLLFGRPDGRFMDWSKRLKVALGAARGLAFLHDEGPFQAMYSEFSTSNIQIDKDFTAKLSGYGCAGFNTEEISNAPVSAAHLSVETLAKGLLTPKSNVWSFGVVLLELITGRKNLDVSSSKEERNIVKWSRPFLTDDSRLSLIMDSRIKGRFPTKAARIVADIILKCLHNDPSERPTMRDVVEALTGVQEIKVPCRYPLQEPSAAPRKRMLKSTSLNGIVPQHPVITFSPSPPSHNQPLISPRSFF

SEQ ID NO: 103492 - protein, 62 aa, Setaria italica
  Transcript Sequence Number=SeqID_37518
PEFLTEQPRSKVCWQWRQGQCLTDITLAAGKRLWVEFLRLDQLFSRKKLMKPVTLHSPSGDR

SEQ ID NO: 103493 - protein, 163 aa, Setaria italica
  Transcript Sequence Number=SeqID_37519
  Gene Ontology: Mol. function=protein binding; Biological process =apoptosis
  Homolog annotation: Hit_ID=B9R9G5; Match level="QueryCoverage=84%, HitCoverage=38%, E-value=2e-32, Identity=51%"; Hit description =Protein binding protein, putative
QQLTYKGRARGNTEYLDACGVKNKSKMVLAEDPASLERRYIERQKNAKIESANRAIGAIALEVDKLADQVTSIEKSISRGNKVAEVQITTLIELLMRHAVKLESIPAVGDSSSQRNIQAKRVQKCVETLDVLKVSNARLQAVVVTTKWETFDAPATTQWELFD

SEQ ID NO: 103494 - protein, 80 aa, Setaria italica
  Transcript Sequence Number=SeqID_37520
  Gene Ontology: Cellular component=integral to membrane; Biological process=response to stress
  Homolog annotation: Hit_ID=Q5JM42; Match level="QueryCoverage=60%, HitCoverage=30%, E-value=3e-19, Identity=91%"; Hit description =Abscisic acid-induced protein-like
  Pfam annotation: Domain name=TB2_DP1_HVA22; Domain location=36-80; Score=-17.0; E_value=0.016; Accession=PF03134.11; Description=TB2DP1, HVA22 family
GDQEHPDRLLASRNRSTRRRQETIQHTARRRTMGVLGALARNLDALVGPGVMLLYPLYASMRAIESPSSLDDQQWLTYWV

SEQ ID NO: 103495 - protein, 287 aa, Setaria italica
  Transcript Sequence Number=SeqID_37521
  Pfam annotation: Domain name=AT_hook; Domain location=107-119; Score =11.7; E_value=0.25; Accession=PF02178.11; Description=AT hook motif
  Pfam annotation: Domain name=AT_hook; Domain location=169-181; Score =9.9; E_value=0.52; Accession=PF02178.11; Description=AT hook motif
  Pfam annotation: Domain name=AT_hook; Domain location=210-222; Score =10.4; E_value=0.42; Accession=PF02178.11; Description=AT hook motif
  Pfam annotation: Domain name=AT_hook; Domain location=251-263; Score =7.7; E_value=1.2; Accession=PF02178.11; Description=AT hook motif
  Pfam module annotation: Pfam domain module=AT_hook::AT_hook::AT _hook::AT_hook; Domain location=107-119::169-181::210-222::251-263
  Subcellular localization annotation: CTP_CleavageSite=62; ConfidenceScore=5.33e-01
DTVLDAQPLRTLTPMFPAPLGLHTFTPQNSPSFICVTPFGPYAGGTELGTAAVPSTFAASTPAAEPSQTQLHTANMNGAAQANGTAVNSLVPPLQTPLSAGMQESGKRKRGRPKRVPDAAGPSAPSASSTPLAPTVPPVTSFPLVPSAPQESDNVVSLTPSATPQESGKRKRGRPKRVQDVPVQGPPAPQADSTPVVQALPGPTVHESGTRKRGRPKRLQDSSDIITPSIHSKDSVPPFQTPATTSPESGKRKRGRPKRILDGSVTPSSHSGYSMDDGAVDTTKRGR

SEQ ID NO: 103496 - protein, 56 aa, Setaria italica
  Transcript Sequence Number=SeqID_37522
MGDGAGDLAASGGPRRHHRHHPLHHLPLIADAGRGGAHTMSRLQRRRRHPFIIIRT

SEQ ID NO: 103497 - protein, 156 aa, Setaria italica
  misc_feature (145)..(145): Xaa can be any naturally occurring amino acid
  Transcript Sequence Number=SeqID_37523
  Gene Ontology: Mol. function=nucleoside-triphosphatase activity; Cellular component=integral to membrane; Biological process=transport
  Homolog annotation: Hit_ID=B6SWA8; Match level="QueryCoverage=98%, HitCoverage=26%, E-value=1e-63, Identity=80%"; Hit description =ATPase, coupled to transmembrane movement of substances
  Pfam annotation: Domain name=ABC_tran; Domain location=1-89; Score= -28.1; E_value=0.00055; Accession=PF00005.19; Description=ABC transporter
LRHVAASRVADVSGGERRRVSIGMDLVHDPAVLLLDEPTSGLDSGSALHIVKMLRDMAAAHGKTVVLTIHQPGFRILELIDRVVLLADGAVRHHGSLDFLQSRLIATGHAIPAHVNVLEYAMETIDSLKPDVAVATTITTASANXENNVAPVGPGL

SEQ ID NO: 103498 - protein, 103 aa, Setaria italica
  Transcript Sequence Number=SeqID_37524
  Subcellular localization annotation: CTP_CleavageSite=67; ConfidenceScore=5.13e-01
AIKIAASSLSTRKASLRWNADTLSIVISSPQQSGAGGAKSSDNIYDNPEVSEKMPSQLRTRSDSSVRVTANPNRIATLDALRSTSMRSHEQDSSKSKRQNLIQ

SEQ ID NO: 103499 - protein, 72 aa, Setaria italica
  Transcript Sequence Number=SeqID_37525
  Gene Ontology: Mol. function=triacylglycerol lipase activity; Biological process=lipid metabolic process
  Homolog annotation: Hit_ID=B9RIW9; Match level="QueryCoverage=91%, HitCoverage=14%, E-value=4e-26, Identity=78%"; Hit description =Calmodulin-binding heat-shock protein, putative
  Pfam annotation: Domain name=Lipase3_N; Domain location=14-72; Score =58.1; E_value=3.3e-14; Accession=PF03893.8; Description=Lipase 3 N -terminal region
RSTNLMSIACCLPVVECVYCLACARWTWQRCLHSGGYDSETWGIASAAEFEPVPRLCRLILSVYEDDLENPQ

SEQ ID NO: 103500 - protein, 357 aa, Setaria italica
  misc_feature (347)..(347): Xaa can be any naturally occurring amino acid
  Transcript Sequence Number=SeqID_37526
  Pfam annotation: Domain name=DUF295; Domain location=265-324; Score =22.9; E_value=0.0013; Accession=PF03478.10; Description=Protein of unknown function (DUF295)
MAAMGWSDLPPELLTDIAGGITELADIARFRSVCSSWRSAAGDAAAAPPPQPPWLLLPSSPSRLFFCPREDRIYPDLRLPRPAAEAHHRRRRLYASPHGWALAVDPTDLAASLVHPFNGATRPLPPLPAFFKETDDLAWDWSPHGVMVSCGEGIHFCASGPPAADSWAPIPALADCNASSINYAGGKFFVFEEDVCRTAIVDAVTLAVAAVIPAPAVELPSEARLAVAGDELFLLVKSKWMYLFGDDVDFSKAFHVNHRGVNPAWQELAGIGDRALFIDSLHGFAVPTAGFGNLESNTIYTVSINEVSNRRPTKVNYSVSAFSLESRSSKKLACRLNGRNMAMRGDXPSWIVPSLIE

SEQ ID NO: 103501 - protein, 402 aa, Setaria italica
  Transcript Sequence Number=SeqID_37527
  Gene Ontology: Mol. function=transferase activity; Cellular component= cytoplasm; Biological process=positive regulation of cell proliferation
  Homolog annotation: Hit_ID=Q69SJ5; Match level="QueryCoverage=89%, HitCoverage=53%, E-value=0.0, Identity=86%"; Hit description=NatC N(Alpha)-terminal acetyltransferase, Mak10 subunit-like
  Pfam annotation: Domain name=Mak10; Domain location=42-196; Score =268.4; E_value=1.6e-77; Accession=PF04112.5; Description=Mak10 subunit, NatC N(alpha)-terminal acetyltransferase
  Subcellular localization annotation: CTP_CleavageSite=8; ConfidenceScore=5.16e-01
MEASSSSSAAAAPPPPSIPTSSGQGVWADASPLLAAACRDLQDGELVHGENFSLFAAMSALEIMDPKMDSGIERSGYNSIEEAIEDGVAPLPLSLDRTLDVQRSIDVMDHLFSCEATWHKGHPLAQTVFTCLYLMRMERTSSHAVLHSFCRILRATCNAVISVVSTARTHEEEDIFTMSFGLPLRDEGDDKCLSILNSVEETISRQLRACKAQALSKKKTLEDLESLQDNPDLEEDYCRALLCRLRFRKHFYHVVMSMKKPHGRGLELARKHVASCLNELSLMLKSREFLKSQSNITLQDDENCTTASGCRPVGFDVSLNSRLLSPTPPRAVKVLSWSNAIRYFEKLLNDLDVICALSLDPVLENVLHYIVQFQKSVPDLVPRAFLQTLLVQDGKLFNGTKT

SEQ ID NO: 103502 - protein, 244 aa, Setaria italica
  Transcript Sequence Number=SeqID_37528
  Gene Ontology: Mol. function=nucleic acid binding
  Homolog annotation: Hit_ID=B6TEB9; Match level="QueryCoverage=99%, HitCoverage=73%, E-value=1e-104, Identity=77%"; Hit description=RING finger protein 113A
  Pfam annotation: Domain name=zf-C3HC4; Domain location=179-216; Score= 28.6; E_value=2.5e-05; Accession=PF00097.17; Description=Zinc finger, C3HC4 type (RING finger)
  Pfam annotation: Domain name=zf-CCCH; Domain location=102-128; Score =43.7; E_value=7.2e-10; Accession=PF00642.16; Description=Zinc finger C-x8-C-x5-C-x3-H type (and similar)
  Pfam module annotation: Pfam domain module=zf-C3HC4::zf-CCCH; Domain location=179-216::102-128
PIQSTDSRATATLETETEFDRDARAIRERQLKQAEEALKKNPSGAASASASGAGEVYKGIHGYTDHKAGFRREHTVSSEKAGGSHGPLRASAHIRLSARFDYQPDICKDYKETGYCGYGDSCKFMHDRGDYKSGWQMEKEWEEAEKARKRRIAMGGGGSDDEAAEDEDDDDEEALPFACFICRQPFVDPVVTKCKHYFCEHCALKHHSKNKKCFVCNKATLGIFNAAQEIRKKMAQDKKQQQEQ

SEQ ID NO: 103503 - protein, 527 aa, Setaria italica
  Transcript Sequence Number=SeqID_37529
  Gene Ontology: Mol. function=histone-lysine N-methyltransferase activity; Cellular component=nucleus; Biological process=chromatin modification
  Homolog annotation: Hit_ID=Q8LPU2; Match level="QueryCoverage=96%, HitCoverage=76%, E-value=0.0, Identity=59%"; Hit description=SET domain protein 105
  Pfam annotation: Domain name=Pre-SET; Domain location=247-347; Score =160.1; E_value=6.5e-45; Accession=PF05033.8; Description=Pre-SET motif
  Pfam annotation: Domain name=SET; Domain location=349-502; Score =186.0; E_value=1.1e-52; Accession=PF00856.20; Description=SET domain
  Pfam annotation: Domain name=YDG_SRA; Domain location=70-220; Score =321.3; E_value=1.9e-93; Accession=PF02182.9; Description=YDGSRA domain
  Pfam module annotation: Pfam domain module=Pre-SET::SET::YDG_SRA; Domain location=247-347::349-502::70-220
TSSTIGTNLLQLPSLSSEDTRETADNVLMMFDALRRRLVQLDDVKQVAKQQHNLKAGSIMTNAELRVNKIKRIGEIPGVEVGDMFYFRIEMCLVGLNSQSMAGIDYMSAKFGNEEDPVAISVVSAGVYDNSEDDPDVLVYTGQGMSGKDDQKLERGNLALERSLHRGNPIRVIRSVKDLACPTGKIYVYDGLYKIKEAWMEKGKSGFNVFKHKLLREPGQPDGIAVWKKTEKWRENPSSRDHVILLDISYGVESKPICLVNEVDDEKGPTNFTYTTKLTYGNSLSSMRKMQGCKCTSVCLPGDNNCSCMHRNAGDLPYSASGILVSRMPMLYECNDSCTCSQNCRNRVVQKGTQIRFEVFKTGDRGWGLRSWDPIRAGTFICEYAGEIIDRNSGNSEDDFIFETSPSEQNLRWNYAPELLGEPSLSDSNETPKQLPIIISAKRTGNVARFMNHSCSPNVFWQPVLYDHGDEGYPHIAFFAIKHIPPMTELTYDYGQSQGNSQVGSNSGCRKSKSCFCWSRKCRGSFG

SEQ ID NO: 103504 - protein, 107 aa, Setaria italica
  Transcript Sequence Number=SeqID_37530
SYMNDLEEDAAKRSAEEQQQRTAIDAHDADIALVRAQSKQASEEAEQLATARAQVCVEMLEKQGRIATLDVECATLKQTLELLHQEIASTSAKLNEKRYTYILKNIL

SEQ ID NO: 103505 - protein, 57 aa, Setaria italica
  Transcript Sequence Number=SeqID_37531
  Gene Ontology: Mol. function=hydrolase activity; Biological process =lipid catabolic process
  Homolog annotation: Hit_ID=O48723; Match level="QueryCoverage=96%, HitCoverage=13%, E-value=3e-11, Identity=61%"; Hit description =Similar to latex allergen
MAPAAATKKGEELRILCIDGGGIRGLIPAKILEYLEAELQRIDGSTARLADYFDYIV

SEQ ID NO: 103506 - protein, 57 aa, Setaria italica
  Transcript Sequence Number=SeqID_37532
GCMTFQIENAKAGTSDICFNPEAKMSFMFSIVSLSSTVYEVLNRIFFAGILTRNWCA

SEQ ID NO: 103507 - protein, 75 aa, Setaria italica
  misc_feature (18)..(18): Xaa can be any naturally occurring amino acid
  Transcript Sequence Number=SeqID_37533
  Homolog annotation: Hit_ID=B4FBP8; Match level="QueryCoverage=97%, HitCoverage=31%, E-value=7e-22, Identity=75%"; Hit description =Cation transport protein chaC
ANNRDYLFSMEKALASIXSNRRNELRIQFELANEVRKVLNRTKEAKITGSDVSLQSHVPLVHLSALPEGTVVDSR

SEQ ID NO: 103508 - protein, 163 aa, Setaria italica
  misc_feature (48)..(48): Xaa can be any naturally occurring amino acid
  Transcript Sequence Number=SeqID_37534
  Gene Ontology: Mol. function=protein binding; Cellular component =cellular_component; Biological process=biological_process
  Homolog annotation: Hit_ID=B4FBP8; Match level="QueryCoverage=99%, HitCoverage=73%, E-value=5e-84, Identity=90%"; Hit description =Cation transport protein chaC
  Pfam annotation: Domain name=ChaC; Domain location=3-162; Score =206.0; E_value=9.8e-59; Accession=PF04752.4; Description=ChaC-like protein
MVLWVFGYGSLIWNPGFDFDDKILGFIKGYKRTFNLACIDHRGTPEHXARTCTLETDEEAICWGIAYCVKGDTDKEQKAMQYLERRECEYDQKISVDFFKEGDSLKPAVTGVLVFVSTPDPIGNKYYLGPAPLQDMATKGQIATVNGPTGYNRDYLFSMEKGN

SEQ ID NO: 103509 - protein, 135 aa, Setaria italica
  misc_feature (74)..(74): Xaa can be any naturally occurring amino acid
  Transcript Sequence Number=SeqID_37535
  Homolog annotation: Hit_ID=B4FBP8; Match level="QueryCoverage=88%, HitCoverage=54%, E-value=1e-56, Identity=90%"; Hit description =Cation transport protein chaC
  Pfam annotation: Domain name=ChaC; Domain location=3-98; Score=9.5; E_ value=2.1e-09; Accession=PF04752.4; Description=ChaC-like protein
VSFPFPNSHFPLLKCQEGDSLKPAVTGVLVFVSTPDPIGNKYYLGPAPLQDMARQIATANGPTGYNRDYLFSMXEKALASIIHEDDSIIELANEVRKVLNRTKEAKITGSDVSLQSHVPLVHLSALPEGTVVDSR

SEQ ID NO: 103510 - protein, 218 aa, Setaria italica
  Transcript Sequence Number=SeqID_37536
  Gene Ontology: Mol. function=protein binding; Cellular component =cellular_component; Biological process=biological_process
  Homolog annotation: Hit_ID=B4FBP8; Match level="QueryCoverage=100%, HitCoverage=100%, E-value=1e-118, Identity=92%"; Hit description =Cation transport protein chaC
  Pfam annotation: Domain name=ChaC; Domain location=3-181; Score =297.9; E_value=2.2e-86; Accession=PF04752.4; Description=ChaC-like protein
MVLWVFGYGSLIWNPGFDFDDKILGFIKGYKRTFNLACIDHRGTPEHPARTCTLETDEEAICWGIAYCVKGDTDKEQKAMQYLERRECEYDQKISVDFFKEGDSLKPAVTGVLVFVSTPDPIGNKYYLGPAPLQDMARQIATANGPTGYNRDYLFSMEKALASIIHEDDSIIELANEVRKVLNRTKEAKITGSDVSLQSHVPLVHLSALPEGTVVDSR

SEQ ID NO: 103511 - protein, 164 aa, Setaria italica
  Transcript Sequence Number=SeqID_37537
  Gene Ontology: Mol. function=serine-type endopeptidase activity; Biological process=negative regulation of catalytic activity
  Homolog annotation: Hit_ID=B9RBX7; Match level="QueryCoverage=73%, HitCoverage=16%, E-value=3e-22, Identity=46%"; Hit description=Xylem serine proteinase 1, putative
  Pfam annotation: Domain name=Inhibitor_I9; Domain location=48-123; Score=32.0; E_value=2.4e-06; Accession=PF05922.8; Description =Peptidase inhibitor I9
MGSFKLSLLRILLIPFLLAPIVAEDLTTAGDGVLPTLIELPTGDDELQTFIVHVQPAENRVFGTADDRTAWYQSFLPEDGRLLHAYHHVASGFAARLTRRELDAMSAIPGFLWAHPSEVYELLTTYTPRFLGLDTPQGDGGGNHSALGFGDGVIIGVPDSGVSP

SEQ ID NO: 103512 - protein, 89 aa, Setaria italica
  misc_feature (1)..(1): Xaa can be any naturally occurring amino acid
  Transcript Sequence Number=SeqID_37538
  Subcellular localization annotation: CTP_CleavageSite=29; ConfidenceScore=5.23e-01
XGPPCSFRRLTCARPIHAHHSSSPAPATSAGAEGPGPSISGGIRSPRSPSAGSALAGRLPGGWRWRRRWGAAAQAHGGPRRCRPIGIPV

SEQ ID NO: 103513 - protein, 227 aa, Setaria italica
  misc_feature (175)..(175): Xaa can be any naturally occurring amino acid
  Transcript Sequence Number=SeqID_37539
  Gene Ontology: Mol. function=GTP binding; Cellular component =intracellular
  Homolog annotation: Hit_ID=B4FR01; Match level="QueryCoverage=99%, HitCoverage=73%, E-value=1e-121, Identity=93%"; Hit description=GTP -binding protein
  Pfam annotation: Domain name=GTP_EFTU; Domain location=42-220; Score=- 80.7; E_value=0.0048; Accession=PF00009.19; Description=Elongation factor Tu GTP binding domain
  Pfam annotation: Domain name=MMR_HSR1; Domain location=45-166; Score =110.0; E_value=7.7e-30; Accession=PF01926.15; Description=GTPase of unknown function
  Pfam annotation: Domain name=Miro; Domain location=46-166; Score= -8.4; E_value=0.067; Accession=PF08477.5; Description=Miro-like protein
  Pfam module annotation: Pfam domain module=GTP_EFTU::MMR_HSR1::Miro; Domain location=42-220::45-166::46-166
AVTADMVIPGSNIVVGPYAGDARVKEAEFVRSSARARDCPKDDRPEFAVLGRSNVGKSSLINALTRRKEAALTSKKPGKTQTINHFLVNKSWYLVDLPGYGFAAASQSARMDWSSFTKGYFLNRDTLVSVLLLIDASIPPQKIDLDCANWLGRNNIGLTFVFTKCDKVKKGKGGXPDENIKVFQETISGLYPEPPPWIMTSSVTGLGRDGLLLHMSQLRNYWDNEAV

SEQ ID NO: 103514 - protein, 239 aa, Setaria italica
  Transcript Sequence Number=SeqID_37540
  Gene Ontology: Cellular component=integral to membrane; Biological process=vesicle-mediated transport
  Homolog annotation: Hit_ID=B9RPU0; Match level="QueryCoverage=100%, HitCoverage=100%, E-value=6e-96, Identity=71%"; Hit description =Vesicle-associated membrane protein, putative
  Pfam annotation: Domain name=Synaptobrevin; Domain location=147-235; Score=116.5; E_value=8.9e-32; Accession=PF00957.13; Description =Synaptobrevin
  Subcellular localization annotation: CTP_CleavageSite=68; ConfidenceScore=5.30e-01
MNKQALIYSFVAKGSVVLAEHTAFSGNFSTVAVQCLQKLPPNSTRSTYSCDGHTFNFLVDRGFVFLVVADEATGRSVPFVFLERVREDFMQRYGSSIDEEGQHPLADDAEEDDFLFEDRFSIAYNLDREFGPRLKDHMQYCVNHPEEINKLSKVKAHLSEVKGIMMDNIEKILDRGEKIELLVGKTETLQSQADSFHRHGRELRRKMWLQNLRFKLMVGGAIAALILILWLMVCRGFKC

SEQ ID NO: 103515 - protein, 60 aa, Setaria italica
  Transcript Sequence Number=SeqID_37541
CLFQDTTNYSFMLMLHTKLFFLVQFVPFLTVIERYVRALCPEYWRALLEVKTVLKAGRMT

SEQ ID NO: 103516 - protein, 66 aa, Setaria italica
  Transcript Sequence Number=SeqID_37542
QDRCYIIVYTTYILDTEVLTRSWKQRKYRTADSIIDLTRAKSNTQTYNRTTTMKYFNTCKIHLIIL

SEQ ID NO: 103517 - protein, 121 aa, Setaria italica
  Transcript Sequence Number=SeqID_37543
  Gene Ontology: Mol. function=signal transducer activity; Biological process=response to light stimulus
  Homolog annotation: Hit_ID=B9S8R5; Match level="QueryCoverage=62%, HitCoverage=11%, E-value=2e-15, Identity=52%"; Hit description =Protein binding protein, putative
QANAGPYARTIMANEGGAAGSGEEGGGDSDGGGTWRVATRGNQMLRLDMDSMRSRVQELERECTSMRKAIEKMDGRGAAADGRWGSMVTKRFGCKFPAQVFQSQQRTVVARPLRPRIEQSP

SEQ ID NO: 103518 - protein, 76 aa, Setaria italica
  Transcript Sequence Number=SeqID_37544
  Subcellular localization annotation: CTP_CleavageSite=29; ConfidenceScore=5.31e-01
WQQVPSASGDGRRRRGVAGGFGVAHQPSRSATRGRDGAGVSRSWASFVLPDLRAESLLPTASPPRILTGHRRCREC

SEQ ID NO: 103519 - protein, 128 aa, Setaria italica
  misc_feature (88)..(88): Xaa can be any naturally occurring amino acid
  Transcript Sequence Number=SeqID_37545
  Gene Ontology: Mol. function=carbon-nitrogen ligase activity, with glutamine as amido-N-donor; Biological process=translation
  Homolog annotation: Hit_ID=B6U151; Match level="QueryCoverage=96%, HitCoverage=22%, E-value=2e-62, Identity=95%"; Hit description =Glutamyl-tRNA
WLLEGRFSADDLNEVYGESRANGLGHEVKMRILMGTYALSAGYYDAYYKRAQQVRTLVKESFKDALERYDILISPAAPSAAYKIGEKXINDPLAMYAGDIMTVNVNLAGLPALVVPCGFVEGGAAGLP

SEQ ID NO: 103520 - protein, 459 aa, Setaria italica
  misc_feature (340)..(340): Xaa can be any naturally occurring amino acid
  Transcript Sequence Number=SeqID_37546
  Gene Ontology: Mol. function=carbon-nitrogen ligase activity, with glutamine as amido-N-donor; Biological process=translation
  Homolog annotation: Hit_ID=B6U151; Match level="QueryCoverage=96%, HitCoverage=80%, E-value=0.0, Identity=89%"; Hit description =Glutamyl-tRNA
  Pfam annotation: Domain name=Amidase; Domain location=1-436; Score =537.2; E_value=1.9e-158; Accession=PF01425.13; Description=Amidase
AAEREAEELDRRIASGEKDAVGPLAGVLVGVKDNLCTANMPSTGGSRILDGYRPAYDATAVRRLREAGAIVVGKTNLDEFGMGSTTEGSAFQVTTNPWDDARVPGGSSGGSASAVSARQCVVSLGSDTGGSVRQPASFCGVVGLKPTYGRVSRFGLMAYASSLDVVGCFGSSVFDTATILSVVAGHDKMDSTSSSQDVPDYASELVSLDSLESKPLNGVRIGIIQETLGEGVDTGVVSSIKGAASHLERLGSVVEEVSLPSFSLGLPAYYILASSEASSNLSRYDGIRYGRQVSADDLNEVYGESRANGLGHEVKMRILMGTYALSAGYYDAYYKRAQQXYKRVQQVRTLVKESFKDALERYDILISPAAPSAAYKIGEKINDPLAMYAGDIMTVNVNLAGLPALVVPCGFVEGGAAGLPVGLQMIGSPFSEGNLLRVGHIFEQTLQNFSFVPPLLAEH

SEQ ID NO: 103521 - protein, 74 aa, Setaria italica
  Transcript Sequence Number=SeqID_37547
  Gene Ontology: Mol. function=pyridoxal phosphate binding; Biological process=Mo-molybdopterin cofactor biosynthetic process
  Homolog annotation: Hit_ID=Q655R6; Match level="QueryCoverage=83%, HitCoverage=7%, E-value=3e-23, Identity=75%"; Hit description =Molybdenum cofactor sulfurase
  Pfam annotation: Domain name=MOSC; Domain location=9-73; Score=-15.2; E_value=0.012; Accession=PF03473.9; Description=MOSC domain
PCYDNLVVTQIPGNGNGKQRVFVDAMRFRPNIVVSGSTPYNEDNWKRLNIGEAYFTSMGGCNRCQMINLYQSSG

SEQ ID NO: 103522 - protein, 519 aa, Setaria italica
  misc_feature (19)..(19): Xaa can be any naturally occurring amino acid
  misc_feature (507)..(507): Xaa can be any naturally occurring amino acid
  Transcript Sequence Number=SeqID_37548
  Gene Ontology: Mol. function=pyridoxal phosphate binding; Cellular component=cellular_component; Biological process=Mo-molybdopterin cofactor biosynthetic process
  Homolog annotation: Hit_ID=Q655R6; Match level="QueryCoverage=99%, HitCoverage=62%, E-value=0.0, Identity=81%"; Hit description =Molybdenum cofactor sulfurase
  Pfam annotation: Domain name=MOSC; Domain location=398-515; Score =54.3; E_value=4.6e-13; Accession=PF03473.9; Description=MOSC domain
  Pfam annotation: Domain name=MOSC_N; Domain location=261-381; Score =55.7; E_value=1.7e-13; Accession=PF03476.8; Description=MOSC N -terminal beta barrel domain
  Pfam module annotation: Pfam domain module=MOSC::MOSC_N; Domain location=398-515::261-381
FCSFYKIFGYPTGLGALIXKNEAASLLNKTYFSGGTVAASIADIDFVQKRKSIEQVLEDGTISFLSISSLRYGFEIIDMLTISAIARHTASLATYVRKKMMDLKHSNEKNVCIIYGQQASKVKDLKMGPTITFNLKREDGTWFGYREVEKLASLSGIHLRTGCFCNPGACAKYLGLSHSDLVSNFEAGHVCWDDNDIINGKPTGAVRISFGYMSTYEDAEEFLKFLQSSFVSKAVGLTNGYMVNMDIPNFVDDWSQQAISDIRLKSITIYPVKSCQGFSVQGWPLTIGGLKYDREWLLQGSGGEILTQKKVPELSSIRTLIDLELGKLFLESPKRKDKLQISVLENWTHLSAEVDVYGQRYEVQTYGDKVNFWFSDAIGRPCTFMRCLSSKYRSCTINGRRDRLCRDTQSKLSFVNEGQLLLVSEASITDLNSRLSSGNGNGKQRVFVDAMRFRPNIVVSGSTPYNEDNWKRLNIGEAYFTLMGGCNRCQMINLYQSSGQVIKSKDXTGNLASYRRQKG

SEQ ID NO: 103523 - protein, 174 aa, Setaria italica
  Transcript Sequence Number=SeqID_37549
  Gene Ontology: Mol. function=protein binding; Biological process =protein metabolic process
DLAYAAEAWAAASERRRRGGREPGQCYCPVEHAVMEVSSLVSAAGGGSGRGLDRFWLLGSGNSHAYMKCRAGQPSLEAVWELHPVVVPDGSLALSLSCDSDAEQLASQERSRRPWPFVNNGAAAGESEPTSSCAATMTTPSVPPWLHRYQEPDMNRLGNRSTSLQLPDWNPTMD

SEQ ID NO: 103524 - protein, 85 aa, Setaria italica
  Transcript Sequence Number=SeqID_37550
LHEQSSIVNSLRKNWQETVAQCASIREDLIAISDILLPSEEEPHIPLCRHESLGNWSDRWKFSFFRKITHQDHSLSSSEQNKNSA

SEQ ID NO: 103525 - protein, 40 aa, Setaria italica
  Transcript Sequence Number=SeqID_37551
  Gene Ontology: Mol. function=nucleotidyltransferase activity; Biological process=biosynthetic process
  Homolog annotation: Hit_ID=Q9AYG1; Match level="QueryCoverage=85%, HitCoverage=4%, E-value=4e-11, Identity=97%"; Hit description =Putative phospholipid cytidylyltransferase
MDALTSLLGDQLVVGVVSDEEIVANKGPPVLSMEERLTLL

SEQ ID NO: 103526 - protein, 65 aa, Setaria italica
  Transcript Sequence Number=SeqID_37552
  Gene Ontology: Mol. function=nucleotidyltransferase activity; Biological process=biosynthetic process
  Homolog annotation: Hit_ID=Q9AYG1; Match level="QueryCoverage=92%, HitCoverage=8%, E-value=1e-27, Identity=90%"; Hit description =Putative phospholipid cytidylyltransferase
MMGLLAFESHQGLWNSGYYSQLFGIGGVMITIAILMLSTGYFGGIGAPFAPYFWPYLGQVPKKRE

SEQ ID NO: 103527 - protein, 424 aa, Setaria italica
  Transcript Sequence Number=SeqID_37553
  Gene Ontology: Mol. function=nucleotidyltransferase activity; Cellular component=phagocytic vesicle; Biological process =biosynthetic process
  Homolog annotation: Hit_ID=Q9AYG1; Match level="QueryCoverage=93%, HitCoverage=52%, E-value=0.0, Identity=79%"; Hit description =Putative phospholipid cytidylyltransferase
  Pfam annotation: Domain name=CTP_transf_2; Domain location=264-396; Score=50.0; E_value=9.1e-12; Accession=PF01467.18; Description =Cytidylyltransferase
  Pfam annotation: Domain name=CTP_transf_2; Domain location=73-203; Score=91.3; E_value=3.4e-24; Accession=PF01467.18; Description =Cytidylyltransferase
  Pfam module annotation: Pfam domain module=CTP_transf_2::CTP_transf _2; Domain location=264-396::73-203
MMGLLAFESHQGLWNSGYYSQLFGIGGVMITIAILMLSTGYFGGIGAPFAPYFWPYLGQVPKKRERKRPVRVYMDGCFDLMHYGHANALRQAKLLGDQLVVGVVSDEEIVANKGPPVLSMEERLTLVSGLKWVDEVIPNAPYEITEEFMNTLFNKYSIDYIIHGDDPCLLPDGTDAYALAKKVGRYKQIKRTEGVSSTDIVGRILLTFKQKDADTDFNIDVDEKAGAKPNDEVKSHLSHFLPTSRRIMQFSNGQAPSPGARVVYIDGAFDLFHAGHVEILRSARQLGDFLLVGVHDDQSIRDRRGYCPIMHLHERTLSVLACRYVDEVIIGAPWEVSKDMITTFNISLVVHGTVAEGNPAGEIDPYAVPKSMGIFKTITSPKSITSVSVATRIVDNHEAYKKRNLKKKASEDRYYTQKKFVSGD

SEQ ID NO: 103528 - protein, 107 aa, Setaria italica
  Transcript Sequence Number=SeqID_37554
  Gene Ontology: Mol. function=sequence-specific DNA binding; Cellular component=nucleus; Biological process=regulation of transcription, DNA-dependent
  Homolog annotation: Hit_ID=A6MD10; Match level="QueryCoverage=85%, HitCoverage=11%, E-value=3e-30, Identity=74%"; Hit description =Homeodomain transcription factor
CISQLAFTKYTVTLQATSGNQNNMLILQETCTDSSGSLVVYAPVDVQSMHVVMNGGDSAYVSLLPSGFAILPDGHSQPSSNTAQGSPNSQSSTVGSNSAGSLVTVAF

SEQ ID NO: 103529 - protein, 283 aa, Setaria italica
  Transcript Sequence Number=SeqID_37555
  Gene Ontology: Mol. function=sequence-specific DNA binding; Cellular component=nucleus; Biological process=regulation of transcription, DNA-dependent
  Homolog annotation: Hit_ID=Q9LEE8; Match level="QueryCoverage=100%, HitCoverage=33%, E-value=1e-131, Identity=85%"; Hit description=OCL3 protein
CSNSLPARDHAAITPVGRRSMLKLAQRMTDNFCAGVCASAAQKWRRLDEWRGEGGGAAGNGAAGEGEKKVRMMARQSVGAPGEPPGVVLSATTSVRLPSTPPQRVFDYLRDEQRRGEWDILANGEAMQEMDHIAKGQHHGNAVSLLRPNATSGNQNNMLILQETCTDSSGSLVVYAPVDVQSMHVVMNGGDSAYVSLLPSGFAILPDGHSQPSSNTAQGSPNSQSSTVGSNSAGSLVTVAFQILVNNLPTAKLTVESVETVSNLLSCTIQKIKSALQASIVTP

SEQ ID NO: 103530 - protein, 63 aa, Setaria italica
  Transcript Sequence Number=SeqID_37556
LAHLDEQTNMPSNMLHAASTERKQVAINHNHAFIVPYRSRDKFYKSTKQRVSQLIQHGTSLVL

SEQ ID NO: 103531 - protein, 62 aa, Setaria italica
  Transcript Sequence Number=SeqID_37557
GLPSSGFFLGEGGGQVFCLCSGIERLRFPFFYPKTPTKVPSWNRISRENSSESLSEEISAVA

SEQ ID NO: 103532 - protein, 78 aa, Setaria italica
  Transcript Sequence Number=SeqID_37558
PTTTTLLPNKVVEATAAKTSSRIGAKDDWSEEFKRFQRKQYMIRIGSGVAAFSILGISGKYTLYLLETGQLPKVRRRK

SEQ ID NO: 103533 - protein, 340 aa, Setaria italica
  misc_feature (22)..(22): Xaa can be any naturally occurring amino acid
  Transcript Sequence Number=SeqID_37559
  Gene Ontology: Mol. function=hydrolase activity; Cellular component =integral to membrane; Biological process=lipid catabolic process
  Homolog annotation: Hit_ID=Q94DR5; Match level="QueryCoverage=77%, HitCoverage=25%, E-value=1e-126, Identity=79%"; Hit description =P0460E08.35 protein
YDMTGRVLGITVCSPRKMSHPXCLNYLTAPHVVIWSAVTASCAFPGLFEAQELMAKDRFGNIVPFHAPFSTDPEQGPGASKRRWRDGSLEMDLPMMRLKELFNVNHFIVSQTNPHISPLLRMKELVRAYGGRFAGKLARLAEMEVKYRCNQILELGLPMGGLAKLFAQDWEGDVTMVMPATVAQYLKIIQNPTYAELQMAANQGRRCTWEKLSAIRANCAIELALDESIAVLNHKRRLKRSIERTAASQGHSNYVRLKTPRRVPSWNRISRENSSESLSEEISAVATSSTQQGTVLVVGTPPSESLSEEISAVATSSTQQGTVLVVGTPNISSPRSVQFS

SEQ ID NO: 103534 - protein, 123 aa, Setaria italica
  Transcript Sequence Number=SeqID_37560
YSIIISMRVQPRQQTAQVQQIFLCAGPDSLPTLATCASRLRLLEPRPGDKTKGIARQPHYEPPLAKKEARRTQTLAAGARLAPHAVLPQIRPIRRHHGAAFSRRQAEDPPCFGGGLSHLLPQV

SEQ ID NO: 103535 - protein, 137 aa, Setaria italica
  Transcript Sequence Number=SeqID_37561
  Gene Ontology: Mol. function=unfolded protein binding; Cellular component=cytoplasm; Biological process=response to stress
  Homolog annotation: Hit_ID=Q08277; Match level="QueryCoverage=100%, HitCoverage=19%, E-value=2e-62, Identity=86%"; Hit description=Heat shock protein 82
  Pfam annotation: Domain name=HSP90; Domain location=1-137; Score= -233.9; E_value=3.4e-06; Accession=PF00183.10; Description=Hsp90 protein
RIVDSPCCLVTGEYGWTANMERIMKAQALRDSSMSAYMASKKTMEINPDNGIMEELRKRAEADRNDKSVKDLVMLLFETALLTSGFSLDDPNTFAARIHRMLKLGLNIDEEAAPEDDADMPALDEGAAEESKMEEVD

SEQ ID NO: 103536 - protein, 113 aa, Setaria italica
  Transcript Sequence Number=SeqID_37562
  Gene Ontology: Mol. function=protein serine/threonine kinase activity; Cellular component=cell surface; Biological process =protein amino acid phosphorylation
  Homolog annotation: Hit_ID=Q5NB60; Match level="QueryCoverage=92%, HitCoverage=13%, E-value=4e-28, Identity=54%"; Hit description =Putative S-domain receptor-like protein kinase
LYLRNCKGRKELTKRLKSGSHRYFPLYAAAQVNEGNVLLLLDSRLEGNGNVKELDITCRVACWCIQDEENDRPSMGQVVRMLEGVVNTEIPPIPSSFQNLMEGENSCIYSDEG

SEQ ID NO: 103537 - protein, 166 aa, Setaria italica
  misc_feature (24)..(24): Xaa can be any naturally occurring amino acid
  Transcript Sequence Number=SeqID_37563
  Gene Ontology: Mol. function=diacylglycerol kinase activity; Cellular component=plasma membrane; Biological process=activation of protein kinase C activity
  Homolog annotation: Hit_ID=B9SIF7; Match level="QueryCoverage=99%, HitCoverage=31%, E-value=6e-72, Identity=76%"; Hit description =Diacylglycerol kinase, alpha, putative
  Pfam annotation: Domain name=DAGK_acc; Domain location=20-166; Score=- 16.8; E_value=9.6e-06; Accession=PF00609.11; Description =Diacylglycerol kinase accessory domain
PKTDPQDMEYSYTYRGGFWNYFSXGMDAQVSYAFHSERKLHPEKFQNQLSNQKTYLKLACTQGWFCASLFHPMSRNIACLSKVKIMKKSGKWETLEIPQSIRSIVCLNLPSFSGGLNPWGTPSKRKQRKRDLVMPPLVDDGLLEIVGFKDAWHGLVLLSPKGHGTR

SEQ ID NO: 103538 - protein, 232 aa, Setaria italica
  Transcript Sequence Number=SeqID_37564
  Gene Ontology: Mol. function=polyubiquitin binding; Cellular component=cytosol; Biological process=protein modification process
  Homolog annotation: Hit_ID=B9T2N7; Match level="QueryCoverage=60%, HitCoverage=19%, E-value=6e-38, Identity=61%"; Hit description =Scythe/bat3, putative
  Pfam annotation: Domain name=ubiquitin; Domain location=106-174; Score=67.2; E_value=6.2e-17; Accession=PF00240.15; Description =Ubiquitin family
  Subcellular localization annotation: CTP_CleavageSite=21; ConfidenceScore=5.23e-01
RSRGGRAPSSPSKQASSSLPPARIGGEALLSRLVRGDPHLHASEGSPGTPPRAFLSHRPLLVPLRLASSAAGSRFSLPKEIMESTSDVQMQHCAEDSETTIEIKIKTLDSQTYNLRVNKCVPVPLLKEKIATVTGILSEQQRLICRGRVLKDDELLSAYHVEDGHTLHLVVRQPGQSAPSGSAGTEANASNSGRRRGPTVARSVVLEAVNVDPGSSELPAFVAQILQSVLGS

SEQ ID NO: 103539 - protein, 651 aa, Setaria italica
  Transcript Sequence Number=SeqID_37565
  Gene Ontology: Biological process=protein modification process
  Homolog annotation: Hit_ID=B9T2N7; Match level="QueryCoverage=99%, HitCoverage=94%, E-value=1e-69, Identity=32%"; Hit description =Scythe/bat3, putative
  Pfam annotation: Domain name=ubiquitin; Domain location=2-57; Score =40.3; E_value=7.8e-09; Accession=PF00240.15; Description=Ubiquitin family
LKCVPVPLLKEKIATVTGILSEQQRLICRGRVLKDDELLSAYHVEDGHTLHLVVRQPGQSAPSGSAGTEANASNSGRRRGPTVARSVVLEAVNVDPGSSELPAFVAQILQSVLGSISAQSSGAPASSDTRPSEPTQSSIPNTVRVELDQQQTPLLFQSEPAHGSSQPNVIPDALTTMSQYIDFMRDSFRREGFNHNGQAEGNVENRTAGSTSVGGTQNQEIQPESTSTLGLHTASLLAETMHSTRQIVVEQAGALLSQLSAQLGDLQNITDPATRRDLQSSAFRSGSLLQNLGSLLLELGRTTMLLRINPASSEAVVNSGPALYISPSGPNPLMVQPVPFFPGRSVQMGTLFSGLGSQGSVLHPRDVDIHVRTGGSVPVASTNPSETAGAQANRTGEASHANIGEASAGVAGGTPFSVESGVRLLPLRTVVAMPAGISRAPSGSSSGGVGIIYPLITRVRQRANTIGNDERNGQSPNEPARSSTHPNQQSIPQSSQAHEAGNLESVADVNVGNGSETSPGQQNGLVTLSQIMDLLGSMLPGENVRGNSSSQQAPTSSAEQVDGRNSATTQVSGASEEALHFASMVRQIMPFISQVETQNQSAPPDTSSTHAQAASGSANRARDDPRDSTSSHQHNRDQIDEPNSKRQRFSD

SEQ ID NO: 103540 - protein, 117 aa, Setaria italica
  misc_feature (7)..(7): Xaa can be any naturally occurring amino acid
  misc_feature (61)..(61): Xaa can be any naturally occurring amino acid
  Transcript Sequence Number=SeqID_37566
  Gene Ontology: Mol. function=aspartic-type endopeptidase activity; Cellular component=chromatin; Biological process=DNA integration
  Homolog annotation: Hit_ID=Q10F54; Match level="QueryCoverage=94%, HitCoverage=4%, E-value=1e-33, Identity=62%"; Hit description =Retrotransposon protein, putative, Ty1-copia subclass
ARVGSDXARKSTLQKLRQEWDRLAFKPGEDVDDFTIRLSSLMQWLERYGDNEINEEKAVAXFLCVVPKKYSQLAISIETLFDLSALSIEELTGRLKVVDDRDEPSSGVTIGWLAAPH

SEQ ID NO: 103541 - protein, 86 aa, Setaria italica
  misc_feature (80)..(80): Xaa can be any naturally occurring amino acid
  misc_feature (82)..(82): Xaa can be any naturally occurring amino acid
  Transcript Sequence Number=SeqID_37567
IGGARGINSLLMQSNFRIQFWHVKQRINQKFDVYQVTPMQNDVTYSVIWIGRSHIEIILHRNAFLPEGMNLFLPTKKNKXKXKQKL

SEQ ID NO: 103542 - protein, 49 aa, Setaria italica
  Transcript Sequence Number=SeqID_37568
AHTIELEVEEDEKEHSTHTRNSLLLLNCLSCSCSSTLYRAQVKVEYTKL

SEQ ID NO: 103543 - protein, 73 aa, Setaria italica
  Transcript Sequence Number=SeqID_37569
  Gene Ontology: Mol. function=transferase activity; Cellular component= integral to membrane
  Homolog annotation: Hit_ID=Q2R2S1; Match level="QueryCoverage=89%, HitCoverage=11%, E-value=1e-27, Identity=87%"; Hit description =Ankryin repeat S-palmitoyl transferase, putative, expressed
RVYFTYFLQIAWNITTNEQANKSRYAYLRGPDGRFRNPYSRGCQRNCTDFLVNGYTNDEEIAWPTLQQTVQRS

SEQ ID NO: 103544 - protein, 60 aa, Setaria italica
  Transcript Sequence Number=SeqID_37570
  Subcellular localization annotation: CTP_CleavageSite=37; ConfidenceScore=5.06e-01
RGTYLVHNPSHTPSYRFLDTVVDHRIVWFRRLFAGVCSMFSFSWSQLASTGHFSTTNGPC

SEQ ID NO: 103545 - protein, 224 aa, Setaria italica
  Transcript Sequence Number=SeqID_37571
  Gene Ontology: Mol. function=5-formyltetrahydrofolate cyclo-ligase activity; Biological process=folic acid and derivative biosynthetic process
  Homolog annotation: Hit_ID=B6U451; Match level="QueryCoverage=94%, HitCoverage=59%, E-value=1e-114, Identity=94%"; Hit description=5 -formyltetrahydrofolate cyclo-ligase
  Pfam annotation: Domain name=5-FTHF_cyc-lig; Domain location=1-153; Score=77.1; E_value=6.6e-20; Accession=PF01812.12; Description=5 -formyltetrahydrofolate cyclo-ligase family
  Subcellular localization annotation: CTP_CleavageSite=19; ConfidenceScore=5.21e-01
FQNSQWVKVNPDSPQKQVRFLTLSGDKKLLTPQPRLRTGFFSVLDSQMIPIGCVPEACTSVGAAKYGRPIGLDERIKVDLIVIGSVAVDPSSGARLGKGEGFAELEYGMLRYMGAIDDSTMIVTTVHDKQLVDDIPVEKLLIHDVPVDIICTPTQVIFTKTTIPKPQGIYWEKLSPEKLGQIRILRELKKRIEQETGTILPCGPSEKLPPTAQRRRRVRQQRRR

SEQ ID NO: 103546 - protein, 203 aa, Setaria italica
  misc_feature (65)..(65): Xaa can be any naturally occurring amino acid
  misc_feature (77)..(77): Xaa can be any naturally occurring amino acid
  misc_feature (190)..(190): Xaa can be any naturally occurring amino acid
  Transcript Sequence Number=SeqID_37572
  Gene Ontology: Mol. function=transferase activity; Cellular component= integral to membrane
  Homolog annotation: Hit_ID=Q2R2S1; Match level="QueryCoverage=100%, HitCoverage=36%, E-value=2e-99, Identity=81%"; Hit description =Ankryin repeat S-palmitoyl transferase, putative, expressed
  Pfam annotation: Domain name=zf-DHHC; Domain location=78-145; Score =67.9; E_value=3.6e-17; Accession=PF01529.12; Description=DHHC zinc finger domain
  Subcellular localization annotation: CTP_CleavageSite=60; ConfidenceScore=5.16e-01
FLFAYLVICLILFLNSIVFAPNFSRITATAGLWSWAAVSLFFASQVQFYRVSRKNPGYIKANTKXRLDSKEPLMEIXLTNSSWTGNWSQLCPTCKIIRPMRSKHCPTCKHCVEQFDHHCPWISNCVGKRNKWDFFVFLCMGIATSFLGAAVGFHRLWTEPVILSSSESWTHFMVTNHPGAVLFMFLDVFXLTGALILTGAQAV

SEQ ID NO: 103547 - protein, 88 aa, Setaria italica
  Transcript Sequence Number=SeqID_37573
  Gene Ontology: Mol. function=nucleoside-triphosphatase activity; Cellular component=microtubule; Biological process=cell division
  Homolog annotation: Hit_ID=Q7XXR9; Match level="QueryCoverage=78%, HitCoverage=17%, E-value=5e-22, Identity=75%"; Hit description =Katanin
MQLFNVNRLCFVEGKSNVFYASAGDSEKLVKVLFELARHHAPSTIFLDEIDAIISQRGEARSEHEASRRLMTELILLIQEFTYSCQGS

SEQ ID NO: 103548 - protein, 385 aa, Setaria italica
  Transcript Sequence Number=SeqID_37574
  Gene Ontology: Mol. function=nucleoside-triphosphatase activity; Cellular component=microtubule
  Homolog annotation: Hit_ID=Q7XXR9; Match level="QueryCoverage=99%, HitCoverage=100%, E-value=0.0, Identity=84%"; Hit description=Katanin
  Pfam annotation: Domain name=AAA; Domain location=136-321; Score =271.6; E_value=1.8e-78; Accession=PF00004.21; Description=ATPase family associated with various cellular activities (AAA)
  Pfam annotation: Domain name=AAA_5; Domain location=136-268; Score= -3.5; E_value=0.0018; Accession=PF07728.6; Description=ATPase family associated with various
  Pfam module annotation: Pfam domain module=AAA::AAA_5; Domain location=136-321::136-268
AMDFKGFWESRFGGKKEPEQNGSANGDANGAAPKRTADLAVYEQFEQQARQTQVRAAAIRDGNADVIQKPLLPPFESAEMRNLAETLLRDIIRGSPDVKWESIKGLENAKRLLKEAVVMPIKYPKYFTGLLSPWKGILLFGPPGTGKTMLAKAVATECKTTFFNISASSIVSKWRGDSEKLVKVLFELARHHAPSTIFLDEIDAIISQRGEARSEHEASRRLKTELLIQMDGLTKTNDLVFVLAATNLPWELDAAMLRRLEKRILVPLPEAEARQAMFEELLPETTSKLEVAYDVLVEKTEGYSGSDIRLVCKEAAMQPLRRLMSVLEASNELVPEEELPEVGPLKPEDIELALRNTRPSAHLHAHRYDKFNQDYGSQVLCSEQA

SEQ ID NO: 103549 - protein, 460 aa, Setaria italica
  misc_feature (6)..(6): Xaa can be any naturally occurring amino acid
  misc_feature (11)..(11): Xaa can be any naturally occurring amino acid
  Transcript Sequence Number=SeqID_37575
  Gene Ontology: Mol. function=transferase activity; Cellular component= integral to membrane; Biological process=positive regulation of I -kappaB kinase/NF-kappaB cascade
  Homolog annotation: Hit_ID=Q2R2S1; Match level="QueryCoverage=100%, HitCoverage=83%, E-value=0.0, Identity=84%"; Hit description=Ankryin repeat S-palmitoyl transferase, putative, expressed
  Pfam annotation: Domain name=Ank; Domain location=114-146; Score =30.0; E_value=9.8e-06; Accession=PF00023.22; Description=Ankyrin repeat
  Pfam annotation: Domain name=Ank; Domain location=14-46; Score=32.2; E_value=2.1e-06; Accession=PF00023.22; Description=Ankyrin repeat
  Pfam annotation: Domain name=Ank; Domain location=47-80; Score=21.8; E_value=0.0029; Accession=PF00023.22; Description=Ankyrin repeat
  Pfam annotation: Domain name=Ank; Domain location=81-113; Score=28.4; E_value=2.8e-05; Accession=PF00023.22; Description=Ankyrin repeat
  Pfam annotation: Domain name=zf-DHHC; Domain location=270-337; Score =67.9; E_value=3.6e-17; Accession=PF01529.12; Description=DHHC zinc finger domain
  Pfam module annotation: Pfam domain module=Ank::Ank::Ank::Ank::zf -DHHC; Domain location=114-146::14-46::47-80::81-113::270-337
LIEHGXDVNAXTNAGQTALHWAAVRGSTSVSDVLMEHGARVEAADVNGYRAVHVAAQYGQTSFLHHIISKYGADFDALDNDGRSALHWAAYKGNADTIRLLLFMDANQVRQDKNGCTPLHWAAIRGNLEVCTVLVHAGTKEELTLNDSGGLTPVQLAAEKGHRHLSNILSNAIKVSFEDKFFPGRSRKIGYAPFLFAYLVICLILFLNSIVFAPNFSRITATAGLWSWAAVSLFFASQVQFYRVSRKNPGYIKANTKRLDSKEPLMEIDLTNSSWTGNWSQLCPTCKIIRPMRSKHCPTCKHCVEQFDHHCPWISNCVGKRNKWDFFVFLCMGIATSFLGAAVGFHRLWTEPVILSSSESWTHFMVTNHPGAVLFMFLDVFLLTGALILTGAQAVQIAWNITTNEQANKSRYAYLRGPDGRFRNPYSRGCQRNCTDFLVNGYTNDEEIAWPTLQQTVQRS

SEQ ID NO: 103550 - protein, 39 aa, Setaria italica
  Transcript Sequence Number=SeqID_37576
MQGEEKRGKVKKGWLAVRVGAEGDEGGFQRFVIPIAYLY

SEQ ID NO: 103551 - protein, 66 aa, Setaria italica
  Transcript Sequence Number=SeqID_37577
  Gene Ontology: Mol. function=metal ion binding; Cellular component =integral to membrane
  Homolog annotation: Hit_ID=B9R8R6; Match level="QueryCoverage=96%, HitCoverage=10%, E-value=3e-17, Identity=70%"; Hit description=Zinc finger protein, putative
  Subcellular localization annotation: CTP_CleavageSite=26; ConfidenceScore=5.12e-01
QSEPPGPSVNDDQQSLASSPMSSAPTAFSGSSFARHYKGAWCTPPRIFIDQDEIIPHLEPGRVPYG

SEQ ID NO: 103552 - protein, 137 aa, Setaria italica
  Transcript Sequence Number=SeqID_37578
  Gene Ontology: Mol. function=protein serine/threonine kinase activity; Biological process=protein amino acid phosphorylation
  Homolog annotation: Hit_ID=Q1EPK4; Match level="QueryCoverage=100%, HitCoverage=27%, E-value=1e-22, Identity=47%"; Hit description =Protein kinase family protein
MGSGDLSSDMKRTVLGLTLWVWIAIGVVALLVAILLMICIWVASRRRTKRTMDSLRQTQIPIYSKEIPVDRVAGRSLAQTMHEREQSSFPPPDKYANREPAGATLGHLALSKSSDHDNMSQGSSVCNVDRAASVHSG

SEQ ID NO: 103553 - protein, 448 aa, Setaria italica
  Transcript Sequence Number=SeqID_37579
  Gene Ontology: Mol. function=protein serine/threonine kinase activity; Cellular component=plasma membrane; Biological process =protein amino acid phosphorylation
  Homolog annotation: Hit_ID=Q1EPK4; Match level="QueryCoverage=96%, HitCoverage=84%, E-value=1e-171, Identity=68%"; Hit description =Protein kinase family protein
  Pfam annotation: Domain name=Pkinase; Domain location=125-396; Score =144.0; E_value=4.6e-40; Accession=PF00069.17; Description=Protein kinase domain
  Pfam annotation: Domain name=Pkinase_Tyr; Domain location=125-396; Score=105.1; E_value=2.4e-28; Accession=PF07714.9; Description =Protein tyrosine kinase
  Pfam module annotation: Pfam domain module=Pkinase::Pkinase_Tyr; Domain location=125-396::125-396
GSIPRSYRCLSGRSLAQTMHEREQSSFPPPDKYANREPAGATLGHLALSKSSDHDNMSQGSSVCNVDRAASVHSGEDGSSGPRRKPNSPAAFVSASPLVGLPEFSHLGWGHWFTQRDLELATNRFSKENVLGEGGYGVVYRGRLVNGTEVAIKKIFNNMGQAEKEFRVEVEAIGHVRHKNLVRLLGYCVEGVNRMLVYEFVNNGNLEQWLHGAMCQRGVFSWENRMKVVTGTAKALAYLHEAIEPKVVHRDIKSSNILIDDEFNGKVSDFGLAKLLGSDKSHITTRVMGTFGYVAPEYANTGMLNEKSDVYSFGVLLLETVTGRGPVDYSRSSNEVNLVEWLKTMVANRRAEEVADPSLEVRPSIRSLKRALLVALRCVDPDSEKRPKMGQVVRMLESEEVPYREDRRNRRSRTGSMDIESIAEGSNSAEFGKKVERTGSATSDRSQP

SEQ ID NO: 103554 - protein, 99 aa, Setaria italica
  Transcript Sequence Number=SeqID_37580
  Gene Ontology: Mol. function=DNA binding; Biological process =regulation of transcription
  Homolog annotation: Hit_ID=B6TX27; Match level="QueryCoverage=83%, HitCoverage=87%, E-value=3e-25, Identity=67%"; Hit description=DNA binding protein
  Pfam annotation: Domain name=Myb_DNA-binding; Domain location=13-62; Score=35.6; E_value=2e-07; Accession=PF00249.23; Description=Myb -like DNA-binding domain
MASLSMTSSASARAQWTKKQNKLFEQALAVYDKDTPDRWHNIARAVGGKSAEEVRRYYELLEEDVKHIESGKVPFPAYRCPGGAGTLGYEADRLRHLKI

SEQ ID NO: 103555 - protein, 62 aa, Setaria italica
  Transcript Sequence Number=SeqID_37581
LPQAASQSKSVIKKSGASRIKEEDRNSGRVVFQSGSDESGNEGNDEISPFVQPSDRNSHSQL

SEQ ID NO: 103556 - protein, 94 aa, Setaria italica
  Transcript Sequence Number=SeqID_37582
  Gene Ontology: Mol. function=electron carrier activity; Cellular component=integral to membrane; Biological process=oxidation reduction
  Homolog annotation: Hit_ID=P93148; Match level="QueryCoverage=98%, HitCoverage=95%, E-value=5e-17, Identity=44%"; Hit description =Cytochrome P450 (Fragment)
PGGAGAGVDPKGQHMQLIPFGSGRRACPGMGLAMVSVPAFLAALVQCFDWAVPIPQGHSKAPPLDMEEAEGLVAARKQPPVLIPTPRFDPLPGV

SEQ ID NO: 103557 - protein, 84 aa, Setaria italica
  misc_feature (34)..(34): Xaa can be any naturally occurring amino acid
  Transcript Sequence Number=SeqID_37583
PNTSFLFWSFGAELAPCGILEWSSSTQSWSHAKXDLRFLTRYINLMLELHHRFHYSPFSRSRFVFLIVYLVIQKIVIGWFSSFD

SEQ ID NO: 103558 - protein, 56 aa, Setaria italica
  Transcript Sequence Number=SeqID_37584
FFFFVTSQKKIQIAQRNQVTPVIHTIFLILDLCIILHFEFSTNQKEMFSPVRICRN

SEQ ID NO: 103559 - protein, 34 aa, Setaria italica
  Transcript Sequence Number=SeqID_37585
PCGCIELKCHGCIYGEKLTLITVLHLCCGCICTP

SEQ ID NO: 103560 - protein, 108 aa, Setaria italica
  misc_feature (85)..(85): Xaa can be any naturally occurring amino acid
  Transcript Sequence Number=SeqID_37586
  Gene Ontology: Mol. function=RNA-directed DNA polymerase activity; Biological process=RNA-dependent DNA replication
  Homolog annotation: Hit_ID=B5G4Y0; Match level="QueryCoverage=95%, HitCoverage=5%, E-value=7e-41, Identity=73%"; Hit description =Putative gag-pol polyprotein
  Pfam annotation: Domain name=zf-H2C2; Domain location=59-97; Score =6.7; E_value=0.054; Accession=PF09337.2; Description=His(2)-Cys(2) zinc finger
SQYVHDADFKVMLSAHCIHGKPWGKFHIQDGFLFRANKLCVPASSVRRLLLQEAHGGGLMGHFGVYKTHEVLAAHFFWPRMRADXVERLVARCTTCQKAKSRLNNLLV

SEQ ID NO: 103561 - protein, 67 aa, Setaria italica
  Transcript Sequence Number=SeqID_37587
  Gene Ontology: Mol. function=hydrolase activity, acting on carbon -nitrogen (but not peptide) bonds; Cellular component=cytoplasm; Biological process=nitrogen compound metabolic process
  Homolog annotation: Hit_ID=B9A9C8; Match level="QueryCoverage=59%, HitCoverage=4%, E-value=3e-15, Identity=87%"; Hit description=Urease
SDPVRHWLSISSISISIKGLTDPTYFGQVGKLADLVLWKPSFFGAKPELVVKGGTIAWANMGDPNAS

SEQ ID NO: 103562 - protein, 715 aa, Setaria italica
  Transcript Sequence Number=SeqID_37588
  Gene Ontology: Mol. function=hydrolase activity, acting on carbon -nitrogen (but not peptide) bonds; Cellular component=cytosol; Biological process=nitrogen compound metabolic process
  Homolog annotation: Hit_ID=Q8W3L6; Match level="QueryCoverage=100%, HitCoverage=85%, E-value=0.0, Identity=88%"; Hit description=Urease
  Pfam annotation: Domain name=Amidohydro_1; Domain location=394-710; Score=312.5; E_value=8.6e-91; Accession=PF01979.12; Description =Amidohydrolase family
  Pfam annotation: Domain name=Amidohydro_3; Domain location=394-708; Score=-78.6; E_value=0.014; Accession=PF07969.3; Description =Amidohydrolase family
  Pfam annotation: Domain name=Urease_alpha; Domain location=268-388; Score=285.7; E_value=1e-82; Accession=PF00449.12; Description=Urease alpha-subunit, N-terminal doma
  Pfam annotation: Domain name=Urease_beta; Domain location=132-231; Score=199.3; E_value=1.1e-56; Accession=PF00699.12; Description =Urease beta subunit
  Pfam annotation: Domain name=Urease_gamma; Domain location=1-100; Score=208.9; E_value=1.4e-59; Accession=PF00547.10; Description =Urease, gamma subunit
  Pfam module annotation: Pfam domain module=Amidohydro_1::Amidohydro _3::Urease_alpha::Urease_beta::Urease_gamma; Domain location=394 -710::394-708::268-388::132-231::1-100
MRLVPREAEKLALHNAGFLAQKRLARGLRLNYTEAVALIAAQILEFVRDGDKTVTCLMDLGKQLLGRRQVLPAVPYLLHTVQVEGTFVDGTKLITVHDPISLDDGNMELALHGSFLPVPSPEKFSGGDVEDYPGEIHYSSGRIVLNLHRRALTLKVVNKADRPVQIGSHYHFIEANPYLVFDRERAYGMRLNIIAGTAVRFEPGDAKNVTLVSIGGHKVIRGGNGIANGPIDSSQINEVMQKVNANNFGHEDYPDAREGFIGDGPFDCTVDREKYASIYGPTTGDKIRLGDTNLFAEIEKDFAVYGDECIFGGGKVLRDGMGQATGYPESSCLDTVITNAVVIDYTGIYKADIGIKGGLIVAIGKGGNPDVMDGVHSNMIVGVNTEVIASEGMIVTAGGIDCHVHFICPQLAEEAIASGITTLVGGGTGPAHGTCATTCTPAPSQMKLMLQSTDQLPINMGFTGKGNTAKPEGLAEIVKAGAMGLKLHEDWGSTPAAIDNCLSVAEDFDIQVNIHTDTLNESGCVEHTIAAFKDRAIHTYHSEGAGGGHAPDIIKVCGVKNVLPSSTNPTRPFTTNTVDEHLDMLMVCHHLDKNIPEDVAFAESRIRAETIAAEDILHDMGAISIISSDSQAMGRIGEVITRTWQTANKMKVQRGRLHGSGESDTAQDNDNFRIRRYIAKYTINPAIVNGFSDFVGSVEVGKLADLVLWKPSFFG

SEQ ID NO: 103563 - protein, 159 aa, Setaria italica
  Transcript Sequence Number=SeqID_37589
  Gene Ontology: Mol. function=hydrolase activity, acting on carbon -nitrogen (but not peptide) bonds; Cellular component=cytoplasm; Biological process=nitrogen compound metabolic process
  Homolog annotation: Hit_ID=Q8W3L6; Match level="QueryCoverage=98%, HitCoverage=18%, E-value=1e-72, Identity=85%"; Hit description=Urease
MPPAIVIMPSDFVGSVEVGKLADLVLWKPSFFGAKPELVVKGGTIAWANMGDPNASIPTPEPVMMRPMFGAFGKAGSSNSIAFVSKVAKEAGVATDYKLEKRVEAVSGVRCLTKLDLKLNDALPKIEVDPETYTVTADGEVLTCQPAPTVPLSRNYFLF

SEQ ID NO: 103564 - protein, 143 aa, Setaria italica
  misc_feature (82)..(82): Xaa can be any naturally occurring amino acid
  Transcript Sequence Number=SeqID_37590
  Gene Ontology: Mol. function=transcription factor activity; Cellular component=nucleus; Biological process=regulation of transcription, DNA-dependent
  Homolog annotation: Hit_ID=Q852D5; Match level="QueryCoverage=97%, HitCoverage=10%, E-value=2e-36, Identity=60%"; Hit description =Powdery mildew resistance protein PM3b, putative, expressed
QLKYLTGLRHLYTHGCRKLESMPPELGHLTSLQTLTYFVVGTDSGCCNVRDLHNLDLGGILELSKLENVTGADAQAAGLGNXKKLTELELCWSSDTTPHDEVVEGLNPHDGLKALRIDHCGSRTFPTWMNTLKGMVDLKLFRY

SEQ ID NO: 103565 - protein, 208 aa, Setaria italica
  Transcript Sequence Number=SeqID_37591
  Gene Ontology: Mol. function=transcription factor activity; Cellular component=nucleus; Biological process=regulation of transcription, DNA-dependent
  Homolog annotation: Hit_ID=Q852D5; Match level="QueryCoverage=100%, HitCoverage=15%, E-value=1e-58, Identity=59%"; Hit description =Powdery mildew resistance protein PM3b, putative, expressed
  Pfam annotation: Domain name=LRR_1; Domain location=186-207; Score =5.7; E_value=25; Accession=PF00560.25; Description=Leucine Rich Repeat
  Pfam annotation: Domain name=LRR_1; Domain location=2-23; Score=11.1; E_value=2.3; Accession=PF00560.25; Description=Leucine Rich Repeat
  Pfam annotation: Domain name=LRR_1; Domain location=25-47; Score =15.6; E_value=0.21; Accession=PF00560.25; Description=Leucine Rich Repeat
  Pfam annotation: Domain name=LRR_1; Domain location=49-71; Score=0.4; E_value=2.5e+02; Accession=PF00560.25; Description=Leucine Rich Repeat
  Pfam annotation: Domain name=LRR_1; Domain location=94-115; Score =3.7; E_value=59; Accession=PF00560.25; Description=Leucine Rich Repeat
  Pfam module annotation: Pfam domain module=LRR_1::LRR_1::LRR_1::LRR _1::LRR_1; Domain location=186-207::2-23::25-47::49-71::94-115
HHLRYLDLSRSDIEALPEDISILYHLQTLNLSYCHSLQRLPKQLKYLTGLRHLYTHGCGKLESMPADLGHLTSLQTLTYFVAGTDDSGCCNVRELQNLDLGGTLELRKLENVTGADAQADAEAAGLGNKKKLTELELCWTDSDQEAQNNNHKEVVEGLKPHDGLKALRINHCGSRTFPTWMNTLKGMVELKLVHCKKLEELPALWELP

SEQ ID NO: 103566 - protein, 243 aa, Setaria italica
  misc_feature (108)..(108): Xaa can be any naturally occurring amino acid
  misc_feature (173)..(173): Xaa can be any naturally occurring amino acid
  Transcript Sequence Number=SeqID_37592
  Homolog annotation: Hit_ID=Q10AS2; Match level="QueryCoverage=71%, HitCoverage=37%, E-value=1e-32, Identity=50%"; Hit description=RNA -binding protein Luc7-like 2, putative, expressed
  Pfam annotation: Domain name=LUC7; Domain location=1-229; Score=25.5; E_value=3.2e-10; Accession=PF03194.7; Description=LUC7 N_terminus
TEGRRAGIFRYLNFLPDSCFGTDSLLFKVYIFIWVLLLVILFQAKMLLEAFNKDRASLINSIQNATQTTTPVPPAAPDARTQEMINEKLKKAEELGESGMIDEAQKLXLDEAEALKKLSARPQSVPDSSKMTAHVQITDQKLRLCDICGAFLSVYDSRLLGPLLRGLLLQLKXDRRLADHFGGKLHMGYMLIRERLSELQEEKNKKRKLDRPEYDRRSRERSGERERASSRDHRRGDRSSSRD

SEQ ID NO: 103567 - protein, 414 aa, Setaria italica
  misc_feature (220)..(220): Xaa can be any naturally occurring amino acid
  Transcript Sequence Number=SeqID_37593
  Gene Ontology: Mol. function=protein binding
  Homolog annotation: Hit_ID=Q10AS2; Match level="QueryCoverage=78%, HitCoverage=79%, E-value=1e-115, Identity=64%"; Hit description=RNA -binding protein Luc7-like 2, putative, expressed
  Pfam annotation: Domain name=LUC7; Domain location=1-341; Score =364.0; E_value=2.7e-106; Accession=PF03194.7; Description=LUC7 N _terminus
MDAIRKQLDQLMGANRNGDVREVSRKFYDRDVCRLYLAGLCPHDLFQLTKMDMGPCPKLHSLQLRKEYEEAKAKGTDNYDRELEETIERLIVECERKIQRALKRLEEDDAKAAIAISVTEVTQTKEVMELSKQIRQKMKDIDAFDLEGNTEGKIRATEELDKLKEQRAEEQAKMLLEAFNKDRASLINSIQNATQTTTPVPPAAPDARTQEMINEKLKKXAEELGESGMIDEAQKLLDEAEALKKLSARPQSVPDSSKMTAHVQITDQKLRLCDICGAFLSVYDSDRRLADHFGGKLHMGYMLIRERLSELQEEKNKKRKLDRPEYDRRSRERSGERERASSRDHRRGDRSSSRDRDYDRRRSHDRYHDRERERESGRSRSYDSRSHRRSRSRSPRGSSRDYDRYGRHERRDRY

SEQ ID NO: 103568 - protein, 124 aa, Setaria italica
  Transcript Sequence Number=SeqID_37594
  Homolog annotation: Hit_ID=B6SVA6; Match level="QueryCoverage=100%, HitCoverage=19%, E-value=3e-43, Identity=69%"; Hit description=Leaf protein
MVENGVQLTLTSTLTSTGKARINGDGMNNGPHDKEKQERNGALQPSKGQNQQLCTTCAKGHSCQSVINRTRQMRALINSKKPYQAHSVFKHLVDEGHKPSLVTYTTLLTALTNQRMFESIPSLL

SEQ ID NO: 103569 - protein, 80 aa, Setaria italica
  Transcript Sequence Number=SeqID_37595
MLAKISQLLKAVAIDALSRASLGGDEDLLQAQQGKPQAAAQPDKSSAAVAADDHHRRPLHDGSPTGRKKFLSYFQCCIRA

SEQ ID NO: 103570 - protein, 110 aa, Setaria italica
  misc_feature (28)..(28): Xaa can be any naturally occurring amino acid
  Transcript Sequence Number=SeqID_37596
  Gene Ontology: Mol. function=hydrolase activity; Cellular component =cytoplasm; Biological process=embryonic development ending in birth or egg hatching
  Homolog annotation: Hit_ID=Q6E435; Match level="QueryCoverage=100%, HitCoverage=15%, E-value=1e-45, Identity=77%"; Hit description =ACT11D09.9
MESERGGREQYSYEDILRCMKKVIPLDXKQTVQVDKDLVIRAYYAGHVLGAAMIYAKAGDAAMVYTGDYNMTPDRHLGAAQIDRLKLDLLITESTYAKTIRDSKHARERE

SEQ ID NO: 103571 - protein, 426 aa, Setaria italica
  Transcript Sequence Number=SeqID_37597
  Gene Ontology: Mol. function=nucleoside-triphosphatase activity; Cellular component=protein complex; Biological process=protein catabolic process
  Homolog annotation: Hit_ID=Q9SSB5; Match level="QueryCoverage=100%, HitCoverage=100%, E-value=0.0, Identity=96%"; Hit description=26S protease regulatory subunit 7
  Pfam annotation: Domain name=AAA; Domain location=204-391; Score =297.9; E_value=2.2e-86; Accession=PF00004.21; Description=ATPase family associated with various cellular activities (AAA)
  Pfam annotation: Domain name=AAA_2; Domain location=200-332; Score= -31.5; E_value=0.0031; Accession=PF07724.6; Description=ATPase family associated with various
  Pfam annotation: Domain name=AAA_5; Domain location=204-337; Score= -2.1; E_value=0.0014; Accession=PF07728.6; Description=ATPase family associated with various
  Pfam module annotation: Pfam domain module=AAA::AAA_2::AAA_5; Domain location=204-391::200-332::204-337
MAPEPEDDIMNEKNPRPLDEDDIALLKTYGLGPYSTSIKKVEKEIKEMAKKINDLCGIKESDTGLAPPSQWDLVSDKQMMQEEQPLQVARCTKIISPNTDDAKYVINVKQIAKFVVGLGDKVSPTDIEEGMRVGVDRNKYQIQIPLPPKIDPSVTMMTVEEKPDVTYNDVGGCKEQIEKMREVVELPMLHPEKFVKLGIDPPKGVLCYGPPGTGKTLLARAVANRTDACFIRVIGSELVQKYVGEGARMVRELFQMARSKKACIVFFDEVDAIGGARFDDGVGGDNEVQRTMLEIVNQLDGFDARGNIKVLMATNRPDTLDPALLRPGRLDRKVEFGLPDLEGRTQIFKIHTRTMNCERDIRFELLARLCPNSTGADIRSVCTEAGMYAIRARRKTVTEKDFLDAVNKVIKGYQKFSATPKYMVYN

SEQ ID NO: 103572 - protein, 167 aa, Setaria italica
  Transcript Sequence Number=SeqID_37598
  Gene Ontology: Mol. function=DNA binding; Cellular component=nucleolus
  Homolog annotation: Hit_ID=B6T9W0; Match level="QueryCoverage=77%, HitCoverage=38%, E-value=5e-45, Identity=79%"; Hit description=6b -interacting protein 1
  Pfam annotation: Domain name=MADF_DNA_bdg; Domain location=65-144; Score=3.2; E_value=0.089; Accession=PF10545.1; Description=Alcohol dehydrogenase transcription f
MGTCSGSSGLGSEQRRREEAGDKKMRRRDLGGGAGGGAMDGKLPPPNPNLPYREDCWSEGETAALVDAWGSRYLDLNRGSLRQPQWREVAEAVNSRPGASARRRPPRTDIQCKNRVDTLKKKYKAERARGGSSPWAFYGQLDLLVGPTLSGAAAAGGGGKKPSPPRA

SEQ ID NO: 103573 - protein, 83 aa, Setaria italica
  Transcript Sequence Number=SeqID_37599
CFIDKIQHKTFHSTQCYQEKAIDGPVLLSRSTTEELASNTSESKRTLIDGMFNGHIYWWKIYKTELTYFIRHPEQSRGHCSLV

SEQ ID NO: 103574 - protein, 77 aa, Setaria italica
  Transcript Sequence Number=SeqID_37600
  Homolog annotation: Hit_ID=Q1SKW8; Match level="QueryCoverage=92%, HitCoverage=11%, E-value=3e-24, Identity=74%"; Hit description =Membrane attack complex component/perforin/complement C9
ELSLTGKIPCGMFNSMFDFSGCWQKDAAATKSLAFDGWYISLYKVALSKSRILLRDHVTQAVPSTWDPAALVETRKR

SEQ ID NO: 103575 - protein, 293 aa, Setaria italica
  Transcript Sequence Number=SeqID_37601
  Homolog annotation: Hit_ID=Q1SKW8; Match level="QueryCoverage=96%, HitCoverage=46%, E-value=1e-118, Identity=73%"; Hit description =Membrane attack complex component/perforin/complement C9
NLYLRYKPPIEELHQFLEFQLPRQWAPVYSDLPLGPQRKRQSSASLSLSFMGPRLYVCTNMVDVGERPVTGLRLYLEGKKSNMLAIHLQHLCSLPQILQLQDDPYNHRTPEPYDSKYLEPFGSWKRFSHVYTEPVESDDDSSIVTGAQLQVSSHGLRKILFLRLHFSKVINAASVKNPEWEGSPNLGQKSGLISTLISTHFSTAAQKPAPRPADVIINSAVYPGGPPVPVQAPKLLKFVDTAEMLRGPQDTPGYWVVSGAKLQLERGKLSLRVKYSLLTAMVPDDEYPLDEHS

SEQ ID NO: 103576 - protein, 360 aa, Setaria italica
  misc_feature (116)..(116): Xaa can be any naturally occurring amino acid
  Transcript Sequence Number=SeqID_37602
  Homolog annotation: Hit_ID=Q1SKW8; Match level="QueryCoverage=93%, HitCoverage=54%, E-value=1e-137, Identity=70%"; Hit description =Membrane attack complex component/perforin/complement C9
  Pfam annotation: Domain name=MACPF; Domain location=107-320; Score =165.5; E_value=1.5e-46; Accession=PF01823.11; Description =MACPerforin domain
MALKASAQGAAEAAIAAIGRGYDVVSDVRLKYCKGKLADPDARLIDLSRDEVQDVVLPGGIKVDAVPKSIKCDKGERTRFRSDVLSFQQMSELFNRELSLTGKIPCGMFNSMFDFXGCWQKDAAATKSLAFDGWYISLYKVALSKSRILLRDHVTQAVPSTWDPAALARFIEKFGTHLVVGIKMGGKDVIYLKQQHSSSLQPAVVQKRLKDMSDRRFLDANGHYDMSIKDAYGKDKSDAREQRLRFVQSSPSSSYCSKEDLVMVVKRRGGREWDKEMPHSEWINTVQLEPDVISMTFLPITSLLNGVPGCGFLNHAINLYLRYKPPIEELHQFLEFQLPRQWAPVYSDLPLGPLGLRHAT

SEQ ID NO: 103577 - protein, 342 aa, Setaria italica
  Transcript Sequence Number=SeqID_37603
  Gene Ontology: Mol. function=DNA binding
  Homolog annotation: Hit_ID=Q6AV01; Match level="QueryCoverage=81%, HitCoverage=72%, E-value=2e-60, Identity=49%"; Hit description =Bromodomain associated family protein, expressed
  Pfam annotation: Domain name=Bromo_TP; Domain location=39-115; Score =66.6; E_value=9.4e-17; Accession=PF07524.5; Description=Bromodomain associated
  Pfam annotation: Domain name=TAF8_C; Domain location=177-228; Score =42.4; E_value=1.7e-09; Accession=PF10406.1; Description =Transcription factor TFIID complex subu
  Pfam module annotation: Pfam domain module=Bromo_TP::TAF8_C; Domain location=39-115::177-228
RPAGSERPRRRGARRYEWLGRAQRRSGDMSGGGGSGTGDEFGRAVARAAVAQALEAAGFDCAHRSAVDAVVDVLLRYITHLGRSAAFNANLAGRALANELDIIQALEEVGADTDGFAGASATGRCLAGSGVVRDLMAFVDTKAEVPFVRPLPRFPVPRVQQQPSASFAVAGKETGMRHVPEWLPVFPDPHTYVRTEAWVEPPATKERVDKVEQVRQRRKAEKSLLSLQQRLAQAGAEGFHPAAALAQDSTEKGKEIQAAGTKRNPFLEPALPPGEKDVSEVDMPPEKKKLSVLEAFAPAIQATTIREIDAGTGLDQNQRSIVPKERVPVHLKIGFGNKPVSA

SEQ ID NO: 103578 - protein, 140 aa, Setaria italica
  misc_feature (25)..(25): Xaa can be any naturally occurring amino acid
  Transcript Sequence Number=SeqID_37604
  Gene Ontology: Mol. function=protein serine/threonine kinase activity; Cellular component=plasma membrane; Biological process =protein amino acid phosphorylation
  Homolog annotation: Hit_ID=B9SB26; Match level="QueryCoverage=99%, HitCoverage=16%, E-value=3e-44, Identity=58%"; Hit description =Kinase, putative
VVAGVQLPLGLSDRGVETMYRLNIXGPALKSASDEYLHRPWYTDEAFMFSTNAAQTVSNASSIMYVSSNDSSIAPIDVYETARIMGNNMVVDKRFNVSWRFYVHPNFDYLVRLHFCELVYDKPSQRIFKIYINNKTAAEN

SEQ ID NO: 103579 - protein, 142 aa, Setaria italica
  Transcript Sequence Number=SeqID_37605
  Gene Ontology: Mol. function=protein serine/threonine kinase activity; Cellular component=plasma membrane; Biological process =protein amino acid phosphorylation
  Homolog annotation: Hit_ID=B9SB26; Match level="QueryCoverage=87%, HitCoverage=14%, E-value=2e-21, Identity=43%"; Hit description =Kinase, putative
ALHFSSLQFLRAHGSELLLSCGSNGTVDADGRRWIGDMAPGGNFTLSSPGLAAPLAGKRNSDEIFGPVYSSARFFSTTTWYTISLLPGSYCIRLHFFPTTYGNFSANNSEFDVTANYFKLVSKFNVSEEIVWRNSASNSVIN

SEQ ID NO: 103580 - protein, 84 aa, Setaria italica
  Transcript Sequence Number=SeqID_37606
  Gene Ontology: Mol. function=RNA methyltransferase activity
  Pfam annotation: Domain name=zf-CCCH; Domain location=53-83; Score =31.8; E_value=2.8e-06; Accession=PF00642.16; Description=Zinc finger C-x8-C-x5-C-x3-H type (and similar)
MEDDKTPPQPQPEVVGEKRKREEGSPDAATEDAPPASAAFGEDAASSGRHPMWKTSLCSYFRRRGAGAEGCSHGESCRYAHTEE

SEQ ID NO: 103581 - protein, 350 aa, Setaria italica
  misc_feature (159)..(159): Xaa can be any naturally occurring amino acid
  Transcript Sequence Number=SeqID_37607
RKEQQEPIVLTYKLQITPSKQTEVMPNSGTALSMAETVMQAPPRISSGPQLSMDTQKIEERTLRQYTLRPLTPPASKSSVLSLKTKGTRLGDPTGSSKTLQQFKIQSANSSIRAPVKADISKLSQSGSFQVLSREQNGTAHTGKDCPIKPVSPPPTPFXSMDTQKKPVVSQKLKISTNERPLPLQGPCGDRKSNARDGHKFFATLRTKSSNDSSIAFESGNQPSPSSLVDVKQDSSLSPGNDFSSFPSEVECTGQGKCFCEEANSPEGSQRHLSDTEESIPSLKPTVADGMSRQLLVESREAYSSSEPADTGDEGFQASLSDSAEGSVSSTPADSDDGWNRSQSGNEEAS

SEQ ID NO: 103582 - protein, 75 aa, Setaria italica
  Transcript Sequence Number=SeqID_37608
  Homolog annotation: Hit_ID=B6SKI6; Match level="QueryCoverage=100%, HitCoverage=43%, E-value=9e-17, Identity=47%"; Hit description=ATP binding protein
  Pfam annotation: Domain name=PPR; Domain location=33-67; Score=31.7; E_value=2.9e-06; Accession=PF01535.12; Description=PPR repeat
TTLLKGLCAAKRWDDVEELFAEMMERNCMPNEVTFDMLIRFFCRGGMVERAIQVLEQMTWHGCSANTTLCNIVIN

SEQ ID NO: 103583 - protein, 104 aa, Setaria italica
  Transcript Sequence Number=SeqID_37609
  Pfam annotation: Domain name=PPR; Domain location=29-63; Score=18.6; E_value=0.025; Accession=PF01535.12; Description=PPR repeat
KCYGKSGSLVEMERVIASMSDAGIRLGTGAANIVLSCYSSCRDHSKMLAWLKKMKKLRIVPTTKAYNFVLNSCPTLASVVQELNPSLPLSTTGLVKKLKSVSTL

SEQ ID NO: 103584 - protein, 210 aa, Setaria italica
  Transcript Sequence Number=SeqID_37610
  Gene Ontology: Mol. function=transferase activity; Cellular component= endoplasmic reticulum membrane; Biological process=carbohydrate metabolic process
  Homolog annotation: Hit_ID=B6U4N4; Match level="QueryCoverage=82%, HitCoverage=100%, E-value=4e-73, Identity=79%"; Hit description=UDP -N-acetylglucosamine transferase subunit ALG14
  Pfam annotation: Domain name=Alg14; Domain location=5-183; Score =287.0; E_value=4e-83; Accession=PF08660.3; Description =Oligosaccharide biosynthesis protein Alg14 l
SWFLGGHTAEMMNVVTAVQKDRFTPRYYVAALTDNMSLQKAQVYEQSLIQVEINYHSFGEKTIKNAHFVQIYRSREVGQSYFTSIATTLLATLHAMWLVIRIRPQVIFCNGPGTCFPLCVCAFVLKVLGLGWSSIFYIESIARVKKLSLSGLLLYKLRIADQFFVQWPQLQQKYPRAYYAGRLMNTIVVALKERHYYTIHGAWKCKVASR

SEQ ID NO: 103585 - protein, 212 aa, Setaria italica
  misc_feature (5)..(5): Xaa can be any naturally occurring amino acid
  Transcript Sequence Number=SeqID_37611
  Gene Ontology: Mol. function=transferase activity; Cellular component= endoplasmic reticulum membrane; Biological process=carbohydrate metabolic process
  Homolog annotation: Hit_ID=B6U4N4; Match level="QueryCoverage=78%, HitCoverage=100%, E-value=1e-73, Identity=82%"; Hit description=UDP -N-acetylglucosamine transferase subunit ALG14
  Pfam annotation: Domain name=Alg14; Domain location=33-211; Score =318.5; E_value=1.4e-92; Accession=PF08660.3; Description =Oligosaccharide biosynthesis protein Alg14 l
PVLVXLLAIRFVYVLWRSGQPGCPGRPTAGLRCLIVLGSGGHTAEMMNVVTAVQKDRFTPRYYVAALTDNMSLQKAQVYEQSLIQSGEKTIKNAHFVQIYRSREVGQSYFTSIATTLLATLHAMWLVIRIRPQVIFCNGPGTCFPLCVCAFVLKVLGLGWSSIFYIESIARVKKLSLSGLLLYKLRIADQFFVQWPQLQQKYPRAYYAGRLM

SEQ ID NO: 103586 - protein, 71 aa, Setaria italica
  Transcript Sequence Number=SeqID_37612
  Gene Ontology: Mol. function=hydrolase activity, hydrolyzing O -glycosyl compounds; Cellular component=extracellular region; Biological process=carbohydrate metabolic process
  Homolog annotation: Hit_ID=Q0JKM9-2; Match level="QueryCoverage=73%, HitCoverage=12%, E-value=3e-12, Identity=71%"; Hit description =Isoform 2 of Mannan endo-1,4-beta-mannosidase 1
AGALFWQLLAEGMDSYGDGYEVVLGRTASSTAGVIATQSRRLQGLARAFARARKAQHQQGKASGKGAKGGN

SEQ ID NO: 103587 - protein, 376 aa, Setaria italica
  Transcript Sequence Number=SeqID_37613
  Gene Ontology: Mol. function=protein binding; Biological process =ubiquitin-dependent protein catabolic process
  Homolog annotation: Hit_ID=B6TPI0; Match level="QueryCoverage=96%, HitCoverage=66%, E-value=1e-180, Identity=86%"; Hit description =Cyclin-like F-box
TGLASLAGAAPALRKLSVASCAFGPKAFVAVLQACPLLEDLSVKRLRGLPDTAGAATAITEEIKFPQALSLRSVCLKDLYSAPSFVPLVASSPNLRSLKILRCTGAWDLPLEVITARAPGLVELHLEKLQVGDRGLAALSACRNLEVLFLVKTPECTDLGIISVAERCHKLRKLHIDGWRTNRIGDFGLMAVARGCPDLQELVLIGVNPTVLSLRMLGEHCRALERLALCGCETVGDAEIICLAERCAALKKLCIKGCPVSDRGMEALNGGCPSLVKVKLKRCRGVSYECIENLKVTRGESFSISLDIVLDHDAGSASENGVQETGQAQITELADQMAGMDLPTNSVGAQSSTHTINRVSRVMSAIRRRFGNPPPQ

SEQ ID NO: 103588 - protein, 75 aa, Setaria italica
  Transcript Sequence Number=SeqID_37614
GGTARLTISDVWDHVKDVGLRGLTSKRQMKIMLRWMRERQKLRLICDHDGPHKQFLYTTWFTNPKNAPQRPKGEL

SEQ ID NO: 103589 - protein, 461 aa, Setaria italica
  Transcript Sequence Number=SeqID_37615
  Gene Ontology: Mol. function=signal transducer activity; Biological process=response to light stimulus
  Homolog annotation: Hit_ID=B9RPM7; Match level="QueryCoverage=99%, HitCoverage=82%, E-value=1e-106, Identity=42%"; Hit description=Root phototropism protein, putative
  Pfam annotation: Domain name=NPH3; Domain location=101-328; Score =194.7; E_value=2.5e-55; Accession=PF03000.6; Description=NPH3 family
DAASTAAPSLMRMTEKALEEMPHWPWHAVVDTVKQCQRLLPLADTTGAFDAAVNALVSHMAVPPPAGDATPTTSSPESSAFRFSCDTKSSSLSLRGSCISRTWWFEDLVPLRPGTVERVAAALVARGTDHGVVARFLFYYLKCRIAGASAEDKRAMLEASVAVMSGLDRSAVSCKGLFGILRIAAPLKLTDACQERLVAMIGRKLDHATLDNLLVPAPAGTGSLYDVSLVLRFLEAFLRGDARDEPARLKKLGRLVDLYLAEVAPDPSLRPAKFLELVTALPAPARDCHDALYRAIDVYFQVHARLTDEEKMKICRGLSYEKLSPECCKHLARNGGFPTRAAVQALASQHTVLKSLVLRDPAQLKPVSPSPPPSTGKRRETCCHDDDVGSGGGENDGQVILYAGRLDLTLENQNLRSLLDGMHWRVMELEKVCSRMKTQMIKMKARRGGGRTARSLPRMCS

SEQ ID NO: 103590 - protein, 45 aa, Setaria italica
  Transcript Sequence Number=SeqID_37616
MILWLQVYDRHQCLVANGVRFFLLFHPICYFVCLTFKYEDSCARI

SEQ ID NO: 103591 - protein, 138 aa, Setaria italica
  misc_feature (119)..(119): Xaa can be any naturally occurring amino acid
  Transcript Sequence Number=SeqID_37617
  Gene Ontology: Mol. function=binding
RAEAVSGGGSIPLPRGCGAGVAASGWSGGFPGLRLARSLCTYDERDDRALEEEAEKKFGWILKIFFLGTAGLVGYQFFPYMGDNLLQQSISLLRVKDPLFKRMGASRLGRFAVDDQRDXRWLRMGGAQELLNVLEVLK

SEQ ID NO: 103592 - protein, 62 aa, Setaria italica
  Transcript Sequence Number=SeqID_37618
  Gene Ontology: Mol. function=transferase activity; Cellular component= integral to membrane; Biological process=cell wall organization and biogenesis
  Homolog annotation: Hit_ID=Q69L19; Match level="QueryCoverage=98%, HitCoverage=8%, E-value=9e-13, Identity=62%"; Hit description =Probable xyloglucan glycosyltransferase 2
KAPHDARKANKIYKKELALSLLLLTAATRSLLSAQGIHFYFLLFQGVSFLVVGLDLIGEQIS

SEQ ID NO: 103593 - protein, 65 aa, Setaria italica
  misc_feature (10)..(10): Xaa can be any naturally occurring amino acid
  Transcript Sequence Number=SeqID_37619
FYLKQVHFPXPLNSPATPRSLPSEHIRNGYSFTGDDTGADMVLAVRDRGDSYAVYASNEPKQQYV

SEQ ID NO: 103594 - protein, 65 aa, Setaria italica
  Transcript Sequence Number=SeqID_37620
SAEHHIQGVSQRKEVIKYKLKSNYSCRALRIFLFPFNVNCFGESALTNDKLTGSYKGFQYCHLKR

SEQ ID NO: 103595 - protein, 181 aa, Setaria italica
  Transcript Sequence Number=SeqID_37621
  Gene Ontology: Mol. function=RNA binding; Cellular component =cytoplasm; Biological process=regulation of transcription, DNA -dependent
  Homolog annotation: Hit_ID=B6SUK1; Match level="QueryCoverage=100%, HitCoverage=100%, E-value=7e-80, Identity=80%"; Hit description =Ligatin
  Pfam annotation: Domain name=PUA; Domain location=92-170; Score=77.6; E_value=4.5e-20; Accession=PF01472.12; Description=PUA domain
MFKKFSSEDISGQNQVKASVQRRIRQSIADEYPSLEPLLDDLLPKKSPMIVVKCQNHLNLVVVNNVPLFFNIRDGPYMPTLRLLHQYPEIMKKFQVDRGAIKFVLSGANIMCPGLTSPGGVLDDEVEEETPVAIMAEGKQHALAIGFTKMSAKDIRTINKGIGVDNMHYLNDGLWKMEKLE

SEQ ID NO: 103596 - protein, 289 aa, Setaria italica
  Transcript Sequence Number=SeqID_37622
  Gene Ontology: Mol. function=metal ion binding
  Homolog annotation: Hit_ID=B4FA87; Match level="QueryCoverage=100%, HitCoverage=54%, E-value=1e-136, Identity=79%"; Hit description=IBR domain containing protein
  Pfam annotation: Domain name=IBR; Domain location=155-227; Score =37.9; E_value=4.1e-08; Accession=PF01485.13; Description=IBR domain
  Pfam annotation: Domain name=zf-C3HC4; Domain location=84-132; Score =9.1; E_value=0.0094; Accession=PF00097.17; Description=Zinc finger, C3HC4 type (RING finger)
  Pfam module annotation: Pfam domain module=IBR::zf-C3HC4; Domain location=155-227::84-132
TIATAYRPLYNHMLGIWRPSGKNLADMVNQVLSVRRKFDQCAISFVEPTEVSYVVKLARDSIAVLIAKALATNASTSMERRETCTICLEDTDITKIHVVEGCAHRFCFSCMKEHVKVKLLNGMLPACPQDGCATKLSVEGSKMFLSPWLLEIMVQRVREGQIPPSQKIYCPYPKCSALMSLREVILPMQESCSKYTAADAATLRKCVKCRGSFCISCKVPWHDRMSCYDYKRRYPHARPEDVKLQNLARQRLWRQCVKCKHMIELAEGCYHMICVCGYEFCYTCGKEWK

SEQ ID NO: 103597 - protein, 84 aa, Setaria italica
  Transcript Sequence Number=SeqID_37623
  Gene Ontology: Mol. function=DNA binding
  Homolog annotation: Hit_ID=B4FB11; Match level="QueryCoverage=60%, HitCoverage=21%, E-value=6e-20, Identity=94%"; Hit description=Myb -like DNA-binding domain containing protein
IIHLFCLSAAIGGPTGEILETNAQVLGQISINLSNMQIQDNISLLCQTRDNILRVLKEYVLNYCCVIILKWFSHLIFPVTFVIT

SEQ ID NO: 103598 - protein, 215 aa, Setaria italica
  Transcript Sequence Number=SeqID_37624
  Gene Ontology: Mol. function=DNA binding
  Homolog annotation: Hit_ID=Q01IQ4; Match level="QueryCoverage=99%, HitCoverage=86%, E-value=1e-87, Identity=77%"; Hit description =OSIGBa0159F11.10 protein
  Pfam annotation: Domain name=Myb_DNA-binding; Domain location=21-71; Score=16.5; E_value=0.065; Accession=PF00249.23; Description=Myb -like DNA-binding domain
GGANPSNGGTAAALRHDPGLAREWSPEEQATLDELLAKYASDAPVIRYAKIAMKLPEKTVRDVALRCRWMNKKESGKRKKEDHNSSKKSKDKKEKVSDSSSKPPVHMAGRPNVPPYPLPVLPMDDDEISSKAIGGPTGEILETNAQVLGQISINLSNMQIQDNISLLCQTRDNILRVLKEINDAPEIMKQMPPLPVKINEELVNSLLPRPTVPMQ

SEQ ID NO: 103599 - protein, 211 aa, Setaria italica
  Transcript Sequence Number=SeqID_37625
  Gene Ontology: Mol. function=hydrolase activity; Biological process =cell redox homeostasis
  Homolog annotation: Hit_ID=Q1XBU3; Match level="QueryCoverage=98%, HitCoverage=67%, E-value=1e-92, Identity=82%"; Hit description=Beta -carotene hydroxylase
  Pfam annotation: Domain name=FA_hydroxylase; Domain location=55-174; Score=71.9; E_value=2.4e-18; Accession=PF04116.5; Description=Fatty acid hydroxylase
KARKQSERRTYLVAAVMSSLGVTSMAVAAVYYRFSWQMEGGEVPVTEMFGTFALSVGAAVGMEFWARWAHRALWHASLWHMHESHHRPREGPFELNDVFAIINAVPAISLLSYGFFHRGFVPGLCFGAGLGITLFGMAYMFVHDGLVHRRFPVGPIANVPYFRRVAAAHKIHHMDKFEGVPYGLFLGPKELEEVGGLDELEKELARISRAM

SEQ ID NO: 103600 - protein, 58 aa, Setaria italica
  Transcript Sequence Number=SeqID_37626
STMFVTSSSCCKTCGVSLVPIGHNYIRLAWRRVSDYPSHVYSNEQASYIKTGYSIVPF

SEQ ID NO: 103601 - protein, 525 aa, Setaria italica
  Transcript Sequence Number=SeqID_37627
  Gene Ontology: Mol. function=protein binding; Cellular component =cytoplasm; Biological process=protein transport
  Homolog annotation: Hit_ID=B6SSZ8; Match level="QueryCoverage=91%, HitCoverage=91%, E-value=0.0, Identity=93%"; Hit description =Nonsense-mediated mRNA decay protein 3
  Pfam annotation: Domain name=NMD3; Domain location=26-258; Score =401.7; E_value=1.2e-117; Accession=PF04981.5; Description=NMD3 family
  Subcellular localization annotation: CTP_CleavageSite=17; ConfidenceScore=5.11e-01
MMPGSAAPAGGAGMFVPAATAGTVLCCMCGVAMQPNPANMCARCLRGRIDITEGVPRHAAVVYCPDCCSYLQPPRSWLRATPESPELMQILLRRINRPLARLRVSLSGAEFVFSEPHSKRLRLKLRLRREVLHGVVLEQTHPVEFVVHDRLCDSCSRAQANPDQWVAVVQLRQHVPHRRTFLYLEQLLLKHGQASLAIRVAAAPGGLDFFFGSRSHAARLVDFLATVAPIQTQTAKQLVSHDTKSSVYNYKYTFSVEICPICREDLIALSPKASRDMGGLGPLVLCVKVTNAIALLDPLTLRVHHLEEKKYRVYNFKAALTSKQLVEYIVLDIEQESPEISIDGSRYQLAYAQVARVSDFGKNDTIFTVRTHLGHLLNPGDHALGYDLYGANLNDDDMDTAMTRYSLPEVVLVKKSYEKRPRTRRWKLKRLPVEEDAANKAKGEEEKRLDEYESFLKDLEQDPELRFTINLYKNEDYRSEMASTVGDDVPTVPIEELIEDLTLGDDEEDEGDEAVAGIAQSGMVE

SEQ ID NO: 103602 - protein, 512 aa, Setaria italica
  Transcript Sequence Number=SeqID_37628
  Gene Ontology: Mol. function=CTP synthase activity; Cellular component=cellular_component; Biological process=pyrimidine nucleotide biosynthetic process
  Homolog annotation: Hit_ID=Q2QNR8; Match level="QueryCoverage=99%, HitCoverage=93%, E-value=0.0, Identity=90%"; Hit description=CTP synthase, putative, expressed
  Pfam annotation: Domain name=CTP_synth_N; Domain location=2-231; Score=427.4; E_value=2.3e-125; Accession=PF06418.6; Description=CTP synthase N-terminus
  Pfam annotation: Domain name=GATase; Domain location=255-492; Score =230.5; E_value=4.2e-66; Accession=PF00117.20; Description=Glutamine amidotransferase class-I
  Pfam annotation: Domain name=Peptidase_C26; Domain location=272-474; Score=-106.4; E_value=0.043; Accession=PF07722.5; Description =Peptidase C26
  Pfam module annotation: Pfam domain module=CTP_synth_N::GATase::Peptid ase_C26; Domain location=2-231::255-492::272-474
FILCLYVIDDGGEVDLDLGNYERFIDVTLTRDNNITTGKIYQSVIEKERKGDYLGKTVQVVPHVTDEIKQWIQSVSSVPVDGQTRPADVCVIELGGTVGDIESMPFIEALRQLSFSLGKENFCLIHVSLVPVLGVVGEQKTKPTQHSVRELRALGLTPDLLACRSAQPLIGSVKEKLSQFCHVPVENILNIHDVPNLWHVPLILRNQKAHEAIIKQLNLAGSAGPPELQDWTEMAESYDNLKNSVKIALVGKYTNLTDSYLSVVKALLHASVACSLKPSIQWIAASDLEDATAINAPDAHAKAWETLKDSASILIPGGFGDRGISGMILAAKYARENKVPYLGICLGMQISVIEMSRHVLGLGDADSEEFNKDTPNHVVMYMPEVSKTHMGNTMRLGCRRTFFRKPDCLTSKLYGSPPHVDERHRHRYEVNPSFVPMLEKAGLHFVGSDESGKRMEIVELQDHPFYVGVQFHPEFKSRPRRPSPPFTGLIMAATKQLGTNSNNSNGYVGASE

SEQ ID NO: 103603 - protein, 440 aa, Setaria italica
  Transcript Sequence Number=SeqID_37629
  Homolog annotation: Hit_ID=B9R9Y4; Match level="QueryCoverage=65%, HitCoverage=74%, E-value=3e-81, Identity=52%"; Hit description =Catalytic, putative
  Pfam annotation: Domain name=DUF676; Domain location=125-346; Score =303.8; E_value=3.7e-88; Accession=PF05057.6; Description=Protein of unknown function (DUF676)
  Subcellular localization annotation: CTP_CleavageSite=56; ConfidenceScore=5.93e-01
MPASSRFYTSATCSRFYTSATCSPVSASSRSPPHRRRYASLMGQSPSAPPGRNRSRSSSRWPQPGLGLDLGVFLGRKPRPGDERLDLANWMRCFLSQRLPPPTAEAEADAEGKAAGSREEDEIGGEEADHLVVMVNGLYGSSADWKFAAEQFVKRLPGKVFVHRSQSNHSKLTYDGVDLMGERLAEEVRQVVQRRRNLKKISFVAHSLGGLVTRYAIGKLYEPATNETSSLDTDKLSDEQETPGAGKIAGLEPINFITSATPHLGSRWNKQLPFLFGVPVLERTAAGTAHFIVGRTGTHLFLTDRDDGKPPLLVRMVEDCDDGKFMSALRSFKRRVAYANHELPKLKLTAKDEKYPHVINVDNGNSEDHQQEESVEGSLADSLEERMIRGLTQVSWERVDVCFHKSWLKYNAHHNIQVRIHPVNSDGEDVIYHMIDNFLV

SEQ ID NO: 103604 - protein, 103 aa, Setaria italica
  Transcript Sequence Number=SeqID_37630
LRAGSPELQREAVREAVEDAVAGPRAEAMRASARRWSEAARRAVGPGGSSDAHVQAFVDEVARRAACGGAAGAAKARAQESSEDASSLVGVAERQERVEVAVP

SEQ ID NO: 103605 - protein, 124 aa, Setaria italica
  Transcript Sequence Number=SeqID_37631
  Gene Ontology: Mol. function=triacylglycerol lipase activity; Biological process=lipid metabolic process
  Homolog annotation: Hit_ID=B6T9Z7; Match level="QueryCoverage=98%, HitCoverage=45%, E-value=4e-58, Identity=90%"; Hit description =Triacylglycerol lipase
MAMAQQASLSCSTATWRELTNTSWRDDDYRRMVMAYLIEAVYLLELERQERRDAAAVAQQWWKPFQYRLAHELVDDRDGSVFGAIFERDHHADADGRPSPSGAPSAVVAFRGTLLRAPTIRRDV

SEQ ID NO: 103606 - protein, 130 aa, Setaria italica
  misc_feature (11)..(11): Xaa can be any naturally occurring amino acid
  misc_feature (79)..(79): Xaa can be any naturally occurring amino acid
  misc_feature (101)..(101): Xaa can be any naturally occurring amino acid
  Transcript Sequence Number=SeqID_37632
  Gene Ontology: Mol. function=aspartic-type endopeptidase activity; Cellular component=chromatin; Biological process=RNA-dependent DNA replication
  Homolog annotation: Hit_ID=Q8SA93; Match level="QueryCoverage=97%, HitCoverage=4%, E-value=7e-34, Identity=52%"; Hit description =Putative polyprotein
KSIQDLAPRLXIFVSKRRVNRRTVREALTNKQWFQDIQGNLTVDALMEYLKLWDIIAGVVLHQDIPDKHVWRLSSSGQXTSKSAYDALFQGAILFEPYKRXIWKSWAPPKCRVFMWLVAHKRCWTADRLA

SEQ ID NO: 103607 - protein, 146 aa, Setaria italica
  Transcript Sequence Number=SeqID_37633
  Gene Ontology: Cellular component=membrane
  Homolog annotation: Hit_ID=B6TIX8; Match level="QueryCoverage=100%, HitCoverage=33%, E-value=2e-31, Identity=55%"; Hit description =Nodulin-like protein
LDVGLLAVGYSGFVVTGVSFYLQAWCIEKRGPVFLAMSNPLGLLLTIFCSSFFLGEIVHLGSLLGSALLVGGLYSVLWGKSKDHLHQPPPPQPQPSQEAPKHQSTGGVCSNDDDDEEKQQQHKDGEETQLKDLFAMEASPLRHQVG

SEQ ID NO: 103608 - protein, 44 aa, Setaria italica
  misc_feature (34)..(34): Xaa can be any naturally occurring amino acid
  Transcript Sequence Number=SeqID_37634
MSSAVKEQLQQMSTTCDSLLLELNVIWDEVGDPXSARDRMLLEL

SEQ ID NO: 103609 - protein, 209 aa, Setaria italica
  misc_feature (84)..(84): Xaa can be any naturally occurring amino acid
  misc_feature (117)..(117): Xaa can be any naturally occurring amino acid
  Transcript Sequence Number=SeqID_37635
  Gene Ontology: Mol. function=nucleotide binding; Cellular component =ER-Golgi intermediate compartment membrane; Biological process=small GTPase mediated signal transduction
  Homolog annotation: Hit_ID=Q70WD6; Match level="QueryCoverage=91%, HitCoverage=89%, E-value=1e-106, Identity=96%"; Hit description=RAB -like small G-protein
  Pfam annotation: Domain name=Arf; Domain location=7-166; Score=-71.7; E_value=0.0005; Accession=PF00025.13; Description=ADP-ribosylation factor family
  Pfam annotation: Domain name=MMR_HSR1; Domain location=7-121; Score= -4.6; E_value=0.0027; Accession=PF01926.15; Description=GTPase of unknown function
  Pfam annotation: Domain name=Miro; Domain location=8-121; Score=49.0; E_value=1.8e-11; Accession=PF08477.5; Description=Miro-like protein
  Pfam annotation: Domain name=Ras; Domain location=8-168; Score=298.5; E_value=1.4e-86; Accession=PF00071.14; Description=Ras family
  Pfam module annotation: Pfam domain module=Arf::MMR_HSR1::Miro::Ras; Domain location=7-166::7-121::8-121::8-168
MSYAYLFKYIIIGDTGVGKSCLLLQFTDKRFQPVHDLTIGVEFGARMITIDNKPIKLQIWDTAGQESFRSITRSYYRGAAGALXYDITRRETFNHLASWLEDARQHANANMTVMLIXNKCDLSHRRAVSYEEGEQFAKEHGLVFMEASAKTAQNVEEAFIKTAGTIYKKIQDGIFDVSNESNGIKVGYAVPNSSGGAAGSSSQAGGCCS

SEQ ID NO: 103610 - protein, 63 aa, Setaria italica
  misc_feature (62)..(62): Xaa can be any naturally occurring amino acid
  Transcript Sequence Number=SeqID_37636
RPIIQIVTRQDACFICSLLCRCLQAQYWPHTYYNTGDDRIDKQAASVTVGTGIRRSFSFRCXV

SEQ ID NO: 103611 - protein, 154 aa, Setaria italica
  Transcript Sequence Number=SeqID_37637
  Gene Ontology: Mol. function=dopamine beta-monooxygenase activity; Biological process=histidine catabolic process
  Homolog annotation: Hit_ID=B9RNX5; Match level="QueryCoverage=73%, HitCoverage=13%, E-value=3e-49, Identity=82%"; Hit description =Dopamine beta-monooxygenase, putative
LVVTSAPSGARYPNPPNPDKVLYINKKEAPLLKVERGVPVKFSVQAGHDVALYITSDPIGGNATLRNKTEVIYAGGPNAHGVLATPKVLVWLPDRNTPDLVYYQSLYEQKMGWKVQVVDGGLSDMYNNSVLLDDQQVTLFWSLSPDSISIAARG

SEQ ID NO: 103612 - protein, 99 aa, Setaria italica
  Transcript Sequence Number=SeqID_37638
TWCREKESLLALTPLHDPSLHYTHFQWASRSQVLEINYHETELSTKAFLQLGNPCFYYLLAETPHISIISTLGTTATSTCSSLLPCFSQCCRFVLQLLN

SEQ ID NO: 103613 - protein, 123 aa, Setaria italica
  misc_feature (104)..(104): Xaa can be any naturally occurring amino acid
  Transcript Sequence Number=SeqID_37639
  Homolog annotation: Hit_ID=Q2HU53; Match level="QueryCoverage=98%, HitCoverage=20%, E-value=1e-17, Identity=35%"; Hit description =Tetratricopeptide-like helical
YADTGLWDSTEAVRDAMTEQGLDVERQCSWLYHGTAVHSFEAGDLSHPAIDAILSTWKDLTTRMEQSGYSPRDIEPYCNIEADPFSCHHTEKIAVCYGLISTNXTNQYDISKNFRMCLECHSS

SEQ ID NO: 103614 - protein, 59 aa, Setaria italica
  Transcript Sequence Number=SeqID_37640
DQMTGTPQIQVLVTLWAIKRLGIAGQQQQCRLHLSELGTLVHRRTGQLVDFVFSQSTII

SEQ ID NO: 103615 - protein, 85 aa, Setaria italica
  misc_feature (65)..(65): Xaa can be any naturally occurring amino acid
  Transcript Sequence Number=SeqID_37641
PAPPCEITVSFRGKYEIHWVYVRSTARIYELYHSTDAKGTSKDYLCTVRCGLAAKEPQPCGEESXMSQGSGGAPTSDKREHENQK

SEQ ID NO: 103616 - protein, 72 aa, Setaria italica
  Transcript Sequence Number=SeqID_37642
SCFCCLSQEIDMPEKRATEPDMVDEYVDIGDEMPTVNYQSVEIEKDAQVASSSSGSGSGSSSSSGMYGRAND

SEQ ID NO: 103617 - protein, 355 aa, Setaria italica
  Transcript Sequence Number=SeqID_37643
  Gene Ontology: Mol. function=protein binding
  Homolog annotation: Hit_ID=B6TY40; Match level="QueryCoverage=90%, HitCoverage=70%, E-value=2e-80, Identity=51%"; Hit description =Bromodomain containing protein
  Pfam annotation: Domain name=Bromodomain; Domain location=13-98; Score=93.7; E_value=6.4e-25; Accession=PF00439.17; Description =Bromodomain
PPPALVEAMRKRCAEILMRLRKSKNSVWFNSPVDVEGLKLHDYRAIIRSPMDLGTVKHNLAAGRYPSHEAFADDVRLTFNNALRYNPPDHHVHRYAGSLLATFEGLYKEAVSWFDQQRPPIEPPMPLPDLPAPLQHLPVSVPVQAPPRIGGGRRPKPKAREPNKREMDEEEKQKLRVEIENLPEEKMLNVLQIVQKRNSDPALTGEVVELDFDELDIETLWELDRFVVNWRKALKKSQRNSVMNGDAAAMNGDTIDVTIIPDEDDMVQVDVNPPMVVEIGDSEIDMPEKRATEPDMVDEYVDIGDEMPTVNYQSVEIEKDAQVASSSSGSGSGSSSSSDSDSDSDSDGDDARSPD

SEQ ID NO: 103618 - protein, 71 aa, Setaria italica
  Transcript Sequence Number=SeqID_37644
MEKAGRHHQIMAGGGGGGMKKVGPAAAPAMGLQKQNSWSPDIERDEAWERRRRGMRRGGSALRRVRSVTDD

SEQ ID NO: 103619 - protein, 163 aa, Setaria italica
  Transcript Sequence Number=SeqID_37645
AASFFSGMDGLGFGARLDDVSRRRGAAGAQEHFGNSASLSVGPPGLLFNGTGDLDEWQFGPSRIYSGGAMANYSTFDIGSLWTDMDPENAEYRRNVQNCFMSNIEKMNANKDASYMSDSDLSDALSGLRLSNSRVMDERNRGEKLLDELLKCQRDSLKLVMIT

SEQ ID NO: 103620 - protein, 105 aa, Setaria italica
  Transcript Sequence Number=SeqID_37646
  Subcellular localization annotation: CTP_CleavageSite=41; ConfidenceScore=5.18e-01
NAVLKRVSDMQSDTYFRQNCSYSISSAWFVILTLSSLQFCSASSTPSCLKRTAQIICEPIYKLPLRPLPRVLHSCLLSGAPPSPTPRGMLYSPRLVDFTAPQPFT

SEQ ID NO: 103621 - protein, 254 aa, Setaria italica
  Transcript Sequence Number=SeqID_37647
TVNNYYCEFRPVEARQAAASCIKRAIQICHIQGTPRVALVSDTPSFVQDIKSDISEFAEVIYFDYELFVNKSNWMFGNDTPLDFRLRDWGPAPRWAAIVDFFLASRARYAVITGAHPRVGTTYAQLIAALAAANTYDLKPSGANFTFLSSIHSSLLVHGLSTQVGRSHIWDTYAGPLSCGHQPHQCAVTPLLPPTWWDGTWQSPNPRDVKRLSEYGVQLSITGEVDESQLLAHCRSREDHVDRYSVLSSDIKNS

SEQ ID NO: 103622 - protein, 76 aa, Setaria italica
  misc_feature (21)..(21): Xaa can be any naturally occurring amino acid
  Transcript Sequence Number=SeqID_37648
  Gene Ontology: Mol. function=binding; Cellular component=endoplasmic reticulum; Biological process=intracellular protein transport
  Homolog annotation: Hit_ID=Q6X9T1; Match level="QueryCoverage=77%, HitCoverage=51%, E-value=8e-22, Identity=86%"; Hit description=Alpha- SNAP (Fragment)
CRGDPVAITNSLERYQEIEPXTFSGTREYKLLADLAASMDEGDIAKFTDAIKEFDSMTRLVCFVATAMFYFETSSR

SEQ ID NO: 103623 - protein, 289 aa, Setaria italica
  Transcript Sequence Number=SeqID_37649
  Gene Ontology: Mol. function=binding; Cellular component=endoplasmic reticulum; Biological process=intracellular protein transport
  Homolog annotation: Hit_ID=B6UFA9; Match level="QueryCoverage=95%, HitCoverage=95%, E-value=1e-131, Identity=81%"; Hit description =Alpha-soluble NSF attachment protein
  Pfam annotation: Domain name=NSF; Domain location=131-142; Score =10.1; E_value=9.7; Accession=PF02071.12; Description=Aromatic-di -Alanine (AdAR) repeat
  Pfam annotation: Domain name=NSF; Domain location=32-43; Score=12.3; E_value=2; Accession=PF02071.12; Description=Aromatic-di-Alanine (AdAR) repeat
  Pfam annotation: Domain name=NSF; Domain location=52-63; Score=7.7; E_ value=23; Accession=PF02071.12; Description=Aromatic-di-Alanine (AdAR) repeat
  Pfam annotation: Domain name=NSF; Domain location=72-83; Score=14.3; E_value=0.53; Accession=PF02071.12; Description=Aromatic-di-Alanine (AdAR) repeat
  Pfam annotation: Domain name=NSF; Domain location=91-102; Score=9.0; E_value=15; Accession=PF02071.12; Description=Aromatic-di-Alanine (AdAR) repeat
  Pfam annotation: Domain name=TPR_1; Domain location=112-145; Score =15.5; E_value=0.08; Accession=PF00515.20; Description=Tetratricopepti de repeat
  Pfam annotation: Domain name=TPR_1; Domain location=53-86; Score=3.7; E_value=2.1; Accession=PF00515.20; Description=Tetratricopeptide repeat
  Pfam annotation: Domain name=TPR_2; Domain location=112-145; Score =17.3; E_value=0.064; Accession=PF07719.9; Description=Tetratricopepti de repeat
  Pfam annotation: Domain name=TPR_2; Domain location=152-185; Score =0.4; E_value=31; Accession=PF07719.9; Description=Tetratricopeptide repeat
  Pfam annotation: Domain name=TPR_2; Domain location=72-105; Score =8.8; E_value=2.7; Accession=PF07719.9; Description=Tetratricopeptide repeat
  Pfam module annotation: Pfam domain module=NSF::NSF::NSF::NSF::NSF::TP R_1::TPR_1::TPR_2::TPR_2::TPR_2; Domain location=131-142::32-43::52 -63::72-83::91-102::112-145::53-86::112-145::152-185::72-105
MGDHEARGDDFEKKAEKKLSGWAIFGSKYEDAADLFDKAANSFKLAKNWSRAASVYIKIANCHLKGDSKHEAASAYVEAANCYKKFSPQEAAQALNQAVNLFLEIGRLNMAARYSKDIGEIYQQEQDLEKATDYLERAADLFDSEGQSSQANTIKQKVAEIAAQLEQYPKATEIFEGIARQSINNNLLKYSVRGILLNAGICQLCRGDPVAITNSLERYQEIDPTFSGTREYKLLADLAASMDEGDIAKFTDAIKEFDSMTRLDPWKTTLLLRAKNELKKKEDDEDDLT

SEQ ID NO: 103624 - protein, 283 aa, Setaria italica
  Transcript Sequence Number=SeqID_37650
  Gene Ontology: Mol. function=amino acid transmembrane transporter activity; Cellular component=integral to membrane; Biological process=amino acid transport
  Homolog annotation: Hit_ID=B6UB79; Match level="QueryCoverage=92%, HitCoverage=53%, E-value=1e-135, Identity=93%"; Hit description =Cationic amino acid transporter
DKNAEADAGAASAATAAPGGGHKKLSLVPLIFLIFFEVAGGPYGAEPAVQSAGPLYALLGFLVFPFIWAIPEALVTAELSTAMPGNGGFVLWADRAFGPFSGSLMGTWKYVSGAINGAAFPALCADYLARVVPAVSGGGPRTATIVAFNVALTVVNYTGLTVVGWSAVGLGVASLSPFLLMSGVALPKIRPRRWGGVAPEKDWKLFFNTLFWNLNYWDSVSTMAGEVERPGKTLPKALVSAVAMTSLGYLLPLMAATGAIDVAPEDWGNGFFADAAGMIAGRW

SEQ ID NO: 103625 - protein, 101 aa, Setaria italica
  misc_feature (18)..(18): Xaa can be any naturally occurring amino acid
  Transcript Sequence Number=SeqID_37651
  Pfam annotation: Domain name=UPF0203; Domain location=7-91; Score =67.0; E_value=7e-17; Accession=PF05254.4; Description=Uncharacterised protein family (UPF0203)
MVFGRSKSSSSATPSAPXKAAAACSELRAAYHECFNRWYADKFAKGLFQKDDCADHWHKYRACLEEHLEDKHLRQILLDAETSAFYARPEADPPSGQGATK

SEQ ID NO: 103626 - protein, 63 aa, Setaria italica
  Transcript Sequence Number=SeqID_37652
YACDDDFMSPNVILYRVDTSYFNAYTYLVILNLLYLVAIRLWFFRSVRCHMLSLLRANTRSLK

SEQ ID NO: 103627 - protein, 109 aa, Setaria italica
  Transcript Sequence Number=SeqID_37653
  Gene Ontology: Mol. function=galactosyltransferase activity; Cellular component=membrane
  Subcellular localization annotation: CTP_CleavageSite=44; ConfidenceScore=5.07e-01
MATALKLLIVSLFFSVSLQGTSGERCGTSSIQVQTINTGETASSGDMEFEVEVKNLCSCSVRNVRLYGGGFATTVEVDPAVFRADDGGVYLVNGGGPIESMGAVSFRYA

SEQ ID NO: 103628 - protein, 63 aa, Setaria italica
  Transcript Sequence Number=SeqID_37654
SIHWEQEHKIHTIFLIHIHDPCWIVGMRNDQSSRDHKKKSPTLGITHHVTRPQPPPWLTLATN

SEQ ID NO: 103629 - protein, 90 aa, Setaria italica
  Transcript Sequence Number=SeqID_37655
  Subcellular localization annotation: CTP_CleavageSite=83; ConfidenceScore=5.64e-01
KGVNSQFTRGQMSIAFLFFLLSFFLLFLFLFHTILSSLFFFFLSHFFSSFFPSLIWCLLAPYPFVSFLPHIISLSKPNFAQLTLGKVGSG

SEQ ID NO: 103630 - protein, 114 aa, Setaria italica
  Transcript Sequence Number=SeqID_37656
GNWDKIEVLEAEETRFEVYEANFGQSRWAMVTTLGDDQVLFLCQRFGRSVNVSHNEMPGDRIFFIDNDKGFSSVYNKGASSSCSVYDMTDGKVSSPLPMVSWKPGTVFATWLLP

SEQ ID NO: 103631 - protein, 108 aa, Setaria italica
  Transcript Sequence Number=SeqID_37657
  Gene Ontology: Mol. function=catalytic activity; Biological process =cellular metabolic process
  Homolog annotation: Hit_ID=B6T555; Match level="QueryCoverage=91%, HitCoverage=28%, E-value=1e-38, Identity=78%"; Hit description =Dihydroflavonol-4-reductase
MASPSASRRVTGGGSYIASWLVKLLLTRGYAVNATVRDPGDPKNAHLGRLDGAAGNLRLFKADMLDPDALATAVAGCEGVFHVASPVPSVKAVDPESEVLAPAVKGTL

SEQ ID NO: 103632 - protein, 144 aa, Setaria italica
  misc_feature (11)..(11): Xaa can be any naturally occurring amino acid
  misc_feature (104)..(104): Xaa can be any naturally occurring amino acid
  Transcript Sequence Number=SeqID_37658
  Homolog annotation: Hit_ID=Q7XKC2; Match level="QueryCoverage=93%, HitCoverage=37%, E-value=5e-24, Identity=47%"; Hit description =OSJNBa0064G10.9 protein
  Pfam annotation: Domain name=DUF1668; Domain location=1-135; Score= -115.6; E_value=0.05; Accession=PF07893.5; Description=Protein of unknown function (DUF1668)
WDKVGNWMLPXHGKVEYVPEFKLWFGLSSDGRHLAAADLSTMDAHSPPQVAAGHSWEEFQRPVEWAERGLDIDQVGVQLVNLGSGRFCIARFFMNSLESEDCRXFAILTGVEMDMGVRPSGKVVLDMIPHKAMFHLRSTVDGGY

SEQ ID NO: 103633 - protein, 168 aa, Setaria italica
  misc_feature (121)..(121): Xaa can be any naturally occurring amino acid
  Transcript Sequence Number=SeqID_37659
  Gene Ontology: Mol. function=serine-type endopeptidase activity; Biological process=DNA integration
  Homolog annotation: Hit_ID=Q2QVH7; Match level="QueryCoverage=55%, HitCoverage=9%, E-value=6e-19, Identity=47%"; Hit description =Transposon protein, putative, CACTA, En/Spm sub-class
DERVDDLEVNDPTSPLPASPPNRPAAPRMVNTYEKAPSADVDKFLNVLKKKASSSGEKSVTRSVSRQKEKDQNLNFFASDDVPMDYEHGKPFLYRWDLLEGPWELNKLHVWIMNALKQGIXAITAHVPTKLFLGVGVLSYQIVIDFENLHRLYRRQHLDVNLIFVWCL

SEQ ID NO: 103634 - protein, 108 aa, Setaria italica
  Transcript Sequence Number=SeqID_37660
  Gene Ontology: Mol. function=sucrose synthase activity; Cellular component=plasma membrane; Biological process=sucrose metabolic process
  Homolog annotation: Hit_ID=Q9FHU4; Match level="QueryCoverage=98%, HitCoverage=11%, E-value=4e-39, Identity=68%"; Hit description =Sucrose synthase
QEWGLERGWADTAEACRETISCLSEVLQAPDPTNMDSFFSRVPSLFSIVIFSIHGYFGQEKVLGLPDTGGQVVYILDQVRALEDELLQRINQQGLHFTPRILVVPKPH

SEQ ID NO: 103635 - protein, 60 aa, Setaria italica
  Transcript Sequence Number=SeqID_37661
MYTIRCFRFACVLQAVLLSKYYGFEAKLFPALTSEFLYKFTVLISSKNFQFFQRSNESKS

SEQ ID NO: 103636 - protein, 53 aa, Setaria italica
  Transcript Sequence Number=SeqID_37662
  Gene Ontology: Mol. function=actin binding; Cellular component =intracellular
  Homolog annotation: Hit_ID=Q10P87; Match level="QueryCoverage=100%, HitCoverage=37%, E-value=3e-19, Identity=84%"; Hit description=Actin- depolymerizing factor 5
GRVPCLWQVGGPGEGYEELVAALPGDDCRYAVFDFDFVTVDNCQKSKIFFIAW

SEQ ID NO: 103637 - protein, 89 aa, Setaria italica
  Transcript Sequence Number=SeqID_37663
  Homolog annotation: Hit_ID=B6UD95; Match level="QueryCoverage=100%, HitCoverage=20%, E-value=4e-26, Identity=70%"; Hit description =CRAL/TRIO domain containing protein
SAELADGVAFVAGHDDDGRPVVVFRIKQDYPKFHSQKSFVRLLVFTLEVAVACMSRFVDQFVLLFDASFFRSASAFLNLLMGTLKIVAD

SEQ ID NO: 103638 - protein, 232 aa, Setaria italica
  Transcript Sequence Number=SeqID_37664
  Gene Ontology: Mol. function=Rab GTPase activator activity; Cellular component=intracellular; Biological process=regulation of Rab GTPase activity
  Homolog annotation: Hit_ID=A8I108; Match level="QueryCoverage=92%, HitCoverage=61%, E-value=7e-56, Identity=47%"; Hit description =RabGAP/TBC protein
  Pfam annotation: Domain name=TBC; Domain location=1-164; Score=107.8; E_value=3.6e-29; Accession=PF00566.10; Description=TBC domain
LPRTFPCHPWLNSEEGQASLRRVLVGYSFRDSEVGYCQGLNYVAALLLLVMKKEEDAFWMLAVLLENVLVSDCYTDTLSGCHVEQRVFKDLLAKKCPRIASHLEAMGFDVSLVATEWFLCLFSKSLPSETTLRVWDVLFNEGAKVLFHVALAIFKMREDDLLRIQHIGDVIDILQTTTHHLYDPDELLTFAFDKIGSMTTNTITKERKKQETVVMAELDQRIRRLSSLKMDG

SEQ ID NO: 103639 - protein, 60 aa, Setaria italica
  Transcript Sequence Number=SeqID_37665
ELVYTVQEVILLIPSYGSLLHMISLYSCSCPSCSNLSTHIFICHNQLMQTALHTRKKMCS

SEQ ID NO: 103640 - protein, 202 aa, Setaria italica
  Transcript Sequence Number=SeqID_37666
  Gene Ontology: Mol. function=peptidyl-prolyl cis-trans isomerase activity; Cellular component=chloroplast; Biological process=protein folding
  Homolog annotation: Hit_ID=B6TC76; Match level="QueryCoverage=90%, HitCoverage=72%, E-value=7e-86, Identity=86%"; Hit description=FK506 binding protein
  Pfam annotation: Domain name=FKBP_C; Domain location=90-195; Score =71.0; E_value=4.4e-18; Accession=PF00254.20; Description=FKBP-type peptidyl-prolyl cis-trans isomer
  Subcellular localization annotation: CTP_CleavageSite=4; ConfidenceScore=5.20e-01
QSVQAQAQPAARPKRAGGADSTDWVASSLTRRFGIGAGLAWAGFLAVGVVSEQLKTRFEVAQQQANTKDVEQEQEVVLPNGIRYYELRVGGGDVPRPGDLVVIDLQGRVAGGGGEAFVDTFGEGKRPLALVMGSRPYTRGMCEGVEYVLRSMRAGGKRRVIVPPGLGFGDDGADFGEEHVQIPPGATLEYVVQVDKVSIAPA

SEQ ID NO: 103641 - protein, 106 aa, Setaria italica
  Transcript Sequence Number=SeqID_37667
MEDMELATEEALKRAEMAEAAKKAVEGELKRWREKEQKKTAEAQPSTGEHAGTSPPVPQASGGKASEKNEGHQRTAGTFISLSFSDSSTFRLRESNSSFEIVIFAA

SEQ ID NO: 103642 - protein, 507 aa, Setaria italica
  Transcript Sequence Number=SeqID_37668
  Gene Ontology: Mol. function=phosphoprotein phosphatase activity; Cellular component=plasma membrane; Biological process=protein modification process
  Homolog annotation: Hit_ID=B9S9W3; Match level="QueryCoverage=99%, HitCoverage=78%, E-value=9e-86, Identity=40%"; Hit description =Paramyosin, putative
  Pfam annotation: Domain name=DUF827; Domain location=6-405; Score =223.9; E_value=4.1e-64; Accession=PF05701.3; Description=Plant protein of unknown function (DUF827)
  Pfam annotation: Domain name=EzrA; Domain location=17-439; Score= -389.2; E_value=0.061; Accession=PF06160.4; Description=Septation ring formation regulator, EzrA
  Pfam module annotation: Pfam domain module=DUF827::EzrA; Domain location=6-405::17-439
EGLGTDGPLKQELESAREQYAVALADLDAAKQELRKLKKDFETSLDMRLSAAQQEEESLHTTEANKEKANQLRNEIAEIQESLMHVKAATQQAQEEESQIRAEKDVARTTYKQALEETQKKLSSLRNDFDPAAYESLKEKLDQTNSEIASMQKKIEDARARDLESVAIVSTELDDAKEMLQKVAEEESSLRGLVESLKVELEAVKQEHNQLKEKDTETESIVGDLHVKLQKCKSELKAAVAAESKATSASDDLMLALQQLSSESKNALQEAEMMQKSATELRDEAEKARVELAEAEQKLQLALKEAEEAKAAEARALDQIKELSDRASAARASTSESAANITISKEEFDSLSRKVEESEKLSEMKVAAAMAQVEAVRASENEAIKKLEAARKEMEDMELATEEALKRAEMAEAAKKAVEGELKRWREKEQKKTAEAQPSTGEHAGTSPPVPQASGGKASEKNEGHQRNSRTLLRKSFMLPNITSMFHKKKGHAGSSSPSYLPGEKSV

SEQ ID NO: 103643 - protein, 53 aa, Setaria italica
  Transcript Sequence Number=SeqID_37669
RHITFLSAWKFHSSVTLLQQRTKNVVLIAMYVTDHFKTRCITRPLSFALEQNL

SEQ ID NO: 103644 - protein, 134 aa, Setaria italica
  misc_feature (64)..(64): Xaa can be any naturally occurring amino acid
  misc_feature (79)..(79): Xaa can be any naturally occurring amino acid
  Transcript Sequence Number=SeqID_37670
  Gene Ontology: Mol. function=binding
  Pfam annotation: Domain name=HEAT; Domain location=1-35; Score=18.6; E_value=0.027; Accession=PF02985.14; Description=HEAT repeat
ASTHILPALITLGSDHNLTVKYASIDAFGAVAQHFKNDMVKNDSYFLPLNFTYFVYFLLSLTLXQVVDKIRIQMDAFLXKIGSHEATISVIRALAVAVPHSTDRLREYLLTKIFKLTSITPSGDDIERRRERAN

SEQ ID NO: 103645 - protein, 116 aa, Setaria italica
  Transcript Sequence Number=SeqID_37671
  Gene Ontology: Mol. function=binding
  Homolog annotation: Hit_ID=Q9P260; Match level="QueryCoverage=87%, HitCoverage=8%, E-value=1e-22, Identity=54%"; Hit description=LisH domain and HEAT repeat-containing protein KIAA1468
  Pfam annotation: Domain name=HEAT; Domain location=29-65; Score=10.0; E_value=2.9; Accession=PF02985.14; Description=HEAT repeat
  Pfam annotation: Domain name=HEAT; Domain location=68-104; Score =15.5; E_value=0.23; Accession=PF02985.14; Description=HEAT repeat
  Pfam module annotation: Pfam domain module=HEAT::HEAT; Domain location=29-65::68-104
HHIFFIFISVFLVIWLQACVELAKSVGEMRTETELLPQCWEQINHQYEERRLLVAQSCGELAVYVRPEIRDSLILSIVQQLVEDAATVVREAATHNLALLLPLFPNLDKYYKVEEL

SEQ ID NO: 103646 - protein, 980 aa, Setaria italica
  misc_feature (22)..(22): Xaa can be any naturally occurring amino acid
  misc_feature (247)..(247): Xaa can be any naturally occurring amino acid
  Transcript Sequence Number=SeqID_37672
  Gene Ontology: Mol. function=binding
  Homolog annotation: Hit_ID=Q08BT5; Match level="QueryCoverage=65%, HitCoverage=53%, E-value=1e-65, Identity=28%"; Hit description=LisH domain and HEAT repeat-containing protein KIAA1468 homolog
  Pfam annotation: Domain name=HEAT; Domain location=276-313; Score =9.6; E_value=3.3; Accession=PF02985.14; Description=HEAT repeat
  Pfam annotation: Domain name=HEAT; Domain location=335-371; Score =10.0; E_value=2.9; Accession=PF02985.14; Description=HEAT repeat
  Pfam annotation: Domain name=HEAT; Domain location=374-410; Score =15.5; E_value=0.23; Accession=PF02985.14; Description=HEAT repeat
  Pfam annotation: Domain name=HEAT; Domain location=414-446; Score =0.4; E_value=44; Accession=PF02985.14; Description=HEAT repeat
  Pfam annotation: Domain name=HEAT; Domain location=700-736; Score =8.4; E_value=4.5; Accession=PF02985.14; Description=HEAT repeat
  Pfam annotation: Domain name=HEAT; Domain location=739-775; Score =24.1; E_value=0.00058; Accession=PF02985.14; Description=HEAT repeat
  Pfam module annotation: Pfam domain module=HEAT::HEAT::HEAT::HEAT::HEA T::HEAT; Domain location=276-313::335-371::374-410::414-446::700 -736::739-775
ALRRYYYQYLSSTAEAAEEKIXSILRENETLLKDNERLNAEKDSLTKSREAANSQVAALRKSLEAAHKEIKEKEKMVQDLRQSLDVQRKELNDCRAEITALKMYIEGAQSNKQLFVGNSDDLESHSIANSMGEAATLNNKDGDSKGSESITNKLGSAVNLTEDPQKDHQVIENSAEGPSVSEAPVSCSSHENGGYGTSEEDKSMSNISSENVTLNSSLHGASMIGKIQESSDGISVYLSTEKLESPXKQKSSDKMALETIKIVSDALPKIVPYVLINHREELLPLIICAIEKHPDSDVRDSLTHTLFNLIKRPDGQQRRIIMDACVELAKSVGEMRTETELLPQCWEQINHQYEERRLLVAQSCGELAVYVRPEIRDSLILSIVQQLVEDAATVVREAATHNLALLLPLFPNLDKYYKVEELMFQLVCDPSGAVVEVALKELVPAVVRWGGKLDQISRVLLAHILASAQRCPPISGVEGTIDSHLRVLGEQERWNIDVLLRMLTELLPFIHQKAIETCPFAPVDPTGSTPENFFSASCLKLYSTGDSEWSAFEWMHTDCLPDLIKLACLLPVKEDNLRTIITKYLLEVSGCYGKDYLEHIMLPVFLVAAGDIDSGDFTYFPLSIQPKVRGLRPKTSTAEKLAIMCVFPLLLSGILGSPSSRQQLEEYLRKVLIQNTKDGSFSMHHTTEIINAVRFLCLFVEHHGVIFNILWEMVVSSDTSLKINAAALLKALVPYIDVKVASTHILPALITLGSDQNLTVKYASIDAFGAVAQHFKNDMVVDKIRIQMDAFLEDGSHEATISVIRALAVAVPHSTDRLREYLLTKIFKLTSITPSGDDIERRRERANVYCEALRALDATDLPATSVRDLLLPSIQNLLKDPDALDPAHKEALEIIGREQSGGTLESLSKVMGAHLGIASSVSSFFGESSLLGKKEGGEQHDPATTAAPDPNPQAQPESTRFGRIMRGGFGDILRGQSKGQ

SEQ ID NO: 103647 - protein, 54 aa, Setaria italica
  misc_feature (37)..(54): Xaa can be any naturally occurring amino acid
  Transcript Sequence Number=SeqID_37673
LAALGHCIIFITELYLYRNLVILLLTGTYCQLQITKXXXXXXXXXXXXXXXXXX

SEQ ID NO: 103648 - protein, 111 aa, Setaria italica
  Transcript Sequence Number=SeqID_37674
MLFICSGYIHLGHGKPYWRASFNLPQCNILFLAGLNFTHPLCDHHVRPTSDKRFPCCKQIADLRNTGDVAERSEQVGHYWLELGRRSNYWLHMVIAILSYILFGLLPPVIY

SEQ ID NO: 103649 - protein, 696 aa, Setaria italica
  Transcript Sequence Number=SeqID_37675
  Pfam annotation: Domain name=DUF125; Domain location=490-656; Score =59.9; E_value=9.4e-15; Accession=PF01988.11; Description=Integral membrane protein DUF125
FYYSPNKEGAEEDEVTEVVEVGGQKENSKETSIAEGKETEKEENVNDQETNHSSSNGKLETKENGSHSNGVHEISSGTETVSVAAEETQPLKVIATISERKNILTNWNGALDISSGSTSRTEVHEIEVEKDENATKGKVHIEEYDLEKILDEQETHDLYCPNCKSCITRRVILKKRKRTARQAKRDEPPKKPQLEEPSANVPNQTPTESHDQESPKVFRCLSCFAFFIPTGCGFNIFRIFERSNANQQVQVQHSASQETSEHCGSWLLSCFQTVDSPKQSTDADSLKEPLLSGSQSNNDKAPVEDSASSSHNQATVGEAEQLNQPLLAGSSSKVQTTTGNNGEESKQPFSECHGSASSSVAVHTSSSSSSQSQTGILTQTEGHVVIVQQDEAQQEQISPSKPAGDIQGNTTGASGDNLFINHINQPLFNPELKLPTKILPGADNQTGGKPTPVIPQSGQSPHSVVTVPEATESEPPVCPAPSVQRDEWDILKAIVYGGLVESIMSLSVVSAAAASGAKTLDIFILGMANLIGGLPLIYHNIADLRNTGDVAERSEQVGHYWLELGRRSNYWLHMVIAILSYILFGLLPPVIYGLSFRTSDNRENKMMVVAAASLLCIALLAIGKAHVKSRTYITTLLYYVSIGFSCSGLSYIAGVLITRLLAHFGLIDHGGASAPAPPSLLFPQAMGADAAAWASY

SEQ ID NO: 103650 - protein, 153 aa, Setaria italica
  Transcript Sequence Number=SeqID_37676
  Gene Ontology: Mol. function=electron carrier activity; Biological process=oxidation reduction
  Homolog annotation: Hit_ID=B9T5M5; Match level="QueryCoverage=100%, HitCoverage=30%, E-value=7e-53, Identity=62%"; Hit description =Cytochrome P450, putative
EAYLTASWAGEFDNLCDWYAHLLRSSPAQTVHVHVLRNVLTANPVTVDHMLRGRFDNYPKGAPFSAILADFLGRGIFNVDGDSWLFQRKLAAAELAAPALRGYATGVVASELRCRLIPLLHSASSGGEKLLDLQDVFRRFAFDCICRISFGLD

SEQ ID NO: 103651 - protein, 136 aa, Setaria italica
  misc_feature (116)..(116): Xaa can be any naturally occurring amino acid
  misc_feature (129)..(129): Xaa can be any naturally occurring amino acid
  Transcript Sequence Number=SeqID_37677
  Gene Ontology: Mol. function=nucleic acid binding; Cellular component= cytoplasm; Biological process=multicellular organismal development
  Homolog annotation: Hit_ID=Q75HC2; Match level="QueryCoverage=100%, HitCoverage=12%, E-value=2e-68, Identity=87%"; Hit description =Protein argonaute 7
  Pfam annotation: Domain name=PAZ; Domain location=1-109; Score=106.7; E_value=8e-29; Accession=PF02170.14; Description=PAZ domain
EVEKALKNIRVFVCHRETDQRYHVHGLTEETTENLKFRDRSGKDYMVLDYFKEHYNHDIKFRKLPCLQIGKSKPCYVPMELCMVCEGQKFLGKLSDEQTSKMLKMGCQRPSERKGXIKGVVEGAFAARXNSYADQF

SEQ ID NO: 103652 - protein, 370 aa, Setaria italica
  Transcript Sequence Number=SeqID_37678
  Gene Ontology: Mol. function=RNA binding
  Homolog annotation: Hit_ID=B6U1B3; Match level="QueryCoverage=95%, HitCoverage=98%, E-value=5e-98, Identity=52%"; Hit description =Agenet domain containing protein
  Pfam annotation: Domain name=Agenet; Domain location=7-91; Score =35.3; E_value=2.4e-07; Accession=PF05641.4; Description=Agenet domain
MDLLLPFKIGDLAELKSFLIGYRSAWFRCKVHDMRLNSSAGYLEYYLEYIDYSTEQEKEWVKVFEENPTSSNQNSRESTQLMIRPCFPQWYYGHEVPEQFPNSDVTAIVDEAWKVGDLVDWFTAGCYWSGTITKLLGKNMVEVKLPPPPIGEGIRYRANCNDLRPTLEWSLTKGWTVPLSQAKRKHWHAARLLQHSKSESEKSTSDEESSSDDEYGDNGGGVQQSGCRALNLSQGGPVVLAPPSAKNSASSPKAQEDGIIPSAENLKLSSTSKPPGPGHGTQSAATSSQPAGTGVTVKQEPGIGISIKQEQEWPLTVAEADDGPDEFLEKLDKLQAKLDYLVERTQVGQERRAEVLASSHGSTKDNASSK

SEQ ID NO: 103653 - protein, 141 aa, Setaria italica
  Transcript Sequence Number=SeqID_37679
  Gene Ontology: Mol. function=oxidoreductase activity; Biological process=oxidation reduction
  Homolog annotation: Hit_ID=B6TQ13; Match level="QueryCoverage=97%, HitCoverage=39%, E-value=4e-67, Identity=91%"; Hit description =Flavonol synthase/flavanone 3-hydroxylase
  Pfam annotation: Domain name=2OG-FeII_Oxy; Domain location=4-103; Score=143.0; E_value=9.3e-40; Accession=PF03171.12; Description=2OG -Fe(II) oxygenase superfamily
VGEVYQNITISYYSPCPQPDLALGLQSHSDMGAITLLIQDDVGGLEVLKDGMWIPVAPLPDGILVILADQTEIITNGRYKSSVHRAVVNAECARLSVATFYDPSKSRKICTAPQLVSKDEPQKYRDVVYGDYCSQLWLLSL

SEQ ID NO: 103654 - protein, 57 aa, Setaria italica
  Transcript Sequence Number=SeqID_37680
  Gene Ontology: Mol. function=DNA binding; Cellular component=nucleus; Biological process=regulation of transcription, DNA-dependent
  Homolog annotation: Hit_ID=Q5ZBP6; Match level="QueryCoverage=84%, HitCoverage=8%, E-value=4e-15, Identity=68%"; Hit description=LEUNIG- like
QEVSVKVWSFKSGNDVECIHELNCSGNKFHSCVFHPNYPYLLIIGCYEASSPISHQA

SEQ ID NO: 103655 - protein, 290 aa, Setaria italica
  misc_feature (281)..(281): Xaa can be any naturally occurring amino acid
  Transcript Sequence Number=SeqID_37681
  Gene Ontology: Mol. function=DNA binding; Cellular component=nucleus; Biological process=regulation of transcription, DNA-dependent
  Homolog annotation: Hit_ID=Q5ZBP6; Match level="QueryCoverage=88%, HitCoverage=47%, E-value=1e-105, Identity=74%"; Hit description =LEUNIG-like
  Pfam annotation: Domain name=WD40; Domain location=174-212; Score =21.6; E_value=0.0033; Accession=PF00400.24; Description=WD domain, G- beta repeat
  Pfam annotation: Domain name=WD40; Domain location=216-254; Score =46.7; E_value=9.1e-11; Accession=PF00400.24; Description=WD domain, G-beta repeat
  Pfam annotation: Domain name=WD40; Domain location=259-290; Score =7.8; E_value=4.8; Accession=PF00400.24; Description=WD domain, G -beta repeat
  Pfam module annotation: Pfam domain module=WD40::WD40::WD40; Domain location=174-212::216-254::259-290
  Subcellular localization annotation: CTP_CleavageSite=53; ConfidenceScore=5.39e-01
SQQHSHSQQQLQQPALSGQQSQSSNQLLHQHGKSGVGSMPIDGNLPNSFGFPEQASKKRKKPVSSSGRANSSGTANTAGPSPSSAPSTPSTHTPGDAMSMPQLQYNGGPSKPLMMFGSDGTGSLTSPANPLADVDRLLEDGSLDENVESFLSQDDMDPRETMGRCMDSSKGLGFTEVAKARVSTNKVVCCHFSLDGKLLATGGHDKKVVLWFTDMLKPKSTLEEHSLLITDVRFSPGMTRLATSSFDKTVRVWDADNPGYSLRTFTGHSASVMSLDFHPNXKEDIVCSCD

SEQ ID NO: 103656 - protein, 261 aa, Setaria italica
  misc_feature (10)..(10): Xaa can be any naturally occurring amino acid
  Transcript Sequence Number=SeqID_37682
  Gene Ontology: Mol. function=DNA binding; Cellular component=nucleus; Biological process=regulation of transcription, DNA-dependent
  Homolog annotation: Hit_ID=Q5ZBP6; Match level="QueryCoverage=100%, HitCoverage=48%, E-value=1e-108, Identity=72%"; Hit description =LEUNIG-like
  Pfam annotation: Domain name=WD40; Domain location=137-174; Score =28.9; E_value=2.1e-05; Accession=PF00400.24; Description=WD domain, G-beta repeat
  Pfam annotation: Domain name=WD40; Domain location=181-219; Score =12.4; E_value=1.3; Accession=PF00400.24; Description=WD domain, G -beta repeat
  Pfam annotation: Domain name=WD40; Domain location=223-261; Score =27.8; E_value=4.3e-05; Accession=PF00400.24; Description=WD domain, G-beta repeat
  Pfam annotation: Domain name=WD40; Domain location=51-90; Score=36.4; E_value=1.2e-07; Accession=PF00400.24; Description=WD domain, G-beta repeat
  Pfam annotation: Domain name=WD40; Domain location=8-46; Score=24.0; E_value=0.00063; Accession=PF00400.24; Description=WD domain, G-beta repeat
  Pfam annotation: Domain name=WD40; Domain location=94-132; Score=9.1; E_value=3.3; Accession=PF00400.24; Description=WD domain, G-beta repeat
  Pfam module annotation: Pfam domain module=WD40::WD40::WD40::WD40::WD4 0::WD40; Domain location=137-174::181-219::223-261::51-90::8-46::94 -132
VLWFTDMLNXKSTLEEHSLLITDVRFSPGMTRLATSEVVKTVRVWDADNPGYSLRTFTGHSASVMSLDFHPNKEDIVCSCDSDGEVRCWSITNGSCVTCVRVFNEGATQLRFQPHQGKYLATASEKAISILDAETLQVCRTPLQGHVQIIQSVCWDAAGNYLASVSEDSVKVWSFKSGNDVECIHELNCSGNKFHSCVFHPNYPYLLIIGCYESLELWDIREKNTVTISNAHEGMVAALAASHSTGLVASVSHDQLVKLWK

SEQ ID NO: 103657 - protein, 131 aa, Setaria italica
  misc_feature (79)..(79): Xaa can be any naturally occurring amino acid
  misc_feature (118)..(118): Xaa can be any naturally occurring amino acid
  Transcript Sequence Number=SeqID_37683
  Gene Ontology: Mol. function=metal ion binding
  Homolog annotation: Hit_ID=Q8S7A7; Match level="QueryCoverage=98%, HitCoverage=21%, E-value=5e-45, Identity=76%"; Hit description =Putative DHHC-type zinc finger protein
  Subcellular localization annotation: CTP_CleavageSite=41; ConfidenceScore=5.32e-01
PHLQHEARSAFQPSIASSIRNLNLTSSPESSLDSPDLHPFRVSMSGADELRSFMSLAASESTAQKSIALSRSTSGGYEXASGGEDSDRIPSRIVHRSSNWTNVILNSGRREMALDLRXPTSGGFAANTRLN

SEQ ID NO: 103658 - protein, 191 aa, Setaria italica
  misc_feature (70)..(70): Xaa can be any naturally occurring amino acid
  Transcript Sequence Number=SeqID_37684
  Gene Ontology: Mol. function=oxysterol binding; Cellular component =cytosol; Biological process=steroid metabolic process
  Homolog annotation: Hit_ID=B6U0I9; Match level="QueryCoverage=97%, HitCoverage=46%, E-value=6e-78, Identity=76%"; Hit description =Oxysterol-binding protein OBPa
GGLNVLLEQVSHRPPVSALHATNAAGDVRLVWCQSPVPKFHGASIEAAVRGRRELRLPRHGERYEVDCPXLLIRLLPAPSVEWSGDVRVVCAESGLEAQLSYCRSRSFLGFGGDARCVRGRVFRSASRDETIYEIDGFWDRTVSLKDVSTGEVSVLYDAQRAISKLTTPVVQDHKGLAPSESAVVWARSAT

SEQ ID NO: 103659 - protein, 65 aa, Setaria italica
  misc_feature (23)..(23): Xaa can be any naturally occurring amino acid
  Transcript Sequence Number=SeqID_37685
  Gene Ontology: Mol. function=metal ion binding; Biological process =RNA-dependent DNA replication
  Pfam annotation: Domain name=DUF594; Domain location=1-40; Score =43.6; E_value=7.8e-10; Accession=PF04578.5; Description=Protein of unknown function, DUF594
FWAEMILYVSPSDDARAHLEVLXRREFITHLWALLTHAGVLKRGPTEPKCVICPTSAQVTVHIST

SEQ ID NO: 103660 - protein, 377 aa, Setaria italica
  Transcript Sequence Number=SeqID_37686
  Gene Ontology: Mol. function=metal ion binding; Biological process =RNA-dependent DNA replication
  Pfam annotation: Domain name=DUF594; Domain location=313-371; Score =118.1; E_value=3e-32; Accession=PF04578.5; Description=Protein of unknown function, DUF594
LPYCSWLTVDCLHVKRQDDHNNHSNHKNHSVMYVTIVITVVLAVLEAYQLYLYIASGWFKVALIRSYVNAPFLQRCCCFEMIIRLLLIWKAFRPWNGRLGQYCLLKKLGRKSRVKNCLHHTTLRLVDKAKKGSKKSVKLSEKVKKAVVDSLLLSNGYLTGGLKSLENNGVHGLLTWACDATATDGAVTRTILVWHIATTVCEHQLDKKAREEDAVKTASTLSKYCMHLLAVAPNLLPDHSSISESILDQSIDEAGKLLKEAKEKKIKGKNKKIKGKNKKIEGRCEILMQISTDVDCVGDETRLVAQGVHLARQLIDNIQDSTTRWKVLSDFWAEMMLYVSPSDDAREHLEVLARGGEFITHLWALLTHAGVLKRGPR

SEQ ID NO: 103661 - protein, 84 aa, Setaria italica
  Transcript Sequence Number=SeqID_37687
FFFLSHTNTFRSIPWSTFTSQIAYPKKKEKKLSHLRLQMNDLYISYCFLHHVRLHCRHGALSKRSSKTNKLLNTRPDLMVNFYT

SEQ ID NO: 103662 - protein, 351 aa, Setaria italica
  Transcript Sequence Number=SeqID_37688
  Gene Ontology: Mol. function=protein binding; Cellular component=cell wall
  Homolog annotation: Hit_ID=B9RKF0; Match level="QueryCoverage=82%, HitCoverage=69%, E-value=1e-89, Identity=55%"; Hit description =Serine-threonine protein kinase, plant-type, putative
  Pfam annotation: Domain name=LRRNT_2; Domain location=50-89; Score =40.5; E_value=6.9e-09; Accession=PF08263.4; Description=Leucine rich repeat N-terminal domain
  Pfam annotation: Domain name=LRR_1; Domain location=127-149; Score =11.2; E_value=2.2; Accession=PF00560.25; Description=Leucine Rich Repeat
  Pfam annotation: Domain name=LRR_1; Domain location=151-171; Score =11.8; E_value=1.6; Accession=PF00560.25; Description=Leucine Rich Repeat
  Pfam annotation: Domain name=LRR_1; Domain location=175-195; Score =11.2; E_value=2.2; Accession=PF00560.25; Description=Leucine Rich Repeat
  Pfam annotation: Domain name=LRR_1; Domain location=198-220; Score =7.8; E_value=9.8; Accession=PF00560.25; Description=Leucine Rich Repeat
  Pfam annotation: Domain name=LRR_1; Domain location=221-243; Score =1.5; E_value=1.6e+02; Accession=PF00560.25; Description=Leucine Rich Repeat
  Pfam annotation: Domain name=LRR_1; Domain location=246-268; Score =3.3; E_value=70; Accession=PF00560.25; Description=Leucine Rich Repeat
  Pfam annotation: Domain name=LRR_1; Domain location=270-292; Score =15.2; E_value=0.28; Accession=PF00560.25; Description=Leucine Rich Repeat
  Pfam annotation: Domain name=LRR_1; Domain location=294-316; Score =13.9; E_value=0.65; Accession=PF00560.25; Description=Leucine Rich Repeat
  Pfam module annotation: Pfam domain module=LRRNT_2::LRR_1::LRR_1::LRR_ 1::LRR_1::LRR_1::LRR_1::LRR_1::LRR_1; Domain location=50-89::127 -149::151-171::175-195::198-220::221-243::246-268::270-292::294-316
  Subcellular localization annotation: CTP_CleavageSite=61; ConfidenceScore=5.08e-01
AAAVLLLLVLLTPAPTSQLGLGPAIAAWINGAPPPSPSPAAAGASSSSAPNQEYTALQALKAAVTEDPRGALSSWQGANVCAYRGVYCSAPPDGAAAAGAPTVVAGIDLNRANLRGTLPEAVSLLAHLTFLHLNSNRLGGAVPDSLRDLEYLTELDLSNNLFSGPFPSSTLLIPSLVYLDLRFNGFSGELPPEVFAKDLDALFLNDNQFEGQIPDTLWSSPATVITLANNHLTGPVPASYGYAGGRVREVLFLNNNLTGCVPEALGFLPSIQVLDLSYNALSGHLPGTLSCLSGIEVLNVAHNQLTGELPDLLCGLRRITNLSVAFNFFSGIGQRCDRQLGEDRRGSYELT

SEQ ID NO: 103663 - protein, 73 aa, Setaria italica
  misc_feature (26)..(26): Xaa can be any naturally occurring amino acid
  misc_feature (46)..(46): Xaa can be any naturally occurring amino acid
  Transcript Sequence Number=SeqID_37689
  Gene Ontology: Mol. function=transferase activity, transferring phosphorus-containing groups; Cellular component=membrane; Biological process=peptidyl-histidine phosphorylation
  Homolog annotation: Hit_ID=C4WYK9; Match level="QueryCoverage=100%, HitCoverage=33%, E-value=3e-21, Identity=67%"; Hit description =Putative ethylene receptor-like protein (Fragment)
SVVKADSLREFRTPEFHPVASDDHFXLKVQVKDTGCGISPQDLPHXFTKFAHPQSGGNRGFNGSGLGLAICKR

SEQ ID NO: 103664 - protein, 57 aa, Setaria italica
  Transcript Sequence Number=SeqID_37690
QSHHQQDGRGGEAGPGGPLPSAAAQPPAQAAAVGGPRWAGIVNGDGSGSVGAPRQGY

SEQ ID NO: 103665 - protein, 57 aa, Setaria italica
  Transcript Sequence Number=SeqID_37691
  Gene Ontology: Mol. function=transferase activity, transferring phosphorus-containing groups; Cellular component=membrane; Biological process=peptidyl-histidine phosphorylation
  Homolog annotation: Hit_ID=B5AID0; Match level="QueryCoverage=100%, HitCoverage=8%, E-value=2e-29, Identity=100%"; Hit description =Ethylene receptor
MDGCDCIEPLWPTDDLLVKYQYISDFFIALAYFSIPLELIYFVKKSSFFPYRWVLIQ

SEQ ID NO: 103666 - protein, 641 aa, Setaria italica
  Transcript Sequence Number=SeqID_37692
  Gene Ontology: Mol. function=ATP-dependent helicase activity; Cellular component=plasma membrane; Biological process=interspecies interaction between organisms
  Homolog annotation: Hit_ID=Q75HJ0; Match level="QueryCoverage=88%, HitCoverage=88%, E-value=0.0, Identity=81%"; Hit description=DEAD -box ATP-dependent RNA helicase 37
  Pfam annotation: Domain name=DEAD; Domain location=202-382; Score =251.2; E_value=2.5e-72; Accession=PF00270.21; Description=DEADDEAH box helicase
  Pfam annotation: Domain name=GRP; Domain location=531-636; Score= -21.3; E_value=0.013; Accession=PF07172.3; Description=Glycine rich protein family
  Pfam annotation: Domain name=Helicase_C; Domain location=456-532; Score=133.6; E_value=6.4e-37; Accession=PF00271.23; Description =Helicase conserved C-terminal domain
  Pfam annotation: Domain name=ResIII; Domain location=198-377; Score= -31.6; E_value=0.024; Accession=PF04851.7; Description=Type III restriction enzyme, res subunit
  Pfam module annotation: Pfam domain module=DEAD::GRP::Helicase _C::ResIII; Domain location=202-382::531-636::456-532::198-377
MRSSWADSVANAEESVPATVTATAPAVNHQSGRPTLSAYVPPHLRGRSAGPSSEIQAVPAAAPAPAEVRSAAVQPSGYASVVGGGSRWSGPTGGGGSSAIVGPRQGGGGGGGGGGRGGGGGWNSRPGWDRRDREPNPFANTEASDVDFEAQENTGINFDAYEDIPVETSGHDVPPPVNTFAEIDLGDALNENIRRCKYVKPTPVQRHAIPIAIAGRDLMACAQTGSGKTAAFCFPIISGILKSRPPQRQRGSRTACPLALILSPTRELSMQIHEEARKFSYQTGVRVVVAYGGAPIHQQLRELERGVEILVATPGRLMDLLERARVSLQMIKYLALDEADRMLDMGFEPQIRKIVDQMDMPPRGVRQTMLFSATFPKEIQRLASDFLADYIFLAVGRVGSSTDLIAQRVEFVLEADKRSYLMDLLHAQKANAAHGKQALTLVFVETKRGADALEDWLFKNGFPATSIHGDRTQQEREYALRSFKSGATPILVATDVAARGLDIPHVAHVINFDLPNDIDDYVHRIGRTGRAGKSGLATAFFNEGNLSVAKPLCELMQEANQEVPQWLERYAARSSYGGGGGRNRRSGGARFGGRDFRRDRDFRGGGGGGGYGGGGYGGGGYGGGGGGYGGGYGGGATSSWD

SEQ ID NO: 103667 - protein, 635 aa, Setaria italica
  misc_feature (163)..(163): Xaa can be any naturally occurring amino acid
  Transcript Sequence Number=SeqID_37693
  Gene Ontology: Mol. function=transferase activity, transferring phosphorus-containing groups; Cellular component=membrane; Biological process=peptidyl-histidine phosphorylation
  Homolog annotation: Hit_ID=B5AID0; Match level="QueryCoverage=100%, HitCoverage=100%, E-value=0.0, Identity=83%"; Hit description =Ethylene receptor
  Pfam annotation: Domain name=GAF; Domain location=159-308; Score =79.8; E_value=9.9e-21; Accession=PF01590.18; Description=GAF domain
  Pfam annotation: Domain name=HATPase_c; Domain location=456-587; Score=126.0; E_value=1.2e-34; Accession=PF02518.18; Description =Histidine kinase-, DNA gyrase B-, and HSP90-like ATPase
  Pfam annotation: Domain name=HisKA; Domain location=344-409; Score =87.5; E_value=4.7e-23; Accession=PF00512.17; Description=His Kinase A (phosphoacceptor) domain
  Pfam module annotation: Pfam domain module=GAF::HATPase_c::HisKA; Domain location=159-308::456-587::344-409
MDGCDCIEPLWPTDDLLVKYQYISDFFIALAYFSIPLELIYFVKKSSFFPYRWVLIQFGAFIVLCGATHLINLWTFTTHTKTVAMVMTIAKVSTAVVSCATALMLVHIIPDLLSVKTRELFLKNKAEELDREMGLIRTQEETGRHVRMLTHEIRSTLDRHTIXLKTTLVELGRTLGLEECALWMPSRSGSSLQLSHTLRHQITVGSSVPINLPVVNQVFSSNRAIIIPHTCPLARIRPLAGRYVPPEVAAVRVPLLHLSNFQINDWPELSAKSFAIMVLMLPSDSARKWHVHELELVEVVADQVAVALSHAAILEESMRARDLLMEQNVALDLARREAEMAIRARNDFLAVMNHEMRTPMNAIIALSSLLLETELTPEQRLMVETVLKSSNLLATLINDVLDLSKLEDGSLELEIKAFNLHAVFKEVMSFIKPIASIKRLSVSVMLAPDLPLSAVGDEKRLMQTILNISGNAVKFTKEGHITLVASVVKADSLREFRTPEFHPVASDDHFYLKVQVKDTGCGISPQDLPHVFTKFAHPQSGGNRGFNGSGLGLAICKRFVSLMGGHIWLDSEGTGRGCTATFIVKLGVCDNTNTYQQQLIPLVWPSSADSNLSGSKALTDGKGSASLKSRYQRSV

SEQ ID NO: 103668 - protein, 649 aa, Setaria italica
  misc_feature (211)..(211): Xaa can be any naturally occurring amino acid
  misc_feature (448)..(448): Xaa can be any naturally occurring amino acid
  Transcript Sequence Number=SeqID_37694
  Gene Ontology: Mol. function=ATP-dependent helicase activity; Cellular component=plasma membrane; Biological process=interspecies interaction between organisms
  Homolog annotation: Hit_ID=Q75HJ0; Match level="QueryCoverage=87%, HitCoverage=88%, E-value=0.0, Identity=76%"; Hit description=DEAD -box ATP-dependent RNA helicase 37
  Pfam annotation: Domain name=DEAD; Domain location=201-381; Score =253.3; E_value=5.9e-73; Accession=PF00270.21; Description=DEADDEAH box helicase
  Pfam annotation: Domain name=GRP; Domain location=530-643; Score= -13.9; E_value=0.0022; Accession=PF07172.3; Description=Glycine rich protein family
  Pfam annotation: Domain name=Helicase_C; Domain location=455-531; Score=134.6; E_value=3.1e-37; Accession=PF00271.23; Description =Helicase conserved C-terminal domain
  Pfam annotation: Domain name=ResIII; Domain location=197-376; Score= -35.6; E_value=0.052; Accession=PF04851.7; Description=Type III restriction enzyme, res subunit
  Pfam module annotation: Pfam domain module=DEAD::GRP::Helicase _C::ResIII; Domain location=201-381::530-643::455-531::197-376
MRSSWADSVANAEESAPATGAANGSVANHGNPRPTRSSYVPPHLRGRPAGGGFDAQAGSVAPGPGGPLPSAAAQPPAQAAAVGGPRWAGIVNGDGSGSVGAPRQGYGGGGSRGGGGGGGAWNSRPGGWDRRDREPDPFAKAEAEEVVFEGDNTGINFDAYEDIPVETSGHDVPPPANTFAEIDLGDALNENIRRCKYVKPTPVQRYAIPIXLLGRDLMACAQTGSGKTAAFCFPIISGILKSRPPQRPRSSRTACPLALILSPTRELSVQIHEEARKFAYQTGVRVVVAYGGAPITNQLRELERGVEILVATPGRLMDLLERARVSLQNIMYLALDEADRMLDMGFEPQIRKIVEQMDMPPRGERQTMLFSATFPKEIQRMAADFLADYIFLAVGRVGSSTDLIVQRVEFVLDADKRSYLMDLLHAQKANGTHGKQSLTLVFVETKRXADALEDWLYRNGFPATSIHGDRTQQEREHALRSFKSGATPILVATDVAARGLDIPHVAHVINFDLPNDIDDYVHRIGRTGRAGKSGLATAFFNESNLSLAKELSVLMQEANQEVPQWLERYAARPSYGGGGGRNRRSGGGARFGDRDFRRDRGAGGYGGGAGGYGGGGGGGYGGGSSGYGGGGYSGGGGGYGGGQGTSAWD

SEQ ID NO: 103669 - protein, 140 aa, Setaria italica
  Transcript Sequence Number=SeqID_37695
  Subcellular localization annotation: CTP_CleavageSite=83; ConfidenceScore=5.35e-01
GPTPLLPTGANTSSYTRRSLDAVQAPRWIEFWSDAASDRRRRDSSSSEASTASSSSSSSSSGCPSPHRRSTPRWVDNYLDELGSMLKKGGWRDREVDEMVEVTASGIFDGEEAPAPDTEAVLDALVLKTDRCSDSLRRAG

SEQ ID NO: 103670 - protein, 63 aa, Setaria italica
  misc_feature (13)..(13): Xaa can be any naturally occurring amino acid
  Transcript Sequence Number=SeqID_37696
  Gene Ontology: Mol. function=hydrolase activity; Cellular component =cytoplasm; Biological process=translation
  Homolog annotation: Hit_ID=B4FSD3; Match level="QueryCoverage=100%, HitCoverage=25%, E-value=5e-28, Identity=98%"; Hit description =Peptidyl-tRNA hydrolase 2
  Pfam annotation: Domain name=PTH2; Domain location=1-63; Score=35.4; E_value=1.3e-10; Accession=PF01981.8; Description=Peptidyl-tRNA hydrolase PTH2
VVVKIESEEDMLXLQGRAKSLNLPTHITIDAGRTQIAPNSRTVMAILGPADMVDDVTGGLKLL

SEQ ID NO: 103671 - protein, 187 aa, Setaria italica
  misc_feature (29)..(29): Xaa can be any naturally occurring amino acid
  misc_feature (176)..(176): Xaa can be any naturally occurring amino acid
  Transcript Sequence Number=SeqID_37697
  Gene Ontology: Mol. function=transcription regulator activity; Cellular component=nucleus; Biological process=regulation of transcription
  Homolog annotation: Hit_ID=C0JP34; Match level="QueryCoverage=79%, HitCoverage=44%, E-value=1e-33, Identity=52%"; Hit description =Putative basic helix-loop-helix protein BHLH26 (Fragment)
  Pfam annotation: Domain name=HLH; Domain location=47-98; Score=61.1; E_value=4.2e-15; Accession=PF00010.18; Description=Helix-loop-helix DNA-binding domain
  Subcellular localization annotation: CTP_CleavageSite=22; ConfidenceScore=5.04e-01
DQSSDASTDQLLQGKKAASEPAAAVGRGXRKRRRAKVVKNKEEIETQRMTHIAVERNRRRQMNEYLAVLRSLMPPSYAHRGDQASIVGGAINYVRELEQLLQSLEVQKSIKNNRGRSSTDAAGNSSPFAGFFSFPQYSTSPAHGGGCSSTSLGSSSNTSSSNATTNSDASVADIEXTMVEGHASLKV

SEQ ID NO: 103672 - protein, 97 aa, Setaria italica
  Transcript Sequence Number=SeqID_37698
GRGRSCRVMNPEEAPGAISPEQSSSSTGLPSRPNRKPPSPELRTDELDVPESSGDATLRSSTISDRGSGGAKSLHLLLPLKLQNSPPSQSATTPPAA

SEQ ID NO: 103673 - protein, 70 aa, Setaria italica
  Transcript Sequence Number=SeqID_37699
  Subcellular localization annotation: CTP_CleavageSite=53; ConfidenceScore=5.45e-01
MMASLPSVFLSAAFLLAAAAYIRSSGTVGSSTATSTTHLHFFMHDDYTGPRPTAARIVSGRSLLPTLASS

SEQ ID NO: 103674 - protein, 180 aa, Setaria italica
  Transcript Sequence Number=SeqID_37700
  Gene Ontology: Mol. function=hydrolase activity, acting on glycosyl bonds; Cellular component=vacuole; Biological process=cell wall organization and biogenesis
  Homolog annotation: Hit_ID=Q2R052; Match level="QueryCoverage=100%, HitCoverage=40%, E-value=4e-82, Identity=81%"; Hit description =Glycoside hydrolase family 28 protein, putative, expressed
TDVVITGNNGVIDGQGSVWWQWLRSHELNHSRPHLLEFLHSEKIVISNLTFLNSPAWSIHPVYCSNVKVHNVTIKTALDAPLTDGIVPDSCSNVCIEDSTVSVSHEAISLKSGWDKYGISFGRPTSNIHINRVDLLSSSGAALAFGSEMSGGISDIHVNHLRIHDSYKGISFKTSPGRGG

SEQ ID NO: 103675 - protein, 421 aa, Setaria italica
  Transcript Sequence Number=SeqID_37701
  Gene Ontology: Mol. function=hydrolase activity, acting on glycosyl bonds; Cellular component=vacuole; Biological process=cell wall organization and biogenesis
  Homolog annotation: Hit_ID=Q2R052; Match level="QueryCoverage=87%, HitCoverage=89%, E-value=1e-172, Identity=74%"; Hit description =Glycoside hydrolase family 28 protein, putative, expressed
  Pfam annotation: Domain name=Glyco_hydro_28; Domain location=71-396; Score=-13.8; E_value=2e-08; Accession=PF00295.9; Description =Glycosyl hydrolases family 28
MKGLVVVLALVLAGALGSVRGELRRLGDQAPPGSRPHSVTITEFGAVGDGKTLNTVAFQNAVFYVRSFADKGGAQLYVPKGRWLTGSFNLTSHLTLYLEKGAVIIGSKDSSQWPIVEPLPSYGQGLDLPGPRHRSLINGYNLTDVVITGNNGVIDGQGSVWWQWLRSHELNHSRPHLLEFLHSEKIVISNLTFLNSPAWSIHPVYCSNVKVHNVTIKTALDAPLTDGIVPDSCSNVNIHINRVDLLSSSGAALAFGSEMSGGISDIHVNHLRIHDSYKGISFKTSPGRGGYIKEVVVSDVKMEDVHIGIEFTGNCSSHPDDSFDPSQLPVINQITMKNLVGTNISTVGVLSGIDGAPFTAICLSNLNFSMVADSTSGSWSCSNVSGYSQSVFPQPCRELSDPSSSSSICFSLSRYSAIAIA

SEQ ID NO: 103676 - protein, 70 aa, Setaria italica
  Transcript Sequence Number=SeqID_37702
  Gene Ontology: Mol. function=phosphoglycolate phosphatase activity; Biological process=metabolic process
  Homolog annotation: Hit_ID=B9SZX9; Match level="QueryCoverage=91%, HitCoverage=20%, E-value=8e-28, Identity=89%"; Hit description=N -acylneuraminate-9-phosphatase, putative
MYLSISRYVNDGRPFWQYIVSSSTGCSDLQYFEELYQYYTTEKAWHLCDPDAGRVFQALRRAGVKTAVVS

SEQ ID NO: 103677 - protein, 268 aa, Setaria italica
  Transcript Sequence Number=SeqID_37703
  Gene Ontology: Mol. function=phosphoglycolate phosphatase activity; Biological process=metabolic process
  Homolog annotation: Hit_ID=Q4F886; Match level="QueryCoverage=86%, HitCoverage=99%, E-value=1e-119, Identity=93%"; Hit description=DT -related protein
  Pfam annotation: Domain name=Hydrolase; Domain location=55-253; Score= 124.4; E_value=3.6e-34; Accession=PF00702.18; Description=haloacid dehalogenase-like hydrolase
GERRLLATAAAEVTVDAGAAAAAAVAAAVARWEIMGAGAREYYDYRRAIYGDITHKAILVDAAGTLLAPTEPMAQVYRTIGQKYGVDYSEDEILMRYRRAYAQPWGKSRLRYVNDGRPFWQYIVSSSTGCSDLQYFEELYQYYTTEKAWHLCDPDAGRVFQALRRAGVKTAVVSNFDTRLRPLLQALKCDHWFDAVAISAEVAAEKPNPTIFLKACELLGVKPEEAVHIGDDRRNDLWGARDAGCDAWLWGSDVYSFKEVAERIGVEV

SEQ ID NO: 103678 - protein, 107 aa, Setaria italica
  Transcript Sequence Number=SeqID_37704
  Gene Ontology: Mol. function=hydrolase activity, acting on acid anhydrides, in phosphorus-containing anhydrides; Cellular component =TRAMP complex; Biological process=embryonic development ending in birth or egg hatching
  Homolog annotation: Hit_ID=Q53PH9; Match level="QueryCoverage=79%, HitCoverage=8%, E-value=2e-36, Identity=85%"; Hit description =DEAD/DEAH box helicase family protein, expressed
RAGWEDPSPPAPASTALACLRADPAAKRRNTSRSCIHEVAVPKSYEAAKDEAVHGTLANPEFNGEMAKQYPFKLDPFQSVSIACLERNESVLVSAHTSAGKTVVAEY

SEQ ID NO: 103679 - protein, 310 aa, Setaria italica
  Transcript Sequence Number=SeqID_37705
  Gene Ontology: Mol. function=binding
  Homolog annotation: Hit_ID=Q7XV52; Match level="QueryCoverage=97%, HitCoverage=70%, E-value=1e-159, Identity=88%"; Hit description =OSJNBa0086B14.3 protein
  Pfam annotation: Domain name=PPR; Domain location=199-233; Score=0.9; E_value=6.9; Accession=PF01535.12; Description=PPR repeat
  Pfam annotation: Domain name=PPR; Domain location=270-304; Score =16.3; E_value=0.1; Accession=PF01535.12; Description=PPR repeat
  Pfam annotation: Domain name=PPR; Domain location=58-92; Score=35.3; E_value=2.4e-07; Accession=PF01535.12; Description=PPR repeat
  Pfam annotation: Domain name=PPR; Domain location=93-127; Score=16.3; E_value=0.1; Accession=PF01535.12; Description=PPR repeat
  Pfam module annotation: Pfam domain module=PPR::PPR::PPR::PPR; Domain location=199-233::270-304::58-92::93-127
VRRYKHALEVADWMKTHHESDLSESDYGMRIDLITRVFGANAAEDFFEKLPPEAKSLQAYTALLHSYARSKMTDKAERLFGRMKDANLSMDVLVYNEMMTLYISVGELDKVQVIAEELKRQNVSPDLFTYNLRVSAAAASMDLECFKGILDEMSKDPKSKEGWTLYRKLASIYVDASQLVGSGNSLVEAEAKISQREWITYDFLVLLHAGLGNLERIKDIWKSMLMTSQRMTSRNYICVISSYLMCERLKDAGEIVDQWQRSKAPEFDISACNRLFDALLNAGLTDTAESFRELMLQKSCILTSRATVAA

SEQ ID NO: 103680 - protein, 97 aa, Setaria italica
  Transcript Sequence Number=SeqID_37706
  Subcellular localization annotation: CTP_CleavageSite=84; ConfidenceScore=5.66e-01
SVPNQKAKEKQASFSKLRSIARAPSQRARSASPAQRSHSVPPSEAAIPINRDRRSDSPIPSATPLTRSGSLSKKASLLKTSSVRVQYLPSYLVPFKL

SEQ ID NO: 103681 - protein, 73 aa, Setaria italica
  misc_feature (35)..(73): Xaa can be any naturally occurring amino acid
  Transcript Sequence Number=SeqID_37707
QPTVSHLVFCSRWITDFVMTRSFFFICSYHSLVNXXXXXXXXXXXXXXXXXXXXXXXXXXXXXXXXXXXXXXX

SEQ ID NO: 103682 - protein, 355 aa, Setaria italica
  Transcript Sequence Number=SeqID_37708
  Gene Ontology: Mol. function=nucleotide-sugar transmembrane transporter activity; Cellular component=integral to membrane; Biological process=nucleotide-sugar transport
  Homolog annotation: Hit_ID=B9SBS6; Match level="QueryCoverage=89%, HitCoverage=89%, E-value=1e-130, Identity=71%"; Hit description=CMP -sialic acid transporter, putative
  Pfam annotation: Domain name=DUF6; Domain location=63-195; Score=0.6; E_value=0.071; Accession=PF00892.12; Description=Integral membrane protein DUF6
  Pfam annotation: Domain name=Nuc_sug_transp; Domain location=118-339; Score=174.2; E_value=3.7e-49; Accession=PF04142.7; Description =Nucleotide-sugar transporter
  Pfam annotation: Domain name=UAA; Domain location=60-354; Score= -106.2; E_value=4.8e-05; Accession=PF08449.3; Description=UAA transporter family
  Pfam module annotation: Pfam domain module=DUF6::Nuc_sug_transp::UAA; Domain location=63-195::118-339::60-354
MEYRRVKDQESYDDLSQKDVESLSGRSLSSANASGLSSAGGAKGKSSWKLKSVVTLALTLLTSSQAILIVWSKRAGKYEYSVTTANFSVEALKCLLSLAALFRTWNRHGVTDDNRLTTSFDEVSVYPIPAVLYMVKNLLQYYIFAYVDAPAYQILKNLNIISTGVLYRIILKKKLSEIQWAAFVLLCAGCTTAQLNPSSDHVLQTPIQGWMMAIVMALLSGFAGVYTEAIIKKRPSRNINVQNFWLYIFGVIFNLVAICVQDYDAVMNKGFFHGYSFITVLMILNHALSGIAVSMVMKYADNIVKVYSTSVAMLLTAIVSVFLFSFHLSLAFFLGSTVVSVSVYLHSVGKLQPQK

SEQ ID NO: 103683 - protein, 233 aa, Setaria italica
  Transcript Sequence Number=SeqID_37709
  Homolog annotation: Hit_ID=Q9SF22; Match level="QueryCoverage=47%, HitCoverage=15%, E-value=7e-26, Identity=50%"; Hit description =F26K24.5 protein
FREKPRTTSKPPPHAMRDHRKSLEAAAYHDVLDLKQLLDLAEKEGRVAVYGSKRNSDTSSVSSFSSSSSSSTISISSASSSGGASPELASTSKRRFLPWMRRSRDFDKRSTESLSQELPIKCMDDDPAGSWETREFTSRDAETKLRTPVFFASIDQRDGSAGGESACTALVAVLAAALHANHPAMPTRPELDALIRDGSSEWRRLCDDEAHMARFPNRHFDLETVLAARTRPI

SEQ ID NO: 103684 - protein, 148 aa, Setaria italica
  misc_feature (9)..(9): Xaa can be any naturally occurring amino acid
  misc_feature (56)..(56): Xaa can be any naturally occurring amino acid
  Transcript Sequence Number=SeqID_37710
  Subcellular localization annotation: CTP_CleavageSite=57; ConfidenceScore=5.84e-01
SPIAPPISXFASASLVKSLNYVRSLVARHIPKLSFQPIVQSVASKQALPSLSSFFXNRSLVSQLTPEVISNREHLELKECHSSSDLISSASDKVDGGEPGDDSKYISFDILSWRWHVYGERQASTSARESVFVGLQDFHTHGFLEVGA

SEQ ID NO: 103685 - protein, 108 aa, Setaria italica
  misc_feature (65)..(65): Xaa can be any naturally occurring amino acid
  Transcript Sequence Number=SeqID_37711
  Gene Ontology: Cellular component=chloroplast
  Homolog annotation: Hit_ID=B6TS67; Match level="QueryCoverage=70%, HitCoverage=13%, E-value=2e-25, Identity=76%"; Hit description=Amino acid permease
FPNIYLSLKNRNQFPSILFTCIGLSTVLYSGAAVMGYKMFGEATESQFTLNLPDNSVVSKVAVWXVANPITKYPLSANYFLERGLVSLKMEQRKCILMKTNFGSFFML

SEQ ID NO: 103686 - protein, 60 aa, Setaria italica
  Transcript Sequence Number=SeqID_37712
  Homolog annotation: Hit_ID=B6TS67; Match level="QueryCoverage=90%, HitCoverage=9%, E-value=2e-17, Identity=83%"; Hit description=Amino acid permease
RPTRSTTSYNDYNLPDNSVVSKVAVWTTVANPITKYALTIIPLAMSLEELLPTNQQKYSN

SEQ ID NO: 103687 - protein, 44 aa, Setaria italica
  Transcript Sequence Number=SeqID_37713
  Gene Ontology: Cellular component=chloroplast
  Homolog annotation: Hit_ID=Q25AF7; Match level="QueryCoverage=100%, HitCoverage=9%, E-value=8e-17, Identity=90%"; Hit description =H0512B01.7 protein
TYPDIGHAAFGTTGRIAISIILYVELYACCIEYLILESDNLSKL

SEQ ID NO: 103688 - protein, 144 aa, Setaria italica
  misc_feature (55)..(55): Xaa can be any naturally occurring amino acid
  Transcript Sequence Number=SeqID_37714
  Gene Ontology: Cellular component=chloroplast
  Homolog annotation: Hit_ID=B6TS67; Match level="QueryCoverage=98%, HitCoverage=20%, E-value=8e-37, Identity=61%"; Hit description=Amino acid permease
RIITYALTIIPLSMSLEELLPPNQQKYSNIMMLRSALVVSTLLIALSVPFFGKLXDIFGKAQSLHHPQSNLYFRALTGLVMALVGSLLTMLVTYILPCACFLAILKTKVTWHQVAACSFIMAVGVCCACVGTYSSLSRIIQSYT

SEQ ID NO: 103689 - protein, 72 aa, Setaria italica
  Transcript Sequence Number=SeqID_37715
  Gene Ontology: Mol. function=nucleotide binding; Biological process =defense response
  Homolog annotation: Hit_ID=Q2QU63; Match level="QueryCoverage=95%, HitCoverage=18%, E-value=1e-09, Identity=52%"; Hit description =Leucine Rich Repeat family protein
VEALRHLTKLKKLGIDMLNRWQLGCDTEQYEEAFKSSLAAMGKHGLQSLRVTKYDILEEELMDILCCTVPCL

SEQ ID NO: 103690 - protein, 202 aa, Setaria italica
  Transcript Sequence Number=SeqID_37716
  Gene Ontology: Mol. function=transferase activity, transferring glycosyl groups; Biological process=metabolic process
  Homolog annotation: Hit_ID=Q69IU8; Match level="QueryCoverage=84%, HitCoverage=36%, E-value=3e-61, Identity=68%"; Hit description =Putative UDP-glucose:salicylic acid glucosyltransferase
YERELRRPADFPTFLTEPDGGCRAYLDLVLQQCQGYEVADHVLVNSFYDLEIEEAEYMASRWCAKTVGPTVPSAYLDNRLPDDVSHGFHLYTPMTEESKAWLDARPDHSVVYVSFGSLAAPGAGQMAEVAEGLYNSGKDFLWVVRASETSKIPQGFSDKVKGRGLLVTWSPQLEVLGDFQDTSGFLGSLRGPDNSGKDFLWV

SEQ ID NO: 103691 - protein, 294 aa, Setaria italica
  Transcript Sequence Number=SeqID_37717
  Gene Ontology: Mol. function=transferase activity, transferring glycosyl groups; Biological process=metabolic process
  Homolog annotation: Hit_ID=Q69IU8; Match level="QueryCoverage=96%, HitCoverage=61%, E-value=1e-106, Identity=64%"; Hit description =Putative UDP-glucose:salicylic acid glucosyltransferase
  Pfam annotation: Domain name=Glyco_tran_28_C; Domain location=111 -277; Score=-39.4; E_value=0.099; Accession=PF04101.8; Description =Glycosyltransferase family 28 C-terminal domain
  Pfam annotation: Domain name=UDPGT; Domain location=1-294; Score= -177.9; E_value=0.071; Accession=PF00201.10; Description=UDP -glucoronosyl and UDP-glucosyl transferase
  Pfam module annotation: Pfam domain module=Glyco_tran_28_C::UDPGT; Domain location=111-277::1-294
PGLSTGLEPADFPTFLTEPDGGCRAYLDLVLQQCQGYEVADHVLVNSFYDLEIEEAEYMASRWCAKTVGPTVPSAYLDNRLPDDVSHGFHLYTPMTEESKAWLDARPDHSVVYVSFGSLAAPGAGQMAEVAEGLYNSGKDFLWVVRASETSKIPQGFSDKVKGRGLLVTWSPQLEVLAHPAVGCFVTHCGWNSTMEALGIGVPMVAMPQWSDQPTNAKYIEDVWRVGVKLQPDGKGVVRKEEVERCVRQVMEGESSEEYRKNATGWSQKAKKAMSEGGSSDSNIVEFLSKIRLK

SEQ ID NO: 103692 - protein, 54 aa, Setaria italica
  Transcript Sequence Number=SeqID_37718
VEKWCCKADEIEQLYAFDHQGILFLSKYETGHKLKNKDIKVLAYCILHKIKQTW

SEQ ID NO: 103693 - protein, 185 aa, Setaria italica
  misc_feature (78)..(78): Xaa can be any naturally occurring amino acid
  Transcript Sequence Number=SeqID_37719
  Gene Ontology: Mol. function=metal ion binding; Cellular component =integral to membrane; Biological process=ubiquitin-dependent protein catabolic process
  Homolog annotation: Hit_ID=A8E124; Match level="QueryCoverage=89%, HitCoverage=53%, E-value=7e-32, Identity=45%"; Hit description=NEP1 -interacting protein
  Pfam annotation: Domain name=PHD; Domain location=139-184; Score= -2.5; E_value=0.049; Accession=PF00628.21; Description=PHD-finger
  Pfam annotation: Domain name=zf-C3HC4; Domain location=140-181; Score= 34.4; E_value=4.5e-07; Accession=PF00097.17; Description=Zinc finger, C3HC4 type (RING finger)
  Pfam module annotation: Pfam domain module=PHD::zf-C3HC4; Domain location=139-184::140-181
PIQSTQKIIEEICADRFLHHQLDVIWSLLTGRLVREKVDPAVQSAVDSQVRDALIICSIDQALKSSAKLKLNAILVFXPRAQMNAVDSPFREIAPTLADVFETGAAGAKGMPADAIEALPVTTFTEHTALDADTGDRVGCSVCLQDFEAGETARSLPECGHTFHLPCIDAWLLRHASCPLCRRAL

SEQ ID NO: 103694 - protein, 59 aa, Setaria italica
  Transcript Sequence Number=SeqID_37720
VGNWQRCRRSKQYGVIRDLLFLPGMKPDLWLTYTKHTGMHIISINYRKEKHLSETSLGA

SEQ ID NO: 103695 - protein, 90 aa, Setaria italica
  Transcript Sequence Number=SeqID_37721
  Gene Ontology: Mol. function=phosphoribosylformylglycinamidine synthase activity; Biological process='de novo' IMP biosynthetic process
  Subcellular localization annotation: CTP_CleavageSite=31; ConfidenceScore=5.40e-01
MSYPGEMTGSNIIRLQCFPSNMVNQRSGFIPARNRRSRMTRHCLDPRHLCRLPTQRVNVPNIRPLPTPNAAVSRDINTPLVEESVTEVES

SEQ ID NO: 103696 - protein, 149 aa, Setaria italica
  Transcript Sequence Number=SeqID_37722
  Subcellular localization annotation: CTP_CleavageSite=74; ConfidenceScore=5.48e-01
AKIPYSAAARLDTVLAPRYRAVAVTAAGQGRAPVALRRSPRCPVASVGLRRCLAAARVRAPRRLLGGAARVPTPCAAGSSLLRVSAMFPSLPERGAGFLRLLIDAIVMFWCMVLSPLWSTTPSSLVCRPYIQFCLKQLPFSFCNYGKLV

SEQ ID NO: 103697 - protein, 117 aa, Setaria italica
  misc_feature (6)..(6): Xaa can be any naturally occurring amino acid
  misc_feature (92)..(92): Xaa can be any naturally occurring amino acid
  Transcript Sequence Number=SeqID_37723
EVHRVXPANAPDLLDFVNDLEFHITTVSSMSCAQAVAPSTIAMGTPGFMDFRVQPLSTLLTYSCQNTSDGPSITLKCNGCRIPPRDHYVSWXFVDLPRQPAAAVGFQFNLTAKQHGD

SEQ ID NO: 103698 - protein, 90 aa, Setaria italica
  misc_feature (12)..(12): Xaa can be any naturally occurring amino acid
  misc_feature (35)..(35): Xaa can be any naturally occurring amino acid
  Transcript Sequence Number=SeqID_37724
  Gene Ontology: Mol. function=protein binding; Cellular component =protein complex; Biological process=biological_process
  Homolog annotation: Hit_ID=B9RK59; Match level="QueryCoverage=100%, HitCoverage=21%, E-value=8e-37, Identity=80%"; Hit description=PCI domain-containing protein, putative
KLELQVYQRLVXKIHIIQRQKEPAKAHQIKLDVVXKALKWLEIDMDVDEVECIMACLIYKNLIKGYFAHKSKVLVLSKQDPFPKLNGKPV

SEQ ID NO: 103699 - protein, 47 aa, Setaria italica
  Transcript Sequence Number=SeqID_37725
QSISSNQCTTKEDGKGWFMDIWESSDSKDNPRIKDECFINYLEIING

SEQ ID NO: 103700 - protein, 86 aa, Setaria italica
  Transcript Sequence Number=SeqID_37726
  Subcellular localization annotation: CTP_CleavageSite=26; ConfidenceScore=5.53e-01
MAAPTSPASPAAGLKAPLPTMGDIMAASRAQGLRVRLRTVGPFFRVTATCGEGEDAVELGRAEGGVRPWPGGAVLHLDSMRMTRAT

SEQ ID NO: 103701 - protein, 314 aa, Setaria italica
  Transcript Sequence Number=SeqID_37727
  Homolog annotation: Hit_ID=Q9S770; Match level="QueryCoverage=30%, HitCoverage=14%, E-value=6e-09, Identity=38%"; Hit description =F18B13.8 protein
SRGNRSRTYYHESSKNYSYVPKESHSYNDNTKNARHALPDNGKNRVSKPSRAHYDDVKNHDIVPKESRTYYGDAKSQKNTPRVVRGRGSKRYQPRLRSNADISSGQNNKSQGLEATSSNTNLGQNQAQTSNSQPEPVHPIKQTIASNLNSASPPFYPSRSSNQEFPVSQGGNAQLSSTLLRGKAFVPSVGHVEAAMKGMNRPALSSNGPFPAFPVSSNQANRDYVQPAHPVVQQNPVQSPSQAVPRMPAQMFGARFSNSNKISPVQPTISSDDTELSSPSGSKKFDSRLTVGQPGDQGEERTSFTYGGTHVLGA

SEQ ID NO: 103702 - protein, 57 aa, Setaria italica
  Transcript Sequence Number=SeqID_37728
HCAVVIELHAFFFPKHRLIHLLQAYKIKMNGPEYLLILKRRAFYSNQCINRNALVGV

SEQ ID NO: 103703 - protein, 71 aa, Setaria italica
  Transcript Sequence Number=SeqID_37729
  Gene Ontology: Mol. function=iron-sulfur cluster binding; Cellular component=mitochondrion; Biological process=biotin biosynthetic process
  Homolog annotation: Hit_ID=P54967; Match level="QueryCoverage=69%, HitCoverage=12%, E-value=2e-20, Identity=91%"; Hit description =Biotin synthase
MKFGASFFCSGGIIGLGEAEEDRVGLLHTLATLPAHPESVPINALVAVKGTPLGDQKVFCTVPCFLYLICV

SEQ ID NO: 103704 - protein, 71 aa, Setaria italica
  Transcript Sequence Number=SeqID_37730
  Gene Ontology: Mol. function=iron-sulfur cluster binding; Biological process=biotin biosynthetic process
  Homolog annotation: Hit_ID=P54967; Match level="QueryCoverage=46%, HitCoverage=8%, E-value=5e-10, Identity=84%"; Hit description=Biotin synthase
  Subcellular localization annotation: CTP_CleavageSite=32; ConfidenceScore=5.16e-01
MTMILLARSLRSSLRPPLAAGFSSAPTAASSSAAAAEAERSIRDGPRNDWSRPEIQAVYDSPLLDLLFHGA

SEQ ID NO: 103705 - protein, 385 aa, Setaria italica
  Transcript Sequence Number=SeqID_37731
  Gene Ontology: Mol. function=iron-sulfur cluster binding; Cellular component=mitochondrion; Biological process=biotin biosynthetic process
  Homolog annotation: Hit_ID=P54967; Match level="QueryCoverage=89%, HitCoverage=89%, E-value=1e-167, Identity=81%"; Hit description =Biotin synthase
  Pfam annotation: Domain name=BATS; Domain location=268-360; Score =156.0; E_value=1.1e-43; Accession=PF06968.5; Description=Biotin and Thiamin Synthesis associate
  Pfam annotation: Domain name=Radical_SAM; Domain location=93-257; Score=87.1; E_value=6.1e-23; Accession=PF04055.13; Description =Radical SAM superfamily
  Pfam module annotation: Pfam domain module=BATS::Radical_SAM; Domain location=268-360::93-257
MAMMLLAAGRSLRSILHPRLAGAAAAFSSAPSAASAAAAEAERTIREGPRNDWSRPEIQAVYDSPLLDLLFHGAQVHRHVHRFREVQQCTLLSIKTGGCSEDCSYCPQSSRYDTGLKAQKLMNKDAVLEAAKKAKEAGSTRFCMGAAWRETIGRKTNFNQILEYVKEIRGMGMEVCCTLGMIEKQQAEELKKAGLTAYNHNLDTSREYYPNIITTRSYDDRLQTLQHVREAGISICSGGIIGLGEAEEDRVGLLHTLATLPAHPESVPINALVAVKGTPLGDQKPVEIWEMIRMIATARIVMPKAMVRLSAGRVRFSMPEQALCFLAGANSIFAGEKLLTTANNDFDADQAMFKILGLIPKAPSFGDEEAPAPADTERSEQAASM

SEQ ID NO: 103706 - protein, 91 aa, Setaria italica
  Transcript Sequence Number=SeqID_37732
VPAGKVGYQCPTRGRGYGFLPAGENSYPYPCPSGNPRYPCPRVKLSSLIYPASTTDKKITTKLLHPTQVSTEIQHEKLLSFTWPLMDSNSD

SEQ ID NO: 103707 - protein, 338 aa, Setaria italica
  Transcript Sequence Number=SeqID_37733
  Gene Ontology: Cellular component=chloroplast
  Homolog annotation: Hit_ID=Q9FZJ2; Match level="QueryCoverage=98%, HitCoverage=22%, E-value=5e-53, Identity=40%"; Hit description =F17L21.22
DDSKDQLHLDNSIPLSPQWLYAKPADGKISLPHGSSFEPAEREVRMLEGTVDRKERRRNIFDADSSLRWLEEERETSLLGRRERKKEVERDVDNRKIDRRSDNVSARDNTDSRAPPASDRWNDGSTRTLGNEGRRDGKWSTRWGPDDKEKDSRSEKKADAEKDETHAEKQTFTGRLLSESDSRDKWRPRHRQESHSAGTATYRAAPGFGSEKGRVKDSNVGFAPGRGRGNPNSVTSFSRPSSAGPIGAPAVHGKSAKAAGSFRYPRGKLLDIYRQKNMMSSFDDAKLEEIPSITLSTSAKPLAFVAPDTVEEALLEDIRKGKVISSEGSNATGNKKER

SEQ ID NO: 103708 - protein, 97 aa, Setaria italica
  Transcript Sequence Number=SeqID_37734
  Gene Ontology: Mol. function=catalytic activity; Cellular component =chloroplast envelope; Biological process=metabolic process
  Pfam annotation: Domain name=DUF1012; Domain location=1-97; Score= -5.0; E_value=0.00073; Accession=PF06241.4; Description=Protein of unknown function (DUF1012)
VAEPGKNERYEVDTDAFVSILALQPITQLASVPIIVEASNSTTCELLKSINGLNVQPVEMVASKLFVQCSRQKGLLKIYKHLLNQRSNILILLTCIC

SEQ ID NO: 103709 - protein, 73 aa, Setaria italica
  misc_feature (17)..(17): Xaa can be any naturally occurring amino acid
  misc_feature (39)..(39): Xaa can be any naturally occurring amino acid
  Transcript Sequence Number=SeqID_37735
RRRGATALAAASMAAGXRVVRSVYLPIGKGVEVLHVGVXKGASLHSRGGARGTGRWIRHVNHDTGEEHVFRRQ

SEQ ID NO: 103710 - protein, 88 aa, Setaria italica
  misc_feature (80)..(80): Xaa can be any naturally occurring amino acid
  Transcript Sequence Number=SeqID_37736
  Gene Ontology: Mol. function=transferase activity, transferring hexosyl groups; Cellular component=integral to membrane
  Homolog annotation: Hit_ID=Q9M9U0; Match level="QueryCoverage=96%, HitCoverage=15%, E-value=2e-27, Identity=65%"; Hit description =Putative glycosyltransferase 4
PFEADDQSALIYLLVTQRSRWGDKTFLESTYELNGFWEGIVDRYEELRRKGRPGDLGDGRWPLVTHFVGCKPCRRYADSXYPADRCRR

SEQ ID NO: 103711 - protein, 166 aa, Setaria italica
  misc_feature (45)..(45): Xaa can be any naturally occurring amino acid
  Transcript Sequence Number=SeqID_37737
  Gene Ontology: Mol. function=nucleic acid binding
  Homolog annotation: Hit_ID=Q00RL5; Match level="QueryCoverage=95%, HitCoverage=29%, E-value=5e-28, Identity=45%"; Hit description =OSIGBa0117N13.2 protein
PQTTLHFSYYAGDPNYVPQLEDALHVRRVDFRHDHSPGALYYARXKLPLIVPNVRTLVLSTRAETGNTPMASCKFLQLKYLEIVLCALIFPSDYDFYSLVSFLDASPALETFVLRIAMPTIRPDSIIEDSGGDFSRPRCLSEQCHGRLKNVMITGFCSAKSMIELV

SEQ ID NO: 103712 - protein, 126 aa, Setaria italica
  Transcript Sequence Number=SeqID_37738
  Gene Ontology: Mol. function=nucleic acid binding
  Homolog annotation: Hit_ID=Q00RL5; Match level="QueryCoverage=96%, HitCoverage=23%, E-value=3e-19, Identity=40%"; Hit description =OSIGBa0117N13.2 protein
NSCAVEQLRLSNCNDIICLKIPCLLQKLDILHLVGCSKLEMIDSNAPNLSTFFFAGRPIHILLGEALQVRKISFFRDFSPDALYYASTKFPFIAPNLQTLVLSTSDEVSFIHPNKFIVLEMKLMVE

SEQ ID NO: 103713 - protein, 276 aa, Setaria italica
  Transcript Sequence Number=SeqID_37739
  Gene Ontology: Mol. function=nucleic acid binding
  Homolog annotation: Hit_ID=Q00RL5; Match level="QueryCoverage=99%, HitCoverage=51%, E-value=5e-59, Identity=45%"; Hit description =OSIGBa0117N13.2 protein
MSSLTNLELHSVHITGEELYGFLSNSCAVEELRLSNCNDIICLKIPCLLQKLDILDVVGCSKLEMIDSNAPNLSTFFFAGRPIHILLGEALQVRKISFFRDYSPDALYYASTKFPFIAPNLQTLVLSTSDETVNTPKVFGKFIQLKYLEIWVSTSTFSQDYDLCSLISFLDASPALESLIVRIAQPTIRRDSVIEDSNGYSRPQCLQEQCHDNLKNVMITGFCSAKSMIELTICIIEKSKALACLTLDTTRGYDRRLVKFDKCLLTQLQALIKLDK

SEQ ID NO: 103714 - protein, 527 aa, Setaria italica
  misc_feature (352)..(352): Xaa can be any naturally occurring amino acid
  Transcript Sequence Number=SeqID_37740
  Homolog annotation: Hit_ID=Q00RL5; Match level="QueryCoverage=94%, HitCoverage=94%, E-value=1e-106, Identity=41%"; Hit description =OSIGBa0117N13.2 protein
  Pfam annotation: Domain name=F-box; Domain location=50-97; Score =17.9; E_value=0.042; Accession=PF00646.25; Description=F-box domain
MGILEQMKALSVEGQPQVQITRDGSNCSASQIMVSPSLEGDISHCVETMGSQVQLPEDILHQIHALMPLRDAAQAACVSRGFLRSWRCFPNLIISVGSLGINENTSNDDEIKRDFICRVDHIMQNHSSMGVKRFVMETYPCSNLQPSYVDRWLQCAITPGIKEIYLSVFSCGIKYNFPGLLLFSREIRSSIQTFVLGDCSFHCAAQVGYMSSLTNLELHSVHITGEELYGFLSNSCAVEQLRLTNCNDIICLKIPCLLQKLDILDVVGCSKLEMIDSNAPNLSTFFFAGRPIHILLGEALQVRKISFFRDYSPDALYYASTKFPFIAPNLQTLVLSTSDESTINLRGTFISXTVNTPKVFGKFIQLKYLEIVVSTLKFSQDYDLCSLISFLDASPALESLIVRIAQPTIRRDSVIEDSNGYSRPQCLQEQCHDNLKNVMITGFCSAKSMIELTICIIEKTKALACLTLDTTRGYDRRLVKFDKCLQLGKEALVEAKRARVAIQRYIEGRVPPAVNLKVIEPCSKCIW

SEQ ID NO: 103715 - protein, 63 aa, Setaria italica
  misc_feature (56)..(56): Xaa can be any naturally occurring amino acid
  Transcript Sequence Number=SeqID_37741
  Gene Ontology: Mol. function=two-component sensor activity; Cellular component=membrane; Biological process=signal transduction
  Homolog annotation: Hit_ID=Q5JLC8; Match level="QueryCoverage=100%, HitCoverage=3%, E-value=8e-27, Identity=88%"; Hit description =Putative THO complex 2
LCQVGSDLACQNSSSVTISIIKSLIGHFDLDPNRVFDIVLECFEVYPDSNIFHQLXIPLFPKS

SEQ ID NO: 103716 - protein, 86 aa, Setaria italica
  misc_feature (41)..(41): Xaa can be any naturally occurring amino acid
  Transcript Sequence Number=SeqID_37742
  Gene Ontology: Mol. function=aspartic-type endopeptidase activity
  Homolog annotation: Hit_ID=Q337X2; Match level="QueryCoverage=43%, HitCoverage=2%, E-value=2e-09, Identity=78%"; Hit description =Retrotransposon protein, putative, unclassified, expressed
VECVFLGYSPKHKGYRCYDPSSRRIRIYRYVTFVEDRPFFXYNPSPQPSYSPRVHIFFVFLLFHPRVMSLPSASIPDPSISITPPL

SEQ ID NO: 103717 - protein, 205 aa, Setaria italica
  Transcript Sequence Number=SeqID_37743
SFFRRYRIFKDQGAEAASPYIVSSIRDQEHKRGDLGGANRCSWYHEVTPQVLYNRSASPRGWAQRRQPVANATSRSTGSSTQALVIGASTMPTQLKGHWRRESAALGRGASKQSQVQDNSYASVARRSSDPKHPTTLGMASLLVRKAAEGPQSVRTPVFSAYYKHTPHHFHHGRPQPTWGGRGQPTASATTTQAAAGHQRPAAAS

SEQ ID NO: 103718 - protein, 66 aa, Setaria italica
  Transcript Sequence Number=SeqID_37744
GPQLCCIKIWSPSYYILRSASFPVVNVQEGAYRLCKISNRIWLQKLDLTGGTMNSSSIQFNKKEIF

SEQ ID NO: 103719 - protein, 89 aa, Setaria italica
  Transcript Sequence Number=SeqID_37745
GNKGGSTLIINEKVLVKFGTPRPKGVLDASIQIALEKNSNLPRMTNMPLPPHIAREARMSSPWCPNPCYIYARARVSVPPPPSRTTNQP

SEQ ID NO: 103720 - protein, 39 aa, Setaria italica
  misc_feature (27)..(27): Xaa can be any naturally occurring amino acid
  Transcript Sequence Number=SeqID_37746
EEKREARIAKKELKGLYKSETQKAQKXAAVTGPSSIRLM

SEQ ID NO: 103721 - protein, 119 aa, Setaria italica
  misc_feature (23)..(23): Xaa can be any naturally occurring amino acid
  Transcript Sequence Number=SeqID_37747
  Gene Ontology: Mol. function=hydrolase activity, acting on acid anhydrides, in phosphorus-containing anhydrides
  Homolog annotation: Hit_ID=B9S2H8; Match level="QueryCoverage=88%, HitCoverage=9%, E-value=1e-18, Identity=45%"; Hit description =Helicase, putative
ESIDRKLSREELSEEDYAEISLXLKRLKEEKQIRNELKKRMELERMAAWKNRLEEFESGHLPFMCLQYKDKDSVHHTIPAVFIGNLNSFADQKIANMVEEDSLGSGKHKADTGEQLYCP

SEQ ID NO: 103722 - protein, 59 aa, Setaria italica
  Transcript Sequence Number=SeqID_37748
MMLPLRLLLLLVIGLLPAAAWALAPPRFPGPQPRARPGANGMGGYEYETRYFRQRLDHF

SEQ ID NO: 103723 - protein, 126 aa, Setaria italica
  Transcript Sequence Number=SeqID_37749
  Subcellular localization annotation: CTP_CleavageSite=21; ConfidenceScore=5.44e-01
MASKSSIGSPASLFVAVTLMLAASKQAQAWPPAPVPRSAPTPAPTPVPTPSPAPSQAFCPPGFKNLLELLKAIPEYAERGIVLSPSIYSPSSGGPGIVIAPRTCVCYAPTIIGLVFGPIECVGAPA

SEQ ID NO: 103724 - protein, 81 aa, Setaria italica
  misc_feature (33)..(33): Xaa can be any naturally occurring amino acid
  Transcript Sequence Number=SeqID_37750
  Gene Ontology: Mol. function=nucleotide binding; Biological process =defense response
  Homolog annotation: Hit_ID=Q8LJZ8; Match level="QueryCoverage=90%, HitCoverage=7%, E-value=2e-20, Identity=65%"; Hit description =Putative Mla1
CSPRFAVKLATEIREIKSRVIEVHERRRNYKVXLGVDKPVTAASDPRLSTPYLEVKDLVGIDGARDEIIKIMTEREEVPMQ

SEQ ID NO: 103725 - protein, 115 aa, Setaria italica
  Transcript Sequence Number=SeqID_37751
  Gene Ontology: Mol. function=methyltransferase activity
  Homolog annotation: Hit_ID=Q9ZVM5; Match level="QueryCoverage=100%, HitCoverage=35%, E-value=2e-46, Identity=75%"; Hit description =T22H22.9 protein
IFTLSAIPFAIMPSTIEQCVSVLKPGGLLLFRDYGLYDMTMLRFLPHQRVGFREYMRSDGTLSYFFTLDTVRELFHAAGLVELELEYCCVKSVNRKNGKKMQRVWVHGKFQKPPS

SEQ ID NO: 103726 - protein, 65 aa, Setaria italica
  Transcript Sequence Number=SeqID_37752
  Subcellular localization annotation: CTP_CleavageSite=44; ConfidenceScore=5.73e-01
MAAVTSTAFLCPAAGGLSPSPPFRRNPGSSSSRRRLQLQVCHCRPARVEGLDRREALLGVALSAA

SEQ ID NO: 103727 - protein, 55 aa, Setaria italica
  misc_feature (1)..(9): Xaa can be any naturally occurring amino acid
  Transcript Sequence Number=SeqID_37753
XXXXXXXXXPQGRIYNLQCIHRLKRILLPPSQIVSHFSIFRFITFAMYLDIVHIR

SEQ ID NO: 103728 - protein, 353 aa, Setaria italica
  Transcript Sequence Number=SeqID_37754
  Gene Ontology: Mol. function=hydrolase activity, acting on ester bonds; Biological process=lipid metabolic process
  Homolog annotation: Hit_ID=B6TLI6; Match level="QueryCoverage=93%, HitCoverage=94%, E-value=1e-121, Identity=60%"; Hit description =Anther-specific proline-rich protein APG
  Pfam annotation: Domain name=Lipase_GDSL; Domain location=32-344; Score=202.2; E_value=1.4e-57; Accession=PF00657.14; Description=GDSL- like LipaseAcylhydrolase
MSSESLCYWLLLLVAHFSLSPSRATAGKVSAIIVFGDSTVDAGNNNFIPTIAKGNFPPYGRDFDGGVATGRFSNGRLATDFFSEAFGLPSSVPAYLDPSYSIDQLAMGVSFASAGTGLDDLTAKIASVIPLRQQLEYFKEYKERLKLAKGESMAKEIVAEALYVFSIGTNDFILNYFVLPLRPAQYTAPEYVTYLIGLADAAVRDAYDLGARKIEFTGLAPFGCVPSARTLNHDEPDECNEEHNQLAMRFNAELQEAVRKLNGDLAGAQVVYAETYSVVSTIIANPSFYGFENVAQGCCGTGLIETSVLCGLDRPLTCQDADKYVFFDSVHPSQRTYRIVAKHILNTKLQVFL

SEQ ID NO: 103729 - protein, 95 aa, Setaria italica
  Transcript Sequence Number=SeqID_37755
  Subcellular localization annotation: CTP_CleavageSite=69; ConfidenceScore=5.75e-01
STPNQHLTASINPTTQLTHNHHTLSLSSSLAQETTSKRRPAMAQSPPRRTAALLLSLLLLFSVAAHAAREAAASSRGHAELQEGEDSEVVDSKGG

SEQ ID NO: 103730 - protein, 68 aa, Setaria italica
  Transcript Sequence Number=SeqID_37756
STDSSSLANSTPMVILSSVIASVVSEIGLGSDPAFTVPEYDFRSPTGTLIIEISSTDDPLIFYKTSND

SEQ ID NO: 103731 - protein, 278 aa, Setaria italica
  Transcript Sequence Number=SeqID_37757
  Gene Ontology: Mol. function=voltage-gated chloride channel activity; Cellular component=integral to membrane; Biological process=chloride transport
  Homolog annotation: Hit_ID=B9RKW2; Match level="QueryCoverage=95%, HitCoverage=35%, E-value=1e-65, Identity=56%"; Hit description =Voltage-gated clc-type chloride channel, putative
  Pfam annotation: Domain name=Voltage_CLC; Domain location=1-268; Score=41.7; E_value=2e-10; Accession=PF00654.12; Description=Voltage gated chloride channel
  Subcellular localization annotation: CTP_CleavageSite=83; ConfidenceScore=5.06e-01
LGPEGPSVEIGSSIAKGFGNVFDWEGGKRLSLVAAGSAAGISSGFNAAVAGCFFAVESVLWPSSTDSSSLANSTPMVILSSVIASVVSEIGLGSDPAFTVPEYDFRSPTELPLYLLLGVFCGLVSITLSKCTSLAMETVERLQMATGLPKAASPALGGLIVGLLALMYPEVLYWGFENVDILLESRPFTSGLSATILVQLIGVKILATSICRASGLVGGYYAPSLFIGAATGMAYGKFMRFTFTCPEPLLHVPFLDVASPQAYGLVTCLHFFPSSQLP

SEQ ID NO: 103732 - protein, 210 aa, Setaria italica
  Transcript Sequence Number=SeqID_37758
  Gene Ontology: Mol. function=voltage-gated chloride channel activity; Cellular component=integral to membrane; Biological process=chloride transport
  Homolog annotation: Hit_ID=Q8GX93; Match level="QueryCoverage=96%, HitCoverage=29%, E-value=3e-42, Identity=48%"; Hit description =Chloride channel protein CLC-e
  Pfam annotation: Domain name=Voltage_CLC; Domain location=44-210; Score=-132.6; E_value=0.0036; Accession=PF00654.12; Description =Voltage gated chloride channel
VLFNLSVHEIRDIFWDGIPLRGASWLREEPIGEVWQRVIFVPVSGGVVVGGLNALRSSIKTNSNGHVSKIQSAVRPFLKAVAASFTLGTGNSLGPEGPSVEIGSSIAKGFGNVFDWEGGKRLSLVAAGSAAGISSGFNAAVAGCFFAVESVLWPSSTDSSSLANSTPMVILSSVIASVVSEIGLGSDPAFTVPEYDFRSPTEIESMRIFT

SEQ ID NO: 103733 - protein, 223 aa, Setaria italica
  Transcript Sequence Number=SeqID_37759
  Subcellular localization annotation: CTP_CleavageSite=60; ConfidenceScore=5.09e-01
MDSIFSQYHATDSKKDWIENSSSVWSPDDSFSKPNVMHSWSDFSSRESFSGAPAKGPVVSANATSGNYVEDLEDNGDRPTATRISGEEIQKVCDLLYEFKDDMLGMTSMAKGTCKSSPSLEVLLAESSDSEAQISDPEYIDNGAGIGSARLFRTFSSSDDDASTGNEPLVDVADLTTPSEPYASAKPLVDLADLTNPSGTDASAVNELSADVVDLPTPSETCL

SEQ ID NO: 103734 - protein, 140 aa, Setaria italica
  Transcript Sequence Number=SeqID_37760
  Gene Ontology: Mol. function=sequence-specific DNA binding; Cellular component=nucleus; Biological process=regulation of transcription, DNA-dependent
  Homolog annotation: Hit_ID=B6U513; Match level="QueryCoverage=82%, HitCoverage=83%, E-value=9e-22, Identity=50%"; Hit description=GATA transcription factor 22
  Pfam annotation: Domain name=GATA; Domain location=26-61; Score=69.4; E_value=1.3e-17; Accession=PF00320.19; Description=GATA zinc finger
MMDSSEQKVIGIAAAPAVAEAGRPCCVECRTTATPMWRGGPTGPRSLCNACGIRYRKKRRQELGLDNNQKPQQNHQQPPPQQQPQQQQHQDHSQAPNAVKDNKSSGLQVVKKRRVLMGVEEAAILLMALSSSSRSTLLHG

SEQ ID NO: 103735 - protein, 86 aa, Setaria italica
  misc_feature (8)..(8): Xaa can be any naturally occurring amino acid
  Transcript Sequence Number=SeqID_37761
  Gene Ontology: Mol. function=hydrolase activity
  Homolog annotation: Hit_ID=B6TAG5; Match level="QueryCoverage=60%, HitCoverage=13%, E-value=3e-17, Identity=76%"; Hit description =Phosphatase DCR2
IYSELKKXGQRSWMEVESIQTWKLLDDEKLSKIDEQVLWRRSTDDSDHKNFVKTRSIRFKFCMHLLYLYATLYNICNQVQYSTFVD

SEQ ID NO: 103736 - protein, 83 aa, Setaria italica
  misc_feature (62)..(62): Xaa can be any naturally occurring amino acid
  misc_feature (71)..(71): Xaa can be any naturally occurring amino acid
  Transcript Sequence Number=SeqID_37762
  Gene Ontology: Mol. function=aspartic-type endopeptidase activity; Cellular component=chromatin; Biological process=chromatin assembly or disassembly
  Homolog annotation: Hit_ID=Q7X7I2; Match level="QueryCoverage=96%, HitCoverage=5%, E-value=4e-16, Identity=50%"; Hit description =OSJNBa0013A04.20 protein
TACLGLTPSPQPGMTVGVANGERVPTSGICPATPIWIGDELFAVDIYIIPLQGYKLILGCQXLRTLGPIIXDFTTNSMSFWRT

SEQ ID NO: 103737 - protein, 105 aa, Setaria italica
  Transcript Sequence Number=SeqID_37763
  Gene Ontology: Mol. function=protein tyrosine kinase activity; Cellular component=integral to membrane; Biological process=protein amino acid phosphorylation
  Homolog annotation: Hit_ID=Q5QM36; Match level="QueryCoverage=100%, HitCoverage=28%, E-value=6e-47, Identity=81%"; Hit description =Serine/threonine-specific protein kinase NPK15-like
EIISGKPPYSEQKGSLANLALECIRDNRSMSCLLDPNLKAHKENDLEIICELVQDCLQSDPKKRPTMRDITTRLREVISISPEAATPRLSPLWWAELEILSVEAS

SEQ ID NO: 103738 - protein, 84 aa, Setaria italica
  misc_feature (66)..(66): Xaa can be any naturally occurring amino acid
  Transcript Sequence Number=SeqID_37764
  Subcellular localization annotation: CTP_CleavageSite=46; ConfidenceScore=5.05e-01
MEGGEGSGFDGAHMRRRRSSAARRPRPEGGPAADQRDNAPSPPSPSASSRSGPRRLLLSSDENAGXPDGGNRRREFLLNAPSSE

SEQ ID NO: 103739 - protein, 197 aa, Setaria italica
  Transcript Sequence Number=SeqID_37765
SLTAKEPLKNPVLSSSLNLLFPHSALLRMGCCGGDGRRHRASSSAAVAHRRPCGHGVHWLVQPPEREPLAVALGLHAVVTRREHPRDHAPLHRLPVADAGVLEPAFLHTLLPPGEALVPLEAVRGLERHRVADLPREHLLRLEPRGARVRQPGRVHGVERRGVVPQRAREPRLPPAGVEGVLVLAQEEDGGARAARE

SEQ ID NO: 103740 - protein, 133 aa, Setaria italica
  misc_feature (46)..(46): Xaa can be any naturally occurring amino acid
  Transcript Sequence Number=SeqID_37766
  Subcellular localization annotation: CTP_CleavageSite=78; ConfidenceScore=5.25e-01
FPLRDSNGGEWRKIGRREGPSANASSPPPPPPPPPPPASPSSSRLXNPAPASLPVAAIPPRRNPKPTLPLGLPPLPTMAEDASPPAPQMTPEEVQAETELRLRDIGQRFGALPQEKEELLRLLSDAETWLSEG

SEQ ID NO: 103741 - protein, 70 aa, Setaria italica
  Transcript Sequence Number=SeqID_37767
YMHHEQRCLAACTMLPSISSSCCHAYLIIFGTVNYTGRQMILFLAKSINGKIRNLRIVQTAIYFRICMVN

SEQ ID NO: 103742 - protein, 133 aa, Setaria italica
  Transcript Sequence Number=SeqID_37768
LVGVRRGARRRAGLVSQAVIATDLSRGTPAHSLELLHRFIVISVSVAFRMMSFSLHTCIYRSLYNRISWQQAKIILSTHHPWRDLVCSLYSCYLLVRNAIKLATEFSARIWLKLILRGWAYSSDFKAVHTQFQ

SEQ ID NO: 103743 - protein, 117 aa, Setaria italica
  Transcript Sequence Number=SeqID_37769
  Pfam annotation: Domain name=HMA; Domain location=6-68; Score=19.7; E_ value=0.012; Accession=PF00403.18; Description=Heavy-metal-associated domain
MRKEIIIRMHVKSDKCQAKAMKVAAAVSGVESVSLAGGDKSLLLVIGTGVDSNKLVKKLKKKVGEAEIVELRTHDTFEPAALPLPGTKQEVAAMAAARSPYSTPQHHHQWQYNSYAA

SEQ ID NO: 103744 - protein, 81 aa, Setaria italica
  Transcript Sequence Number=SeqID_37770
  Subcellular localization annotation: CTP_CleavageSite=30; ConfidenceScore=5.27e-01
MLRRAAPTAAALCRRAVSTSASPSPTAEATAAASSSAVNSILLRSLKEHYLEVSKMAPPPKTSPPKPFTIVKGALDQQSGP

SEQ ID NO: 103745 - protein, 134 aa, Setaria italica
  Transcript Sequence Number=SeqID_37771
  Gene Ontology: Mol. function=transferase activity, transferring glycosyl groups; Biological process=metabolic process
  Homolog annotation: Hit_ID=B6SQA3; Match level="QueryCoverage=100%, HitCoverage=27%, E-value=2e-61, Identity=83%"; Hit description =Cytokinin-O-glucosyltransferase 2
MGSLPPAEGEGRQLQPPHAVMIPYPAQGHVTPMLQLAKLLHARGFHVTFVNNEFNHRRHLRARGPAALDGAPGFRFAAIDDGLPPCDADATQDVPALCHSTMTTCFPRFKDLVARLNDEAERDGRPAVTCVVAD

SEQ ID NO: 103746 - protein, 389 aa, Setaria italica
  misc_feature (303)..(303): Xaa can be any naturally occurring amino acid
  Transcript Sequence Number=SeqID_37772
CSSASFSDDMTFGRASSTNDLMFKWRIPLFKSLAYIFSTDPPNNEKTIAEEPLSEESVHECSSIMHHLLMFCQVLPVGREMLACSLAFKELASSYTCRSAVALIFSQIHTSNQDVLEKDESEANHNSSTVDNWRCFSSLFKCWKKLTKYIGSNQPTDYLVETIYSLTLGAIALSQYGENLEGLLILRYLFGLPSDPSGSLESSGESLNEIALFMKTFEEKICQGFENSKTSVGKSLLRQVLNSTTLLHSILESSGLSTDSIQMVLEEGTDSLSKVARSVVMTAHLMPSLVDMPVNDESPFLFXWKVIVDSEEPIDCQEGEFAKRLVWELPDSSLDRQVMHGQSARRKLALGENASRRVRDNQVPELTGQFSRGLNTTNASSGHNTRRVH

SEQ ID NO: 103747 - protein, 239 aa, Setaria italica
  misc_feature (65)..(65): Xaa can be any naturally occurring amino acid
  Transcript Sequence Number=SeqID_37773
  Gene Ontology: Mol. function=DNA-directed RNA polymerase activity; Cellular component=chloroplast; Biological process=transcription
  Homolog annotation: Hit_ID=O82725; Match level="QueryCoverage=98%, HitCoverage=24%, E-value=1e-136, Identity=96%"; Hit description=DNA -directed RNA polymerase
ALDILGSTKWRVNRRVHDVVETIWSRGGGIAGLVDKANIPLPERPESEDPDEMQKWKWSLKKAKXTNRELHAERCDTELKLSVARKMREEDGFYYPHNLDFRGRAYPMHPHLSHLGSDLCRGVLEYAEGRPLGKSGLCWLKIHLANKYGGGVEKLSHEGKLAFVENQLLDIFDSAANPVDGNRWWTNAEDPFQCLAACMDLSDALKSSSPYRAVSHLPIHQDGSCNGLQHYAALGRTTW

SEQ ID NO: 103748 - protein, 56 aa, Setaria italica
  misc_feature (50)..(50): Xaa can be any naturally occurring amino acid
  Transcript Sequence Number=SeqID_37774
  Gene Ontology: Mol. function=glutathione transferase activity
  Homolog annotation: Hit_ID=B6TXQ4; Match level="QueryCoverage=96%, HitCoverage=17%, E-value=2e-18, Identity=83%"; Hit description =Glutathione S-transferase, C-terminal domain containing protein
MPVKVFGSPASAEVARVLTCLFEKDVEFQLIRVDSFRGSQRMPQYLKLQXPHGEAL

SEQ ID NO: 103749 - protein, 214 aa, Setaria italica
  Transcript Sequence Number=SeqID_37775
  Gene Ontology: Mol. function=voltage-gated chloride channel activity; Cellular component=integral to membrane; Biological process=chloride transport
  Homolog annotation: Hit_ID=Q2VBU9; Match level="QueryCoverage=98%, HitCoverage=26%, E-value=1e-73, Identity=65%"; Hit description =Chloride channel-like protein Osclc
  Pfam annotation: Domain name=Voltage_CLC; Domain location=65-213; Score=-116.9; E_value=0.0008; Accession=PF00654.12; Description =Voltage gated chloride channel
PDQVRYVVLKWTFCFAIGILTGIVGFVVNLAVENVAGFKHNAVSALMESSSYWTAFWVFAGSNLALLLFASSITAFVSPAAGGSGIPEVKAYLNGVDAPNIFSLRTLAVKIAGNIAAVSSSLHVGKAGPMVHTGACIAAIFGQGGSRKYGLTCRWLRYFKNDRDRRDLVTIGAGAGVAAAFRAPVGGVLFALESLSSWWRSALIWRSFFTTAVV

SEQ ID NO: 103750 - protein, 70 aa, Setaria italica
  Transcript Sequence Number=SeqID_37776
PTCKFQRVKCIASHYFSTKFSLESLNLQMIHTASSNLHPCSPEVLLSRWYTPHHQTCIFVHRRSFFTTSD

SEQ ID NO: 103751 - protein, 212 aa, Setaria italica
  misc_feature (10)..(10): Xaa can be any naturally occurring amino acid
  Transcript Sequence Number=SeqID_37777
  Gene Ontology: Mol. function=metal ion binding
  Homolog annotation: Hit_ID=B6SL08; Match level="QueryCoverage=92%, HitCoverage=56%, E-value=1e-78, Identity=75%"; Hit description =Ubiquitin-protein ligase/ zinc ion binding protein
  Pfam annotation: Domain name=zf-C3HC4; Domain location=141-190; Score= 8.5; E_value=0.011; Accession=PF00097.17; Description=Zinc finger, C3HC4 type (RING finger)
  Pfam annotation: Domain name=zf-FCS; Domain location=133-171; Score =9.2; E_value=0.069; Accession=PF06467.6; Description=MYM-type Zinc finger with FCS sequence mot
  Pfam module annotation: Pfam domain module=zf-C3HC4::zf-FCS; Domain location=141-190::133-171
MLDLVAMSAXDSALAEDLQFEEVLQFSTHFESENVCAVCKQMIQSLEASWIPDNCDHVICIACFCQYAHETDATGLPRCAVASCESLCKTETYHEISVPHGTLTSTEGMDRKGKKPLDGTLQELGQCSHGDDAMISSDFYCSICMETVHIGEVFPIDGCTHTFCISCVSQYIAAKVEENVLSIGCPDPGCKDGVLHPGSGQPIDKTFSSTFA

SEQ ID NO: 103752 - protein, 74 aa, Setaria italica
  Transcript Sequence Number=SeqID_37778
LRKTSPRCHYVYDNDLNSTGTKRPQVLDEHYRNKAISKSTLPLKPLGCERHESPVYCLIPNQFRCQIKVQGILK

SEQ ID NO: 103753 - protein, 81 aa, Setaria italica
  Transcript Sequence Number=SeqID_37779
  Homolog annotation: Hit_ID=Q5YJQ6; Match level="QueryCoverage=75%, HitCoverage=70%, E-value=2e-17, Identity=68%"; Hit description =F12E4.230-like protein (Fragment)
MVCVACLLPLFLIPVVNALPYLFDLILRKVYRLFGWEYRRPERAPPACPYKPAAQKNDEGASESKPLVEPHGAAAEDKKEE

SEQ ID NO: 103754 - protein, 160 aa, Setaria italica
  Transcript Sequence Number=SeqID_37780
  Gene Ontology: Mol. function=structural constituent of ribosome; Cellular component=ribonucleoprotein complex; Biological process =translation
  Homolog annotation: Hit_ID=Q9M5M1; Match level="QueryCoverage=99%, HitCoverage=99%, E-value=4e-74, Identity=86%"; Hit description=40S ribosomal protein S11
  Pfam annotation: Domain name=Ribosomal_S17; Domain location=74-143; Score=147.5; E_value=4.1e-41; Accession=PF00366.12; Description =Ribosomal protein S17
MAEQTEKAFLKQPKVFLCPKKAAKGNKPGKGGNRFWKSIGLGFKTPREAIEGTYIDKKCPFTGTVSIRGRIIAGTCHSAKMNRTIIVRRNYLHFVKKYQRYEKRHSNIPAHISPCFRVKEGDHVIIGQCRPLSKTVRFNVLKVIPAGSKSGAVKKAFTAA

SEQ ID NO: 103755 - protein, 160 aa, Setaria italica
  Transcript Sequence Number=SeqID_37781
  Gene Ontology: Mol. function=structural constituent of ribosome; Cellular component=ribonucleoprotein complex; Biological process =translation
  Homolog annotation: Hit_ID=Q9M5M1; Match level="QueryCoverage=99%, HitCoverage=99%, E-value=3e-74, Identity=86%"; Hit description=40S ribosomal protein S11
  Pfam annotation: Domain name=Ribosomal_S17; Domain location=74-143; Score=147.5; E_value=4.1e-41; Accession=PF00366.12; Description =Ribosomal protein S17
MAEQTEKAFLKQPKVFLCSKKAAKGNKPGKGGNRFWKNIGLGFKTPREAIEGTYIDKKCPFTGTVSIRGRIIAGTCHSAKMNRTIIVRRNYLHFVKKYQRYEKRHSNIPAHISPCFRVKEGDHVIIGQCRPLSKTVRFNVLKVIPAGSKSGAVKKAFTAA

SEQ ID NO: 103756 - protein, 49 aa, Setaria italica
  Transcript Sequence Number=SeqID_37782
  Gene Ontology: Mol. function=nucleic acid binding
  Homolog annotation: Hit_ID=B9RM26; Match level="QueryCoverage=67%, HitCoverage=6%, E-value=9e-13, Identity=93%"; Hit description =Protein ariadne-1, putative
SFTRTIPSIDILLLTGYISTAINDGPGCLMLRCPDPSCAAAVGQEMINA

SEQ ID NO: 103757 - protein, 49 aa, Setaria italica
  Transcript Sequence Number=SeqID_37783
TTRIEFEEHDGFSEKLLKLFITYKPDGSYFIEVITFHRTEVPLMYLLHI

SEQ ID NO: 103758 - protein, 61 aa, Setaria italica
  Transcript Sequence Number=SeqID_37784
  Gene Ontology: Mol. function=methylcrotonoyl-CoA carboxylase activity; Cellular component=mitochondrial matrix
  Homolog annotation: Hit_ID=B6SKB7; Match level="QueryCoverage=93%, HitCoverage=7%, E-value=5e-24, Identity=92%"; Hit description =Methylcrotonoyl-CoA carboxylase subunit alpha
MNADGFSEKLLKLFITYKPDGSYFIETEDGTSGLDVKVDHKGDHDFRVDAAGLQTDVTLAY

SEQ ID NO: 103759 - protein, 208 aa, Setaria italica
  Transcript Sequence Number=SeqID_37785
  Gene Ontology: Mol. function=methylcrotonoyl-CoA carboxylase activity; Cellular component=mitochondrial matrix; Biological process=metabolic process
  Homolog annotation: Hit_ID=B6SKB7; Match level="QueryCoverage=93%, HitCoverage=25%, E-value=7e-78, Identity=75%"; Hit description =Methylcrotonoyl-CoA carboxylase subunit alpha
  Pfam annotation: Domain name=Biotin_lipoyl; Domain location=144-203; Score=30.2; E_value=2.4e-06; Accession=PF00364.14; Description =Biotin-requiring enzyme
LRSLVLSKLVLVIGYNNTPFRMHHFARQPLELEFEEHDGFSEKLLKLFITYKPDGSYFIETEDGTSGLDVKVDHKGDHDFRVDAAGLQTDVTLAYYSKDNSEHIHIWHGKHHHHYRQTLRTEHVVDDTSQPSHASEGESHIQKGVFWHRMAGLVVKVLLEDGAQVEAGQPVMVMEAMKMEHVVKAPRAGYVEGLKVTAGPNKVFRTTK

SEQ ID NO: 103760 - protein, 346 aa, Setaria italica
  misc_feature (328)..(328): Xaa can be any naturally occurring amino acid
  Transcript Sequence Number=SeqID_37786
  Gene Ontology: Mol. function=methylcrotonoyl-CoA carboxylase activity; Cellular component=mitochondrial matrix; Biological process=metabolic process
  Homolog annotation: Hit_ID=B6SKB7; Match level="QueryCoverage=83%, HitCoverage=37%, E-value=1e-153, Identity=93%"; Hit description =Methylcrotonoyl-CoA carboxylase subunit alpha
  Pfam annotation: Domain name=ATP-grasp; Domain location=170-345; Score=-81.5; E_value=0.051; Accession=PF02222.14; Description=ATP -grasp domain
  Pfam annotation: Domain name=CPSase_L_D2; Domain location=170-346; Score=170.6; E_value=4.7e-48; Accession=PF02786.9; Description =Carbamoyl-phosphate synthase L chain, ATP binding domain
  Pfam annotation: Domain name=CPSase_L_chain; Domain location=56-168; Score=177.6; E_value=3.5e-50; Accession=PF00289.14; Description =Carbamoyl-phosphate synthase L chain, N-terminal domain
  Pfam annotation: Domain name=Dala_Dala_lig_C; Domain location=170 -344; Score=-77.6; E_value=0.00014; Accession=PF07478.5; Description =D-ala D-ala ligase C-terminus
  Pfam module annotation: Pfam domain module=ATP-grasp::CPSase_L _D2::CPSase_L_chain::Dala_Dala_lig_C; Domain location=170-345::170 -346::56-168::170-344
  Subcellular localization annotation: CTP_CleavageSite=61; ConfidenceScore=5.58e-01
MASRLLRLHLRRRGGGRSPGSPVPPLPLLLAARLLSSSSSSSAPTSPAAAASPGAGIEKVLVANRGEIACRVMRTARRLGVATVAVYSDADRKALHVRAADEAVRIGPPPARESYLDARAIIDAAHRTGAQAIHPGYGFLSESADFAQLCEAEGLKFIGPPASAIRDMGDKSASKRIMGAAGVPLVPGYHGAEQDIELLKLEADKIGYPVLIKPTHGGGGKGMRIVQRPEEFVDSVLSAQREAAASFGVNTLLIEKYITQPRHVEVQVFGDQHGNAIYLYERDCSLQRRHQKIIEEAPAPNVTAEFRSHIGGAAVSAAKGHLLDSLCXKAVGYYNAGTVEFIVDTL

SEQ ID NO: 103761 - protein, 483 aa, Setaria italica
  Transcript Sequence Number=SeqID_37787
  Gene Ontology: Mol. function=methylcrotonoyl-CoA carboxylase activity; Cellular component=mitochondrial matrix; Biological process=metabolic process
  Homolog annotation: Hit_ID=B6SKB7; Match level="QueryCoverage=100%, HitCoverage=64%, E-value=0.0, Identity=86%"; Hit description =Methylcrotonoyl-CoA carboxylase subunit alpha
  Pfam annotation: Domain name=Biotin_carb_C; Domain location=121-228; Score=181.1; E_value=3e-51; Accession=PF02785.11; Description=Biotin carboxylase C-terminal domain
  Pfam annotation: Domain name=Biotin_lipoyl; Domain location=410-477; Score=76.0; E_value=1.4e-19; Accession=PF00364.14; Description =Biotin-requiring enzyme
  Pfam annotation: Domain name=CPSase_L_D2; Domain location=1-114; Score=52.0; E_value=3e-15; Accession=PF02786.9; Description =Carbamoyl-phosphate synthase L chain, ATP binding domain
  Pfam module annotation: Pfam domain module=Biotin_carb_C::Biotin _lipoyl::CPSase_L_D2; Domain location=121-228::410-477::1-114
QHGNAIYLYERDCSLQRRHQKIIEEAPAPNVTAEFRSHIGGAAVSAAKAVGYYNAGTVEFIVDTLSGEFYFMEMNTRLQVEHPVTEMIVGQDLVEWQIRVANGERLPLSQEQVPLNGHAFEARIYAENVPRGFLPATGTLHHYRPVPSASTVRVETGVEEGDTVSMHYDPMIAKLVVWGESRSAALVKLKKCLSNFQIAGLPTNVGFLQELASHSSFEEGIVDTHFIERYKDDLLSTSTKASGESRDVAELGAILAAACICKKDHITSKESIRADKKLSVWYNNTPFRMHHFARQPLELEFEEHDGFSEKLLKLFITYKPDGSYFIETEDGTSGLDVKVDHKGDHDFRVDAAGLQTDVTLAYYSKDNSEHIHIWHGKHHHHYRQTLRTEHVVDDTSQPSHASEGKSHPKGSVLAPMAGLVVKVLLEDGAQVEAGQPVMVMEAMKMEHVVKAPRAGYVEGLKVTAGQQVFDSSVLFTIKDNTAN

SEQ ID NO: 103762 - protein, 171 aa, Setaria italica
  Transcript Sequence Number=SeqID_37788
  Gene Ontology: Mol. function=transferase activity; Cellular component= chloroplast
  Homolog annotation: Hit_ID=B9S748; Match level="QueryCoverage=76%, HitCoverage=12%, E-value=1e-32, Identity=56%"; Hit description =Synaptotagmin, putative
  Pfam annotation: Domain name=C2; Domain location=3-93; Score=74.5; E _value=3.9e-19; Accession=PF00168.22; Description=C2 domain
MKLAVEISDASDLAPKDGAASCNPYVEVDFDDQRQRTATKPADRNPYWNQTLVFDVRDPARFPSLPIDVSVLHDRRLQDHNALRPHTFLGRVRINAAASVARSPEEAVLQRYPLEKRGLFSRVSGDIALRIYLLQQHNDDAFAATNQQQQDSVAAAAASGDPERMVRSAFA

SEQ ID NO: 103763 - protein, 62 aa, Setaria italica
  misc_feature (9)..(9): Xaa can be any naturally occurring amino acid
  misc_feature (16)..(16): Xaa can be any naturally occurring amino acid
  Transcript Sequence Number=SeqID_37789
  Gene Ontology: Mol. function=protein serine/threonine kinase activity; Biological process=protein amino acid phosphorylation
  Homolog annotation: Hit_ID=Q2L3U3; Match level="QueryCoverage=100%, HitCoverage=5%, E-value=9e-15, Identity=61%"; Hit description =CLAVATA-like kinase
TRLLFYGYXPNGSLSXGLLHGGLAAKGAPPAGEWGARFDVALGVAHAVAYLHHDCVPAILHG

SEQ ID NO: 103764 - protein, 54 aa, Setaria italica
  Transcript Sequence Number=SeqID_37790
GLIYFLGYFTFTFTFTLGYLIVEGGIPHDEKEEKRWRPVQLRNCPVLGAILILD

SEQ ID NO: 103765 - protein, 114 aa, Setaria italica
  Transcript Sequence Number=SeqID_37791
  Homolog annotation: Hit_ID=B6U179; Match level="QueryCoverage=72%, HitCoverage=17%, E-value=2e-16, Identity=67%"; Hit description =LEC14B protein
LDFWPVRSSISCKARMRGVRRSARGEASGKAHRELDRFDMANEVFHLTRARSELCHRARGATSARRKRPFSTFELLSARECGRTGGAGFAAADRAYVGSRSTISRYLKGFRFGL

SEQ ID NO: 103766 - protein, 117 aa, Setaria italica
  Transcript Sequence Number=SeqID_37792
SKQGEKQQAVETGDDDASRAHQREMKPSLTKRPKRRTTKPAAMHCVLVTTVCWYASSVTAAPAHPIRNPLRFRSMLPLLLRRRFSPPIALPLLASWMLLRVVWTVDETRDGEEGRGD

SEQ ID NO: 103767 - protein, 76 aa, Setaria italica
  Transcript Sequence Number=SeqID_37793
PAGSAREVSRAEPALALAANRRPLGTCFIVYAVEHFRAERLGDWLCFEMFAMLGFGDFRWDAARCGDLVGSRVVVW

SEQ ID NO: 103768 - protein, 43 aa, Setaria italica
  Transcript Sequence Number=SeqID_37794
AGKLSDVAIEDSLCSVASADPLGSGVTEHMDSSKNGDGTCNDG

SEQ ID NO: 103769 - protein, 1067 aa, Setaria italica
  misc_feature (475)..(475): Xaa can be any naturally occurring amino acid
  misc_feature (654)..(654): Xaa can be any naturally occurring amino acid
  Transcript Sequence Number=SeqID_37795
  Gene Ontology: Mol. function=N-acetyltransferase activity; Cellular component=nucleus; Biological process=metabolic process
  Homolog annotation: Hit_ID=Q10CY0; Match level="QueryCoverage=98%, HitCoverage=86%, E-value=0.0, Identity=60%"; Hit description =Acetyltransferase, GNAT family protein, expressed
  Pfam annotation: Domain name=PHD; Domain location=692-735; Score =57.8; E_value=4.2e-14; Accession=PF00628.21; Description=PHD-finger
AKAGRKCEEELRFEKRVTRSATVRQREVSGSSCQHTTNEATLGSKGRKRDVVAHYTRKVSSTVSPKTHHAELVERNTIMKKQTVKGKVIDRRDLGVTENDNHANATENEESENETKVNLKSQPLARSISIVKKATEAAVSAVDQNISGSAITEKNDMEHTDSDGVKSENKTPVQKPEMSVGAKIVASKKRILESGLDKIAGRSPIAMPSMKKTRNTSSDPDIEQPNKSSGEKVVGKNCDSGNKRVLRERQHRNQTSLSSRSSNRTNQNDIKLTQDQSDDDEIGRDTSYRRTRRGRSRDAAALVVPQQDDSSDSEEDIVVKKNQQKRKKSGHKQKAGSKLKHASARSKAGRLGRPVLTSSESSSLSLQAGKGKVKVPEGKGRSDRASTMNTASPSEQINTGSLREEKQKISDEIKAILLGAGWTIDLRPRNGRNYMDSVYIPPSGKGSYWSVTKAYYAFRETMESEQKDSSKGQSXIKKSVGSPGKRQASNSSGCTLTEDILSKLKRVVVNKRTTKVEIQRLRKKAFRKGASKVKRNKITKSRRLHLGNDRKKRGGCALLARGSNKESDSSTDGFVPYEWKRTIFSWLIDLDILSVNTKLKCMDESHSKVLLEGIVTRDGINCSCCSEVLAVLEFVAHAGGDVKKPYRNIVVDGXLDIDLMHCLTNAWNKQSDSERQDFFPISIEGDDPNDDTCGICGDGGNLICCDGCPSTFHMSCLGLEALPSDDWCCANCSCKFCHEHSSDDTEDIADADSSLRSCSQCDEMYHQACSPEIDSITSDSDPSCNVFCQHSCRLLFEELQNLLGVKKDLEQEFSCRVIQRIHDDVPETVVALDERVECNSKIAVALSLMDECFLPIVDQRTGINLIRNVVYSCGSNFVRLDFRGFYIFILEHGDEMIAAASVRIHGTKLAEMPFIGTRNMYRRQGMCRRLLDGIEMILSSLNVEKLIIPAISELVDTWTSKFGLVQLEDSEKQEVKAISMLVFPGTGLLQKPLLKKALPDKDPCPSGVGAVSSANKAGKLSDVAIEDSLCSVASADPLGSGVTEHMDSSKNGDGTCNGDVSQQSPHP

SEQ ID NO: 103770 - protein, 262 aa, Setaria italica
  Transcript Sequence Number=SeqID_37796
  Gene Ontology: Mol. function=transposase activity; Biological process= transposition, DNA-mediated
  Homolog annotation: Hit_ID=Q2QT97; Match level="QueryCoverage=56%, HitCoverage=21%, E-value=2e-09, Identity=28%"; Hit description =Transposon protein, putative, CACTA, En/Spm sub-class
NIEKSKKSCSDRGYISWNDDMEKALLDTFVEYYNKGDRCQNGWKSHVYTATIKNVREKCHVDITKNNIMLRNKTFNKHYIIINGMLESSGFGWDWNKNKISIDSDSVWEAYVTKNKEATGYRHKTVLYWDSISLVLGKDHAIGEAAKTAAESSKDMSKEDLSNKEPTSSATSGSLKRQRSGDSFTSMMAEKMDKFAEALKEEAPKGPTSKEILNTLNEVQGLDEDTLLDLFDILTGDARKYESLLALPEKMRNRWLLKQLNK

SEQ ID NO: 103771 - protein, 80 aa, Setaria italica
  misc_feature (16)..(16): Xaa can be any naturally occurring amino acid
  Transcript Sequence Number=SeqID_37797
VVLFYFLRQFERTPPXESPRREHIKMVVWLLTTMLTAAFSYKVAEIMPLPVQVLVWAISSATVLGGFYAFFLYQEGTSKA

SEQ ID NO: 103772 - protein, 163 aa, Setaria italica
  Transcript Sequence Number=SeqID_37798
  Gene Ontology: Mol. function=zinc ion binding; Cellular component =COPII vesicle coat; Biological process=ER to Golgi vesicle-mediated transport
RDGAHDPPEMRSAFVDLLLQGEEGEAAVAAPTPVYVAAIDLSSSEEFLELVKSALQAALEALSPGSLFGLLTFSSKIGLYDVQGPIPIVKNVFIPPDSDGALPIDLEDVMPLCSFLAPIDSCKDRITEALETIKPMSSWDVAANTAEGQDHVLHHTRGFGVAL

SEQ ID NO: 103773 - protein, 66 aa, Setaria italica
  Transcript Sequence Number=SeqID_37799
METPPPSRVRLACLAFNRGRYSDAPILFSLSERKAVASDMDDLAGNTTWATPHGWFLVRRPTPATF

SEQ ID NO: 103774 - protein, 125 aa, Setaria italica
  Transcript Sequence Number=SeqID_37800
  Gene Ontology: Cellular component=plastoglobule
  Subcellular localization annotation: CTP_CleavageSite=30; ConfidenceScore=5.54e-01
MATSTAAAALLRPCPGVPAALQLSERWSPRAVAGRTTRRRRGAAGVVRACFNPLGDERILREAIKEPVAFMGGVFAGLLRLDLNEDPLKEWITRTVEASGIAEENSSEESSEADQNDAPQQIEIE

SEQ ID NO: 103775 - protein, 164 aa, Setaria italica
  Transcript Sequence Number=SeqID_37801
  Homolog annotation: Hit_ID=B6TC50; Match level="QueryCoverage=92%, HitCoverage=45%, E-value=5e-75, Identity=88%"; Hit description=ZCW7
SEAEEMTPEQEEEKYFEWRSSLVEKLEGIELNLEGVKFRMTIEIPPSEDFRTMKKSWEDFYSSELLNSRNPVRKIARRPDTIIVRGVPSRWFAETRVSSKPSTLVTHTIFSALGKIRTLNIANDDELEAKEDGANKELISGLNCKVWVQFESYDDFHDAMKALC

SEQ ID NO: 103776 - protein, 106 aa, Setaria italica
  Transcript Sequence Number=SeqID_37802
  Homolog annotation: Hit_ID=B6TC50; Match level="QueryCoverage=93%, HitCoverage=29%, E-value=1e-39, Identity=76%"; Hit description=ZCW7
LGKYKEDGATKELISGLNCKVWVQFESYDDFHDAMKALCGRSLEKEGSRLRVDYDVTWDREGFFRIAQYEPARSNVGEKDASASVHGRKKHYTSRIESDHRKRFRD

SEQ ID NO: 103777 - protein, 111 aa, Setaria italica
  Transcript Sequence Number=SeqID_37803
SVNGSGGRLNPWAEPFVPSGVRYRGLQTAAAEQEVDDFSPEWWRLVASSPAFRDRWLSDYGALGLLDADEDAEVVDSFLPADLFSPPPPRQGKQPSRSACGFLEILPVLRN

SEQ ID NO: 103778 - protein, 167 aa, Setaria italica
  Transcript Sequence Number=SeqID_37804
MAVVSGNGSGGRLNPWAEPFVPSGVRYRGLQTAAAEQEVDDFSPEWWRLVASSPAFRDRWLSDYGALGLLDADEDAEVVDSFLPADLFSPPPPRQESEREESAAGKRGGAGLEVAAWGIDKWWRAHAGPPEAPRYAEKAPRRVAGGAGKQPSRSACGFLEILPVLRN

SEQ ID NO: 103779 - protein, 434 aa, Setaria italica
  Transcript Sequence Number=SeqID_37805
  Gene Ontology: Mol. function=transposase activity; Biological process= transposition, DNA-mediated
  Homolog annotation: Hit_ID=Q2QT97; Match level="QueryCoverage=91%, HitCoverage=50%, E-value=1e-104, Identity=48%"; Hit description =Transposon protein, putative, CACTA, En/Spm sub-class
  Pfam annotation: Domain name=Plant_tran; Domain location=278-359; Score=-52.6; E_value=0.061; Accession=PF04827.6; Description=Plant transposon protein
MDPEDSSEFEEEEEEEDDDDDLMLFILPALYLATTETETETPRQPSKLSDATGIKTTGQAPVFGDAKWICKVLEDDRGQGYGKLRVEPHILLELSRYLRSNNLLRNTKGLSVEGKIGIFIYMLSRNASFQILSNRFKHSTETIHRHIKACFDAVTAMTGEFVKPPSTQTHWKISSDPCYGAYFENCIGAIDGIHVPMTLSDSEAAPYRNRQESVSQNVMLACDFDLNFVYVSCGREGSASDAAVLYSAIESGFEVPIGKYYLVDGGYANTPSFLAPYIEVPYHTKEQEQNNVQPRDYRELFNLRHAQLRGHIKRAVGLLKMRFPILNVATSYRKDTQLKIPAAAVVLHNIIQRQGGDEELLSDQTIPFASRKPVTLPSGDDTYGYDVAAFNSECNMGNALRDGIAQRMWADYERSMYMPDFTIEEVGLKECQGE

SEQ ID NO: 103780 - protein, 68 aa, Setaria italica
  Transcript Sequence Number=SeqID_37806
AEERGRADEQLLEAEAVVVGSGRPGSGPQPGPAGRDVDVATGIGQQHAQEKINESVNRHHQPNVNRRS

SEQ ID NO: 103781 - protein, 91 aa, Setaria italica
  Transcript Sequence Number=SeqID_37807
  Gene Ontology: Mol. function=aspartic-type endopeptidase activity; Biological process=DNA integration
  Homolog annotation: Hit_ID=Q2QZY6; Match level="QueryCoverage=83%, HitCoverage=4%, E-value=8e-15, Identity=50%"; Hit description =Transposon protein, putative, CACTA, En/Spm sub-class
LSFTNSCILSPSLPKVFEAFAVNYNSQPEKWGVEKMIAMCVQEEERLKGSSGDTINYLSQNKKRNFQNSKPQGKPQWNASSSKAHGNAPNE

SEQ ID NO: 103782 - protein, 60 aa, Setaria italica
  Transcript Sequence Number=SeqID_37808
PLKRCSLAFHVSSLHPTIEMQSWEELELNSDEFTSCSYFPHATSNPCKHTNYYLCQMKRK

SEQ ID NO: 103783 - protein, 53 aa, Setaria italica
  Transcript Sequence Number=SeqID_37809
  Gene Ontology: Mol. function=calcium ion binding
  Homolog annotation: Hit_ID=B6U4N5; Match level="QueryCoverage=96%, HitCoverage=29%, E-value=6e-22, Identity=100%"; Hit description =Calcineurin subunit B
TVSQQEIVSLYERFCQLDRSAKGFISEDEFLSIPEFSLNPLSKRLLRMVDGLN

SEQ ID NO: 103784 - protein, 162 aa, Setaria italica
  Transcript Sequence Number=SeqID_37810
  Gene Ontology: Mol. function=calcium ion binding; Cellular component =calcineurin complex; Biological process=adaptation to pheromone during conjugation with cellular fusion
  Homolog annotation: Hit_ID=B6U4N5; Match level="QueryCoverage=87%, HitCoverage=81%, E-value=9e-69, Identity=90%"; Hit description =Calcineurin subunit B
  Pfam annotation: Domain name=efhand; Domain location=31-59; Score =9.4; E_value=2; Accession=PF00036.24; Description=EF hand
  Pfam annotation: Domain name=efhand; Domain location=95-123; Score =29.7; E_value=1.2e-05; Accession=PF00036.24; Description=EF hand
  Pfam module annotation: Pfam domain module=efhand::efhand; Domain location=31-59::95-123
MGNASSMLTQYDIEEVQEHCNYLFSQQEIVSLYERFCQLDRSAKGFISEDEFLSIPEFSLNPLSKRLLRMVDGLNFKDFVAFLSTFSTKASLRQEIELIFKVYDIDGKGKVTFKDLLEVLRDQTGSFMSEEQREVLACHFIKFWISLSMLCVCFLYFVKTIL

SEQ ID NO: 103785 - protein, 83 aa, Setaria italica
  Transcript Sequence Number=SeqID_37811
QMLGSNQWSRQTEAHRSRKYVALRHTHTHTKGIMIVPCCANNKCMNLSCEDKTLVLGVCISCTYFCSEGCGVAPCEIVNAYGM

SEQ ID NO: 103786 - protein, 138 aa, Setaria italica
  Transcript Sequence Number=SeqID_37812
  Homolog annotation: Hit_ID=Q10A51; Match level="QueryCoverage=85%, HitCoverage=49%, E-value=6e-14, Identity=34%"; Hit description=F-box domain containing protein, expressed
QEKYKSDIHLMPAEDGGIGFAGVNLSSLHFWSRKTDNEGAAGWALIRIIDMAMLPISHKLAGDMLLWSSVAGFADDSDVLFLHSEAGVFMINLRSKQLKEVPQASDNAIYIYPYTSFYSRGPDIIKDDKDMALKYRKK

SEQ ID NO: 103787 - protein, 30 aa, Setaria italica
  Transcript Sequence Number=SeqID_37813
FLKGTAEVVFTRRSDAIAALKRYNNVLLDG

SEQ ID NO: 103788 - protein, 109 aa, Setaria italica
  Transcript Sequence Number=SeqID_37814
  Gene Ontology: Mol. function=nucleic acid binding; Cellular component= spliceosome; Biological process=mRNA processing
  Homolog annotation: Hit_ID=B6TD71; Match level="QueryCoverage=92%, HitCoverage=33%, E-value=2e-28, Identity=62%"; Hit description=THO complex subunit 4
  Pfam annotation: Domain name=RRM_1; Domain location=48-106; Score =20.7; E_value=0.0024; Accession=PF00076.14; Description=RNA recognition motif. (a.k.a. RRM, RBD, o
RGPLGVSSRPSARTIAKARSKLTKDMTWRPDLFSDSMAASGIETGTKLYISNLDYGVSNEDIKELFSEVGHLKRFAVHYDGYGRPNGTAEVVFTRRSDAICLSTCKSFI

SEQ ID NO: 103789 - protein, 273 aa, Setaria italica
  Transcript Sequence Number=SeqID_37815
  Gene Ontology: Mol. function=nucleic acid binding
  Homolog annotation: Hit_ID=B6TD71; Match level="QueryCoverage=51%, HitCoverage=47%, E-value=4e-46, Identity=64%"; Hit description=THO complex subunit 4
  Pfam annotation: Domain name=RRM_1; Domain location=82-151; Score =61.7; E_value=2.7e-15; Accession=PF00076.14; Description=RNA recognition motif. (a.k.a. RRM, RBD, o
  Subcellular localization annotation: CTP_CleavageSite=68; ConfidenceScore=5.27e-01
MSYYARRGGDRGTGRIQGSGGKGGHALRGRSGLPPRGPLGVSSRPSARTIAKSFSRTKDMTWRPDLFSDSMAASGIETGTKLYISNLDYGVSNEDIKELFSEVGHLKRFAVHYDGYGRPNGTAEVVFTRRSDAIAALKRYNNVLLDGKAMKIEVIGSDLGLPMTPRINVVGASNGRATRTVVMTPEFSQRGRGSSSRPLSNPSNRFNNRGGFQAGRGRGQFQARGRGRGQFQARGRGRGQFQGRGGRGRKPEKTADELDKDLESYHAEAMKTD

SEQ ID NO: 103790 - protein, 271 aa, Setaria italica
  misc_feature (176)..(176): Xaa can be any naturally occurring amino acid
  Transcript Sequence Number=SeqID_37816
  Homolog annotation: Hit_ID=Q6Z867; Match level="QueryCoverage=87%, HitCoverage=88%, E-value=7e-65, Identity=54%"; Hit description=RNA recognition motif (RRM)-containing protein-like
  Subcellular localization annotation: CTP_CleavageSite=57; ConfidenceScore=5.56e-01
MPLLLLPPTVCATGAAAAPASSAAFSRPPPSSRLRCSHLPFAFPRLRKYGRRHREPVAAPTSDDNDEEETEAEDGDYDDDDEEEIEMAVDEEEFLATRPKPMGFGEGKTYSTDIEEQLLREMGLGGARSRGDATSAKRREGNGSAKETNSDLNDKGVQVRVWNLPKKKNIHKDLKXAFKGFPGLLSIDPAVSANKKTRDPICKGFAYLKLESADAATRFVEIYSRKPVPFGKVEKPISCCIVDGNSSVEPSNKASNATQPRSKLQNLVAAS

SEQ ID NO: 103791 - protein, 245 aa, Setaria italica
  misc_feature (36)..(36): Xaa can be any naturally occurring amino acid
  Transcript Sequence Number=SeqID_37817
  Gene Ontology: Mol. function=endonuclease activity
  Homolog annotation: Hit_ID=B9SFL5; Match level="QueryCoverage=94%, HitCoverage=45%, E-value=1e-101, Identity=70%"; Hit description =Hydrolase, putative
RTEGDYGMRYVFAESWAPEYGNAVLSRWPIKRWKAXRVADQSDFRNVLRATIEVPEAGEINFHCTHLDHLDEGWRMKQVDAIIRSGDGPHILAGGLNALDGTDYSAERWADIVKYYEEIGKPTPKVEVMKYLKGKQYVDAKDFAGECEAVVVVAKGQDVQGTCKYGTRVDYILASPSSPYKFVPGSYSVISSKGTSDHHIVRVDVTIPQVKETDTETVNRKQRVLRVNKKSSRKGLTKLRRPGIT

SEQ ID NO: 103792 - protein, 109 aa, Setaria italica
  Transcript Sequence Number=SeqID_37818
GLDARMGPEEAVKEQKKRREMEDAHEVGRCPSCGYGAAGLKMVVSARRRRGATQGDCVLVLMRALAVVGMLIWLIYGMAKMYINLGPERRWIFYSVVVEGIVVMVGGGM

SEQ ID NO: 103793 - protein, 464 aa, Setaria italica
  Transcript Sequence Number=SeqID_37819
  Gene Ontology: Mol. function=protein serine/threonine kinase activity; Cellular component=integral to membrane; Biological process=protein amino acid phosphorylation
  Homolog annotation: Hit_ID=Q6W0C7; Match level="QueryCoverage=78%, HitCoverage=98%, E-value=1e-138, Identity=66%"; Hit description=Pto -like serine/threonine kinase (Fragment)
  Pfam annotation: Domain name=APH; Domain location=113-289; Score= -14.1; E_value=0.022; Accession=PF01636.15; Description =Phosphotransferase enzyme family
  Pfam annotation: Domain name=Pkinase; Domain location=111-379; Score =139.8; E_value=8.5e-39; Accession=PF00069.17; Description=Protein kinase domain
  Pfam annotation: Domain name=Pkinase_Tyr; Domain location=111-381; Score=107.8; E_value=3.6e-29; Accession=PF07714.9; Description =Protein tyrosine kinase
  Pfam module annotation: Pfam domain module=APH::Pkinase::Pkinase_Tyr; Domain location=113-289::111-379::111-381
  Subcellular localization annotation: CTP_CleavageSite=60; ConfidenceScore=5.39e-01
DTGSGGDPSRSRSKKIIAGIVAGSAVAGVTVVMAVALVVLRVRRRKKPEKKPSSTWAAFSASALGSGSRSRSFGKSNSGGARNNTVTLGQSAAGAGYRFPFAALQEATSGFDEGMVIGVGGFGKVYKGTLRDETRVAVKRGNRRSQQGLNEFRTEIELLSRLRHRHLVSLIGYCDERGEMILVYEYMARGTLRSHLYDSELPPLSWKQRLEASIGAARGLHYLHTGSNKAIIHRDVKSANILLDDSFMAKVADFGLSKTGPELDKTHVSTAVKGSFGYLDPEYFRRQMLTEKSDVYSFGVVLLEVLCARPVIDPTLPPETVNLAEWATKRLKNGELDSIVDQRIAGTIRPESLKKFADTAEKCLAEYGVERPAMGDVLWCLEYALQLQEASPDSSSTLKLPEASPGSSGTDNTQLVPGVASKYQRNQSTASDGTAATMSANLGDLDGMSMRRVFSKMIKSEEGR

SEQ ID NO: 103794 - protein, 167 aa, Setaria italica
  Transcript Sequence Number=SeqID_37820
  Gene Ontology: Cellular component=cell wall
  Homolog annotation: Hit_ID=Q2R0H3; Match level="QueryCoverage=84%, HitCoverage=82%, E-value=7e-61, Identity=79%"; Hit description =Dirigent-like protein, expressed
  Pfam annotation: Domain name=Dirigent; Domain location=11-167; Score =158.7; E_value=1.7e-44; Accession=PF03018.6; Description=Dirigent -like protein
MASCKLYSVALLVVILAAGPATRPVSAASAHLHFYMHDVLTGPSPTAVQVLNGPRGHFGDTVVIDDVLTESASRSSSAVGRAQGHYIWASTGNPELLVTMNVVLTSGPYAGSSVTVVGRDDIGAPVRELSVVGGTGRFRMARGYVLWKTVSLDHPNAVLELDVFVDA

SEQ ID NO: 103795 - protein, 59 aa, Setaria italica
  Transcript Sequence Number=SeqID_37821
TIFETKLSAGCKRTEIYSLPVFILHQYKKEVIFESIKTFLDGWTIFLKYLVQDCLSGHF

SEQ ID NO: 103796 - protein, 92 aa, Setaria italica
  Transcript Sequence Number=SeqID_37822
  Subcellular localization annotation: CTP_CleavageSite=46; ConfidenceScore=5.81e-01
MAMRLLSPSTPPPHFPSPGTKPPASAAAALPSSSSSYFSLRLRRARAAAAAGAAAAGGPEREWGPVRRGRRWAGRSTRGLAEIAKKVPLFEP

SEQ ID NO: 103797 - protein, 65 aa, Setaria italica
  Transcript Sequence Number=SeqID_37823
  Subcellular localization annotation: CTP_CleavageSite=44; ConfidenceScore=5.47e-01
SLAASGGLSEIGVAQIHPALGLSFSILSSPFSPAVLVVATVLLSSMAAVASSSPPAAIVGPQPTW

SEQ ID NO: 103798 - protein, 64 aa, Setaria italica
  Transcript Sequence Number=SeqID_37824
REMGKFFLNPYLSDSLSYKEKSFSYGKADYRLFLGIKNRNILVMPLSLYPHILCGYVVYDSSIS

SEQ ID NO: 103799 - protein, 101 aa, Setaria italica
  Transcript Sequence Number=SeqID_37825
  Gene Ontology: Mol. function=protein serine/threonine kinase activity; Biological process=protein amino acid phosphorylation
  Homolog annotation: Hit_ID=Q5F1Y3; Match level="QueryCoverage=52%, HitCoverage=6%, E-value=9e-17, Identity=69%"; Hit description =Putative wall-associated kinase 4
YGCFLVSHLMGSAKGIAITTMQLVLIWSITSTIMLVASGARPPSAASLAHCPKTCGNVSIWYPFGIGPGCFRQGFEVTCNRTTKPWNLFLGNTTTQVTGPV

SEQ ID NO: 103800 - protein, 209 aa, Setaria italica
  Transcript Sequence Number=SeqID_37826
  Gene Ontology: Mol. function=protein binding
  Homolog annotation: Hit_ID=B9HR17; Match level="QueryCoverage=95%, HitCoverage=30%, E-value=2e-37, Identity=41%"; Hit description=F-box family protein
VRSLLLAAAACRGLRTCASHALAFLPSFHLLEVALTHDLLRPLLPPNPSLRSLRLDCARLEDDAIGCLARSSLHELLLLNCDNISGRLLCELGATCRDLRVLSLNSLGERRGLVVNFSDLQELLNGCSQLESLRLELDFSTFDDPNFGHVWASASQRLSSLEIGYIPMIMLLEFLTAVVEARQHMDYVKAPVFFPSLQKLCLTVDFITD

SEQ ID NO: 103801 - protein, 42 aa, Setaria italica
  Transcript Sequence Number=SeqID_37827
MLDHRRSYQALPNLNSGICADPNESLLLHAILTPYHYNFRNR

SEQ ID NO: 103802 - protein, 45 aa, Setaria italica
  Transcript Sequence Number=SeqID_37828
EIRRRRQHGEEEGEDWQWGIMSGLGPGLTVETIVMHATAGRRNED

SEQ ID NO: 103803 - protein, 209 aa, Setaria italica
  Transcript Sequence Number=SeqID_37829
TARYQPAFLNSLMEQSMKSTDHNSSTNNQNDGSSVLTSKSNAGLVDQILDYIVRSIELMNRSPSVLLSILDLLKALWESGIQFLFVLEKLRSSITFWDNLSRCIRATLDICPVDCIAAVDENFSLRYHCQGKIFEIMSHELFLQGKLLAETSNPAPNGSKGQKEHSAPCRSSVVLKWFDTAILDDLISHLSSNAYNKKLLHRAKVAACL

SEQ ID NO: 103804 - protein, 85 aa, Setaria italica
  Transcript Sequence Number=SeqID_37830
CIWLQLLYPRRCIRFIFLVIMHSSLEYLRHIEAKLIQLASNCECSLLECCSGHCSHNKNLHQRSFVHFYFAFFFFRSVISLLGKT

SEQ ID NO: 103805 - protein, 349 aa, Setaria italica
  misc_feature (195)..(195): Xaa can be any naturally occurring amino acid
  Transcript Sequence Number=SeqID_37831
  Gene Ontology: Mol. function=alpha-mannosidase activity; Cellular component=integral to membrane; Biological process=carbohydrate metabolic process
  Homolog annotation: Hit_ID=B9RUH3; Match level="QueryCoverage=98%, HitCoverage=29%, E-value=1e-134, Identity=67%"; Hit description =Mannosidase alpha class 2a, putative
  Pfam annotation: Domain name=Glyco_hydro_38C; Domain location=1-339; Score=82.5; E_value=1.5e-21; Accession=PF07748.5; Description =Glycosyl hydrolases family 38 C-termi
SILTEGPLVQEAHSLPKTEWHKSPLSHSTRIYDCGDSIQDMLIEKEYHVELVGHVFNDKELIVRYKTDIDNQRIFYSDLNGFQMSRRQTYDKIPLQGNYYPMPSLAFLQDSLGNRFSVHSKQSLGAASLKTGWLEIMLDRRLVQDDGRGLGQGVMDNRPMNVIFHLLRESNVSALPKTHSLLTLQPSLLSHRVGXHLNYPMHAFKSKKPHEKSFKLPQQSFTPLTASLPCDVHIVNLKVPQPLRFPHSEAADPRFAILLQRRGWDASYCKRGGLQCTTVGEEPVNLFYMFKDLSAVSVKATSLNLLHDDPEMLGYLEQIGDVAQEGNVLISPMEIQAYKLDLQPPSPQE

SEQ ID NO: 103806 - protein, 779 aa, Setaria italica
  Transcript Sequence Number=SeqID_37832
  Gene Ontology: Mol. function=alpha-mannosidase activity; Cellular component=integral to membrane; Biological process=carbohydrate metabolic process
  Homolog annotation: Hit_ID=B9RUH3; Match level="QueryCoverage=99%, HitCoverage=66%, E-value=0.0, Identity=70%"; Hit description =Mannosidase alpha class 2a, putative
  Pfam annotation: Domain name=Alpha-mann_mid; Domain location=380-465; Score=122.4; E_value=1.5e-33; Accession=PF09261.3; Description=Alpha mannosidase, middle domain
  Pfam annotation: Domain name=Glyco_hydro_38; Domain location=36-375; Score=512.6; E_value=5.2e-151; Accession=PF01074.14; Description =Glycosyl hydrolases family 38
  Pfam annotation: Domain name=Glyco_hydro_38C; Domain location=525 -779; Score=-77.6; E_value=0.00037; Accession=PF07748.5; Description =Glycosyl hydrolases family 38 C-termi
  Pfam module annotation: Pfam domain module=Alpha-mann_mid::Glyco _hydro_38::Glyco_hydro_38C; Domain location=380-465::36-375::525-779
RDLYDRIQFLDVDGGAWKQGCKVKYRGDEWDGEKLKVFVAPHSHNDPGWIRTVEEYYERQSRHILDTIVESLSKDSRRKFIWEEMSYLERWWRDAPRKKQEAFAKLVRDGQLEIVSGGWVMNDEANSHYFAIIEQMMEGNMWLNDTIGVVPKNSWSIDPFGYSSTMAYLLRRMGFHNMLIQRTHYELKKELAVKKNLEYLWRQNWDIEETTDIFVHMMPFYSYDIPHTCGPEPAICCQFDFARMRGFSYESCPWRFDPVETDTDNVQERATKLLDQYRKKSTLYRTNTLLIPLGDDFRYVSVEEAEVQFRNYEKLFDYINSNPHLNAEVKFGTLEDYFSTLRDEAEKINYSRPGELGSAELQGFPTLSGDFFTYADRNQDYWSGYYVSRPFFKAVDRVLEQTLRASEILGSFVLGYCQKFQCAKLPISFSHKLTAARRNLALFQHHDGVTGTAKDHVVVDYGTRMHTSLQDLQLFMSRAVEVLLGDFHDRSDPTLLSHFEPVQERSKYDVQPVHKVLDPHEGNAQSVVFFNPLEQTRDEIVMVVVSTPDISVLNSNGSCLQSQVSPEWEFVSDEKISTGRHRLYWRASVPALGLETYYVVTGQDCEKAVPAVVKTFTASQRFPCPEPYVCSKLEGKTVEMKNSYYTLSFDVSHGLLQTVTRLKDGEQTVIGEEIGMYRSHGSGAYLFKPIGQARSIVEEGGHFILTEGPLVQEAHSLPKTEWHKSPLSHSTRIYDCGDSIQDMLIEKEYHVELVGHVFNDKELVVNICLSNLNKLQVTL

SEQ ID NO: 103807 - protein, 92 aa, Setaria italica
  Transcript Sequence Number=SeqID_37833
  Subcellular localization annotation: CTP_CleavageSite=76; ConfidenceScore=5.15e-01
RRRRKPEQGLGLAKRCGVAADDSTCAKSATSAAAAGAGAATGSGTAASSASTGGSASTVTKPTANGGATHRLSLTGASALVGFSFIWCTIMV

SEQ ID NO: 103808 - protein, 116 aa, Setaria italica
  Transcript Sequence Number=SeqID_37834
  Gene Ontology: Mol. function=metal ion binding; Cellular component =nucleus
  Homolog annotation: Hit_ID=Q9LGU7; Match level="QueryCoverage=77%, HitCoverage=10%, E-value=3e-21, Identity=62%"; Hit description =Squamosa promoter-binding-like protein 1
MEAGFLWKESGDQAGAARMSGGHNKNKNKSLEWDLNDWRWDANLFLATPAAAAPSECSSRELSRAQGEIDFGVVVDKRRRLSPEEDGSAGCSNDSAVANGDNGHVVSVQRRRSSEE

SEQ ID NO: 103809 - protein, 83 aa, Setaria italica
  Transcript Sequence Number=SeqID_37835
RLMVMLAVWCTKYVWVLITLCFIHHARIADHVPWRITGRCLSWLFSVMQLFALTFLSWRFQDDFVVFTNKLFSGPISYGSWYR

SEQ ID NO: 103810 - protein, 95 aa, Setaria italica
  Transcript Sequence Number=SeqID_37836
  Homolog annotation: Hit_ID=Q6K7P2; Match level="QueryCoverage=87%, HitCoverage=33%, E-value=1e-11, Identity=54%"; Hit description =Transcription factor PCF3-like
AAEPTVAAPAPGFWALPARADFGQLWSFAAAPEMMVAAAAAAAAPAMAGEASAARVGNYLPMAQGNLNLLASFSGGPAPTAATATVGRAEEETAR

SEQ ID NO: 103811 - protein, 127 aa, Setaria italica
  Transcript Sequence Number=SeqID_37837
GEEEVDCKQRESSAAAASFSGLLRQLNELEQSVVTWGRKSTGKGCSSPPAPPPPPPPLPARPVKQRVVHSGGGDSKEGHGSFSPPPPPPPPLPARPVKQRVVVHSGGDSKEGHGNFSPTPPALSFQP

SEQ ID NO: 103812 - protein, 84 aa, Setaria italica
  Transcript Sequence Number=SeqID_37838
  Subcellular localization annotation: CTP_CleavageSite=44; ConfidenceScore=5.24e-01
SCSNNKMVPRDLQFISTAGLFVFSLACVTQHQQPVISSRASSMPCVAVSKLDQDSRSGPQICFHRYFHHKRPVIEENTEVNYLH

SEQ ID NO: 103813 - protein, 72 aa, Setaria italica
  Transcript Sequence Number=SeqID_37839
LLASALDLGTSYHPHGAFFLEHGNGYLLLETTTSHSQTTRPGIMNLSMILFGLSLFVCDISTYFILTKSCNV

SEQ ID NO: 103814 - protein, 146 aa, Setaria italica
  Transcript Sequence Number=SeqID_37840
  Subcellular localization annotation: CTP_CleavageSite=18; ConfidenceScore=5.64e-01
ILACSPPSSAPPAPSPAVAFLRRSSGTNRVDPPREASSAPAADYSAPLQRCGTGVNVAARDPGRRLARQPGSGLSAAATFTVPPHPDPGRLPTKAGGGHPDPPSTASKPCRCRPLTKPPFYIHVHGSHSVGWGNRFLTSFWRLLQA

SEQ ID NO: 103815 - protein, 386 aa, Setaria italica
  Transcript Sequence Number=SeqID_37841
  Gene Ontology: Mol. function=hydrolase activity, acting on ester bonds; Cellular component=vacuole; Biological process=lipid metabolic process
  Homolog annotation: Hit_ID=Q672R1; Match level="QueryCoverage=87%, HitCoverage=87%, E-value=2e-92, Identity=50%"; Hit description =Lipase 1
  Pfam annotation: Domain name=Lipase_GDSL; Domain location=44-372; Score=168.6; E_value=1.8e-47; Accession=PF00657.14; Description=GDSL- like LipaseAcylhydrolase
MGGGRRLVPAASVAAALVVAAVFLSAEAETTASSLRAGAPFDSIFAFGDSFTDTGNNPVVFGWYNIFDVVMRPPYGMTFFGGRPTGRNCNGRLVIDFIAQGLGLPLVPPYLSHKGSFRQGANFAVGSATGLNSSFFHIGDAPGANPFPLNISLEVQLGWFEELKPSLCKTDQECKEFFGKSLFIVGEFGINDYQYSFGKKSFQEIRAFVPDLIQTISRGAERVIEHGAKTLVVPGMIPSGCAPPVLVTFADADASEYDATTGCLKEPNEIVMLHNSLLREAIEKLRAKHPDVTIIHTDLFNHVTEMVKSPDKFGFKKDALTICCGGPGRYHYNLSIVCGDKAATTCEDPSTRLFWDGVHLTEAAYHYIAKDWLNTIVSSLSARASS

SEQ ID NO: 103816 - protein, 166 aa, Setaria italica
  Transcript Sequence Number=SeqID_37842
DTRIDIVRNYKIITMGGLSQEKKRKTTEDSPGWIGTSTQLKYDLPTPLVLAAPTNNYPHLNTETSVSDPASTRDLTGAYCHPTEETPAMRDPPSKCCCRHHTPPDKVISLDPDLSEAASQPPPRYTTREGLATSAVGLHLALARGPRHAHPRTPRPISVFFVVCLY

SEQ ID NO: 103817 - protein, 99 aa, Setaria italica
  misc_feature (52)..(52): Xaa can be any naturally occurring amino acid
  Transcript Sequence Number=SeqID_37843
  Gene Ontology: Mol. function=RNA-directed DNA polymerase activity; Cellular component=chromatin; Biological process=RNA-dependent DNA replication
  Homolog annotation: Hit_ID=Q2QSH9; Match level="QueryCoverage=61%, HitCoverage=3%, E-value=3e-18, Identity=65%"; Hit description =Retrotransposon protein, putative, unclassified, expressed
SYSLRPWKELFKLTGTTFLKTDGQTERVNQCLEMYLWCAMQDSPKQWKSWLXLAQLWYNSTFHTALGCSPFEALYGHEAELGTVVPEQIDEHIPVVDMI

SEQ ID NO: 103818 - protein, 162 aa, Setaria italica
  Transcript Sequence Number=SeqID_37844
  Gene Ontology: Mol. function=transcription regulator activity; Cellular component=nucleus; Biological process=regulation of transcription
SDGNEFAELLWENGQAVVHGRRKQTQTSFPPFTCAAASSSRAQEKQPGSDPVALFKTGGVFGAGGLVTSVHDFSSGLDATRDNGDLDDTVPWIHYPIIEEDSAAAPALAESYSPDFFSELHAAAAAAAATNPSSLPPPIQHTTNNRSTPIATTSREPEPSKE

SEQ ID NO: 103819 - protein, 64 aa, Setaria italica
  Transcript Sequence Number=SeqID_37845
  Gene Ontology: Mol. function=sequence-specific DNA binding; Cellular component=nucleus; Biological process=regulation of transcription, DNA-dependent
  Homolog annotation: Hit_ID=B3GAU6; Match level="QueryCoverage=87%, HitCoverage=16%, E-value=2e-21, Identity=85%"; Hit description =WRKY16 transcription factor
  Pfam annotation: Domain name=WRKY; Domain location=13-56; Score=53.3; E_value=9.2e-13; Accession=PF03106.7; Description=WRKY DNA -binding domain
MLSAFVFYPQGASTLKRGYYKCSSVRGCPARKHVERCVDDSSMLIVTYEGEHNHTRMPTQSTQA

SEQ ID NO: 103820 - protein, 253 aa, Setaria italica
  Transcript Sequence Number=SeqID_37846
  Gene Ontology: Mol. function=sequence-specific DNA binding; Cellular component=nucleus; Biological process=regulation of transcription, DNA-dependent
  Homolog annotation: Hit_ID=Q2QMN5; Match level="QueryCoverage=92%, HitCoverage=63%, E-value=4e-90, Identity=71%"; Hit description=WRKY DNA binding domain containing protein, expressed
  Pfam annotation: Domain name=Plant_zn_clust; Domain location=138-183; Score=78.8; E_value=1.9e-20; Accession=PF10533.1; Description=Plant zinc cluster domain
  Pfam annotation: Domain name=WRKY; Domain location=185-245; Score =140.7; E_value=4.7e-39; Accession=PF03106.7; Description=WRKY DNA -binding domain
  Pfam module annotation: Pfam domain module=Plant_zn_clust::WRKY; Domain location=138-183::185-245
VNRQQLRARIGGVPDPRGLDLASSSSKSGAHPYGAPKMVQPLSVQFQIGNVAHRYPFHQQPSRQKLQAEMFKRSNSGISLKFDSPSPSGGAGTMSSARSFMSSLSMDGSVASLDGKRPFHLVGAPVASDPADAHRAPKRRCMGRGQDGTGKCATTGRCHCSKRRKLRIKRSIKVPAISNKIADIPPDEYSWRKYGQKPIKGSPHPRGYYKCSSVRGCPARKHVERCVDDPAMLIVTYEGEHNHTRLPAQSAQT

SEQ ID NO: 103821 - protein, 349 aa, Setaria italica
  misc_feature (36)..(36): Xaa can be any naturally occurring amino acid
  Transcript Sequence Number=SeqID_37847
  Gene Ontology: Mol. function=sequence-specific DNA binding; Cellular component=nucleus; Biological process=regulation of transcription, DNA-dependent
  Homolog annotation: Hit_ID=B6SKM6; Match level="QueryCoverage=95%, HitCoverage=96%, E-value=1e-153, Identity=80%"; Hit description=WRKY transcription factor 21
  Pfam annotation: Domain name=Plant_zn_clust; Domain location=233-279; Score=75.8; E_value=1.5e-19; Accession=PF10533.1; Description=Plant zinc cluster domain
  Pfam annotation: Domain name=WRKY; Domain location=281-341; Score =139.3; E_value=1.2e-38; Accession=PF03106.7; Description=WRKY DNA -binding domain
  Pfam module annotation: Pfam domain module=Plant_zn_clust::WRKY; Domain location=233-279::281-341
MEEVEEANRAAVESCHRVLALLSQPHDPAQARSIAXGTDEACAKFRKVVSLLSNGGGAGAGGEAGPSGTSRSHPRAKVVSRRQNPGFLTQKGFLDSNTPVVVLNSAHPSPSSAQVYPRTGALDAQSIHPLGGPPKLVQPLSAHFQFSNVSSRYQFPHQQQQKLQAEMFKRSNSGINLKFDSTSGTGTMSSARSFLSSLSMDGSVASLDGKSSSFHLIGGPAMSDPVNAQQAPRRRCTGRGEDGTGKCAVTGRCHCSKRSRKLRVKRSIKVPAISNKIADIPPDEYSWRKYGQKPIKGSPHPRGYYKCSSVRGCPARKHVERCVDDSSMLIVTYEGEHNHTRMPTQSTQA

SEQ ID NO: 103822 - protein, 35 aa, Setaria italica
  Transcript Sequence Number=SeqID_37848
  Homolog annotation: Hit_ID=Q338B9; Match level="QueryCoverage=88%, HitCoverage=6%, E-value=4e-10, Identity=93%"; Hit description =Histone acetyltransferase GCN5
CDAGEAGWTPDQWGHSKSRSAFSPDYNTYRQQLTS

SEQ ID NO: 103823 - protein, 454 aa, Setaria italica
  Transcript Sequence Number=SeqID_37849
  Gene Ontology: Mol. function=N-acetyltransferase activity; Cellular component=Ada2/Gcn5/Ada3 transcription activator complex; Biological process=metabolic process
  Homolog annotation: Hit_ID=Q338B9; Match level="QueryCoverage=97%, HitCoverage=85%, E-value=0.0, Identity=84%"; Hit description=Histone acetyltransferase GCN5
  Pfam annotation: Domain name=Acetyltransf_1; Domain location=154-230; Score=51.5; E_value=3.3e-12; Accession=PF00583.16; Description =Acetyltransferase (GNAT) family
  Pfam annotation: Domain name=Bromodomain; Domain location=349-434; Score=134.0; E_value=4.9e-37; Accession=PF00439.17; Description =Bromodomain
  Pfam module annotation: Pfam domain module=Acetyltransf _1::Bromodomain; Domain location=154-230::349-434
  Subcellular localization annotation: CTP_CleavageSite=44; ConfidenceScore=5.11e-01
PSSSHSDDDDDDSLHTFTAARLDGAPGGGSASGRPPKPDSSSVSAAAAAAAAAAGTGPKPEPGSAAASDGKEDPKGLFTDNLQTSGAYSAREEGLKREEDSGRLKFLCYSNDGVDEHMIWLVGLKNIFARQLPNMPKEYIVRLVMDRTHKSMMVIRNNIVVGGITYRPYASQRFGEIAFCAITADEQVKGYGTRLMNHLKQHARDADGLTHFLTYADNNAVGYFVKQGFTKEITLDKERWQGYIKDYDGGILMECKIDQKLPYVDLATMIRRQRQAIDEKIRELSNCHIVYSGIDFQKKEAGIPRRLMKPEDIPGLREAGWTPDQWGHSKSRSAFSPDYNTYRQQLTSLMRILLKSMNEHPDAWPFKEPVDSRDVPDYYDIIKDPIDLRTMSRRVESEQYYVTLEMFVADMKRMFNNARTYNSPDTIYYKCATRLENFFSGKIASQLAQASTKS

SEQ ID NO: 103824 - protein, 122 aa, Setaria italica
  Transcript Sequence Number=SeqID_37850
GLPPGERKHQTGLKRVMPISLDPIGQSTCPILASNVRSLHTKVVDLVELCNFPYKFTSIEVRMRKIWSMQFLAPPTGLQFDVHVWTFQYPKFGPKSNLEKNPSFMSYSLTSSMVVFILVSKP

SEQ ID NO: 103825 - protein, 63 aa, Setaria italica
  Transcript Sequence Number=SeqID_37851
TLSSSFVDYFCFISCGHLFSALYELDLTSYLPFRCPVRLHCNLRVVCSIFVIRTGPTHSFFVF

SEQ ID NO: 103826 - protein, 149 aa, Setaria italica
  Transcript Sequence Number=SeqID_37852
  Gene Ontology: Mol. function=hydrolase activity; Cellular component =endoplasmic reticulum membrane
  Homolog annotation: Hit_ID=B6TS29; Match level="QueryCoverage=100%, HitCoverage=47%, E-value=1e-73, Identity=87%"; Hit description=CAAX prenyl protease 2
  Pfam annotation: Domain name=Abi; Domain location=1-99; Score=64.9; E_ value=2.9e-16; Accession=PF02517.8; Description=CAAX amino terminal protease family
TEELVFRACMIPLLLCGGFKMSTIIFLSPVFFSLAHLNHLFELQQQGCNFMRSLLIVGVQLGYTVIFGWYAAFLFIRTGNLLSPIVAHVFCNMMGLPVFSSPRTKGVASVALLAGSVCFFWLLFPATSPELYNTRLDRCRCWHGFCNWR

SEQ ID NO: 103827 - protein, 57 aa, Setaria italica
  Transcript Sequence Number=SeqID_37853
FHLGPFGLGSFVRHLTPSLLVPILGFDEFCRFYINLVVFLRQEEIRSSKFLCYVISI

SEQ ID NO: 103828 - protein, 117 aa, Setaria italica
  Transcript Sequence Number=SeqID_37854
  Subcellular localization annotation: CTP_CleavageSite=57; ConfidenceScore=5.22e-01
LPSSLAIDGAASSTKKTSNDTGNLSGVGRRGCRNIMNKLMQHPIAGKSDCCKTDETSKATVATPKNNYRNTARRYHRSTQQCCRCRSPAGAGCRVPPLAGRGHQRRRALPLAGRRRC

SEQ ID NO: 103829 - protein, 2081 aa, Setaria italica
  misc_feature (466)..(466): Xaa can be any naturally occurring amino acid
  misc_feature (1084)..(1084): Xaa can be any naturally occurring amino acid
  Transcript Sequence Number=SeqID_37855
  Gene Ontology: Mol. function=binding; Cellular component =ribonucleoprotein complex; Biological process=ribosome biogenesis
  Homolog annotation: Hit_ID=Q5CAF8; Match level="QueryCoverage=100%, HitCoverage=96%, E-value=0.0, Identity=69%"; Hit description =OSJNBa0065H10.9 protein
  Pfam annotation: Domain name=BP28CT; Domain location=1771-1940; Score= 214.8; E_value=2.3e-61; Accession=PF08146.4; Description=BP28CT (NUC211) domain
  Pfam annotation: Domain name=HEAT; Domain location=1038-1074; Score =0.8; E_value=39; Accession=PF02985.14; Description=HEAT repeat
  Pfam annotation: Domain name=HEAT; Domain location=1484-1516; Score =1.8; E_value=29; Accession=PF02985.14; Description=HEAT repeat
  Pfam annotation: Domain name=HEAT; Domain location=1545-1584; Score =9.0; E_value=3.8; Accession=PF02985.14; Description=HEAT repeat
  Pfam annotation: Domain name=HEAT; Domain location=2037-2073; Score =3.3; E_value=19; Accession=PF02985.14; Description=HEAT repeat
  Pfam annotation: Domain name=HEAT; Domain location=429-463; Score =2.4; E_value=25; Accession=PF02985.14; Description=HEAT repeat
  Pfam module annotation: Pfam domain module=BP28CT::HEAT::HEAT::HEAT::H EAT::HEAT; Domain location=1771-1940::1038-1074::1484-1516::1545 -1584::2037-2073::429-463
SLEVNREQLTPKENDKLNKSISTYLRLLAGYLHLPSAPKTLEYLIRRYLVHVYNLDELLLSALPYHDTHAFVRIVQLLNLGNSKWAFLDGVKSSGAPPPRSVLVQQCIRDKAVLETLCNYASPTKEFSHSRTVVCFCTAVIVECLGAVQKLDTDIVQRVLGFVFDSLNPEITGDQDYKAGALMIVGVLATRATLAPKLVQNLIFFVARTAQHDAFESVDLPWLRVTVMAIISLVQSQSVHDFPKKALVILKDIRDFSGVLSVLSSEYNIERFIRLYVESLVDYSASDDSCHTHFMETIETLPMEKSVERIVSKVLGSCSKVSRATGNRDIDRAGIWAKKILSAIEINYPLELHDAIRKFLEKSEINSTGGDSISEMFGLVFDDSKKMPTEISDSNIWFSLDHPKAMVRQSALSKIATSGIFTNSTLNPRKLVNIQDAILRSLYDDNLSVVQAALSIEGLAAVASPXSLLKAYDDVLTKCIKIINKGGSKASKASDVAVSCLEKMVMEYQLHHMEHAKDIAAVVFRLLIVHPKTLRVNLKALELAKKIQWEFYTSSSLVYDEVTVQKMKENMSADSIASINMKNIVAFAETFLANPNKHVEWLANSGRGTRFSRTVFLLVVLQALVPSEALDKQVSLCEACLPFLKDEWHHVQPEDNGVGDEISIDKLEKCSIELVKHIFNSDTEALNARIIVCIFWGLLKVQSSYIKQNSMIGSGGNAMLDDLFLFFVTSPGKNIFQKHLQYLIINCTGAPFQFISKYFLDEDLSDRVQVESLRLLASICSKCASSESSILDESICMKLLLGFPSVILPLAHENRDIRSSAVKCIEGLSLVWQRLSTSLPRNGNTIKLPQCMSSPTFGIFLESLVNQKTMISSDAKFLPAYISSMLSPRKDMTVPENLHERFDQPTKDALLHFILHSALKLTPYGKFMLLSVLKGVGGILLQAEDVKSLFFDLLDCRDQYQNQHDSKNLSTHEMQILCLLLEVLLSVADHANIGFNMSEPLLRALKVDALAPDDPVVVMPCLTALRTLQPVFFDNLKADTKEKVFGRLISLFRTENIEIRNATRDALLRINVHASIVVKFIELXIVALGGARGQSKRTKRKDGLSRDASSSFEELFGERPIASILVSLLDILFLKKDVNQRPCLLQPLFQILSKLRSDQWVSGIVCQHTNQHDTSSETPDLSSSVKESQHLILLVLKDITDTLHSSHEGAMFSSSDVDLLIEYIRSVKDVGTRNHGFSLIASLGKACPQVVSESIVDLFVAIGDAIKQDDSHSQRVLEDLLSVLVPCWLSRTSSIEKLLQIFIKALADIPEHRRLTLMVYILRTLGKESNLSTVIMHLLHSLVERISHPLSEHHGSLSALSQEWEYGLAANVTDQYSYKLWFPCLSKLLKEIRVHEKQGVHLMLHLAMRLVLSKLQDTELIFELEADDAANFIQGSLGALMEEVVLCTVYTKDKKRDISGDIIKELRDSANTILKTITGWMSASTYFRGITQLLDHSDSLVKRKALGILSETARGNSLVQNKQSKARKLKHSSVITAIKVDKISGPYFSNLCLKILELIDRVVDSDTSVKIAAISSLETLAKEYPSDDPVYSKCLSTIINHIGSADAAMSSGLIHTAGSLIDVLGSKALPQLPLVVKNIMLIAHQVSCCPSGSYAHGSTKATTRLSNQDTAMLLSSLTTIEVVVEKLGEFVNPYLKEILDLVVLHPECSSHMDTRLDAKAADVRKLLTEKVPVRLILPPLLDLYSVAPNCGEASLSLAFQMLASLVSTMDRLAVGTYHVKIYEHCLAALDIRRQHPDSLKNINIVEQSIIHAIITLTMKLTEGTFRPLFLRTLEWAESEVDQSSSKKSLDRAISFYKLINKLAEQHRSLFTPYFKYLLEGSVQYLLEDALAGCKQKKKKKAKLDVQVEQKDNLWGLKLWNLRALILKSLHKCFLYDNEQKVLDSSNFQVLLKPIVSQFVVEPPESIESAVDAPSVEEVDEAIVLCLGQMAVTARSDVLWKPLNHEVLMQTRSDKVRPKLLGLKVVRYMVQHLKEEYVGLLPETIPFLGELLEDVELPVKTLSQEILKEMETLSGESLRQYL

SEQ ID NO: 103830 - protein, 478 aa, Setaria italica
  Transcript Sequence Number=SeqID_37856
  Homolog annotation: Hit_ID=B6TQ67; Match level="QueryCoverage=37%, HitCoverage=40%, E-value=1e-09, Identity=35%"; Hit description=Pro -resilin
MDATVKCGNAGYGYGYGAYGYGYGNSKPQMNYHRQSTESVTTLVTEINRMSVNDKPGCGGAGPGGVQKQAAYKEEEVFVEQDQGSYGGYHGGGAVQKQSSYTEEAYTTCEGAAAGVKNHGYKQKYGEADVGYGSHYGAAAGGVKKQGYEQEACGQTNAGHGGAHYGGAAGALQTYAYDQQAAYGVQQHGYQKDAYGGAVKKDSYQQHESYGDCGAGYGGSHYGGGAGVQTNAAYKQHEKYGEADGGYGAYYGGGAGVKKQQGYKQESYGENGAGYGAHHYGGGGVEQHGYNQKHKDAYGGGAVKKSNYQHESYGDCDAGYGSHYGGGAVQKYGYKQDVYGGKAAGGLQRGAYGYGAHGKAGRTDFAGGYNYNLKAYDSENESESDPDESDCEEHGYGAYKHETHGASKQGGLHGYGAYKYDKHGAGNLGGGGGGVRRYESYEKHEELAGGRRYQSYQSTTQEYTGGGGGGYGYGTCPP

SEQ ID NO: 103831 - protein, 159 aa, Setaria italica
  Transcript Sequence Number=SeqID_37857
LPMVESMWYGHGFFSFPLFLGDGINYGEISDGLAVRYVFHCLIMLKSGWCAWIPFLSYSLLLDWVLPLRWQASVPVLCDGVTGDGHLPERSVVQVHGHLLTVPLLPFSKIEASSSARESASNLFLGAFLCFLRWGSTEQRRIQPAAPGTSRSSIEGLRS

SEQ ID NO: 103832 - protein, 102 aa, Setaria italica
  Transcript Sequence Number=SeqID_37858
TYPFPADLLPISLAQSNLKAHCPRLSPMLLMQQRNYWYYICKILLHSAAPRKDRSPSMELLLVPGAAGWIRLCSVLPHRRKQRKAPRKRLEADSLADEDAHS

SEQ ID NO: 103833 - protein, 78 aa, Setaria italica
  Transcript Sequence Number=SeqID_37859
YKYNCSVHIYLGRLNGSDISFNFDFVNHVLMFMLVKRFSPQSVAALYNIFLIHSPRAFRRKSRNCMVRKGAHRPTATL

SEQ ID NO: 103834 - protein, 86 aa, Setaria italica
  Transcript Sequence Number=SeqID_37860
RGYELHFAAGAGKFLNSVSFPFPFRVWFLDTYIALFNVHAWSPLCTYIPSKTEISSFSQPKSNEYKVNSIIVLIVKLSPVAHCTST

SEQ ID NO: 103835 - protein, 586 aa, Setaria italica
  Transcript Sequence Number=SeqID_37861
  Homolog annotation: Hit_ID=Q6Z8F8; Match level="QueryCoverage=53%, HitCoverage=100%, E-value=1e-143, Identity=78%"; Hit description =Selenium-binding protein-like
  Pfam annotation: Domain name=PPR; Domain location=180-214; Score =31.3; E_value=3.9e-06; Accession=PF01535.12; Description=PPR repeat
  Pfam annotation: Domain name=PPR; Domain location=281-315; Score =36.4; E_value=1.1e-07; Accession=PF01535.12; Description=PPR repeat
  Pfam annotation: Domain name=PPR; Domain location=316-349; Score =13.2; E_value=0.25; Accession=PF01535.12; Description=PPR repeat
  Pfam annotation: Domain name=PPR; Domain location=384-417; Score =10.8; E_value=0.47; Accession=PF01535.12; Description=PPR repeat
  Pfam annotation: Domain name=TPR_4; Domain location=351-376; Score =10.2; E_value=2.6; Accession=PF07721.6; Description=Tetratricopeptide repeat
  Pfam annotation: Domain name=TPR_4; Domain location=386-411; Score =7.5; E_value=5.5; Accession=PF07721.6; Description=Tetratricopeptide repeat
  Pfam module annotation: Pfam domain module=PPR::PPR::PPR::PPR::TPR _4::TPR_4; Domain location=180-214::281-315::316-349::384-417::351 -376::386-411
PKEQAVPCSTAAAAARSVDEVRKALARHVKLGLDRSPRHTRPLLAACALSGWPGGMELAPSIFESLDEPEAFDYNTLMRGHVSVGGRGDRNPEAVLRLYVGMLEAGVEPDNYTFPFVLKACAQLAALQEGRQLQAHVVKLGFQHDEHVRNSLISLYGKCGEPAMARLAFDRMRPDERTTTAWSALLAAYTRAGLWGECLKSFRVMVREGWRPDESSMVSALSACAHLGAYDVGRSIHCALLRNAARLNTIMLTSLVDMYAKCGCIDKATAVFDAMDDRNAWAYSAMVSGLAQHGCGRKVLQVFDAMVREGHTPDAAVYVGVLNACSRAGLLEDGLRCFDRMRLEHKVSPNAQHYACMVDLMARAGKLDDARALIGTMPTGPTDTAWRCLLNACRIHGDLDLAEHALQELRRLGSANAGDYVIVADMHARARNWSAAAALRTEAVNEGLARSPGFSDVEVQGEVHRFVSQDMSHPRRRDIYEMLHQMEWQLRFDGYEPDTSEVALDVGEEEKRRVVAAHSQKLAMAFGLLSTPEGAPVRILTNLRMSKECHAYSALISEIFGREIVVRDRNRFHRFRRGACTCGDYW

SEQ ID NO: 103836 - protein, 196 aa, Setaria italica
  misc_feature (152)..(152): Xaa can be any naturally occurring amino acid
  Transcript Sequence Number=SeqID_37862
  Gene Ontology: Mol. function=magnesium ion binding; Cellular component=nucleus; Biological process=response to DNA damage stimulus
  Homolog annotation: Hit_ID=Q5NSW7; Match level="QueryCoverage=91%, HitCoverage=36%, E-value=3e-91, Identity=87%"; Hit description=Snm1
GGKEGGCSAYFLSHFHHDHYGGLTKKWCHGPIYCSALTARLVKMCLSVNSDYICPLELDTEYVIEGVTVTLLEANHCPGAALIHFRLSDGKTYLHTGDFRASRSMQLHPLLQRGRVNLLYLDTTYCNPKYKFPPQEDVIDFVVRTARRYLTXQPKTLIVVGAYSIGKENVYLAISQALDVLNSLNLKDRFYFGTCR

SEQ ID NO: 103837 - protein, 123 aa, Setaria italica
  misc_feature (107)..(107): Xaa can be any naturally occurring amino acid
  Transcript Sequence Number=SeqID_37863
  Gene Ontology: Biological process=signal transduction
  Homolog annotation: Hit_ID=B9S940; Match level="QueryCoverage=60%, HitCoverage=45%, E-value=9e-22, Identity=66%"; Hit description=28 kDa heat-and acid-stable phosphoprotein, putative
  Pfam annotation: Domain name=PP28; Domain location=40-120; Score =137.1; E_value=5.4e-38; Accession=PF10252.1; Description=Casein kinase substrate phosphoprotein
KEEEEEEEEEEREESEEEESEDESDDKPKHKGTEGIIQIENPNLVKARNIKAKEVDLGKTTELSRREREELEKQKAHERYMKLQEQGKTEQARKDLERLALIRTAKXDAAKKREEEKAAKEQR

SEQ ID NO: 103838 - protein, 101 aa, Setaria italica
  Transcript Sequence Number=SeqID_37864
PFFQIIAASGTSGRPRTFKKEEEEEEEEEEREESEEEESEDESDDKPKHKGTEGIIQIENPNLVKARNIKAKEVDVSWWLLVASFVFLIFVFPSCYRRLIR

SEQ ID NO: 103839 - protein, 64 aa, Setaria italica
  Transcript Sequence Number=SeqID_37865
RLGPGRNATINLLPCFFIISYLSIRMAASCGYPAKIDLVLITFLSIIAASGTSGRPRTFKKKEE

SEQ ID NO: 103840 - protein, 53 aa, Setaria italica
  Transcript Sequence Number=SeqID_37866
MLSCLFYREELEKQKAHERYMKLQEQGKTEQARKDLEPLIKARLLKFTFWFFF

SEQ ID NO: 103841 - protein, 164 aa, Setaria italica
  Transcript Sequence Number=SeqID_37867
  Gene Ontology: Mol. function=kinase activity; Biological process =signal transduction
  Homolog annotation: Hit_ID=B9S940; Match level="QueryCoverage=85%, HitCoverage=85%, E-value=1e-37, Identity=57%"; Hit description=28 kDa heat-and acid-stable phosphoprotein, putative
  Pfam annotation: Domain name=PP28; Domain location=75-155; Score =151.6; E_value=2.4e-42; Accession=PF10252.1; Description=Casein kinase substrate phosphoprotein
MGRGKFKGKPTGRRNFSTPEEIASGTSGRPRTFKKKEEEEEEEEEEREESEEEESEDESDDKPKHKGTEGIIQIENPNLVKARNIKAKEVDLGKTTELSRREREELEKQKAHERYMKLQEQGKTEQARKDLERLALIRQQRADAAKKREEEKAAKEQRKSEARK

SEQ ID NO: 103842 - protein, 190 aa, Setaria italica
  Transcript Sequence Number=SeqID_37868
  Gene Ontology: Mol. function=Rho guanyl-nucleotide exchange factor activity
  Homolog annotation: Hit_ID=B9S1Q7; Match level="QueryCoverage=82%, HitCoverage=28%, E-value=8e-37, Identity=47%"; Hit description=Rop guanine nucleotide exchange factor, putative
  Pfam annotation: Domain name=PRONE; Domain location=1-134; Score= -284.5; E_value=0.045; Accession=PF03759.5; Description=PRONE (Plant -specific Rop nucleotide
EEIFVSLSLKTEHSVLETINRLEGAVFAWNQRILEEKSKKSPARHSWNFIKDSSSELDKMSVCIERVDTLVQLLKSRFPNLPPTFIDVLKVQYNVDVGHAIVEAYSRALVGVAFSILSRVAEILLEDDLIKKPNTPMATLKFDLSSDVYLAGITETPPGHIRRSLMDQISMVDGRFDAVAKKKGVKQLRW

SEQ ID NO: 103843 - protein, 492 aa, Setaria italica
  misc_feature (42)..(42): Xaa can be any naturally occurring amino acid
  misc_feature (201)..(201): Xaa can be any naturally occurring amino acid
  Transcript Sequence Number=SeqID_37869
  Gene Ontology: Mol. function=Rho guanyl-nucleotide exchange factor activity
  Homolog annotation: Hit_ID=B9S1Q7; Match level="QueryCoverage=87%, HitCoverage=81%, E-value=1e-135, Identity=54%"; Hit description=Rop guanine nucleotide exchange factor, putative
  Pfam annotation: Domain name=PRONE; Domain location=46-491; Score =587.0; E_value=2.1e-173; Accession=PF03759.5; Description=PRONE (Plant-specific Rop nucleotide
RCAAGEEEEEEDRRRRRAEMRMKTLACCRRRPQDFSIDMDQXPDRVMTYNGLETCIINSSAYDDDSGISATTGGDGCVTTDSLDDEVSSCSSKDASGSSFSSHCLSKQEEHLFDELGTPVAVHLLPFKGKKPITYTLSASDIENMKEKFAKLLLGDDTSGGARGVCTALALSNGIINLSATVFGELWKLEPLCEEKKIRWXKEMDWLLSPTTYMVELVPTKQSGADGCTFEIMTPKARSDVHVNLPALQKLDAMLIEVMDSMIDTEFWYEESGSRADGRGKLTGPRKSKKWWLPSPRVPEQGLSQFQRKRLVFQAKLVHQILKAAKSINEQVLFHMPIPAAVMDALPKSGRASLGEDLYQAITTEYIPIEEIFVSLSLKTEHSVLETINRLEGAVFAWNQRILEEKSKKSPARHSWNFIKDSSSELDKMSVCIERVDTLVQLLKSRFPNLPPTFIDVLKVQYNMDVGHAVVEAYSQILFYYININIFKYQKK

SEQ ID NO: 103844 - protein, 172 aa, Setaria italica
  Transcript Sequence Number=SeqID_37870
  Subcellular localization annotation: CTP_CleavageSite=57; ConfidenceScore=5.54e-01
TLQHRCTASSPSTARSDPARTTADLGARGRLLSCVEQAACVLTRTARRSSATADSTSAGAESSFAAAESTSAAVDSSSAGAESTFAGAESSSDSDAVWACFLPGNLPPLSDRELSPALPSKKELFMHLSDSDSAVLLADRLTARSDVHVNLPALQKLDAMLIVLGSCHIRST

SEQ ID NO: 103845 - protein, 118 aa, Setaria italica
  misc_feature (103)..(103): Xaa can be any naturally occurring amino acid
  Transcript Sequence Number=SeqID_37871
  Gene Ontology: Mol. function=inositol or phosphatidylinositol phosphatase activity
  Homolog annotation: Hit_ID=B9S378; Match level="QueryCoverage=88%, HitCoverage=23%, E-value=8e-37, Identity=68%"; Hit description=Type I inositol polyphosphate 5-phosphatase, putative
VLILFLNALLLLQGCISVSMTLHQTSFCFVCSHLASGQKEGDEFRRNSDVLEILRLTMFSRICRRTGRRIPEKILEHDKVIWLGDLNYRIALSYADTKKPFNXENNWDALFERISLKS

SEQ ID NO: 103846 - protein, 83 aa, Setaria italica
  misc_feature (45)..(45): Xaa can be any naturally occurring amino acid
  Transcript Sequence Number=SeqID_37872
GEDTLLPASYQKSVLFYPSFGQILDKCQLGDIVRQNTNKLDSNRXCTLLSIVNKCGKGRIPVFCLGRVLLKQSNIPLLFYEHL

SEQ ID NO: 103847 - protein, 73 aa, Setaria italica
  Transcript Sequence Number=SeqID_37873
  Subcellular localization annotation: CTP_CleavageSite=45; ConfidenceScore=5.81e-01
MATAAQAAAAAAAFLSFLSSSPTHHTAPSSSVSLGAAPILRVSLRAAATGGPRLPFHLRGRRVGAVVAQLPTT

SEQ ID NO: 103848 - protein, 92 aa, Setaria italica
  Transcript Sequence Number=SeqID_37874
  Gene Ontology: Mol. function=nucleic acid binding
  Homolog annotation: Hit_ID=Q1G1I8; Match level="QueryCoverage=100%, HitCoverage=10%, E-value=1e-28, Identity=70%"; Hit description =Pentatricopeptide repeat protein
FRGKSLTVRLDDGRKGRARAEERARWVEGGERREPRSPWHKGRDEACREFRRVLESRPEDWQAVVSAFERIPKPSRREFGLMVVYYAKRGDK

SEQ ID NO: 103849 - protein, 83 aa, Setaria italica
  Transcript Sequence Number=SeqID_37875
  Homolog annotation: Hit_ID=B6T5Z3; Match level="QueryCoverage=63%, HitCoverage=31%, E-value=5e-20, Identity=87%"; Hit description=Major latex protein 22
KTRYKLTNKETYKESTLKVSPAKEGEAGAVVNWSMEFDKASEQVPDPDVIKETATKTFHDLDDYLLKNQAEIVPSAEAEIAVV

SEQ ID NO: 103850 - protein, 168 aa, Setaria italica
  Transcript Sequence Number=SeqID_37876
  Gene Ontology: Cellular component=cytoplasmic vesicle; Biological process=response to biotic stimulus
  Homolog annotation: Hit_ID=Q19VG6; Match level="QueryCoverage=91%, HitCoverage=100%, E-value=4e-73, Identity=87%"; Hit description =Major latex protein 22
  Pfam annotation: Domain name=Bet_v_I; Domain location=1-153; Score =144.4; E_value=3.4e-40; Accession=PF00407.11; Description =Pathogenesis-related protein Bet v I family
  Pfam annotation: Domain name=Polyketide_cyc2; Domain location=2-151; Score=33.2; E_value=1.1e-06; Accession=PF10604.1; Description =Polyketide cyclase  dehydrase and li
  Pfam module annotation: Pfam domain module=Bet_v_I::Polyketide_cyc2; Domain location=1-153::2-151
MGSKAELVVEVKSPAEKLWAALRDSTELFPKIFPQQYKSIETVEGDGKSAGTVRLLKYAEGVPMLTFAKEKVELVDDENRVVSYSVVDGELVNFYKNFKITLKVSPAKEGEAGAVVNWSMEFDKASEQVPDPDVIKETATKTFHDLDDYLLKNQAEIVPSAEAEIAVV

SEQ ID NO: 103851 - protein, 47 aa, Setaria italica
  Transcript Sequence Number=SeqID_37877
MVMLLRVQLVSFSLCAAVSYSKIGACFSCAPSHSFLVACSHALFVDL

SEQ ID NO: 103852 - protein, 90 aa, Setaria italica
  Transcript Sequence Number=SeqID_37878
GKKKKKKGGTAPAASFSAFNALEEADEDQDEEEPAPAAAAGPEATADADDDDDLDFDFSKAKKKKKKDKVGRSAPGKDEDDEAAPPPHRG

SEQ ID NO: 103853 - protein, 149 aa, Setaria italica
  Transcript Sequence Number=SeqID_37879
  Gene Ontology: Mol. function=substrate-specific transmembrane transporter activity; Cellular component=integral to membrane; Biological process=transmembrane transport
  Homolog annotation: Hit_ID=O23492; Match level="QueryCoverage=99%, HitCoverage=25%, E-value=3e-58, Identity=75%"; Hit description =Inositol transporter 4
EIVSMAVAGAIVGAAFGGWMNDKFGRRPSIIIADALFFGGAVIMAFSPTPTVIIVGRVFVGLGVGMASMTAPLYISEASPARIRGALVSTNGLLITGGQFLAYLINLAFTKVPGTWRWMLGIAGVPALVQFILMLMLPESPRWLYRKGR

SEQ ID NO: 103854 - protein, 100 aa, Setaria italica
  misc_feature (72)..(72): Xaa can be any naturally occurring amino acid
  misc_feature (87)..(87): Xaa can be any naturally occurring amino acid
  Transcript Sequence Number=SeqID_37880
  Gene Ontology: Mol. function=3'-5' exonuclease activity; Cellular component=intracellular; Biological process=nucleobase, nucleoside, nucleotide and nucleic acid metabolic process
  Homolog annotation: Hit_ID=B9RPI0; Match level="QueryCoverage=99%, HitCoverage=18%, E-value=8e-22, Identity=50%"; Hit description=3-5 exonuclease, putative
GECEVFVVDLLAVPLAELWAPLRDLFERPDVLKLGFRFKQDLVYLSATFAAALGRDAGFDRVEDAMDVTNVXNYHKGHDRQKKLPKXTKSLATICEELLS

SEQ ID NO: 103855 - protein, 83 aa, Setaria italica
  Transcript Sequence Number=SeqID_37881
  Gene Ontology: Mol. function=serine-type peptidase activity; Cellular component=integral to membrane; Biological process=proteolysis
  Homolog annotation: Hit_ID=B6TSU6; Match level="QueryCoverage=96%, HitCoverage=16%, E-value=7e-25, Identity=70%"; Hit description =Peptidase/ serine-type peptidase
  Subcellular localization annotation: CTP_CleavageSite=27; ConfidenceScore=5.10e-01
MAIRITMSYSGYVAQNLASSFGLRCTSAAAAGAGAGAAPGAGCRFIQDALSRPFCLFASSRRSDSHHDAEDHNHPKPSPKALP

SEQ ID NO: 103856 - protein, 189 aa, Setaria italica
  misc_feature (23)..(23): Xaa can be any naturally occurring amino acid
  misc_feature (98)..(98): Xaa can be any naturally occurring amino acid
  misc_feature (137)..(137): Xaa can be any naturally occurring amino acid
  Transcript Sequence Number=SeqID_37882
  Gene Ontology: Mol. function=serine-type peptidase activity; Cellular component=integral to membrane; Biological process=proteolysis
  Homolog annotation: Hit_ID=B6TSU6; Match level="QueryCoverage=100%, HitCoverage=39%, E-value=2e-88, Identity=85%"; Hit description =Peptidase/ serine-type peptidase
  Pfam annotation: Domain name=Peptidase_S24; Domain location=25-108; Score=60.8; E_value=5.1e-15; Accession=PF00717.15; Description =Peptidase family S24
  Pfam annotation: Domain name=Peptidase_S26; Domain location=45-167; Score=-26.8; E_value=0.0062; Accession=PF10502.1; Description=Signal peptidase I
  Pfam module annotation: Pfam domain module=Peptidase_S24::Peptidase _S26; Domain location=25-108::45-167
DAKTVFAAVTVPLLYRSSLAEPXRSIPSKSMYPTFDVGDRILAEKVSYIFREPEILDIVIFRAPPVLQALGYSSSDVFIKRVVAKGGDIVEVSFYPNXRDGNLLVNGVVQDEDFVLEPADYVMDPLSVPEGYVFVLXGDNRNNSFDSHNWGPLPMKSILGRSVLRYWPPSKISDTIYEHDMAQFTVATS

SEQ ID NO: 103857 - protein, 462 aa, Setaria italica
  Transcript Sequence Number=SeqID_37883
  Gene Ontology: Mol. function=serine-type peptidase activity; Cellular component=integral to membrane; Biological process=proteolysis
  Homolog annotation: Hit_ID=B6TSU6; Match level="QueryCoverage=93%, HitCoverage=91%, E-value=1e-109, Identity=74%"; Hit description =Peptidase/ serine-type peptidase
  Pfam annotation: Domain name=Peptidase_S24; Domain location=305-382; Score=60.5; E_value=6.2e-15; Accession=PF00717.15; Description =Peptidase family S24
  Pfam annotation: Domain name=Peptidase_S26; Domain location=325-440; Score=-2.0; E_value=7.6e-05; Accession=PF10502.1; Description=Signal peptidase I
  Pfam module annotation: Pfam domain module=Peptidase_S24::Peptidase _S26; Domain location=305-382::325-440
  Subcellular localization annotation: CTP_CleavageSite=17; ConfidenceScore=5.11e-01
TARSSTAATSPSTSAAAAGAGAGAAPGAGCRFIQDALSRPFCLFASSRRSDSHHDAEDHNHPKPSPKALPQAASAGGGHSLLLPRSSSTKAPVDEPPASLAVGLLSVFASGMGSTGGIAGASSLAASPSISAGFSPAALLPFLQATKWLPCSDIVTAATASRSSGRPAGASTAPASRAAGASTATAPRAAAPSPRPAPRRAVPLPGPAPVPSPAVAAPSKVGIQALVGSASIASGSAGIGSGAIASGAAGMVRKSGASLATGARVSRRAGWLSRWVSSCSDDAKTVFAAVTVPLLYRSSLAEPRSIPSKSMYPTFDVGDRILAEKVSYIFREPEILDIVIFRAPPVLQALGYSSSDVFIKRVVAKGGDIVEVRDGNLLVNGVVQDEDFVLEPADYVMDPLSVPEGYVFVLGDNRNNSFDSHNWGPLPMKSILGRSVLRYWPPSKISDTIYEHDMAQFTVATS

SEQ ID NO: 103858 - protein, 278 aa, Setaria italica
  Transcript Sequence Number=SeqID_37884
  Gene Ontology: Mol. function=heat shock protein binding; Biological process=response to stress
  Homolog annotation: Hit_ID=B6T422; Match level="QueryCoverage=99%, HitCoverage=81%, E-value=1e-144, Identity=90%"; Hit description=DnaJ subfamily B member 4
  Pfam annotation: Domain name=DnaJ; Domain location=4-67; Score=127.5; E_value=4.3e-35; Accession=PF00226.23; Description=DnaJ domain
MGMDYYNILKVNRNATLEDLKKSYRRLARTWPPDKNPTGGAEAEAKFKQITEAYEVLSDPEKRAIYDQYGEEGLKGMPPPGSQSRSSTAAGPSGPSNFRYNPSDPDDFFAEFMASNKTYSVDQDRMRFQQRSNWTSARNSRSEAPSSSRKESGASTSQAEKPLPVEKTLPCTLEELYNGTKRKMKITRNVAKPDGRVEVETEILAVEVLPGWKKGTKITFPNKGDKLHGQLAQDLTFVLDLKPHDVYILDGNNLLVKQEIPLVDALAGTAINLRTLDG

SEQ ID NO: 103859 - protein, 173 aa, Setaria italica
  misc_feature (82)..(82): Xaa can be any naturally occurring amino acid
  Transcript Sequence Number=SeqID_37885
  Gene Ontology: Mol. function=aspartic-type endopeptidase activity; Cellular component=chromatin; Biological process=RNA-dependent DNA replication
  Homolog annotation: Hit_ID=Q8SA93; Match level="QueryCoverage=98%, HitCoverage=6%, E-value=7e-46, Identity=48%"; Hit description =Putative polyprotein
WLQGSSIQLLAPNLFATVPKRRVKKRTVQEALLDNQWIQDIQGHYSVAVLSEFLDIWDMVQETLRLPEAEDVHKWKFENSGXSLLRQHTRLFLGEVQFEPSTLIWRNWGPRKCKFFLWLVAHNRCWTADRLARRGLPHPEYCPFCDHEDETIQHLLHSCVFSRQFWLQLLRSF

SEQ ID NO: 103860 - protein, 68 aa, Setaria italica
  Transcript Sequence Number=SeqID_37886
  Gene Ontology: Mol. function=metal ion binding; Biological process =metal ion transport
  Homolog annotation: Hit_ID=B6UDP3; Match level="QueryCoverage=100%, HitCoverage=55%, E-value=2e-23, Identity=85%"; Hit description=ATFP4
  Pfam annotation: Domain name=HMA; Domain location=6-66; Score=20.3; E_ value=0.008; Accession=PF00403.18; Description=Heavy-metal-associated domain
MAKQKIVIKVQMSSDKCRSKAMALVASTGGVDSVALAGDGKDQVVVVGEGVDSIKLTEALRKKVGDAQ

SEQ ID NO: 103861 - protein, 153 aa, Setaria italica
  Transcript Sequence Number=SeqID_37887
  Gene Ontology: Mol. function=metal ion binding; Biological process =metal ion transport
  Homolog annotation: Hit_ID=B6UDP3; Match level="QueryCoverage=45%, HitCoverage=57%, E-value=8e-24, Identity=82%"; Hit description=ATFP4
  Pfam annotation: Domain name=HMA; Domain location=41-104; Score=25.5; E_value=0.00022; Accession=PF00403.18; Description=Heavy-metal -associated domain
SPPGHLHQLLPPFCTTLQPPADLATERLTCSASFINFQQKIVIKVQMSSDKCRSKAMALVASTGGVDSVALAGDGKDQVVVVGEGVDSIKLTEALRKKVGDAQLVQVGENKKEEKKPADPVAEYNQWYYHHYPPTPPVVYDHRAAGTATTRSR

SEQ ID NO: 103862 - protein, 173 aa, Setaria italica
  Transcript Sequence Number=SeqID_37888
  Subcellular localization annotation: CTP_CleavageSite=14; ConfidenceScore=5.75e-01
AAFLLGHIRFRALLASNAARRRRVRFRAVLLSTTASPGTRSRSTFLILITTSRKRSFTTIQRLRSSVLIPGKARRLSTWRRSRGWPTARLRRRHSPRAAPTATCPAAWSKLPRPRNKVKAATRTPKPRSSKESLCSRRRSRKRSPGRPRRRRPHLRSTCRPQQRRSSTAYERT

SEQ ID NO: 103863 - protein, 53 aa, Setaria italica
  Transcript Sequence Number=SeqID_37889
GLKVVVSSMGFCVALCLCSSIQLLFFGSIIFLSINLLAYQLVGRRDYRDQDFR

SEQ ID NO: 103864 - protein, 158 aa, Setaria italica
  misc_feature (126)..(126): Xaa can be any naturally occurring amino acid
  Transcript Sequence Number=SeqID_37890
CEFIDDQGAIDVSPRGHLWSLTIAECNYITDIHAGRASGLPSFRLSSALLPTYDIPSTAPLEDLYICLRGHNYNPIKQWIKELPHLTDLTVLTICSIALRRVYALTRFGSANCLANFRSLPSLREXLQLLMFAMASTNLAHIYMFLKTCQCPQLERLF

SEQ ID NO: 103865 - protein, 58 aa, Setaria italica
  Transcript Sequence Number=SeqID_37891
LDSRFLCSVHFCARGAPDVQVGTVIYSLRLRLLNCMLNVTVHLHGTIFVSVDGNKIYA

SEQ ID NO: 103866 - protein, 489 aa, Setaria italica
  Transcript Sequence Number=SeqID_37892
  Gene Ontology: Mol. function=transferase activity, transferring glycosyl groups; Cellular component=cytoskeleton; Biological process= metabolic process
  Homolog annotation: Hit_ID=B9UYP6; Match level="QueryCoverage=96%, HitCoverage=92%, E-value=1e-102, Identity=43%"; Hit description =Flavonoid glucosyltransferase
  Pfam annotation: Domain name=UDPGT; Domain location=17-487; Score= -57.3; E_value=2.7e-08; Accession=PF00201.10; Description=UDP -glucoronosyl and UDP-glucosyl transferase
MPAMVEELRAAAEAEPHFLVVTYPAQGHINPVRHLARRLLRATGARVTVSTAVSAFRKMFPGEDDDAAAEGHRDAAGVWHVPYSDGYDAGFDRAVHDHTHYLSQVKLVGSRTLSAVIARLRDAGRPVTLVVYTLLLSWVANVARGHGVPAALYWIQPATVLAAYLHFFRGTDGVDKAIAAAGGDPSAAVSLPGLPPLRIRDLPSFITATSENDPYAFVADMFRELVDMLGREDSPSVLANTFDAMEPEAVASLREHGVDIVPVGPVLCFLDGATAAAGAKSGGGNDLFKQDEGYLEWLDAQAPGSVVYISFGSLSMMSTRQIEEVARGMSESGRPFLWVLRADNRGGAADVDAASLGGERGMVVEWCDQVRVLLHPAVGCFVTHCGWNSTLESVACGVPAVGVPQWTDQGTNAWLLERLGTGVRAAVSDKDGVLEAGELRRCLDFAASEMVQAKAVLWREKARAAAAEGGSSERNLREFVGKQLTAGGN

SEQ ID NO: 103867 - protein, 49 aa, Setaria italica
  Transcript Sequence Number=SeqID_37893
FKTVFFKILTQAMLFLHNVQVYCFSNYPAMSIMYCDNFWVYSPGSLCPV

SEQ ID NO: 103868 - protein, 270 aa, Setaria italica
  Transcript Sequence Number=SeqID_37894
  Gene Ontology: Mol. function=protein serine/threonine kinase activity; Cellular component=plasma membrane; Biological process =protein amino acid phosphorylation
  Homolog annotation: Hit_ID=Q10P10; Match level="QueryCoverage=99%, HitCoverage=39%, E-value=1e-83, Identity=60%"; Hit description =Protein kinase domain containing protein, expressed
MMLVYDLMPNGSLQDALLGKRCPDLVAEWPRRLAVARDIASALHYLHSVVQPPVIHGDVKPSNVLLDADLRARLSDFGLARIRSEEEDELESGAIGADADGNGNPGGGCDEDVSVAGESVTAIVVNGEDNAAKSPEDDEAFTTASPAEAASTSECDKTSVGSGLNARSCNGGGAAGSGTGSDWWWRQDNGGGGGGGGGVKDYVMEWIRSEIKKERPKNDWIAGSSAITPVVSTERKKPKRRAREWWREEYAEELTKKQKRRALAKSKSDA

SEQ ID NO: 103869 - protein, 90 aa, Setaria italica
  Transcript Sequence Number=SeqID_37895
RLSSALPSGQPSERLAYTGQSIFFGGPLLGAAAAAGPRRSDDAGTRARLEESWELTARQNDAGGDRRRTTESLPVFAPGTFQKNPPPFNR

SEQ ID NO: 103870 - protein, 82 aa, Setaria italica
  Transcript Sequence Number=SeqID_37896
  Gene Ontology: Mol. function=electron carrier activity; Biological process=oxidation reduction
  Homolog annotation: Hit_ID=Q6Z6D6; Match level="QueryCoverage=87%, HitCoverage=12%, E-value=3e-33, Identity=91%"; Hit description =Cytochrome P450 monooxygenase
RARALAPAAAIPVEDMLEECKTFFFAGKQTTTNLLTWATVLLAMHPEWQERARREVLDVCGADELPSKEHLPRLKMLGMIIN

SEQ ID NO: 103871 - protein, 87 aa, Setaria italica
  Transcript Sequence Number=SeqID_37897
  Gene Ontology: Mol. function=protein serine/threonine kinase activity; Cellular component=integral to membrane; Biological process=protein amino acid phosphorylation
  Homolog annotation: Hit_ID=B9RLU0; Match level="QueryCoverage=100%, HitCoverage=8%, E-value=2e-13, Identity=44%"; Hit description =Brassinosteroid LRR receptor kinase, putative
NRGAYDTWSESDASPCGWQGVGCDAAGRVASLDLSRASISGPAFGNFSRLPALASLDLSDNTISGAGDIGQCRGLVHLNISHNLIYG

SEQ ID NO: 103872 - protein, 324 aa, Setaria italica
  Transcript Sequence Number=SeqID_37898
  Homolog annotation: Hit_ID=Q8T2A5; Match level="QueryCoverage=75%, HitCoverage=35%, E-value=1e-17, Identity=23%"; Hit description =Similar to Dictyostelium discoideum (Slime mold). MkpA protein
QQLFADIALKVDDRARDAIMSENDDGIAPLDEREDGWLCFYEILANHFVRVPESGRRILELIVQLWSQSFASNIFSLLLHKWLFEAPLDGKEIPLRYSSALVQGATNVFWIDIQTNTRHFLSLYHYLLEDVALVPDRLNKISLQAGRDLFLLLSRFMFFYDQDHLLSRFLEHFPTFPNSFLVGGPADYFVIDLTDQLQKLKIEPVLLHYLSRMSILQGLELRLSTSTRLKACLYSFTSPGGPTYPTRAVRHAAWNTLDLLFPIGRYPRHVISLFFRLLYPWYWPSSCWNFVMTCAMTVYYYILNLLVSTWESLRRPSHRRTHEE

SEQ ID NO: 103873 - protein, 137 aa, Setaria italica
  Transcript Sequence Number=SeqID_37899
  Gene Ontology: Mol. function=identical protein binding
  Homolog annotation: Hit_ID=B9RKD6; Match level="QueryCoverage=98%, HitCoverage=59%, E-value=9e-38, Identity=57%"; Hit description =Meiotic coiled-coil protein, putative
  Pfam annotation: Domain name=Mnd1; Domain location=2-135; Score=98.0; E_value=3.3e-26; Accession=PF03962.7; Description=Mnd1 family
LILPSWICNQLRSTYNKLEFDLSSSKKRYMELVEQRDNLRRGREDSEEREAALEELKAVELHHKKLKEELAAYADSDPAALEAMKDAIDVAHSAANRWTDNIFTLQQWCSTTFPQAKEQLEHMYREVGITEDFEYLQ

SEQ ID NO: 103874 - protein, 67 aa, Setaria italica
  misc_feature (40)..(40): Xaa can be any naturally occurring amino acid
  Transcript Sequence Number=SeqID_37900
DETCEWWSMMAGELALAALAILLSSLLALVLSHFLPLLLXPKAPRGSFGWPLIGETLRFLTPHASNT

SEQ ID NO: 103875 - protein, 222 aa, Setaria italica
  Transcript Sequence Number=SeqID_37901
  Gene Ontology: Mol. function=rRNA binding; Cellular component =ribonucleoprotein complex; Biological process=ribosome biogenesis
  Homolog annotation: Hit_ID=B6SUJ0; Match level="QueryCoverage=100%, HitCoverage=100%, E-value=1e-105, Identity=86%"; Hit description=50S ribosomal protein L10
  Pfam annotation: Domain name=Ribosomal_L10; Domain location=43-141; Score=42.1; E_value=2.2e-09; Accession=PF00466.12; Description =Ribosomal protein L10
  Subcellular localization annotation: CTP_CleavageSite=40; ConfidenceScore=5.61e-01
METSFLPTTLPTAKPLPAFRTLSTAASLRPHPRPRTSTIRAAITRGRKEETVAAVREQLEGCYLLAGIKYEGLTVKQLQGIRDALPETCSLLVAKNTLVGKAIEGTPWEALKPCMKGMNAWLFVHTEEVPTALKPYRAFQKEERVEETNDFVGAVFEGKFYGPGDFKALETMPSRAEVYAQLLGALQGPATSLVTTLQAPARDVVAVLSAYVRKLEEEAGSA

SEQ ID NO: 103876 - protein, 245 aa, Setaria italica
  misc_feature (40)..(40): Xaa can be any naturally occurring amino acid
  misc_feature (214)..(214): Xaa can be any naturally occurring amino acid
  misc_feature (225)..(225): Xaa can be any naturally occurring amino acid
  Transcript Sequence Number=SeqID_37902
  Gene Ontology: Mol. function=binding
  Homolog annotation: Hit_ID=B9RQE4; Match level="QueryCoverage=95%, HitCoverage=19%, E-value=5e-16, Identity=30%"; Hit description=DNA repair/transcription protein met18/mms19, putative
VEEKVPILSSLEDLAQLHALGSVISILSESSTYLCTRVLXQEHFTQLVDILGTSTDYESRQLNTCNGSSSAADNYGALYLSVQMLTSCREVALVSYADCSSIKLAKESWWLILEKKLDRLIHFLGSFLTIDSESMQSMFRQEYVSCAVKGLLTLATFPEQCSPLTANAYEDILAMLTSVIISKFENVDLWRLSLKALTSIGSSIGEFHASQKGXIYCRTVVDKIXSLVESYDGPMPLSLRLEASY

SEQ ID NO: 103877 - protein, 408 aa, Setaria italica
  misc_feature (152)..(152): Xaa can be any naturally occurring amino acid
  misc_feature (183)..(183): Xaa can be any naturally occurring amino acid
  Transcript Sequence Number=SeqID_37903
  Homolog annotation: Hit_ID=B9SB08; Match level="QueryCoverage=55%, HitCoverage=15%, E-value=3e-09, Identity=30%"; Hit description=ATP binding protein, putative
NVSCSAGLAGMPTNASFGSLLHEDVAGNSDTGRLVLSGSSCVGHSNSILHFQHLSKEVPSKNSSHKICDRSSNSLLQSNVGASETTVTKPNNLDSISMLGHYCGSERPPMHLVVSTRMKRSTMINILRYWEMLDSQSRDLSKESSIDGPLLXKVSTDPLISTDEKVSLIFSLLLWDLRFAEEXLADGNFASSAFSLSVKSHMETRWTILRGDQLDVLISLIEDFLLNKEVIVCEKMGQKAFGASKDHELDDEAGIQISVKPAKVDQFIAACILLASICVEVERVDVVLEVSYKVLQMGKSNLLWTLLALHVFGSMCGDKFLFPKSCNFLTTAIRLVVQLLESKDPSLCLMSSYVQSDKPTTLPSCAHCLFDVDKVSIDGFISSLLDELDLCSLLWNNHAYSNETTRHT

SEQ ID NO: 103878 - protein, 55 aa, Setaria italica
  Transcript Sequence Number=SeqID_37904
VYWFSFFYPPFVFRKGFQPLYHESFEILVLLDRDSQMILFLLLCFTLETLKKKKK

SEQ ID NO: 103879 - protein, 133 aa, Setaria italica
  misc_feature (24)..(24): Xaa can be any naturally occurring amino acid
  misc_feature (112)..(112): Xaa can be any naturally occurring amino acid
  Transcript Sequence Number=SeqID_37905
  Gene Ontology: Mol. function=translation initiation factor activity; Cellular component=eukaryotic translation initiation factor 3 complex; Biological process=translational initiation
  Homolog annotation: Hit_ID=Q9C5Z1; Match level="QueryCoverage=97%, HitCoverage=18%, E-value=5e-58, Identity=81%"; Hit description =Eukaryotic translation initiation factor 3 subunit B
  Pfam annotation: Domain name=eIF2A; Domain location=1-111; Score =50.7; E_value=1.3e-15; Accession=PF08662.3; Description=Eukaryotic translation initiation factor eIF
ALVNNTSRVSKLTTLKAKQANALXFWSPAGRFIVLAGLKGFNGQLEFYNVDELETMATGEHFMATDIMWDPTGRYLATAVTSVHEMENGFQIWSFNGKHLYKVSKDHFYQLXWRPRPPSLLTPEKEEEISKNL

SEQ ID NO: 103880 - protein, 145 aa, Setaria italica
  Transcript Sequence Number=SeqID_37906
  Gene Ontology: Mol. function=translation initiation factor activity; Cellular component=eukaryotic translation initiation factor 3 complex; Biological process=translational initiation
  Homolog annotation: Hit_ID=B9RNS0; Match level="QueryCoverage=73%, HitCoverage=14%, E-value=1e-51, Identity=88%"; Hit description =Eukaryotic translation initiation factor 3 subunit, putative
  Pfam annotation: Domain name=eIF2A; Domain location=26-144; Score =26.6; E_value=1.4e-13; Accession=PF08662.3; Description=Eukaryotic translation initiation factor eIF
LRRETSQLRWGGGKDDRYYVLPKPCKIFIILSTTPPKYGFELFRIKERDIPIEVLELENKNDKIIAFAWEPKGHRFAIIHGDGPRPDVSFYTMRTANNTSRVSKLTTLKAKQANALFWSPAGRFIVLAGLKGFNGQLEFYNVDVL

SEQ ID NO: 103881 - protein, 160 aa, Setaria italica
  misc_feature (35)..(35): Xaa can be any naturally occurring amino acid
  misc_feature (47)..(47): Xaa can be any naturally occurring amino acid
  Transcript Sequence Number=SeqID_37907
  Gene Ontology: Mol. function=translation initiation factor activity; Cellular component=eukaryotic translation initiation factor 3 complex; Biological process=translational initiation
  Homolog annotation: Hit_ID=B9RNS0; Match level="QueryCoverage=96%, HitCoverage=21%, E-value=6e-65, Identity=75%"; Hit description =Eukaryotic translation initiation factor 3 subunit, putative
RTCVSKQYWTDSFIQWSPLGTYLATVHRQGSQVWXGENGFERLMRFXAHPMVKLIDFSPGERYLITYSSHEPSNPRDTHRVVLNIFDVRTGKVMRDFKGSADEFTAGGNIGVSGVSWPIFRWGGGKDDKYFARLGKNIISVYETDTFYLQGLLVKKGERI

SEQ ID NO: 103882 - protein, 720 aa, Setaria italica
  Transcript Sequence Number=SeqID_37908
  Gene Ontology: Mol. function=translation initiation factor activity; Cellular component=eukaryotic translation initiation factor 3 complex; Biological process=translational initiation
  Homolog annotation: Hit_ID=B9RNS0; Match level="QueryCoverage=95%, HitCoverage=95%, E-value=0.0, Identity=75%"; Hit description =Eukaryotic translation initiation factor 3 subunit, putative
  Pfam annotation: Domain name=RRM_1; Domain location=63-141; Score =27.1; E_value=7.4e-05; Accession=PF00076.14; Description=RNA recognition motif. (a.k.a. RRM, RBD, o
  Pfam annotation: Domain name=eIF2A; Domain location=407-607; Score =354.6; E_value=1.8e-103; Accession=PF08662.3; Description=Eukaryotic translation initiation factor eIF
  Pfam module annotation: Pfam domain module=RRM_1::eIF2A; Domain location=63-141::407-607
MALTTSMEGLEARARELAVDLSAVDLDSITLPAGEDFGILSDDEEVLRNEDPPELEMGLSNIMVVDNLPVVPPEKFEKLENVIRKIYSQIGAIKENGLWMPVNPETKKTYGYCFIEYNTPQEAELAREKTNGYKLDKSHIFAVNMLDDFEKYMKVPDTWTPAEIKPYTPGENLLKWLTDEKARDQFVIRAGTLTEVYWNDARKQAPELVFQKQYWTDSFIQWSPLGTYLATVHRQGSQVWGGENGFERLMRFAHPMVKLIDFSPGERYLITYSSHEPSNPRDTHRVVLNIFDVRTGKVMRDFKGSADEFTAGGNIGVSGVSWPIFRWGGGKDDKYFARLGKNIISVYETDTFSLLDKKSLKVENVVDFSWSPTDPIISLFVPEMGGGNQPARVSLVQIPGKEELRQKNLFSVSDCKMYWQNNGEYLAVQVDRYTKTKKSTYTGFELFRIKERDIPIEVLELENKNDKIIAFAWEPKGHRFAIIHGDGPRPDVSFYTMRTANNTSRVSKLTTLKAKQANALFWSPAGRFIVLAGLKGFNGQLEFYNVDELETMATGEHFMATDIMWDPTGRYLATAVTSVHEMENGFQIWSFNGKHLYKVSKDHFYQFIWRPRPPSLLTPEKEEEISKNLKKYSKKYEQEDQDAFNQLSEQERKRRTQLQEEWDSWVAKWKQIHEEERAYRRELRDGDASDEEEEYEAKEVEVEEVVDVTEEVLAFDLDQE

SEQ ID NO: 103883 - protein, 82 aa, Setaria italica
  misc_feature (59)..(59): Xaa can be any naturally occurring amino acid
  Transcript Sequence Number=SeqID_37909
  Gene Ontology: Mol. function=DNA binding; Biological process =regulation of transcription
  Subcellular localization annotation: CTP_CleavageSite=22; ConfidenceScore=5.37e-01
ASNSSTVDEAGGGDSSGRNNPSSSSVRPYVRSKNPRLRWTPELHLCFLRAVDRLGGQDXYRSKKIDDSGQVIGGGGSWRDDD

SEQ ID NO: 103884 - protein, 116 aa, Setaria italica
  Transcript Sequence Number=SeqID_37910
LGQRRRRRQGNASRDDDQQVLESATDDTAGLSLSLFSSYPPFARTSVSMDKGEKRIQQGQVLLISPYECDLVVQCGDILWYLSMCMRLEKDTHICVQIYICIGRAINHVYMRVLIF

SEQ ID NO: 103885 - protein, 101 aa, Setaria italica
  misc_feature (49)..(49): Xaa can be any naturally occurring amino acid
  Transcript Sequence Number=SeqID_37911
  Gene Ontology: Mol. function=DNA binding; Biological process =regulation of transcription
  Homolog annotation: Hit_ID=B9RXJ2; Match level="QueryCoverage=33%, HitCoverage=11%, E-value=1e-09, Identity=79%"; Hit description=DNA binding protein, putative
SGEAEEEEEDAAADMPPGGGRDGSSASNSSTVELLDEAGGGAGTAAGTXSSSSSSVRPYVRSKNPRLRWTPELHLCFLRAVDRLGGQDRKRSSSSPHHPNY

SEQ ID NO: 103886 - protein, 41 aa, Setaria italica
  Transcript Sequence Number=SeqID_37912
KSKDQYMHVYIINSSTYADICLILHTYMCVKIKHIHACIHN

SEQ ID NO: 103887 - protein, 290 aa, Setaria italica
  misc_feature (70)..(70): Xaa can be any naturally occurring amino acid
  Transcript Sequence Number=SeqID_37913
  Gene Ontology: Mol. function=DNA binding; Cellular component=nucleus; Biological process=regulation of transcription
  Homolog annotation: Hit_ID=B9SQQ7; Match level="QueryCoverage=38%, HitCoverage=25%, E-value=3e-25, Identity=53%"; Hit description=DNA binding protein, putative
  Pfam annotation: Domain name=Myb_DNA-binding; Domain location=1-52; Score=45.4; E_value=2.3e-10; Accession=PF00249.23; Description=Myb -like DNA-binding domain
RLRWTPELHLCFLRAVDRLGGQDRATPKLVLQLMNVKGLSIGHVKSHLQMYRSKKIDDSGQVQLLLSLQXIGGSWRDDHELQEGGRQAYNLGHLSLHHAQTGAATTLLSARFGAWPHYWNWLHGHHHHLLGSKPYYSSAADQADVFLTTTRAHHQYVSRASILQAGRSSYHQNDQFIRPLLQQRDDEDNHSNHHDPLDLELALDIGPRRQDNKRIKRSSSGCSLGREEDDDKENASRDDDQQVLESATDDTAGLSLSLFSSYPPFARTSVSMDKGEEAHPTRTSTLDLTI

SEQ ID NO: 103888 - protein, 395 aa, Setaria italica
  Transcript Sequence Number=SeqID_37914
  Gene Ontology: Mol. function=DNA binding; Cellular component=nucleus; Biological process=regulation of transcription
  Homolog annotation: Hit_ID=B9SQQ7; Match level="QueryCoverage=27%, HitCoverage=26%, E-value=8e-28, Identity=57%"; Hit description=DNA binding protein, putative
  Pfam annotation: Domain name=Myb_DNA-binding; Domain location=97-148; Score=45.4; E_value=2.3e-10; Accession=PF00249.23; Description=Myb -like DNA-binding domain
MSQGRLSYPSWTSAHPSASSSMMDHQLQSSSAGGDTEEEDEEEDAAAAADMPPGGGRDGSSASNSSTVDEAGGGDSSGRNNPSSSSVRPYVRSKNPRLRWTPELHLCFLRAVDRLGGQDRATPKLVLQLMNVKGLSIGHVKSHLQMYRSKKIDDSGQVIGGSWRDDHELQEGGRQVYNLGRLSLHHAQTTGATTLLSARFGAWPHYWNWLHGHHHLLGSKPYYSSAAEAGVFLTTRAHQYVARATCSSAPASILQGRSSYHQNDQFIRPLLRDEDSGNHNHHDPLDLELALDIGPRRQDNKRIKRSSSGCSWGREDEENAARDNDQQVLESATDTGLSLSLFSSYPPPFVRTGSGGALGVNMDKGKRIQQEQVLLISPYDLVRCGDILWYLSMCV

SEQ ID NO: 103889 - protein, 204 aa, Setaria italica
  misc_feature (47)..(47): Xaa can be any naturally occurring amino acid
  Transcript Sequence Number=SeqID_37915
  Gene Ontology: Mol. function=binding
  Homolog annotation: Hit_ID=Q2R300; Match level="QueryCoverage=94%, HitCoverage=26%, E-value=2e-64, Identity=73%"; Hit description =Importin, putative, expressed
SAAVCRSLSSAIHSCGQHFHILLPKVLECLSTNFLLFQRHDCFLRTXEAIVASSSLLELSFQKAAICSTAMHRGAALASMSYISCFLEVVLAAVLESPECIPDGSPGVVLIQILARCGEGLLSNVLYALLGVSALSRVHKSATILQQLAAMCSFCERTTWKAVLSWSSLCGWLQSTVKSLPSEYLKQGEAEMNKLPTSRTRKVD

SEQ ID NO: 103890 - protein, 337 aa, Setaria italica
  Transcript Sequence Number=SeqID_37916
  Gene Ontology: Mol. function=binding
  Homolog annotation: Hit_ID=Q2R300; Match level="QueryCoverage=100%, HitCoverage=35%, E-value=1e-162, Identity=82%"; Hit description =Importin, putative, expressed
VFLEYFWPLLEKLFRSSHMENASLSAAVCRSLSSAIHSCGQHFHILLPKVLECLSTNFLLFQRHDCFLRTAANVIEEFGHKEEYGALCVRTFETLSSASSISTLNSSYTCDQEPDLVEAYTYFTSMFIRCCPKEAIVASSSLLELSFQKAAICSTAMHRGAALASMSYISCFLEVVLAAVLESPECIPDGSPGVVLIQILARCGEGLLSNVLYALLGVSALSRVHKSATILQQLAAMCSFCERTTWKAVLSWSSLCGWLQSTVKSLPSEYLKQGEAEMIIPQWLKVLEDAGSDYLHRTGDNIRNHQGYMQGKGGRTLKRIIRDFVESHRNAPTPCPS

SEQ ID NO: 103891 - protein, 46 aa, Setaria italica
  Transcript Sequence Number=SeqID_37917
FQEMAVLDCHCMHDKLMFLNIMINYVSDHQILKDITFSKYKFSISS

SEQ ID NO: 103892 - protein, 159 aa, Setaria italica
  Transcript Sequence Number=SeqID_37918
  Gene Ontology: Mol. function=metal ion binding
  Homolog annotation: Hit_ID=B4F8Z4; Match level="QueryCoverage=72%, HitCoverage=22%, E-value=1e-62, Identity=94%"; Hit description =Protein binding protein
  Pfam annotation: Domain name=Ank; Domain location=4-36; Score=31.0; E_ value=4.9e-06; Accession=PF00023.22; Description=Ankyrin repeat
IGSHCGTALHHAAKKGLEQTVHLLLTHGANPFIPNDDCNTALELAREKGHVNVVRAIEGRISLFCGWMRENYAPAFLDAIAPQFMTRKIWAVVLPREVRTPTRHLKLELAIYPELQVRLLKFEWILLLKLPFIVVDMLAYLLDIEFLHYLLPLININMG

SEQ ID NO: 103893 - protein, 511 aa, Setaria italica
  Transcript Sequence Number=SeqID_37919
  Gene Ontology: Mol. function=metal ion binding
  Homolog annotation: Hit_ID=B4F8Z4; Match level="QueryCoverage=100%, HitCoverage=100%, E-value=0.0, Identity=77%"; Hit description =Protein binding protein
  Pfam annotation: Domain name=Ank; Domain location=39-72; Score=24.3; E_value=0.0005; Accession=PF00023.22; Description=Ankyrin repeat
  Pfam annotation: Domain name=Ank; Domain location=75-107; Score=31.0; E_value=4.9e-06; Accession=PF00023.22; Description=Ankyrin repeat
  Pfam annotation: Domain name=zf-C3HC4; Domain location=460-498; Score= 13.9; E_value=0.0027; Accession=PF00097.17; Description=Zinc finger, C3HC4 type (RING finger)
  Pfam annotation: Domain name=zf-MIZ; Domain location=456-501; Score= -13.9; E_value=0.1; Accession=PF02891.12; Description=MIZ zinc finger
  Pfam module annotation: Pfam domain module=Ank::Ank::zf-C3HC4::zf -MIZ; Domain location=39-72::75-107::460-498::456-501
MGLQQSKEELLYQQVNYGNVDGIRTLRAQGAGLEWIDKEGKTPLMVACMRPDLLGVAKVLIELGANVNAYRPGSHCGTALHHAAKKGLEQTVHLLLTHGANPFIPNDDCNTALELAREKGHVNVVRAIEGRISLFCGWMRENYAPAFLDAIAPQFMTRKIWAVVLPREVRTPTRHLKLELAIYPELQASKPRAIVKLWKSQIEEPKLNLADPSVVIFDKGTKTRYKILPAYEGDKQQLQRFYHACCGMVQVSNTVPAPPANLPVPNPVPANSSVAPSEVSAPTKEDVELAMAINASIQSAIAEGVPNVQPNASTPNTNGWGIPPSNSHNGWGPPSAPAPSKTSGQSQARVDAPSSSSTYNGWDVPGTSSSQSSSKPSKTQTNPPVVIPQEALPALPTPTAPPFAEETFYSGPVQYPSIDSTPVDVIMPATTEGGTVAASVGPGEDEANASGSGNTPSGTCVICLDAPVEGACIPCGHMAGCMSCLKDIESKKWGCPICRATINQVVRLYAV

SEQ ID NO: 103894 - protein, 343 aa, Setaria italica
  misc_feature (17)..(17): Xaa can be any naturally occurring amino acid
  Transcript Sequence Number=SeqID_37920
  Homolog annotation: Hit_ID=Q017L1; Match level="QueryCoverage=34%, HitCoverage=4%, E-value=3e-09, Identity=31%"; Hit description=[S] KOG1893 Uncharacterized conserved protein
FAKIWGLSKESHNWDKXRIISLKRERFETQKITFKCYMKFWIENLFKLRGLEINMIVLLLASFTLLNVVSIFYIVCLVVCILMNRDLIQKVWPLFVFLFASVLILEYFALWNDVMPWFHDINDIEVNCRECWKNSRIFFDYCSKCWLGITVDDPRMLISYYVVFIFSSFKLRSDRFSVFSDSDTYRQMMSQRKNAVVWRDLSLETKSFWTFLDYVRLYAYCHLLDIVLALIAITGTLEYDVLHLGYLGFALVFFRMRLEILKKKNKIFKYLRMYNFALIVLSLAYQSPYVGQFSSGMCDQIDYLYEIIGFYKYDYGFKITSRSAFVEIVIFLLVSVQSYIFRL

SEQ ID NO: 103895 - protein, 62 aa, Setaria italica
  Transcript Sequence Number=SeqID_37921
  Subcellular localization annotation: CTP_CleavageSite=57; ConfidenceScore=5.19e-01
PPHYNLVCCDQFSKNNIKTNVSFLKKQLRNSSSSQKVLTWYHSKIVLLLINLLSFVRAQIDQ

SEQ ID NO: 103896 - protein, 87 aa, Setaria italica
  Transcript Sequence Number=SeqID_37922
  Gene Ontology: Mol. function=zinc ion binding
  Homolog annotation: Hit_ID=Q10LJ3; Match level="QueryCoverage=48%, HitCoverage=4%, E-value=3e-12, Identity=85%"; Hit description=JmjC domain containing protein, expressed
HDQSTVQLALNFLSPESLPESVRMAQEIRCLPNGHVAKLKMLEVRCDLQLLGNSIMLIIQCECLFINDTGKKDLLYMSSAVRQDKKH

SEQ ID NO: 103897 - protein, 601 aa, Setaria italica
  Transcript Sequence Number=SeqID_37923
  Gene Ontology: Mol. function=zinc ion binding
  Homolog annotation: Hit_ID=Q10LJ3; Match level="QueryCoverage=100%, HitCoverage=68%, E-value=0.0, Identity=70%"; Hit description=JmjC domain containing protein, expressed
  Pfam annotation: Domain name=JmjC; Domain location=398-514; Score =14.8; E_value=3.7e-05; Accession=PF02373.14; Description=JmjC domain
YDLCLDCCRDIRRSRATIARGEDNEDHVEDKSRDSFSKRARLEPSTESVNDKSCSQQMDLNNIDIKSLVPTWRVSNDGSLTCGPHEAGGCGSSKLVLRRIFKINWIAKLVKSSEEMVNGCKVHDLQDGCLSYSDGRRLDLIGQQNLGLPKCSNSEDISGNCVYSPVLEDLKHEGIMHFRKHWIKAEPIVIRKAFEPSLSSIWDPVSIWRGIQEIMDEEMNEDVIVKAVDCSNRSEVDIELKQFIKGYSDGNKGGDGRLLMLKLKEWPRPSVLEEFLLCHRPEFIVNFPLVDFIHPRWGLLNLTAKLPQDALQPEVGMKLLIAYGSRQELGQGDPVMNLTINMDDVVHMLMHAAEMHNQCPKRLLSNGSERIANGTSAHVNDHSPVPNLDLDVGEPEHKHTISHCEEVKANNLEESQAGAVWDVFRRQDLPKLNEYLAAHQEEFGASCQAVPSVKYPIYDQTVYLNNYHKKTLKDQYGIEPCTFHQHIGEAVFIPAGCPFQVKNLQSTVQLALNFLSPESLPESVRMAQEIRCLPNGHVAKLKMLEVKKISLYAASSAVREIQRITLDPKFNLDASLEDQNLTRAVSENLARVNKQRKVSFS

SEQ ID NO: 103898 - protein, 103 aa, Setaria italica
  misc_feature (53)..(53): Xaa can be any naturally occurring amino acid
  Transcript Sequence Number=SeqID_37924
  Gene Ontology: Cellular component=nuclear pore; Biological process =transport
  Homolog annotation: Hit_ID=Q2R0I9; Match level="QueryCoverage=79%, HitCoverage=7%, E-value=3e-28, Identity=75%"; Hit description =Nuclear pore protein 84/107 containing protein, expressed
KFVVLFEMLNDAVSPEMLSAEENDQAVAAAKETLELAFLLLKKDERPWLDAVXSSPFESSDPIFLELHASAMLCLPSGECMLPDATSIDNKTLELSRQLIITN

SEQ ID NO: 103899 - protein, 545 aa, Setaria italica
  Transcript Sequence Number=SeqID_37925
  Gene Ontology: Cellular component=nuclear pore; Biological process =transport
  Homolog annotation: Hit_ID=Q2R0I9; Match level="QueryCoverage=99%, HitCoverage=49%, E-value=0.0, Identity=83%"; Hit description=Nuclear pore protein 84/107 containing protein, expressed
  Pfam annotation: Domain name=Nup84_Nup100; Domain location=1-484; Score=-5.6; E_value=4.8e-06; Accession=PF04121.5; Description =Nuclear pore protein 84  107
VTNWWSWLSSAEEEQNIARPLDDPEMIRFAAHVVLVLRYIFISDEMEDELEEKLVAVGDLIINMYVRYLFSEDQEELVGVYASQLQRDLCIDLFVEMMELRLNSSLHTMYKLFLSAVEYLPFSSGDASKACFEEIIERVLSRSRQTKPSKYDEDFSDVAHQHHLQSLQKAMVIQWLCFTPPPSIPDFQMITGKLLIRALMHSNTLFREFSLISMRRVPELPAGPHKLLAILAEPLKQKENLFSLEDQEVSDNLQEFEDWHEYYSLDATYRNWLKVEMQNDAVSPEMLSAEENDQAVAAAKETLELAFLLLKKDERPWLDAVESSPFESSDPIFLELHASAMLCLPSGECMLPDATSCTALTSALYSTASEEDVLHRKLKVDIQVSSRDPCCIEVALSCLAAEGDGYGLHEANDGGLLAAIMAAGFKGELSRFQPGVSMAISRLDAWYSDGNGSVESTAAYIIRGLCRRCCLPETILRSMQACISLSAAGDSLDDCDKLIELVGSSESGMMHLFSQQQLQEFLIFERECLICKMELEEEQQLPSDG

SEQ ID NO: 103900 - protein, 101 aa, Setaria italica
  misc_feature (40)..(40): Xaa can be any naturally occurring amino acid
  Transcript Sequence Number=SeqID_37926
RLFLSYGLTFSAAYNVSESNSGGPSEAPYIVSSKSCLSQXQKKIVEEMVGAIQSEVPIFVAIMKKINVDVTRRYRLIELGKQFATSQLPHRGQTVLLQCMK

SEQ ID NO: 103901 - protein, 190 aa, Setaria italica
  misc_feature (6)..(6): Xaa can be any naturally occurring amino acid
  misc_feature (8)..(8): Xaa can be any naturally occurring amino acid
  misc_feature (157)..(157): Xaa can be any naturally occurring amino acid
  Transcript Sequence Number=SeqID_37927
  Gene Ontology: Mol. function=DNA binding
  Pfam annotation: Domain name=B3; Domain location=111-190; Score=10.2; E_value=0.0059; Accession=PF02362.13; Description=B3 DNA binding domain
  Subcellular localization annotation: CTP_CleavageSite=67; ConfidenceScore=5.12e-01
KEDICXFXPAKGGRRFTFTVYLLRATATYSRGGAAFQKVGSCNGRSSTKMASVVHIKEESTDAYNVSESNSGGPSEAPYIVSSKSCLSQSQKKIVEEMVGAIQSEVPIFVAIMKKINVDVTRRYRLIELGKQFATSQLPHRGQTRLLQCMKKIWTTXMVIHGGRRRWFLVGGWSTFARDNGLRVGDICLF

SEQ ID NO: 103902 - protein, 795 aa, Setaria italica
  misc_feature (8)..(8): Xaa can be any naturally occurring amino acid
  misc_feature (28)..(28): Xaa can be any naturally occurring amino acid
  misc_feature (639)..(639): Xaa can be any naturally occurring amino acid
  Transcript Sequence Number=SeqID_37928
  Gene Ontology: Mol. function=binding; Cellular component=anaphase -promoting complex; Biological process=ubiquitin-dependent protein catabolic process
  Homolog annotation: Hit_ID=Q9SHK3; Match level="QueryCoverage=99%, HitCoverage=88%, E-value=1e-162, Identity=44%"; Hit description =F12K11.7
  Pfam annotation: Domain name=TPR_1; Domain location=240-273; Score =12.0; E_value=0.21; Accession=PF00515.20; Description=Tetratricopepti de repeat
  Pfam annotation: Domain name=TPR_1; Domain location=750-786; Score =3.6; E_value=2.2; Accession=PF00515.20; Description=Tetratricopeptide repeat
  Pfam module annotation: Pfam domain module=TPR_1::TPR_1; Domain location=240-273::750-786
PDDLFNFXDKLRGVLTAPEGASAETYFXGSNSQLGVFLRCCILAFNSMTFEGVCHLLADLVMYCNSTDASYDLAEDEDFDSEMSNLMDADIGSQAGIFEKYRQGYASDSHMGESSSALTRAPGLLHDFDEANTFKVDDNPTCLRSRWQLEAYLNQQADILEKDPSSVPLSSFNATMTQLQTLAPELHRVQFLQYLNALCHDDYVASLDNLHRYFDYSAGMQGLFGRSVSPVQDIVVGNYESALLCLGNLHCYFGHPKKALEAFAEAVRVSQMNNDDSCLAYVLGAISNLLSKIGMSNTVGVISSPYSLGTNIGLGTPLSIQQQLLVLLKRSLKRADVLKLPSLLSFDHLSLAKFDLKHVQRPLVSFGPNASTKLRTCPADVCKNLRLSSRVLTDFGTDVLSTSNENGSFSTSWLRNLSTASDSWRSNSRKSTKLYNDFDNFHYHAQPSPIPASVLQLAGSSYLLRATAWEHYGSAPMVRMNALVYATCFADAASSSELSLAYVKLIQQLAVSKGYSAAFCALKLAEKKFPSSTSLHIQLLRMQILHERALHRGHLKVAQQICDEFGVLSSSVCGVDIELKTEASVRRARTLLAAKQFGQAAAVANSLFSTCYKYNMQVENASVLLLLAEIHKKSDNAVXLGLPYALASQSFCKSFNLDLLEASATLTLAELWLALGSSHAKRALSLVHQSLPMILGHGGLELRARAHIVLAKCHLSDLKFSVPEDPEAVLDPLNQATQDLQVLEYHEMAAEAYYLKAMAYNHLGKLDEREEAAARFKEHITAHENPRNEEDSLAY

SEQ ID NO: 103903 - protein, 118 aa, Setaria italica
  Transcript Sequence Number=SeqID_37929
  Gene Ontology: Mol. function=transferase activity, transferring glycosyl groups; Cellular component=integral to membrane; Biological process=cell wall organization and biogenesis
  Homolog annotation: Hit_ID=Q7XHV0; Match level="QueryCoverage=95%, HitCoverage=11%, E-value=2e-37, Identity=65%"; Hit description =Probable mixed-linked glucan synthase 9
SPSFFIWRVRHPDSDTMVLWWVTVVGDFWFGVSWLLNQASKLNPIRRVPDLALLNQRFDPPGGGGGGSSSSSQLPAVDVFINTVDPVDEPVLCTMNSVLSILATDYPVDRHATLLSSV

SEQ ID NO: 103904 - protein, 242 aa, Setaria italica
  misc_feature (132)..(132): Xaa can be any naturally occurring amino acid
  Transcript Sequence Number=SeqID_37930
  Gene Ontology: Mol. function=extracellular-glutamate-gated ion channel activity; Cellular component=integral to membrane; Biological process=G-protein coupled receptor protein signaling pathway
  Homolog annotation: Hit_ID=Q7XP59; Match level="QueryCoverage=100%, HitCoverage=25%, E-value=2e-79, Identity=56%"; Hit description =Glutamate receptor 3.1
DSVWAVARALDAFFDDGGRISFTNDSRLHDETGGSLHLEAMSVFDMGKRLLGKIRQVNFTGASGQVQFNAQGELIHPAYDIISIIGNGVRTIGFWSNYTRLLSTVLPEDLYSKPPNTSLANQHLYDVIWPGXTAHKPRGWVFPSNAKELIIGVPNRHSFKAFVTLDNATGKMTGYCIDVFTQALSLLPYPVTYRFEPFGSGNENPHYNQLIQKVVDNEFDAAIGDIAITMSRTQTLDFTQPF

SEQ ID NO: 103905 - protein, 311 aa, Setaria italica
  misc_feature (100)..(100): Xaa can be any naturally occurring amino acid
  Transcript Sequence Number=SeqID_37931
  Gene Ontology: Mol. function=extracellular-glutamate-gated ion channel activity; Cellular component=integral to membrane; Biological process=G-protein coupled receptor protein signaling pathway
  Homolog annotation: Hit_ID=B9R8R0; Match level="QueryCoverage=87%, HitCoverage=29%, E-value=3e-79, Identity=56%"; Hit description =Glutamate receptor 3 plant, putative
  Pfam annotation: Domain name=Lig_chan; Domain location=1-231; Score =201.9; E_value=1.8e-57; Accession=PF00060.18; Description=Ligand -gated ion channel
MICFILCRFSFSTLFFAHRENTMSTLGRGVLIIWLFVVLIIQSSYTASLTSILTVQQLDTSIRGLDDLKNSDYPIGFQVGSFAEEYMVKELNISRSRLKXLGSPDEYAENLKQGPKRGGVMAIVDERPYVELFLSTYCKIAVAGSDFTSRGWGFAFPRDSPLQVDLSTAILTLSENGELQRIHDKWLRTSDCSADNTEFVDSNQLRLESFMGLFLICGAACVLALLIYFGIMLRRYLRHEPPESISAEGGSSKSKRSLKRFFSFVDDREPPKQKRSLCLSGSSMPTTPTSNVDIERPVRPIRNGGVVHIES

SEQ ID NO: 103906 - protein, 272 aa, Setaria italica
  Transcript Sequence Number=SeqID_37932
  Gene Ontology: Mol. function=extracellular-glutamate-gated ion channel activity; Cellular component=integral to membrane; Biological process=G-protein coupled receptor protein signaling pathway
  Homolog annotation: Hit_ID=Q7XP59; Match level="QueryCoverage=95%, HitCoverage=27%, E-value=4e-93, Identity=61%"; Hit description =Glutamate receptor 3.1
  Pfam annotation: Domain name=Lig_chan; Domain location=75-272; Score =93.0; E_value=1e-24; Accession=PF00060.18; Description=Ligand-gated ion channel
MLEPFGSGNENPHYNQLIQKVVDNEFDAAIGDIAITMSRTQTLDFTQPFIESGLVILAPVKKHITNSWAFLQPFTLGMWCVTGLSFLVVGVVIWVLEHRINDEFRGSPRQQLITIVWFSFSTLFFAHRENTMSTLGRGVLIIWLFVVLIIQSSYTASLTSILTVQQLDTSIRGLDDLKNSDYPIGFQVGSFAEEYMVKELNISRSRLKALGSPDEYAENLKQGPKRGGVMAIVDERPYVELFLSTYCKIAVAGSDFTSRGWGFVSTLNFMFT

SEQ ID NO: 103907 - protein, 128 aa, Setaria italica
  Transcript Sequence Number=SeqID_37933
  Gene Ontology: Mol. function=RNA binding; Cellular component =ribonucleoprotein complex; Biological process=ribosome biogenesis
  Homolog annotation: Hit_ID=Q8LBE4; Match level="QueryCoverage=100%, HitCoverage=100%, E-value=1e-51, Identity=78%"; Hit description =Ribosomal protein L7Ae-like
  Pfam annotation: Domain name=Ribosomal_L7Ae; Domain location=20-114; Score=109.7; E_value=1e-29; Accession=PF01248.18; Description =Ribosomal protein L7AeL30eS12eGadd45 family
MSQEAVNPKAYPLADAQLTINILEIIQQAANYKQLKKGANEATKTLNRGISEFVVMAADTEPLEILLHLPLLAEDKNVPYVFVPSKQALGRACGVTRPVIACSVTSNEGSQLKQPIQSLKDSIEKLLI

SEQ ID NO: 103908 - protein, 317 aa, Setaria italica
  Transcript Sequence Number=SeqID_37934
  Gene Ontology: Mol. function=nucleoside-triphosphatase activity; Cellular component=nucleus; Biological process=DNA replication
  Homolog annotation: Hit_ID=B9S6E2; Match level="QueryCoverage=100%, HitCoverage=39%, E-value=3e-89, Identity=49%"; Hit description =Replication factor C / DNA polymerase III gamma-tau subunit, putative
  Pfam annotation: Domain name=AAA; Domain location=32-230; Score= -10.4; E_value=0.0002; Accession=PF00004.21; Description=ATPase family associated with various cellular activities (AAA)
  Pfam annotation: Domain name=RFC-E_C; Domain location=247-317; Score =2.0; E_value=1.4e-06; Accession=PF10424.1; Description=Clamp-loader complex subunit E C-terminus
  Pfam module annotation: Pfam domain module=AAA::RFC-E_C; Domain location=32-230::247-317
DKHRPRNLNGFTCHREQVQQLKQLVSTEFCPHIIFKGPPGSGKRSLCRAVLTEIFGDSSLNVSHYLKSCNGQGSSSVPILVPVSSSNHHVELNMRSQSKNARYALMTLANEMSDKRKITEPVLRKNFKVIVLYDVDKVSENNQRLIKWILDSSSDACKIIMTCQDESNLIDSIKSRCKLITIGVPSTREIVDVLTYISKRESFDLPSSFATTIASQSRQNLREAILALEACKANNYPFIDGQAIPLGWEEVLEELSAEILDDPAPKRLFLARGKLQKLLVEFVPPKLILQKLVELYLKGIQTSVKREVYYWHAYYDK

SEQ ID NO: 103909 - protein, 144 aa, Setaria italica
  misc_feature (94)..(94): Xaa can be any naturally occurring amino acid
  misc_feature (117)..(117): Xaa can be any naturally occurring amino acid
  Transcript Sequence Number=SeqID_37935
  Gene Ontology: Mol. function=DNA binding; Biological process =regulation of transcription
  Homolog annotation: Hit_ID=Q6YZ60; Match level="QueryCoverage=100%, HitCoverage=34%, E-value=2e-36, Identity=56%"; Hit description=MYB transcription factor-like
PFHELESLSTIYPTRKDTLGGFSVHVPYVSRMRRGRPRKDFISFVDKEPSVQCNVQTTVGMLSKECEEGNHVRKASEVPPTVNPERGHLEAVDXEGVQNLQANVYKAASKPKIKRVXTRKHHRAWTLCEVVKLVDGVARYGAGK

SEQ ID NO: 103910 - protein, 59 aa, Setaria italica
  Transcript Sequence Number=SeqID_37936
  Gene Ontology: Mol. function=DNA binding; Biological process =regulation of transcription
  Homolog annotation: Hit_ID=Q6YZ60; Match level="QueryCoverage=91%, HitCoverage=13%, E-value=1e-17, Identity=75%"; Hit description=MYB transcription factor-like
KVLLKPRAAPFHELESLSTIYPTRKDTLGGFSVHVPYVSRMRRGRPRKDFISFVVIVYI

SEQ ID NO: 103911 - protein, 315 aa, Setaria italica
  Transcript Sequence Number=SeqID_37937
  Gene Ontology: Mol. function=DNA binding; Biological process =regulation of transcription
  Homolog annotation: Hit_ID=Q6YZ60; Match level="QueryCoverage=99%, HitCoverage=75%, E-value=1e-107, Identity=64%"; Hit description=MYB transcription factor-like
  Pfam annotation: Domain name=Myb_DNA-binding; Domain location=196 -246; Score=21.5; E_value=0.0034; Accession=PF00249.23; Description =Myb-like DNA-binding domain
NKESSKRFKRVPIHNDEPQGNLLAGQCTNKRTRKPTKRYIEELSDIETHESTGKLSSPAKRTAHDEVLLKPRAAPFHELESLSTIYPTRKDTLGGFSVHVPYVSRMRRGRPRKDFISFVDKEPSVQCNVQTTVGMLSKECEEGNHVRKASEVPPTVNPERGHLEAVDRKGVQNLQANVYKAASKPKIKRGLTRKHHRAWTLCEVVKLVDGVARYGAGKWSEIRKLSFSSYSYRTSVDLKDKWRNLIRATQTQLPAQKDGVCPRKINPSIIPIPPSILLRVKELNELQSQGGGFTAPVKFSGQNSKVVQGKGLGFL

SEQ ID NO: 103912 - protein, 375 aa, Setaria italica
  Transcript Sequence Number=SeqID_37938
  Gene Ontology: Mol. function=DNA binding; Biological process =regulation of transcription
  Homolog annotation: Hit_ID=Q6YZ60; Match level="QueryCoverage=42%, HitCoverage=38%, E-value=1e-59, Identity=70%"; Hit description=MYB transcription factor-like
SLYLSMEVDGSNSALVNKSEENDFEKKGSSDPVVYQLVRVEGDGTLVPATEDDVLEFEHFLQDEKVNFPSIEDVGHVEEFFSNDCILLKKSDLEDGSSKVKTLELHTQKMGTDLEENRLDGSLGPPSNSGVLHGQQPDKFLAEQGDSNIAQQDNASTETAKPIVLNDSCSAEKDKADACSRPVDDTSTEPSVSGVTSYVPDFSILRGEVCLDDLTIRELQEAFRATFGRQTTVKDKIWLKRRITMGLTNSCDVPSSGCVVKDYKIVGKDVRQEVSNTGGIPKIGLQSTLVRDQVTYPGNEGDSPSSSYYQSEDQQGSSKRFKRVPIHNDEPQGNLLAGQCTNKRTRKPTKRYIEELSDIETHESTGKLSSPAKRT

SEQ ID NO: 103913 - protein, 82 aa, Setaria italica
  Transcript Sequence Number=SeqID_37939
  Homolog annotation: Hit_ID=Q6Z844; Match level="QueryCoverage=98%, HitCoverage=34%, E-value=8e-14, Identity=53%"; Hit description =Coatomer subunit zeta-2
TNLGFVYFCSIILETDANTIAGKVATNAVDGSVPFSEQVITCPSYRFSQGCIYLMIPVTCSVQTITQALATAREHFARSLLK

SEQ ID NO: 103914 - protein, 182 aa, Setaria italica
  Transcript Sequence Number=SeqID_37940
  Gene Ontology: Mol. function=structural molecule activity; Cellular component=membrane coat; Biological process=intracellular protein transport
  Homolog annotation: Hit_ID=Q6Z844; Match level="QueryCoverage=100%, HitCoverage=100%, E-value=2e-78, Identity=80%"; Hit description =Coatomer subunit zeta-2
  Pfam annotation: Domain name=Clat_adaptor_s; Domain location=11-154; Score=27.6; E_value=1.8e-09; Accession=PF01217.12; Description =Clathrin adaptor complex small chain
MADFSKESCPSVKNILLLDSEGKRVAVKYFSDDWPTNASKLAYEKSVFTKTLKTNARAEAEITLFDGYIVVYKFVHDLHFFVTAGDDENELILASVLNGFSDSVGLLLRGDVEKRTALENLDLILLCIDEIIDGGIILETDANTIAGKVATNAVDGSVPFSEQTITQALATAREHFARSLLK

SEQ ID NO: 103915 - protein, 67 aa, Setaria italica
  misc_feature (20)..(20): Xaa can be any naturally occurring amino acid
  Transcript Sequence Number=SeqID_37941
MQDLTPDQLQQALSKTFSAXKRKGKLQKAWDGTKVIYNVASWSATAIGIYQNPAIVQAATAAFWILH

SEQ ID NO: 103916 - protein, 206 aa, Setaria italica
  Transcript Sequence Number=SeqID_37942
SLRRGRESKGEGAAAGGGRARRTADGGGDEGAQPPPPSDADYETDELCDLLQSRVQSPEFLEKLDSMQKSVYQHGAVDETVSWDFVSAADIWDDKSMNVSDDSEDGYVLVKQEDIVDGIACFMAAYLLSLKQTKDLTPDQLQQALSKTFSAKKRKGKLQKAWDGTKVIYNVASWSATAIGIYQNPAIVQAATAAFWTSCRVISKFL

SEQ ID NO: 103917 - protein, 166 aa, Setaria italica
  Transcript Sequence Number=SeqID_37943
TEVFNLSREMPRTNPTCHHQSLIFFPFFWTLTVPVSQDVVWSFEQIYFHIRSHCYKQSTNLQVRNIYINVSVPQRLELGTMFPFDILKRREAFSIAAGHCLHVCTVQPYGPFTEIWILHGRMSKRLLLLLVQSLDSGRYYTKTTENQHEVAIQLQPTGIFKTGKFI

SEQ ID NO: 103918 - protein, 116 aa, Setaria italica
  Transcript Sequence Number=SeqID_37944
  Homolog annotation: Hit_ID=B6SVR9; Match level="QueryCoverage=81%, HitCoverage=13%, E-value=6e-14, Identity=60%"; Hit description =Protein kinase
  Subcellular localization annotation: CTP_CleavageSite=59; ConfidenceScore=5.19e-01
RKRKNKVNKTDGRPTLKQKGSASGFKLHGLNMEPGTRFSTSALPRTSSLGIQPKPKDLSSDAKPTQHEKAVGDRPPPDVKPTQHEKAVGDRPPQQAPATQDDAKAANGRKEQQPER

SEQ ID NO: 103919 - protein, 72 aa, Setaria italica
  misc_feature (22)..(22): Xaa can be any naturally occurring amino acid
  Transcript Sequence Number=SeqID_37945
VLLEFQYDLKNVGQVKLKEHLXFFFTAKVPFNSFAIKESQVLVFSLSNQVWIHTYANDIYESILMHIPSTPF

SEQ ID NO: 103920 - protein, 77 aa, Setaria italica
  misc_feature (15)..(15): Xaa can be any naturally occurring amino acid
  Transcript Sequence Number=SeqID_37946
FRSAQSPAACSSMRXRVYAFSLGDAAVDSEDERPPAPACFSVRHESFRAFKGCRVAMTVKSALASVGGHGPTSAQKV

SEQ ID NO: 103921 - protein, 117 aa, Setaria italica
  misc_feature (83)..(83): Xaa can be any naturally occurring amino acid
  misc_feature (98)..(98): Xaa can be any naturally occurring amino acid
  Transcript Sequence Number=SeqID_37947
  Gene Ontology: Mol. function=lipid-A-disaccharide synthase activity; Biological process=lipid A biosynthetic process
SLLLVLRILAAKLSEVISDDEARRMQVESADQVFQVLYEPIKEQGTLFVEELGLSSTVLSPSMIAALTVLYTDKHQNTVYQNXVVQSEAKESFYLPVXSWLHACHSSTVGGGKQLLM

SEQ ID NO: 103922 - protein, 60 aa, Setaria italica
  Transcript Sequence Number=SeqID_37948
NVSSLFVRDGQPARKCSGLLNCYDWNNQIEALLKYVHDWKTLPVFQHSSCKGTSHVTFRS

SEQ ID NO: 103923 - protein, 333 aa, Setaria italica
  Transcript Sequence Number=SeqID_37949
  Gene Ontology: Mol. function=receptor activity; Cellular component =plasma membrane
  Homolog annotation: Hit_ID=Q9SA91; Match level="QueryCoverage=64%, HitCoverage=49%, E-value=6e-50, Identity=48%"; Hit description =T5I8.21 protein
MGGLCSKVSAVDKSPSDTTLGRNQVADHEPGAVLEVEKPPVSGEAAAAAKRLEEQQQSFSFMESVVPGLAFRGGHNAGGDAGSRASPQLTRSLSQRAGLGKAKAGAAKVSEVSSILGRASTVGLEKAVEVLDTLGSSMTSLNSSSGFVSSNAAKGNKISMLAFEVANTIVRGSNLMRSLSEPSIKHLTEVVFHSEGVQHLISKDTDELLKMAAADKREELEVFTKEVVRFGNRCKDPQWHHLDRYFENLNSFRLASERTPQNHLKEDAESVMQKLVTCVQCTAELYHEFHALDRFEADYRLKQKEHDGLSSRGDSLDILKQEVKGQSKHCLKI

SEQ ID NO: 103924 - protein, 73 aa, Setaria italica
  misc_feature (13)..(13): Xaa can be any naturally occurring amino acid
  Transcript Sequence Number=SeqID_37950
  Gene Ontology: Mol. function=oxidoreductase activity; Cellular component=cytoplasm; Biological process=oxidation reduction
  Homolog annotation: Hit_ID=B9STI7; Match level="QueryCoverage=91%, HitCoverage=17%, E-value=3e-24, Identity=62%"; Hit description =Desacetoxyvindoline 4-hydroxylase, putative
  Pfam annotation: Domain name=2OG-FeII_Oxy; Domain location=1-72; Score=58.9; E_value=2e-14; Accession=PF03171.12; Description=2OG -Fe(II) oxygenase superfamily
QIILAHYYPPCPXPELAIGTSRHSDSGFLTILLQDEIGGLQILHKDRWVDVTPIPGAFIINIADLLQSRSEEC

SEQ ID NO: 103925 - protein, 84 aa, Setaria italica
  Transcript Sequence Number=SeqID_37951
  Subcellular localization annotation: CTP_CleavageSite=48; ConfidenceScore=5.17e-01
PPDHHTQADTARRRHHVHRPSRLRPHRRAPRPRRLWRNGCPAHLPPPRPGGGGAPAGSSRTPLATVPMIDLGATARPWWTPSAA

SEQ ID NO: 103926 - protein, 58 aa, Setaria italica
  Transcript Sequence Number=SeqID_37952
IQAPYRQNFSTAPGPSSRVEDIQDPFAIPSDYVWTTPEEKKKKTQENKNKSKKGRNGS

SEQ ID NO: 103927 - protein, 62 aa, Setaria italica
  Transcript Sequence Number=SeqID_37953
  Gene Ontology: Mol. function=transition metal ion binding; Cellular component=chloroplast; Biological process=chlorophyll biosynthetic process
  Homolog annotation: Hit_ID=Q17UU7; Match level="QueryCoverage=85%, HitCoverage=13%, E-value=2e-23, Identity=96%"; Hit description =Putative desaturase-like protein
LEGQALDLGFLTKARKYTFFKPKFIFYATYLSEKIGYWRYITIFRHLKANPEYQVYPSSRST

SEQ ID NO: 103928 - protein, 102 aa, Setaria italica
  Transcript Sequence Number=SeqID_37954
  Gene Ontology: Mol. function=bile acid:sodium symporter activity; Cellular component=integral to membrane; Biological process=organic anion transport
  Homolog annotation: Hit_ID=B9RK15; Match level="QueryCoverage=85%, HitCoverage=22%, E-value=5e-29, Identity=73%"; Hit description =Sodium-bile acid cotransporter, putative
STALLHSNILLPSCFSCSTIGAIIMTPLLTKLLAGQLVPVDAAGLAISTFQVVLLPTVLGVLAHEYFPSLLSGIITVAPLFGVLLTTLLCASPVSITKNLLE

SEQ ID NO: 103929 - protein, 108 aa, Setaria italica
  Transcript Sequence Number=SeqID_37955
  Gene Ontology: Mol. function=transition metal ion binding; Cellular component=chloroplast; Biological process=chlorophyll biosynthetic process
  Homolog annotation: Hit_ID=Q17UU7; Match level="QueryCoverage=80%, HitCoverage=21%, E-value=2e-43, Identity=89%"; Hit description =Putative desaturase-like protein
MLPKSQYFTDKHKKMQVLLTIQVYPIFKYFENWCQDENRHGDFFSALLKAQPQFLNDWKAKLWSRFFCLSVYVTMYLNDCQRTAFYEGIGLDTKEFDMHVIIEVKMSC

SEQ ID NO: 103930 - protein, 66 aa, Setaria italica
  Transcript Sequence Number=SeqID_37956
  Subcellular localization annotation: CTP_CleavageSite=21; ConfidenceScore=5.59e-01
MAPSATSSMASVSRALRPRPRAAACSAPRLGCGLGIACSMPSLGLAVVTAPSATVTPALRRQILCQ

SEQ ID NO: 103931 - protein, 134 aa, Setaria italica
  misc_feature (71)..(71): Xaa can be any naturally occurring amino acid
  misc_feature (111)..(111): Xaa can be any naturally occurring amino acid
  Transcript Sequence Number=SeqID_37957
  Gene Ontology: Mol. function=oxidoreductase activity; Cellular component=cytoplasm; Biological process=oxidation reduction
  Homolog annotation: Hit_ID=B9STI5; Match level="QueryCoverage=92%, HitCoverage=33%, E-value=4e-43, Identity=63%"; Hit description =Desacetoxyvindoline 4-hydroxylase, putative
  Pfam annotation: Domain name=2OG-FeII_Oxy; Domain location=16-115; Score=136.5; E_value=8.2e-38; Accession=PF03171.12; Description=2OG -Fe(II) oxygenase superfamily
AQEPRTAPRTDIECNQGQIILAHYYPPCPQPELAIGTSRHSDSGFLTILLQDEIGGLQILHKDRWVDVTPXPGAFIINIADLLQLISNDKFSSVEHRVVAKNAEPRVRSRXFFSTHFHPASTRMYGPIKELLSE

SEQ ID NO: 103932 - protein, 131 aa, Setaria italica
  Transcript Sequence Number=SeqID_37958
  Gene Ontology: Mol. function=bile acid:sodium symporter activity; Cellular component=integral to membrane; Biological process=organic anion transport
  Homolog annotation: Hit_ID=O81017; Match level="QueryCoverage=73%, HitCoverage=28%, E-value=9e-39, Identity=80%"; Hit description =Putative Na+ dependent ileal bile acid transporter
HRIIIILNCHINYWNKQTSYLDHPRVHKTLLPTVLGVLAHEYFPKFTERIITVAPLFGVLLTTLLCASPIGQVAEVLKTQGAQLIIPVALLHVAAFALGYWLSRFSSFGESTSRTISIECGMQKEQQRADL

SEQ ID NO: 103933 - protein, 212 aa, Setaria italica
  Transcript Sequence Number=SeqID_37959
  Gene Ontology: Mol. function=bile acid:sodium symporter activity; Cellular component=integral to membrane; Biological process=organic anion transport
  Homolog annotation: Hit_ID=B9ILH4; Match level="QueryCoverage=100%, HitCoverage=60%, E-value=8e-91, Identity=79%"; Hit description=Bile acid:Na+ symporter family protein (Fragment)
  Pfam annotation: Domain name=SBF; Domain location=1-111; Score=26.4; E_value=5.7e-06; Accession=PF01758.8; Description=Sodium Bile acid symporter family
CPGGQASNVATYISKGNVALSVLMTTCSTIGAIIMTPLLTKLLAGQLVPVDAAGLAISTFQVVLLPTVLGVLAHEYFPKFTERIITVAPLFGVLLTTLLCASPIGQVAEVLKTQGAQLIIPVALLHVAAFALGYWLSRFSSFGESTSRTISIECGMQSSALGFLLAQKHFTNPLVAVPSAVSVVAMALGGSALAVFWRSIGLPANDKDDFKE

SEQ ID NO: 103934 - protein, 220 aa, Setaria italica
  misc_feature (128)..(128): Xaa can be any naturally occurring amino acid
  Transcript Sequence Number=SeqID_37960
  Gene Ontology: Mol. function=transition metal ion binding; Cellular component=chloroplast; Biological process=chlorophyll biosynthetic process
  Homolog annotation: Hit_ID=Q17UU7; Match level="QueryCoverage=85%, HitCoverage=45%, E-value=1e-102, Identity=95%"; Hit description =Putative desaturase-like protein
  Pfam annotation: Domain name=Rubrerythrin; Domain location=9-144; Score=179.1; E_value=1.3e-50; Accession=PF02915.9; Description =Rubrerythrin
GPLRQIFVEFLERSCTAEFSGFLLYKELGRRLKKTNPVVAEIFSLMSRDEARHAGFLNKGLSDFNLALDLGFLTKARKYTFFKPKFIFYATYLSEKIGYWRYITIFRHLKANPEYQVYPIFKYFENWXQGIEETRHGDFFSALLKAQPQFLNDWKAKLWSRFFCLSVYVTMYLNDCQRTAFYEGIGLLCVDEKVSDLLVESPSKCTNKTRKAFGRCSQTK

SEQ ID NO: 103935 - protein, 120 aa, Setaria italica
  misc_feature (66)..(66): Xaa can be any naturally occurring amino acid
  Transcript Sequence Number=SeqID_37961
  Gene Ontology: Mol. function=bile acid:sodium symporter activity; Cellular component=membrane; Biological process=sodium ion transport
  Homolog annotation: Hit_ID=B9RK15; Match level="QueryCoverage=82%, HitCoverage=20%, E-value=2e-21, Identity=50%"; Hit description =Sodium-bile acid cotransporter, putative
MPSLGLAVVTAPSATVTPALRRRQILCQAEANISNNLPEKLPAKVSQPAKVSQPAEVSQPAEVSQXEKIVELLTTLFPVWVIIGTVIGIYKPAMVTWLDTDLFTIGLGLLMLSSGANIDY

SEQ ID NO: 103936 - protein, 571 aa, Setaria italica
  Transcript Sequence Number=SeqID_37962
  Homolog annotation: Hit_ID=B9RWL2; Match level="QueryCoverage=93%, HitCoverage=81%, E-value=0.0, Identity=65%"; Hit description=Protein binding protein, putative
AAAEMLMAAGADWSLQNEQGWSALQEAICAREESLARVIVRHYQPLAWAKWCRRLPRVVAAMRRMRDFYMEITFHFESSVIPFISRIAPSDTYRVWKRGANLRADMTLAGFDGFKIQRSDQTILFLGEGSEDGKVPPGSLLMINHKDKEIMNALEGAGAPASEAEVQQEVTAMSQTNIFRPGIDVTQAVLLPQLTWRRQERAEAVGPWKAKVYDMHHVVVSVKSRRVPGAMTDEEFFSACNDNDTESEGFDDVLTEEEKKQLEAALKMESPDAGSEDQSDSFAGPRHSCFEPREREIPIEDISVSGNGESKHDKKGWFSNWGKRSQVSKPEGMKKMAPPRSSLCVDEKVSDLLVESPSNVQTRPGRHSVDVVRPNDNRRIRERDNRRHAAFAENEHRRKEGSKESEYKKGLRPVLWLSPNFPLRTEELLPLLDILANKVKAIRRLRDLLTTKLPPGTFPVKVAIPVVPTIRVLVTFTKFEELQPLEEFTTPPSSPDNSKSPAVQPSSSSWIQWIKAPYRQNFSTAPGPSSRVEDIQDPFAIPSDYVWTTPEEKKKKTQENKNKSKKGRNGS

SEQ ID NO: 103937 - protein, 241 aa, Setaria italica
  Transcript Sequence Number=SeqID_37963
  Gene Ontology: Mol. function=oxidoreductase activity; Cellular component=cytoplasm; Biological process=oxidation reduction
  Homolog annotation: Hit_ID=Q8H1S4; Match level="QueryCoverage=100%, HitCoverage=66%, E-value=2e-46, Identity=42%"; Hit description=1 -aminocyclopropane-1-carboxylate oxidase homolog 4
MSIAPAAYDRTAELRALDATLAGVRGLVASGATDVPRIFRLPDPEEEEHQQAPQERPSATVPMIDLGGDRAAVVDAVGRAAAEWGFFQVTGHGVPKEAMTAAVAAVRAFHDADGGEGSDKARFYSREPGKAVKYHCNFDLYQSPVANWRDTLYLRMAPDPPAADELPESCRDALFEYAKQVKNLGDRLFEVLSEALGLKPSYLTDIECNQGQIILAHYYPPCPQPELAIGTSRHSDSGFLT

SEQ ID NO: 103938 - protein, 416 aa, Setaria italica
  misc_feature (208)..(208): Xaa can be any naturally occurring amino acid
  misc_feature (230)..(230): Xaa can be any naturally occurring amino acid
  misc_feature (282)..(282): Xaa can be any naturally occurring amino acid
  Transcript Sequence Number=SeqID_37964
  Gene Ontology: Mol. function=transition metal ion binding; Cellular component=chloroplast; Biological process=chlorophyll biosynthetic process
  Homolog annotation: Hit_ID=Q17UU7; Match level="QueryCoverage=85%, HitCoverage=87%, E-value=0.0, Identity=90%"; Hit description =Putative desaturase-like protein
  Pfam annotation: Domain name=Rubrerythrin; Domain location=139-272; Score=194.1; E_value=3.9e-55; Accession=PF02915.9; Description =Rubrerythrin
  Subcellular localization annotation: CTP_CleavageSite=43; ConfidenceScore=5.59e-01
MASAAMELSLLNPAAMHHHRGVSAKTSAGLPLARRSVVRFRVSASAATPAAPPKASGPKKRGKTEIQETLLTPRFYTTDFDEMERLFNAEINKQLNQAEFDALLQEFKTDYNQTHFVRNPEFKAAADKMDGPLRQIFVEFLERSCTAEFSGFLLYKELGRRLKKTNPVVAEIFSLMSRDEARHAGFLNKGLSDFNLALDLGFLTKARXYTFFKPKFIFYATYLSEKIGYXRYITIFRHLKANPEYQVYPIFKYFENWCQDENRHGDFFSALLKAQPQFLNDXGKDQRLWSRFFCLSVYVTMYLNDCQRTAFYEGIGLDTKEFDMHVIIETNRTTARIFPAVLDVENPEFKRKLDRMVEINQKIIAIGESDEMPLVKNLKRIPLVAALVSEIIAAYLMPPIESGSVDFAEFEPQLVY

SEQ ID NO: 103939 - protein, 401 aa, Setaria italica
  misc_feature (113)..(113): Xaa can be any naturally occurring amino acid
  misc_feature (134)..(134): Xaa can be any naturally occurring amino acid
  misc_feature (291)..(291): Xaa can be any naturally occurring amino acid
  misc_feature (324)..(324): Xaa can be any naturally occurring amino acid
  Transcript Sequence Number=SeqID_37965
  Gene Ontology: Mol. function=transition metal ion binding; Cellular component=chloroplast; Biological process=chlorophyll biosynthetic process
  Homolog annotation: Hit_ID=Q17UU7; Match level="QueryCoverage=89%, HitCoverage=88%, E-value=0.0, Identity=91%"; Hit description =Putative desaturase-like protein
  Pfam annotation: Domain name=Rubrerythrin; Domain location=122-256; Score=189.2; E_value=1.1e-53; Accession=PF02915.9; Description =Rubrerythrin
  Subcellular localization annotation: CTP_CleavageSite=25; ConfidenceScore=5.24e-01
RGCSVLSTSAGLPLARRSVVRFRVSASAATPAAPPQGLGAPKKRGKTEIQETLLTPRFYTTDFDEMERLFNAEINKQLNQAEFDALLQEFKTDYNQTHFVRNPEFKAAADKMXGPLRQIFVEFLERSCTAEFSXGFLLYKELGRRLKKTNPVVAEIFSLMSRDEARHAGFLNKGLSDFNLALDLGFLTKARKYTFFKPKFIFYATYLSEKIGYWRYITIFRHLKANPEYQVYPIFKYFENWCQDENRHGDFFSALLKAQPQFLNDWKAKLWSRFFCLSVYVTMYLNDCQRXTCLFYEGIGLDTKEFDMHVIIETNRTTARIFPXAVLDVENPEFKRKLDRMVEINQKIIAIGESDEMPLVKNLKRIPLVAALVSEIIAAYLMPPIESGSVDFAEFEPQLVY

SEQ ID NO: 103940 - protein, 146 aa, Setaria italica
  misc_feature (37)..(37): Xaa can be any naturally occurring amino acid
  Transcript Sequence Number=SeqID_37966
  Gene Ontology: Mol. function=voltage-gated potassium channel activity; Cellular component=integral to membrane; Biological process=potassium ion transport
  Homolog annotation: Hit_ID=Q69KL7; Match level="QueryCoverage=97%, HitCoverage=20%, E-value=7e-60, Identity=77%"; Hit description =Putative cyclic nucleotide and calmodulin-regulated ion channel
GKDRRIAIIVTVFRSIVDLFYAIQIIIKFRTAYINPXSKLGVFGRGDLITDHKEIAKQYLRSDFAVDLVASLPLPQIIIWSVIPAIKYSSSEHGNDMLLLVALFQYILRLYLMISLNNKIVKITGVFAKTAWQGAAYNLLLYIDLS

SEQ ID NO: 103941 - protein, 97 aa, Setaria italica
  Transcript Sequence Number=SeqID_37967
TLKNVKGTNRNKREVVTKGRRLLRRYFADRYLELGPMEISGLITGLGHYGREFGSRPDLTYYTLSSGVSGLKILCGLPEQFGFCWRLRSGPSKLLLF

SEQ ID NO: 103942 - protein, 89 aa, Setaria italica
  Transcript Sequence Number=SeqID_37968
  Subcellular localization annotation: CTP_CleavageSite=61; ConfidenceScore=5.53e-01
MGTDSPSPSTAPVALGARSAVRAVAQHHQAVVGFLVGFFLVLLLYTTVSSQFGSQAAIGVLQSVRTDENAMTPTSPSSMPSNVTQGELQ

SEQ ID NO: 103943 - protein, 90 aa, Setaria italica
  Transcript Sequence Number=SeqID_37969
  Subcellular localization annotation: CTP_CleavageSite=27; ConfidenceScore=5.34e-01
HFFILKPCPSADDQTTNITNSSFAGVLQSVRTDENAMTPTSPSSMPSNVTQGDNMKEENKGQKIDEHKKMEEDRVQHDVHGIEKSNQTEA

SEQ ID NO: 103944 - protein, 159 aa, Setaria italica
  Transcript Sequence Number=SeqID_37970
  Gene Ontology: Mol. function=zinc ion binding; Cellular component =intracellular
IGFNKDEIGKFWDKLNNKDACIITSIMDMRIQDIHGDLLCELIEQTAPEDIFYGIANKLKDTLAGKEKISSSELFALLDEGSERTAFSTDIRHLPKKVLSCEMGVLALKETSNVIACWCFFLEKRLIDDWSNYMDAESTKFANLLLDGDKDSRFHICAP

SEQ ID NO: 103945 - protein, 690 aa, Setaria italica
  misc_feature (17)..(17): Xaa can be any naturally occurring amino acid
  Transcript Sequence Number=SeqID_37971
  Gene Ontology: Mol. function=metal ion binding; Cellular component =nucleus; Biological process=regulation of transcription, DNA -dependent
  Homolog annotation: Hit_ID=A8BCW8; Match level="QueryCoverage=97%, HitCoverage=96%, E-value=0.0, Identity=75%"; Hit description =Vernalization insensitive 3
  Pfam annotation: Domain name=fn3; Domain location=330-418; Score =22.9; E_value=0.00094; Accession=PF00041.13; Description=Fibronectin type III domain
IPVLAVLTNVSNAASAXPEENTPAGDSNTSSESAQDLLSSFREQESNDASDNIEKKEPGISKCKSVEEIPRTVTVKRCKNIDSKKVFSNNNNNSSFTGSHTQKKQPRKGDHLVRPCENGISQDTKPPTTRICINSACKAVMNSDDEFCKRCSCCICHVFDDNKDPSLWLVCSSETGDRDCCGLSCHIECALQNRKAGCIELGQSIQLDGNYCCAACGKVIGILGFWKRQLVVAKDARRVDILCSRIYLSHRLLDGTTRFKDLHQIVEDAKAMLETEVGPLDGTSSRMARGIVGRLPVAADVQKLCSLAIEKADEWLRSNSPSETKQIDTLPAACRFKIEDITASSVVLVLKEAVSSQYHAINGYKLWYWNSREPPYTGEPAVFPKDQRRILISNLQPCTQYSFRIISFTEDGELGHSEHKIFTKSVEIIRKNKENGAEGWSSSAKRAGKSQNGMSSGFQVRQLGNVLRKADENGYPSALCKDEIEDSCDLSDSVILEKDQVPCCASRKIDLNETSVPDLNAEVVMPTECCRDENGCSSGKNTLTKSNGCGDSETFAEGHVGEAPVMESQSQSRKQTSDLEQETCANDSNLAAASARLFSRRLGQLDDNYEYCVKVIRWLECSGHIEKDFRMKFLTWFSLRSTEQERRVVITFIRTLLDDPSSLAGQLLDSFQEIVASKKPRTGFCTKLWH

SEQ ID NO: 103946 - protein, 220 aa, Setaria italica
  Transcript Sequence Number=SeqID_37972
  Gene Ontology: Mol. function=microtubule motor activity; Cellular component=microtubule associated complex; Biological process =microtubule-based movement
  Homolog annotation: Hit_ID=Q93XF4; Match level="QueryCoverage=90%, HitCoverage=24%, E-value=1e-83, Identity=78%"; Hit description =Kinesin heavy chain (Fragment)
  Pfam annotation: Domain name=Kinesin-related; Domain location=3-220; Score=142.4; E_value=1.4e-39; Accession=PF06548.3; Description =Kinesin-related
LINIGRGSEDVPDSNGVKPAEELTSKIDEQCGDSKVSSLNPNEKEALLAEIESLREQLKHQTNVSTNGSLLDQIRNGSTDQEYELDKERQKWMESESKWISLTEELRVDLESNRMHAEKTEMELCNEKKCTAELDDALQRAMYGHARMVEHYVELQELYNDLLEKHRRVMEAISEVKRAAAKAGRKGCGTAFAAALAAELSTVRIDREKERAQLKEQNRR

SEQ ID NO: 103947 - protein, 175 aa, Setaria italica
  misc_feature (10)..(10): Xaa can be any naturally occurring amino acid
  Transcript Sequence Number=SeqID_37973
SRARAAPPQXTHATRRHGTGACDGVPWPRPTATPSITVARAAKWGSEEGLVAPHPGHHSRTWPARVQSGSHVERQMRGKATGRAIQAARACTSRVASAACRAAGAAGGPGKKGMAPGCAHHHAWWLGAGVDVMEPSTSSGHVTPPHSPESPPPCPRGDPHTARRRPKRRQARHRI

SEQ ID NO: 103948 - protein, 151 aa, Setaria italica
  misc_feature (26)..(26): Xaa can be any naturally occurring amino acid
  Transcript Sequence Number=SeqID_37974
  Gene Ontology: Mol. function=metal ion binding; Cellular component =cell wall; Biological process=cell redox homeostasis
  Homolog annotation: Hit_ID=B9S3G9; Match level="QueryCoverage=84%, HitCoverage=39%, E-value=9e-38, Identity=61%"; Hit description=Zinc finger protein, putative
DLRLRRARRGGASGGAGADSRASPFXPVIVLRRSPAGDADAADAAAAASSFELFYDDGAGSGLRPLPESMSDFLMGSGFERLLDQLAQIEAGGLARARDNPPASKAAVESMPVVAVDAARVAAESHCAVCKEPFELGAEAREMPCAHIYHA

SEQ ID NO: 103949 - protein, 191 aa, Setaria italica
  Transcript Sequence Number=SeqID_37975
  Gene Ontology: Mol. function=nucleic acid binding; Cellular component= ribonucleoprotein complex
GFGFVTFDSEEAVGKVMRESFHTLNGTKVEAKIAIPKDEQYYRNGRGRGPRPFGGRGPAGYEGSAYQPYNARYGLYNGYMPQPVPAQPYFPAPYFAVGGYHYGSGYPSQGVMANVPGMMPRRPPAYGTYPQMYPGLNFVYRAGYGGAATSFQHGINGGSDNKKDQMNVDMQQVDSTASVATMLEHMKLGSQ

SEQ ID NO: 103950 - protein, 33 aa, Setaria italica
  Transcript Sequence Number=SeqID_37976
FHAEKDQMNVDMQQVDSTASVATMLEHMKLGSQ

SEQ ID NO: 103951 - protein, 64 aa, Setaria italica
  Transcript Sequence Number=SeqID_37977
  Subcellular localization annotation: CTP_CleavageSite=48; ConfidenceScore=5.26e-01
VYIKVIRFSFPACTTISIKKSNAGLRPMTMLAKNKLNSQLGSTILFVLCMLKKTVVRIGTNQAL

SEQ ID NO: 103952 - protein, 58 aa, Setaria italica
  Transcript Sequence Number=SeqID_37978
SLFNTVQVKGARDGTQQEPPIKTTNKGKKVLAIVIVLLIVTMKYRINLSSNKKLSYKI

SEQ ID NO: 103953 - protein, 124 aa, Setaria italica
  Transcript Sequence Number=SeqID_37979
  Subcellular localization annotation: CTP_CleavageSite=60; ConfidenceScore=5.67e-01
AQAQATVPAARVLTTAVPGGRRGGAGGGGGSRRRPRRRRGPWVPLLPQSSLCSSILLSLTLNAGRSQRCYSVRTSPTHGVGEEEEQHPAAQLPCTPIHFPHSTARRAAPCSWSGCRHGRRTAAA

SEQ ID NO: 103954 - protein, 159 aa, Setaria italica
  Transcript Sequence Number=SeqID_37980
GPDDGGAWRSTRRSRWWRWESPSTSPPPWPRCYSVRTSPTHGVGEEEEQHPAAQLPCTPIYFPHSTARRAAPLQLEWLSTWKTHSSCLRKCLQESKVVGWQLYQNPRITTSVVWSCLLYFRALENMDELADCSILHSACMRDCDLDSIYFCQLMLFHCT

SEQ ID NO: 103955 - protein, 140 aa, Setaria italica
  Transcript Sequence Number=SeqID_37981
  Homolog annotation: Hit_ID=B6SV79; Match level="QueryCoverage=97%, HitCoverage=21%, E-value=4e-33, Identity=59%"; Hit description =Polygalacturonase-1 non-catalytic beta subunit
TRTAGARFKGYSNANFSNYGSGGDGGADSFRSYSPDLNIAADSFRRYARDSSDRADRFESYEADGNVVTANFTSYAGGSTGGSGTFASYAAETNVPDSTFTNYDAAANGRGRGFASYAQEANHGENGFSGYGKNGNGVAS

SEQ ID NO: 103956 - protein, 193 aa, Setaria italica
  Transcript Sequence Number=SeqID_37982
  Gene Ontology: Mol. function=transporter activity; Cellular component= integral to membrane; Biological process=transport
  Homolog annotation: Hit_ID=B6SW90; Match level="QueryCoverage=89%, HitCoverage=51%, E-value=4e-62, Identity=72%"; Hit description =Synaptic vesicle 2-related protein
TGGRPGDCSWDYISDKYGRRTALLFSIILTTGAGFLSALSPNYISLLVFRFLVGIGVGGNHVFSSWFLEFVPAKSRGTWMIVFSVFWTIGTIFEASLAWVVLTRLSWRWLLAFTALPCFLLLLLFVFAPESPRYLCVQNRISDATLVLERMAKANKVALPPGVLTYHKETQLGDHDPLTSQNGHLPVRENDST

SEQ ID NO: 103957 - protein, 93 aa, Setaria italica
  Transcript Sequence Number=SeqID_37983
GNKGRNKCYAHIGVRTVSHACAGVCGLPYPWAVAYPQVADQLVLHAYTTSRLSQLQFPSKEAISAPLHTRRASSLHPLLLSVLLHHHHRARPP

SEQ ID NO: 103958 - protein, 68 aa, Setaria italica
  Transcript Sequence Number=SeqID_37984
KASHYARSWTNLTRTSTYRNTPTPLSKEKLQETLSEAPQSKAKKRPTTKYSCYNKILGELGKTIAYKK

SEQ ID NO: 103959 - protein, 177 aa, Setaria italica
  Transcript Sequence Number=SeqID_37985
  Gene Ontology: Mol. function=protein transporter activity; Cellular component=nuclear pore; Biological process=protein import into nucleus, docking
  Homolog annotation: Hit_ID=Q10GR1; Match level="QueryCoverage=97%, HitCoverage=16%, E-value=4e-74, Identity=80%"; Hit description =Importin-beta N-terminal domain containing protein, expressed
  Pfam annotation: Domain name=IBN_N; Domain location=29-93; Score =35.5; E_value=2.2e-07; Accession=PF03810.11; Description=Importin -beta N-terminal domain
MSSMESLAQLEVLCEKLYNSRDSAERAHAESTLKCFSENSEYISQCQYILDNASTPYALMLASSSLLKQVSDRSLSLQLRLDIRSYVINYLAARGPKLQNFVIVSLIQLVCRITKFGWFDDDRFRETVKEATDFLGLASQDHYFIGLKILNNLVMEMNQQNPAMPMTLHRKISTKTY

SEQ ID NO: 103960 - protein, 58 aa, Setaria italica
  Transcript Sequence Number=SeqID_37986
NSMNWIDSPPLGLQTNDLDISVEHLIMVKQLVPLYEEQLLQWDTEHSLFAVPFLSMRR

SEQ ID NO: 103961 - protein, 96 aa, Setaria italica
  misc_feature (44)..(44): Xaa can be any naturally occurring amino acid
  Transcript Sequence Number=SeqID_37987
  Gene Ontology: Mol. function=metal ion binding
  Homolog annotation: Hit_ID=Q7XE25; Match level="QueryCoverage=51%, HitCoverage=13%, E-value=5e-12, Identity=75%"; Hit description=Heavy metal-associated domain containing protein, expressed
EKKADKEKGGGEKKADKEKGGDKKAEKKEKGGDKPKEEKKPRNXKEETVTLKIRLHCEGCIDRIKRRIYKIKGVKDVVIDAAKDLVKVTGTMDAAA

SEQ ID NO: 103962 - protein, 309 aa, Setaria italica
  Transcript Sequence Number=SeqID_37988
  Gene Ontology: Mol. function=metal ion binding; Biological process =metal ion transport
  Homolog annotation: Hit_ID=B6TVS4; Match level="QueryCoverage=66%, HitCoverage=57%, E-value=1e-25, Identity=82%"; Hit description=Metal ion binding protein
  Pfam annotation: Domain name=HMA; Domain location=171-233; Score =23.8; E_value=0.00073; Accession=PF00403.18; Description=Heavy-metal- associated domain
  Pfam annotation: Domain name=HMA; Domain location=34-96; Score=56.3; E_value=1.1e-13; Accession=PF00403.18; Description=Heavy-metal -associated domain
  Pfam module annotation: Pfam domain module=HMA::HMA; Domain location =171-233::34-96
MGEEKKAAKDGAAGGGGDKKKDAAAAAPAGQQPIVLKVDLHCAGCAGKVRRAIKHAPGVESVVADMAAGKVTVTGPADAAELKERIEARAKKPVQIVSAGAGPPKKDKEKEKEKEKKADGGGEKKADKEKGGGEKKADKEKGGDKKAEKKEKGGDKPKEEKKPKEPKEETVTLKIRLHCEGCIDRIKRRIYKIKGVKDVVIDAAKDLVKVTGTMDAAALPGYLRDKLSRTVEVVAPGKKDGGDKKGDDKKDKADGGDKKKDGGGGGEEKKDKSAGAASASVAPMPMADAGMYQMPPHYGSYAPYPRPRG

SEQ ID NO: 103963 - protein, 283 aa, Setaria italica
  misc_feature (108)..(108): Xaa can be any naturally occurring amino acid
  Transcript Sequence Number=SeqID_37989
  Gene Ontology: Mol. function=metal ion binding; Biological process =metal ion transport
  Homolog annotation: Hit_ID=B6TVS4; Match level="QueryCoverage=53%, HitCoverage=54%, E-value=9e-18, Identity=84%"; Hit description=Metal ion binding protein
  Pfam annotation: Domain name=HMA; Domain location=6-60; Score=24.4; E_ value=0.00048; Accession=PF00403.18; Description=Heavy-metal -associated domain
EEGGQREGCGGKVRRAIKHAPGVESVVADMAAGKVTVTGPADAAELKERIEARAKKPVQIVSAGAGPPKKDKEKEKEKEKKADGGGEKKADKEKGGGEKKADKEKNIXLTCFVLVPGVKDVVIDAAKDLVKVTGTMDAAALPGYLRDKLSRTVEVVAPGKKDGGDKKGDDKKDKADGGDKKKDGGGGGEEKKDKSAGAASASVAPMPMADAGMYQMPPHYGSYAPYPPAPGGYYGAAPAPHPASFYPNAGVQYPPPPAYPYGGAHLHAPQMFSDENPNACSVM

SEQ ID NO: 103964 - protein, 495 aa, Setaria italica
  misc_feature (475)..(475): Xaa can be any naturally occurring amino acid
  Transcript Sequence Number=SeqID_37990
  Homolog annotation: Hit_ID=B6SH61; Match level="QueryCoverage=97%, HitCoverage=86%, E-value=0.0, Identity=70%"; Hit description=CDT1a protein
  Pfam annotation: Domain name=CDT1; Domain location=47-177; Score =185.2; E_value=1.8e-52; Accession=PF08839.3; Description=DNA replication factor CDT1 like
EQRKKVTKEQEFANLLGEDEDDTDDEGYNDSVSPDVCRSLISGSIELLEKHKDLLNLFNRMESSIRLLRLRKKMTTFNNIATQVEVLTKRTFSYSHLAQMKHLFPEAIQIKRILLHDEKSLCMYADMEITLVMDVVECTSPDQSPSMAICEAFYSKLLSFLDAHHKGTEIPEAILPGPFNSRSREKLYLEAPNGHATEPALQGTTEDGLLYASHFPQSFQKLMSQKIVADGTEKTQLLSDPAELSSVSAYVTEGINRSPKKQDTNAPVPVNYEISATPNRHLISCCPESTPKQGTSESPFLAGTPAMQTPKRPLLTPLGKLEATCGHISGPRSAGSARRSLKTSLKFEGGSLSYDDGMEHEATAKRNMFSEDSSSSNKSLEEKEPVSFTDKDKTNQDPVETQEKIASLRTTFDIVCDISRSTKNSLITKQELFHNILANNLEIEETGEIEEQLHILEGLAPDWISKKVINEGEIXYSIEPITDQNSVRARLVEPV

SEQ ID NO: 103965 - protein, 89 aa, Setaria italica
  Transcript Sequence Number=SeqID_37991
  Gene Ontology: Mol. function=oxidoreductase activity, acting on NADH or NADPH, quinone or similar compound as acceptor; Cellular component=integral to membrane; Biological process=ATP synthesis coupled electron transport
  Homolog annotation: Hit_ID=B9UKL1; Match level="QueryCoverage=100%, HitCoverage=17%, E-value=3e-45, Identity=100%"; Hit description=NADH dehydrogenase subunit F (Fragment)
YSTMSQLGYMMLALGIGSYEAALFHLITHAYSKALLFLGSGSVIHSMEPLVGYSPDKSQNMVLMGGLRKYVPITRTTFLCGTLSLCGIP

SEQ ID NO: 103966 - protein, 53 aa, Setaria italica
  Transcript Sequence Number=SeqID_37992
YANVFFTTTKLEFLASIKMLKESTSNSNIGHYDSRESFEKYELHFLEKEIKCE

SEQ ID NO: 103967 - protein, 45 aa, Setaria italica
  Transcript Sequence Number=SeqID_37993
IALNIIRLSVRLHLQSNLSVVRSSIMSFKDVFNDLLKMVQHHVSN

SEQ ID NO: 103968 - protein, 880 aa, Setaria italica
  misc_feature (9)..(9): Xaa can be any naturally occurring amino acid
  Transcript Sequence Number=SeqID_37994
  Gene Ontology: Mol. function=DNA-directed RNA polymerase activity; Cellular component=DNA-directed RNA polymerase II, core complex; Biological process=transcription
  Homolog annotation: Hit_ID=C0JR65; Match level="QueryCoverage=100%, HitCoverage=60%, E-value=0.0, Identity=87%"; Hit description=DNA -directed RNA polymerase
  Pfam annotation: Domain name=RNA_pol_Rpb1_2; Domain location=1-98; Score=-18.5; E_value=2.5e-06; Accession=PF00623.12; Description=RNA polymerase Rpb1, domain 2
  Pfam annotation: Domain name=RNA_pol_Rpb1_3; Domain location=101-251; Score=73.5; E_value=7.8e-19; Accession=PF04983.10; Description=RNA polymerase Rpb1, domain 3
  Pfam annotation: Domain name=RNA_pol_Rpb1_4; Domain location=303-420; Score=22.5; E_value=7.3e-05; Accession=PF05000.9; Description=RNA polymerase Rpb1, domain 4
  Pfam annotation: Domain name=RNA_pol_Rpb1_5; Domain location=422-823; Score=-105.3; E_value=0.00022; Accession=PF04998.9; Description=RNA polymerase Rpb1, domain 5
  Pfam module annotation: Pfam domain module=RNA_pol_Rpb1_2::RNA_pol _Rpb1_3::RNA_pol_Rpb1_4::RNA_pol_Rpb1_5; Domain location=1-98::101 -251::303-420::422-823
IRRNGKLMXIRKANQLEVGDIAYRPLQDGDLILINRPPSVHQHSLIALSTKILPIQSVVSINPLCCMPFLGDFDGDCLHGYIPQSIRSRIELGELVSLHQQLLNMQDGRSLVSLTHDSLAAAHLLTSTDVFLKESELQQLQMLCLSVSTTPVPAIIKSMNFEGSLWTGKQFFSMLLPSGMNFSCDSKLHIIDSEVLTCSSGSSWLQNSTTGLFSIMFKQYGRKALDFLSSAQEVLCEFLTMRGLSVSLSDLYMFSDHYSRRKLTQGVKLALDEAEEAFRIKQILLDPINIPVLKCHDETEDVTYRQSDYIQSNLSVVRSSIMSFKDVFNDLLKMVQHHVSNDNSMMVMINAGSKGSMLKYVQQTACVGLQLPASKFPFRIPSQLSCVSWNRQKSLNCEAESTSEHVEGQNLYAVIRNSFIEGLNPLECLLHAISGRANFFSEHADVPGTLTRKLMYHLRDLHVAYDGTVRSSYGQHIMQFSYDTADDMCCNHDLVGELGAPVGSWAACSISEAAYGALDHPVNGLEDSPLMNLQEVFKCHKATNSGDHVGLLFLSKHLKKYRYSLEYASLEVKNHLERVNFSDLVETIMIIYDGCDKTRKGGPWTTHFHISKEMMKKKRLGLGFVVEELTKEYDATRNQLNNAIPSVHISKRKCSVGDQCVQNSACCITLVAQAESNSMSQLDTIKKRVIPSILDTLLKGFLEFKDVEIQCRHDGELLVKVGMSEHCKAGRFWATLQNACIPVMELIDWEQSQPKNVYDIFCSYGIDSAWKCFVESLKSVTSDIGRNVRREHLLIVADSLSVTGQFQALSSQGLNQQRSRLSISSPFSEACFSRPARSFINAAKHCSVDNLCGSLDAIAWGKEPFNGTSGPFEIMHAGKP

SEQ ID NO: 103969 - protein, 243 aa, Setaria italica
  misc_feature (12)..(12): Xaa can be any naturally occurring amino acid
  Transcript Sequence Number=SeqID_37995
  Gene Ontology: Mol. function=DNA-directed RNA polymerase activity; Biological process=transcription
  Homolog annotation: Hit_ID=C0JR65; Match level="QueryCoverage=99%, HitCoverage=16%, E-value=1e-117, Identity=83%"; Hit description=DNA -directed RNA polymerase
NEQRSRLSISSXFTEACFSRPARSFINAAKHCSVDNLCGSLDAIAWGKEPFNGTSGPFEIMHAGKPHEPEQNESIYDFLRSPEVRNFEKDHMDTCRQSTENALRCRLACKSKDSATVQGGAMTIDQGFLHAKVGIWDNIIDMRTSLQNMLREYPLNGFVKETDKSQLVEALKFHPNGAQKIGVGVREIKIGLNPSHPGTRCFILLRKDGTTEDFSYNKCVQGAANSISPQLGSYFEKKLHRRA

SEQ ID NO: 103970 - protein, 54 aa, Setaria italica
  misc_feature (40)..(40): Xaa can be any naturally occurring amino acid
  Transcript Sequence Number=SeqID_37996
  Gene Ontology: Mol. function=protein dimerization activity
  Homolog annotation: Hit_ID=B6SSW7; Match level="QueryCoverage=96%, HitCoverage=7%, E-value=2e-17, Identity=82%"; Hit description =Transposon protein
IAMDSTIKKVEEIPGPRDWVLSTTEKSVIDALHSYLEPFXKTTTNLCNCKLPTS

SEQ ID NO: 103971 - protein, 105 aa, Setaria italica
  Transcript Sequence Number=SeqID_37997
PCAADPDGELGDVRPAVVGAVDVGGPRDDHGPCDHHHAVPAVRVGALLERRAPGPVVPSGHMCAYPLARPVPFLFTHLGHGGACQSPLFLSFFSPLYSFFLCPFL

SEQ ID NO: 103972 - protein, 90 aa, Setaria italica
  Transcript Sequence Number=SeqID_37998
PLAMTPQGPQPAANGNGNGGGGGGGKKKGKKGGGHGNGNANGNAIANADGAGAGAGAIVEVHPPPDAPTKPGGGNSGPLTVVDAGPYPPP

SEQ ID NO: 103973 - protein, 109 aa, Setaria italica
  Transcript Sequence Number=SeqID_37999
  Gene Ontology: Mol. function=protein phosphatase inhibitor activity; Biological process=regulation of phosphoprotein phosphatase activity
  Homolog annotation: Hit_ID=B6SQN8; Match level="QueryCoverage=63%, HitCoverage=41%, E-value=1e-32, Identity=95%"; Hit description =Protein phosphatase inhibitor 2 containing protein
MLLVTIFCSSGRVKWNEDNLYEIESNKPVRQKITEPKTPYHPMIDDDGSLSPTRAFDKCLDETVQAEAILMALNGVASSSNSSSKDDGWASSDDETDAVEQEAETRNRG

SEQ ID NO: 103974 - protein, 165 aa, Setaria italica
  Transcript Sequence Number=SeqID_38000
  Gene Ontology: Mol. function=protein phosphatase inhibitor activity; Biological process=regulation of phosphoprotein phosphatase activity
  Homolog annotation: Hit_ID=B6SQN8; Match level="QueryCoverage=99%, HitCoverage=99%, E-value=5e-59, Identity=73%"; Hit description =Protein phosphatase inhibitor 2 containing protein
  Pfam annotation: Domain name=IPP-2; Domain location=7-137; Score= -34.8; E_value=0.0015; Accession=PF04979.6; Description=Protein phosphatase inhibitor 2 (IPP-2)
MSSGRVKWNEDNLYEIESNKPVRQKITEPKTPYHPMIDDDGSLSPTRAFDKCLDETVQAEAILMALNGVASSSNSSSKDDGWASSDDETDAVEQEDDPEADTSRLSFKEHRRAHYDEYRKVKELMRTGSLVEDEADENSRVDNSSEGKSVGKGAAVEDRKPSEEI

SEQ ID NO: 103975 - protein, 204 aa, Setaria italica
  misc_feature (32)..(32): Xaa can be any naturally occurring amino acid
  misc_feature (193)..(193): Xaa can be any naturally occurring amino acid
  Transcript Sequence Number=SeqID_38001
  Gene Ontology: Mol. function=protein serine/threonine kinase activity; Cellular component=plasma membrane; Biological process =protein amino acid phosphorylation
  Homolog annotation: Hit_ID=B6U2E7; Match level="QueryCoverage=78%, HitCoverage=25%, E-value=3e-83, Identity=95%"; Hit description=ATP binding protein
  Pfam annotation: Domain name=LRRNT_2; Domain location=43-83; Score =52.1; E_value=2.1e-12; Accession=PF08263.4; Description=Leucine rich repeat N-terminal domain
  Pfam annotation: Domain name=LRR_1; Domain location=112-134; Score =7.9; E_value=9.3; Accession=PF00560.25; Description=Leucine Rich Repeat
  Pfam annotation: Domain name=LRR_1; Domain location=136-158; Score =9.0; E_value=5.8; Accession=PF00560.25; Description=Leucine Rich Repeat
  Pfam annotation: Domain name=LRR_1; Domain location=160-182; Score =13.7; E_value=0.72; Accession=PF00560.25; Description=Leucine Rich Repeat
  Pfam annotation: Domain name=LRR_1; Domain location=184-203; Score =3.0; E_value=81; Accession=PF00560.25; Description=Leucine Rich Repeat
  Pfam annotation: Domain name=LRR_1; Domain location=88-110; Score =1.4; E_value=1.6e+02; Accession=PF00560.25; Description=Leucine Rich Repeat
  Pfam module annotation: Pfam domain module=LRRNT_2::LRR_1::LRR_1::LRR_ 1::LRR_1::LRR_1; Domain location=43-83::112-134::136-158::160 -182::184-203::88-110
MDKIGSRRRNKGRGRHGAAGLRAAAITILAAXSSSAPRPPWGLTPDGEALLELKLAFNATAQRLTSWRPSDPNPCGWEGISCSVPDLRVQSINLPYMQLGGIISPSIGRLDKLQRIALHQNSLHGPIPAEIKNCTELRAIYLRANYLQGGIPSEIGELVHLTILDLSSNLLRGTIPASIGSLTHLRFLNLSTXFFSGEIPNVVS

SEQ ID NO: 103976 - protein, 169 aa, Setaria italica
  misc_feature (35)..(35): Xaa can be any naturally occurring amino acid
  Transcript Sequence Number=SeqID_38002
  Gene Ontology: Mol. function=transferase activity, transferring groups other than amino-acyl groups; Cellular component=membrane; Biological process=fatty acid biosynthetic process
  Homolog annotation: Hit_ID=B6SYP9; Match level="QueryCoverage=98%, HitCoverage=35%, E-value=3e-71, Identity=73%"; Hit description =Acyltransferase
  Pfam annotation: Domain name=ACP_syn_III_C; Domain location=36-124; Score=34.7; E_value=4.2e-09; Accession=PF08541.2; Description=3 -Oxoacyl-[acyl-carrier-protein (ACP)
  Pfam annotation: Domain name=Chal_sti_synt_C; Domain location=1-126; Score=-14.2; E_value=0.032; Accession=PF02797.7; Description =Chalcone and stilbene synthases, C-te
  Pfam module annotation: Pfam domain module=ACP_syn_III_C::Chal_sti _synt_C; Domain location=36-124::1-126
LPVSELARFAARLLSWRLLHPSSGKKQGGAGEPPXINFKTGVDHFCLHPGGTAVIDAVKRSMGLDERDVEPSRMTLHRWGNTSASSVWYVLSYMEAKGWLKVGDRVLMVAFGSGFKCNSCVWEVTGDMADNGAWAHCIDSYPPETLVNPYMDKFGWVNDIQGQGGGFVF

SEQ ID NO: 103977 - protein, 460 aa, Setaria italica
  misc_feature (424)..(424): Xaa can be any naturally occurring amino acid
  Transcript Sequence Number=SeqID_38003
  Gene Ontology: Mol. function=transferase activity, transferring groups other than amino-acyl groups; Cellular component=membrane; Biological process=fatty acid biosynthetic process
  Homolog annotation: Hit_ID=B6SYP9; Match level="QueryCoverage=94%, HitCoverage=90%, E-value=1e-169, Identity=65%"; Hit description =Acyltransferase
  Pfam annotation: Domain name=ACP_syn_III_C; Domain location=329-417; Score=43.0; E_value=5.8e-10; Accession=PF08541.2; Description=3 -Oxoacyl-[acyl-carrier-protein (ACP)
  Pfam annotation: Domain name=Chal_sti_synt_C; Domain location=268 -418; Score=-7.8; E_value=0.0092; Accession=PF02797.7; Description =Chalcone and stilbene synthases, C-te
  Pfam annotation: Domain name=Chal_sti_synt_N; Domain location=19-231; Score=-76.2; E_value=0.013; Accession=PF00195.11; Description =Chalcone and stilbene synthases, N-te
  Pfam annotation: Domain name=FAE1_CUT1_RppA; Domain location=23-314; Score=576.1; E_value=3.9e-170; Accession=PF08392.4; Description =FAE1Type III polyketide synthase-like
  Pfam module annotation: Pfam domain module=ACP_syn_III_C::Chal_sti _synt_C::Chal_sti_synt_N::FAE1_CUT1_RppA; Domain location=329 -417::268-418::19-231::23-314
MELLALLTVLLLAHAAAYLAWQAVSRRRRSRCYLLDYACHKPSDDRKVTTETAGAVIERNKRLGLSEYRFLLKVIVNSGIGEHTYCPRNVLEGREETPTHADSLEEMDDFFADAVATVLSRTGVPARDVDLVVLNVGSFSPEPSLVSRLVRRFGMREDVMAYNLSGMGCSAGLIAVDLARNVMLTRPRTVALVVTSESCAPNWYVGTDKSMMLGNCLFRCGGAAALLTNDPALRHRAKMELRCLVRANIAAHDDAHAAAVHREDADGRLGVSLSKALPKAAVRAFTDNLQRLAPRILPARELARFASRLLLRKLLKKPKAAGAGEGPKIDFTTGVDHFCLHPGGTAVIEAVRKSLGLTAHHVEPARMTLHRWGNTSASSLWYVLSYMEAKRRLKRGDRVLMVTFGSGFKCNSCHWEVSGDIADXGPWESCIDSYPPERLANPYMDKFGWINDVEGDTLML

SEQ ID NO: 103978 - protein, 139 aa, Setaria italica
  Transcript Sequence Number=SeqID_38004
  Gene Ontology: Mol. function=protein tyrosine kinase activity; Cellular component=integral to membrane; Biological process=protein amino acid phosphorylation
  Homolog annotation: Hit_ID=Q10M75; Match level="QueryCoverage=98%, HitCoverage=13%, E-value=7e-62, Identity=86%"; Hit description =Leucine Rich Repeat family protein, expressed
  Pfam annotation: Domain name=LRR_1; Domain location=103-125; Score =9.1; E_value=5.6; Accession=PF00560.25; Description=Leucine Rich Repeat
  Pfam annotation: Domain name=LRR_1; Domain location=55-77; Score =14.9; E_value=0.34; Accession=PF00560.25; Description=Leucine Rich Repeat
  Pfam annotation: Domain name=LRR_1; Domain location=79-101; Score =21.6; E_value=0.0032; Accession=PF00560.25; Description=Leucine Rich Repeat
  Pfam module annotation: Pfam domain module=LRR_1::LRR_1::LRR_1; Domain location=103-125::55-77::79-101
ATATPWNPTSALDADGCPVDWHGVQCSGGQILSIALDGIGLVGNATLSALARMPMLRNLSLSNNKLEGFLPRELGSMASLQLLDLSNNRFSGSIPPELTKLAGLGHLNLSSNGFHGALPLGFRNLRKLKYLDLRGNGFT

SEQ ID NO: 103979 - protein, 151 aa, Setaria italica
  Transcript Sequence Number=SeqID_38005
MAAPSPSSAEAAPPLEAPAAADKEDEWDADGYVIPNLLTQDNDVTEPSIPEAKDPEPLQAKDEKIYLGPHGAPPSQVKQQELNNVGRKQRFRNKLKEADRKFTGNAQENKVESLRELMGARASGTSMPRSSPRDWLDPHCHESEFDRKPTR

SEQ ID NO: 103980 - protein, 88 aa, Setaria italica
  Transcript Sequence Number=SeqID_38006
  Gene Ontology: Mol. function=protein serine/threonine kinase activity; Biological process=protein amino acid phosphorylation
  Homolog annotation: Hit_ID=Q2QZV1; Match level="QueryCoverage=100%, HitCoverage=3%, E-value=1e-23, Identity=60%"; Hit description =Retrotransposon protein, putative, unclassified
MALVGQVATVAQLVGLDAYSLITMIADAARTVRRNRATCRQLARRVEMIGGLLRRLQDAHPMRAPETRAPVEELEETLRRAYLLVRSC

SEQ ID NO: 103981 - protein, 137 aa, Setaria italica
  Transcript Sequence Number=SeqID_38007
  Gene Ontology: Mol. function=DNA binding; Cellular component=nucleus; Biological process=regulation of transcription, DNA-dependent
  Homolog annotation: Hit_ID=Q9S7B2; Match level="QueryCoverage=100%, HitCoverage=37%, E-value=3e-60, Identity=84%"; Hit description =Protein rough sheath 2
  Pfam annotation: Domain name=Myb_DNA-binding; Domain location=4-53; Score=35.2; E_value=2.6e-07; Accession=PF00249.23; Description=Myb -like DNA-binding domain
  Pfam annotation: Domain name=Myb_DNA-binding; Domain location=59-104; Score=38.2; E_value=3.2e-08; Accession=PF00249.23; Description=Myb -like DNA-binding domain
  Pfam module annotation: Pfam domain module=Myb_DNA-binding::Myb_DNA -binding; Domain location=4-53::59-104
MKERQRWRPEEDAVLRAYVRQYGPREWHLVSQRMSVALDRDAKSCLERWKNYLRPGIKKGSLTDDEQRLVIRLQAKHGNKWKKIAAEVPGRTAKRLGKWWEVFKEKQQRELRDSRRPPPEPSPDERGRYEWLLENFA

SEQ ID NO: 103982 - protein, 239 aa, Setaria italica
  Transcript Sequence Number=SeqID_38008
  Gene Ontology: Mol. function=protein tyrosine kinase activity; Cellular component=plasma membrane; Biological process=protein amino acid phosphorylation
  Homolog annotation: Hit_ID=Q2QVC3; Match level="QueryCoverage=85%, HitCoverage=37%, E-value=6e-66, Identity=63%"; Hit description =Leucine Rich Repeat family protein
  Pfam annotation: Domain name=LRRNT_2; Domain location=21-62; Score =56.0; E_value=1.5e-13; Accession=PF08263.4; Description=Leucine rich repeat N-terminal domain
  Pfam annotation: Domain name=LRR_1; Domain location=102-124; Score =13.9; E_value=0.65; Accession=PF00560.25; Description=Leucine Rich Repeat
  Pfam annotation: Domain name=LRR_1; Domain location=126-148; Score =15.2; E_value=0.28; Accession=PF00560.25; Description=Leucine Rich Repeat
  Pfam annotation: Domain name=LRR_1; Domain location=150-172; Score =16.5; E_value=0.11; Accession=PF00560.25; Description=Leucine Rich Repeat
  Pfam annotation: Domain name=LRR_1; Domain location=174-197; Score =8.4; E_value=7.5; Accession=PF00560.25; Description=Leucine Rich Repeat
  Pfam annotation: Domain name=LRR_1; Domain location=199-221; Score =17.6; E_value=0.054; Accession=PF00560.25; Description=Leucine Rich Repeat
  Pfam module annotation: Pfam domain module=LRRNT_2::LRR_1::LRR_1::LRR_ 1::LRR_1::LRR_1; Domain location=21-62::102-124::126-148::150 -172::174-197::199-221
MTTILLLLLLLALPPPSAVALTAEGLALLAFKAAATDDPYSALSRWSESDTDPCRWPGITCANTTSSSSSASSPAQPHVVGVAVAGKNISGYIPSELGSLLFLRRLNLHGNRLSGAIPAALSNASSLHSLYLYGNRLTGGLPVALCDLPRLQNLDVSGNALSGELPLDLRNCRSLQRLVLARNAFAGELPAGVWPEMPSLQQLDLSSNAFNGSIPPDLGELPRLAGTLNLSHNRFSGVV

SEQ ID NO: 103983 - protein, 65 aa, Setaria italica
  Transcript Sequence Number=SeqID_38009
  Subcellular localization annotation: CTP_CleavageSite=21; ConfidenceScore=5.50e-01
QARDVRAPSPAPDRPLTACPRANRPPRRRTEPLPSPARNAPTQRRRPEPAGGALAPSPGSRILSK

SEQ ID NO: 103984 - protein, 104 aa, Setaria italica
  Transcript Sequence Number=SeqID_38010
  Gene Ontology: Mol. function=sequence-specific DNA binding; Cellular component=nucleus; Biological process=regulation of transcription, DNA-dependent
  Homolog annotation: Hit_ID=Q6TAQ6; Match level="QueryCoverage=100%, HitCoverage=12%, E-value=8e-39, Identity=77%"; Hit description =Homeobox-leucine zipper protein HOX10
  Pfam annotation: Domain name=Homeobox; Domain location=28-86; Score =64.6; E_value=3.8e-16; Accession=PF00046.21; Description=Homeobox domain
MAAAVAMRSGSSDGGGGGYDKGGMDTGKYVRYTQEQVEALERVYAECPKPSSSRRQQLLRECPILSNIEPKQIKVWFQNRRCRDKQRKESSRLQAVNRKLTAMN

SEQ ID NO: 103985 - protein, 144 aa, Setaria italica
  Transcript Sequence Number=SeqID_38011
  Gene Ontology: Mol. function=receptor activity; Cellular component =membrane; Biological process=intracellular protein transport
  Homolog annotation: Hit_ID=B9SI82; Match level="QueryCoverage=94%, HitCoverage=59%, E-value=2e-42, Identity=62%"; Hit description =Membrin, putative
  Pfam annotation: Domain name=Sec20; Domain location=53-142; Score= -10.0; E_value=0.057; Accession=PF03908.5; Description=Sec20
  Pfam annotation: Domain name=V-SNARE; Domain location=4-121; Score =59.3; E_value=1.4e-14; Accession=PF05008.7; Description=Vesicle transport v-SNARE protein
  Pfam module annotation: Pfam domain module=Sec20::V-SNARE; Domain location=53-142::4-121
RKVEQLSEEVDSLKETLDRHTLRQKKRILEAKERAELFERANGESSHVLRIFDDEAQAMQSARSSSRMLEEAYETGVAILHKYADQRDRLKSAQRKALDVLNTVGLSNSVLKLIERRHRVDKWIAYAGMIITVVVMIAFWRLTH

SEQ ID NO: 103986 - protein, 81 aa, Setaria italica
  Transcript Sequence Number=SeqID_38012
  Subcellular localization annotation: CTP_CleavageSite=56; ConfidenceScore=5.38e-01
MSSGGGSDKSGSGGGGAVKTPSDFLKSIRGRPVVVKLNSGVDYRGHLPPPAPFPPLSSHLQAILQTLHREAQSCLFNSIRS

SEQ ID NO: 103987 - protein, 97 aa, Setaria italica
  Transcript Sequence Number=SeqID_38013
  Gene Ontology: Mol. function=protein binding; Cellular component =small nuclear ribonucleoprotein complex; Biological process =embryonic development ending in birth or egg hatching
  Homolog annotation: Hit_ID=Q8LCS5; Match level="QueryCoverage=81%, HitCoverage=86%, E-value=8e-35, Identity=87%"; Hit description=U6 snRNA-associated Sm-like protein
  Pfam annotation: Domain name=LSM; Domain location=23-88; Score=79.4; E_value=1.3e-20; Accession=PF01423.14; Description=LSM domain
MSTGGADKPGSGGAGGAVKTPSDFLKSIRGRPVVVKLNSGVDYRGILACLDGYMNIAMEQTEEYVNGQLKNKYGDAFIRGNNVLYISTTKRTLSNGA

SEQ ID NO: 103988 - protein, 114 aa, Setaria italica
  Transcript Sequence Number=SeqID_38014
  Gene Ontology: Mol. function=protein binding; Cellular component =small nuclear ribonucleoprotein complex; Biological process =embryonic development ending in birth or egg hatching
  Homolog annotation: Hit_ID=Q8LCS5; Match level="QueryCoverage=69%, HitCoverage=86%, E-value=7e-35, Identity=87%"; Hit description=U6 snRNA-associated Sm-like protein
  Pfam annotation: Domain name=LSM; Domain location=40-105; Score=79.4; E_value=1.3e-20; Accession=PF01423.14; Description=LSM domain
  Subcellular localization annotation: CTP_CleavageSite=51; ConfidenceScore=5.07e-01
RPRSANAGTEGGTQARKMSSGGGSDKSGSGGGGAVKTPSDFLKSIRGRPVVVKLNSGVDYRGILACLDGYMNIAMEQTEEYVNGQLKNKYGDAFIRGNNVLYISTSKRTLTDGS

SEQ ID NO: 103989 - protein, 61 aa, Setaria italica
  Transcript Sequence Number=SeqID_38015
TFHQHLALGNVTKSCGQLNLCQIAKHLMIEKGITTEELLQCNMLWVSPNNRYVLSSTNVKF

SEQ ID NO: 103990 - protein, 129 aa, Setaria italica
  misc_feature (22)..(22): Xaa can be any naturally occurring amino acid
  Transcript Sequence Number=SeqID_38016
  Homolog annotation: Hit_ID=Q9FXF7; Match level="QueryCoverage=99%, HitCoverage=23%, E-value=4e-27, Identity=51%"; Hit description =F1N18.14 protein
LQDRSLRVTHNLAIFGGGGMVXLSIITGLFGINVDGIPGAQNTPYAFGLFTGLLFFLGIVLVVVGMLYLGLQNPVSSEKVKVRKLELQQLVSMFQHEAEQHGKVREGLSRHGLSPRSSADSDEGYILIS

SEQ ID NO: 103991 - protein, 98 aa, Setaria italica
  Transcript Sequence Number=SeqID_38017
  Gene Ontology: Mol. function=aspartic-type endopeptidase activity; Biological process=proteolysis
  Homolog annotation: Hit_ID=B9RGP5; Match level="QueryCoverage=92%, HitCoverage=21%, E-value=3e-17, Identity=48%"; Hit description =Aspartic proteinase nepenthesin-1, putative
  Subcellular localization annotation: CTP_CleavageSite=45; ConfidenceScore=5.03e-01
TDTLALGGAARIDGFVFGCGLSNRGLFGGTAGLMGLGRTELSLVSQTASRYGGVFSYCLPASTSGDASGSLSLGGGGGASPSYRNTTLVAYTRMIADP

SEQ ID NO: 103992 - protein, 104 aa, Setaria italica
  Transcript Sequence Number=SeqID_38018
MPQVQNDNGFPHVQQQSNFVARHGQTAVGTAEGESKFGGSYGQPRNDNSKGPPRFGAQTDHHYSTGYRASYGTQGFNGPRGEYETASKDQLDPTSSEDRQQVAF

SEQ ID NO: 103993 - protein, 280 aa, Setaria italica
  Transcript Sequence Number=SeqID_38019
  Gene Ontology: Mol. function=actin binding; Cellular component =cytoskeleton; Biological process=actin filament bundle formation
  Homolog annotation: Hit_ID=B9RQ50; Match level="QueryCoverage=87%, HitCoverage=70%, E-value=1e-112, Identity=52%"; Hit description =Fimbrin, putative
  Pfam annotation: Domain name=CH; Domain location=187-280; Score=62.9; E_value=1.2e-15; Accession=PF00307.23; Description=Calponin homology (CH) domain
  Pfam annotation: Domain name=CH; Domain location=42-158; Score=105.0; E_value=2.5e-28; Accession=PF00307.23; Description=Calponin homology (CH) domain
  Pfam module annotation: Pfam domain module=CH::CH; Domain location =187-280::42-158
  Subcellular localization annotation: CTP_CleavageSite=40; ConfidenceScore=5.26e-01
YLNLQARVSAKVGGGAGGGGGKTSSSFLKSSTTTLLHNLNQAEKSSYVAHINTYLREDPFLRKYLPIDPSGNQLFDLIRDGVLLCKLINVAVPGTIDERAINKKRVLNPWERNENHTLCLNSAKAIGCTVVNIGTQDLVEGRPHLVLGLISQIIKIQLLADLNLKKTPQLVELFDDSKDIDEVLSLSPEKMLLRWMNHHLKKAGYKKTVNNFSSDVKDGEAYAYLLKALAPEHSPETTLDTKDPDERAKLVLEQAEKLDCKRYLTPKDITEGSANLNLAF

SEQ ID NO: 103994 - protein, 60 aa, Setaria italica
  Transcript Sequence Number=SeqID_38020
VTPCCPLFGESLYKLFMDPDVYVFPFHFLGVMYCISTFVVYTSYLTSFDDVILCVCLLPN

SEQ ID NO: 103995 - protein, 170 aa, Setaria italica
  Transcript Sequence Number=SeqID_38021
  Subcellular localization annotation: CTP_CleavageSite=55; ConfidenceScore=5.33e-01
LLRQVSRFRSTPHLGAPCVGRCGRSCLARQRRRRCAGSFSPIPHLKSGRPLPAIRRQPVKGEGEPTAAAAAEGARRSFAAGGENVASRRSPAPCPLAPLTLQRQEALPGAARCLLQRWPPSPSTSAALPSTSAKRRCALVPAGRPPCLQVSGCNVQCKRATPCAFYCEKR

SEQ ID NO: 103996 - protein, 213 aa, Setaria italica
  misc_feature (3)..(3): Xaa can be any naturally occurring amino acid
  misc_feature (175)..(175): Xaa can be any naturally occurring amino acid
  misc_feature (181)..(181): Xaa can be any naturally occurring amino acid
  Transcript Sequence Number=SeqID_38022
  Gene Ontology: Mol. function=protein serine/threonine kinase activity; Cellular component=ubiquitin ligase complex; Biological process=protein amino acid phosphorylation
  Homolog annotation: Hit_ID=Q43468; Match level="QueryCoverage=54%, HitCoverage=20%, E-value=5e-35, Identity=59%"; Hit description=Heat shock protein STI
  Pfam annotation: Domain name=TPR_1; Domain location=20-53; Score =27.5; E_value=5.5e-05; Accession=PF00515.20; Description =Tetratricopeptide repeat
  Pfam annotation: Domain name=TPR_1; Domain location=54-87; Score =23.5; E_value=0.00089; Accession=PF00515.20; Description =Tetratricopeptide repeat
  Pfam annotation: Domain name=TPR_2; Domain location=20-53; Score =24.2; E_value=0.00053; Accession=PF07719.9; Description =Tetratricopeptide repeat
  Pfam annotation: Domain name=TPR_2; Domain location=54-87; Score =18.4; E_value=0.03; Accession=PF07719.9; Description=Tetratricopeptid e repeat
  Pfam module annotation: Pfam domain module=TPR_1::TPR_1::TPR_2::TPR _2; Domain location=20-53::54-87::20-53::54-87
KYXEAAMHYTRAMKMNPKETRAFSNRAQCHIYLGDFPHGLEDAEKCVELDPTFLKGYLRKAKAQFLMESYENALATYLEGLKCDPNNLEVLDGLRRCATGIKRANGGDVELQDLKEMLGNFQSENDLHKFQKAMEQAAIFKKEASDERLMRIEAERMARTMEEYLSGLQQEMETXLKKQQXEVMEKLQKANEHLQGQLSEYRGQYERLLSEHD

SEQ ID NO: 103997 - protein, 153 aa, Setaria italica
  Transcript Sequence Number=SeqID_38023
  Gene Ontology: Mol. function=potassium ion transmembrane transporter activity; Cellular component=membrane; Biological process=potassium ion transport
  Homolog annotation: Hit_ID=Q75G84; Match level="QueryCoverage=83%, HitCoverage=16%, E-value=3e-27, Identity=52%"; Hit description =Potassium transporter 21
  Subcellular localization annotation: CTP_CleavageSite=53; ConfidenceScore=5.55e-01
PSASYTESLALARARSTSSGTMMMLAHSASCNNSNIRPTTTTTGVFAEEMLTPAESFSELSRMGSAAGGMMKVSLEEMARIEEEQRFIEREMEKGVVYILGEAEVVARPNSSLLKKIMVNYAYAFLRKNCRQGEKMLAIPKSQLLKVGMSYEI

SEQ ID NO: 103998 - protein, 757 aa, Setaria italica
  Transcript Sequence Number=SeqID_38024
  Gene Ontology: Mol. function=cycloartenol synthase activity; Biological process=metabolic process
  Homolog annotation: Hit_ID=Q6IWA3; Match level="QueryCoverage=99%, HitCoverage=100%, E-value=0.0, Identity=85%"; Hit description =Cycloartenol synthase
  Pfam annotation: Domain name=Prenyltrans; Domain location=143-186; Score=50.8; E_value=5.2e-12; Accession=PF00432.13; Description =Prenyltransferase and squalene oxidase re
  Pfam annotation: Domain name=Prenyltrans; Domain location=585-627; Score=40.2; E_value=8.4e-09; Accession=PF00432.13; Description =Prenyltransferase and squalene oxidase re
  Pfam annotation: Domain name=Prenyltrans; Domain location=634-689; Score=31.0; E_value=4.9e-06; Accession=PF00432.13; Description =Prenyltransferase and squalene oxidase re
  Pfam module annotation: Pfam domain module=Prenyltrans::Prenyltrans::P renyltrans; Domain location=143-186::585-627::634-689
MWRLKIAEGGGDPWLRTKNGHVGRQVWEFDAAAEPDPAVDAARRAFAERRHDLKHSADLPMRIQFAKENPLKLDLPAIKLDENEDVTEEAVSTTLKRAISRFSTLQAHDGHWPGDYGGPMFLMPGLIITLYVSGALNTVLSSEHQKEIRRYLYNHQNEDGGWGLHIEGPSTMFGSALTYVSLRLLGEGPDSGDGAMEKGRNWILDHGGATYITSWGKFWLSVLGVFEWSGNNPVPPEVWLLPYLLPFHPGRMWCHCRMVYLPMCYIYGKRFVGRITPLVLELRKELFKDPYSKIDWDMARNQCAKEDLYYPHPFVQDVLWATLHKFVEPVMLHWPGSKLREKALETVMQHVHYEDENTRYICIGPVNKVLNMLACWIEDPNSEAFKLHIPRIYDYLWLAEDGMKMQGYNGSQLWDTAFTVQAIVATNLIEEFGTTLKLAHNFLKNSQVRDDCPGNLDDWYRHKSKGAWPFSTADHGWPISDCTAEGLKASLLLSKISPEIVGESLEANQFYDAVSCLMSYMNDNGGFATYELTRSYPWLELINPAETFGDIVIDYPYVECTSAAIQALTSFRKLYPGHRRKEVDSCISKAASFIESIQKSDGSWYGSWAVCFTYGTWFGVKGLVAAGRTFESSPAIRKACEFLLSKELPSGGWGESYLSSQDQVYTNLKGKRAHAVNTGWAMLALIGAGQAARDPTPLHRAAKVLINLQSEDGEFPQQEIIGVFNKNCMISYSQYRNIFPIWALGEYRCLVLGAGKQ

SEQ ID NO: 103999 - protein, 75 aa, Setaria italica
  Transcript Sequence Number=SeqID_38025
MALAAAVLLLLPGILFTAMAATPYPHGRGGDPLLGASKKYEGSSDLVDLRYHMGPVLSAAPLRLYVLWYGRWDPA

SEQ ID NO: 104000 - protein, 825 aa, Setaria italica
  Transcript Sequence Number=SeqID_38026
  Gene Ontology: Mol. function=ubiquitin-protein ligase activity; Cellular component=ubiquitin ligase complex; Biological process =ubiquitin-dependent protein catabolic process
  Homolog annotation: Hit_ID=B9SG36; Match level="QueryCoverage=99%, HitCoverage=95%, E-value=0.0, Identity=50%"; Hit description =Ubiquitin-protein ligase, putative
  Pfam annotation: Domain name=Arm; Domain location=571-611; Score =44.4; E_value=4.3e-10; Accession=PF00514.15; Description =Armadillobeta-catenin-like repeat
  Pfam annotation: Domain name=Arm; Domain location=612-652; Score =30.5; E_value=6.8e-06; Accession=PF00514.15; Description =Armadillobeta-catenin-like repeat
  Pfam annotation: Domain name=Arm; Domain location=653-693; Score =32.1; E_value=2.2e-06; Accession=PF00514.15; Description =Armadillobeta-catenin-like repeat
  Pfam annotation: Domain name=Arm; Domain location=694-733; Score =22.0; E_value=0.0025; Accession=PF00514.15; Description =Armadillobeta-catenin-like repeat
  Pfam annotation: Domain name=Arm; Domain location=734-774; Score =22.4; E_value=0.0019; Accession=PF00514.15; Description =Armadillobeta-catenin-like repeat
  Pfam annotation: Domain name=Arm; Domain location=776-816; Score =16.4; E_value=0.1; Accession=PF00514.15; Description=Armadillobeta -catenin-like repeat
  Pfam annotation: Domain name=U-box; Domain location=224-298; Score =91.7; E_value=2.6e-24; Accession=PF04564.7; Description=U-box domain
  Pfam module annotation: Pfam domain module=Arm::Arm::Arm::Arm::Arm::Ar m::U-box; Domain location=571-611::612-652::653-693::694-733::734 -774::776-816::224-298
SRRTLLNSISRLGVLTSDGSNVRPKPIQKYCQNVYDISSIVNSLLEDLCKSPEEQLNEVLRDLDTAIHEASGLIGNWHQTTSKIYFGWQIESVISDIQGCSLQLCQLANSLLPSLTGCACTCIEKLQDINYEHMFDLVKDAAMELAEKSTVSSENLLKLTGLLSLSTNMELYMEAVSLENLRTRALRSENREELDLAEQMIPLVNHMHDRLLKEKQQLLINGVPIPADFCCPLSLELMSDPVIVASGQTYERVYIKLWLDEGFTICPKTRQRLGHSNLIPNYTVKALIANWCESHDIRLPDPMKSLKLNFPAAASSLQDLNAAGGSPLHPSVISRANIPGSPEADVYLRNLNGASPPQSVANQNSHVHPSRSGHEVSTSQTSENANGSAPDISRLSLASPEARESSLEGRRGGSIGQTSEQSTEEAFQSSNLDRDMQDNMASSSMNGSLPNSGQLDGECDNGVTRVPSDRTNYSSDASGEVTDGGGAPVPSSVPQREPLIPPRLTPRSQFIRRQASDRGFPRIISSSSMDARSDLSAIENQVRKLIEDLRSDSLDVQRSAASELRLLAKHNMENRIVIANCGAVNLLVGLLHSPDAKTQEHAVTALLNLSINDNNKIAIANADAVNPLIHVLETGNAEAKENSAATLFSLSVIEEIKMRIGRSGAIKPLVDLLGNGTPRGKKDAATALFNLSILHENKARIVQADAVRHLVDLMDPAAGMVDKAVAVLANLATIPEGRTAIGQARGIPALVEVVELGSARGKENAAAALLQLCTNSNRFCSIVLQEGAVPPLVALSQSGTPRAREKAQALLSYFRSQRHGNSARR

SEQ ID NO: 104001 - protein, 421 aa, Setaria italica
  Transcript Sequence Number=SeqID_38027
  Homolog annotation: Hit_ID=B9R7J2; Match level="QueryCoverage=90%, HitCoverage=41%, E-value=6e-19, Identity=24%"; Hit description =Signal peptidase I, putative
MAARARWRLLALPLALFLVAGSARGLVKPEAAAAPKPPVPKAISDLRDAIVKGLGFQAEGLKVSGFDVRDALVGHAVSYEFDIEVGRKVLPVRLLEDVKRWDFVDLPIFRSQADADDTALAEIWRAGKGSVVEPTLPPFQLAGPMELWIQDGDDVRLALPHDVDAGTLKKVVLSDGAVVTVKGARAVSLRLPLELPLPLNRTTYKGRPSSLLSIAQALRGAARSNQKPLLSLRIEGPTSLSSTPSKSPNDKLKLKRLAPGQVELSSRAGTIPAVTEDEDEPHNTALWPLLSLNGSDGSLQGFEELLASVLGKKAGENGTFKLVKARASAQTYVKMAFAVEKKLVKGETDWSNFPEWKTKPKNLRAHYEVLARVEGSQAIPERIAQVQPFQADEAMSESVLTGNVTRSKMEIVHPPPVYFTL

SEQ ID NO: 104002 - protein, 136 aa, Setaria italica
  Transcript Sequence Number=SeqID_38028
  Gene Ontology: Mol. function=aspartic-type endopeptidase activity; Biological process=proteolysis
  Homolog annotation: Hit_ID=B9S302; Match level="QueryCoverage=88%, HitCoverage=21%, E-value=2e-45, Identity=61%"; Hit description=Basic 7S globulin 2 small subunit, putative
GVQDGSGGTIIDSGTTLSYFAEPTYQVIRRAFMERMGRSYPLIRDFPVLNPCYNVSGVERPEVPELTLAFADGAVWDFPAENYFIRLDDDVMCLAVLGTPRSGMSIIGNFQQQNFHLVYDLKGNRLGFAPRRCAEV

SEQ ID NO: 104003 - protein, 326 aa, Setaria italica
  Transcript Sequence Number=SeqID_38029
  Gene Ontology: Mol. function=metal ion binding; Cellular component =vacuolar membrane; Biological process=protein transport
  Homolog annotation: Hit_ID=Q54YP4; Match level="QueryCoverage=76%, HitCoverage=25%, E-value=5e-62, Identity=44%"; Hit description =Vacuolar protein sorting-associated protein 11 homolog
  Pfam annotation: Domain name=Vps39_2; Domain location=153-252; Score=- 33.7; E_value=0.086; Accession=PF10367.1; Description=Vacuolar sorting protein 39 domain 2
SQKIGSNHHNNKETKGKETANGYKSGTREKANLGKEDTKIAKNIVDRRRKGLALLKSAWTSEMEDPLYDVDLALILCNTHAFKDGLLFLYEKLKLYKEVISCYKQAHDHQGLIACCKKLGDSSQGGDPSLWGDLLKYFGELGEDCSKEVKEVLTYIEKEDVVPPIVVLQTLSKNPCLTLSVVKDYIARKLEQESKLIEDDRKSIDKYQEETELMKREIEDLKTNAKVFQLSKCTACTFTLDLPAVHFMCMHSFHLRCLGDNEKECPECAPEYRSVMEAKQKLEQNARDHDLFFRQLRGSKDGFSVIADYFSKGIVSKTTVPPENSR

SEQ ID NO: 104004 - protein, 195 aa, Setaria italica
  Transcript Sequence Number=SeqID_38030
  Gene Ontology: Mol. function=protein serine/threonine kinase activity; Cellular component=extracellular region; Biological process=protein amino acid phosphorylation
  Pfam annotation: Domain name=LRR_1; Domain location=101-124; Score =7.4; E_value=12; Accession=PF00560.25; Description=Leucine Rich Repeat
  Pfam annotation: Domain name=LRR_1; Domain location=126-148; Score =11.0; E_value=2.4; Accession=PF00560.25; Description=Leucine Rich Repeat
  Pfam annotation: Domain name=LRR_1; Domain location=151-173; Score =6.3; E_value=19; Accession=PF00560.25; Description=Leucine Rich Repeat
  Pfam annotation: Domain name=LRR_1; Domain location=175-194; Score =5.5; E_value=27; Accession=PF00560.25; Description=Leucine Rich Repeat
  Pfam annotation: Domain name=LRR_1; Domain location=51-73; Score=8.5; E_value=7.2; Accession=PF00560.25; Description=Leucine Rich Repeat
  Pfam annotation: Domain name=LRR_1; Domain location=75-96; Score=6.6; E_value=16; Accession=PF00560.25; Description=Leucine Rich Repeat
  Pfam module annotation: Pfam domain module=LRR_1::LRR_1::LRR_1::LRR _1::LRR_1::LRR_1; Domain location=101-124::126-148::151-173::175 -194::51-73::75-96
DGGLGLSWKNGTDCCTWEGVACGTDGTVTDVSVTSKALEGQISASLGMLRGLLRLNLSHNLLSGGMPSELMSSNSIIVLDVSFNRLNGEVHELPSSTPSRPLQVLNISTNLFTGQFPSTTWEVMNRLVALNASNNSFTGQIPSHLCRSSPALAVIALCYNQLSGHISPGLGNCSMLKVLKAGHNALSGPLPDELF

SEQ ID NO: 104005 - protein, 81 aa, Setaria italica
  misc_feature (56)..(56): Xaa can be any naturally occurring amino acid
  Transcript Sequence Number=SeqID_38031
  Homolog annotation: Hit_ID=Q84UX7; Match level="QueryCoverage=58%, HitCoverage=6%, E-value=4e-11, Identity=80%"; Hit description=Global transcription factor group E
NFSSFEISKSTQDFYNGVGNADSDSGSDSESESEKVGSPAKLAKGPKKPDQLVEQXEKSDVISPADVNCPADIVGLREEDS

SEQ ID NO: 104006 - protein, 88 aa, Setaria italica
  Transcript Sequence Number=SeqID_38032
  Homolog annotation: Hit_ID=Q84UX7; Match level="QueryCoverage=70%, HitCoverage=8%, E-value=1e-21, Identity=79%"; Hit description=Global transcription factor group E
GLASTVEINDNLHLKDLEMLGTATAEHIVSSVDETSPEHSQDCMPGFLPGSVNPLEQLGLFMKADEEEDDEEPSSVPSVKEAEEGEIN

SEQ ID NO: 104007 - protein, 108 aa, Setaria italica
  misc_feature (47)..(47): Xaa can be any naturally occurring amino acid
  Transcript Sequence Number=SeqID_38033
  Homolog annotation: Hit_ID=Q84UX7; Match level="QueryCoverage=57%, HitCoverage=8%, E-value=9e-26, Identity=87%"; Hit description=Global transcription factor group E
REQNQQVKSEPSENEAVNVSGLSHSSTNPCKGGEPIEEDVDICGNAXPIMLDKDAQLRSNKCVSPSSSSSESESSSSGLCLTVFICIYYYYYRHSCIMKMPVSFPTLL

SEQ ID NO: 104008 - protein, 148 aa, Setaria italica
  Transcript Sequence Number=SeqID_38034
  Gene Ontology: Mol. function=protein binding
  Homolog annotation: Hit_ID=Q84UX7; Match level="QueryCoverage=50%, HitCoverage=10%, E-value=1e-33, Identity=90%"; Hit description =Global transcription factor group E
  Pfam annotation: Domain name=Bromodomain; Domain location=8-87; Score= 53.3; E_value=9.6e-13; Accession=PF00439.17; Description=Bromodomain
EAAVFKQCEAILKKLMTQKYSHIFNIPVDVVKLQIPDYFDIIKTPMDLGTVQKKLESGSYTSPSDFAADVRPGFRRQEPSLCTTDDIGPAVQLLGSRGSRGRQRRCPTHRSRGCKRWLLEEISHGIKLCPESLPKIPTLRRGHLGRHK

SEQ ID NO: 104009 - protein, 135 aa, Setaria italica
  Transcript Sequence Number=SeqID_38035
  Homolog annotation: Hit_ID=Q84UX7; Match level="QueryCoverage=90%, HitCoverage=17%, E-value=2e-29, Identity=59%"; Hit description =Global transcription factor group E
MRLSSLSALRMIEEDSESKPAPEGENSKPDTQVSPDRLLRAAVLRSRYADVIVKARGILSQGGDKQEELEKLQKEEKARLLAEGNAAMEARRAEAEAEAKRKRDFEREKARQALQEMERTVEINDNLHLKDLEML

SEQ ID NO: 104010 - protein, 707 aa, Setaria italica
  Transcript Sequence Number=SeqID_38036
  Gene Ontology: Mol. function=kinase activity
  Homolog annotation: Hit_ID=Q84UX7; Match level="QueryCoverage=96%, HitCoverage=98%, E-value=0.0, Identity=73%"; Hit description=Global transcription factor group E
  Pfam annotation: Domain name=Bromodomain; Domain location=171-256; Score=123.1; E_value=8.9e-34; Accession=PF00439.17; Description =Bromodomain
MTPTVLMEFGQQRPIKRGYEEMAFRGVAAAAPRGYSETVGESEGAAGSPVRVDSEVSAAPKRKCISLNSDGFDVKREIFVPSKMSSSERRYLRKRFRAELDSVRDLLKKPAFAAPAPVSRAPALSSSAAPRAKKLHRGTNVIRGAKGRFLPTKPRPEPSVELSEAAVFKQCEAILKKLMTQKYSHIFNIPVDVVKLQIPDYFDIIKTPMDLGTVQKKLESGSYTSPSDFAADVRLTFNNAMTYNPRGHAVHDMAIQLNKMFENRWRTVEKKLASAAIEKHVDVDKADSKRRKTPPVDRSDVSVEGLRQTEPVKPKMTAAEREAFGNSLAEIADDLPAHIVELLQQCMDSNTDTAGDGEIEIDIQAVSDDLLFELKKQVDKYLQEREQNQQVKSEPSENEAVNVSGLSHSSTNPCKGGEPIEEDVDICGNASPIMLDKDAQLRSNKCVSPSSSSSESESSSSDSDSGSDSESESEKVGSPAKLAKGPKKPDQLVEQEKSDVISPADVNCPADIVGLREEDSESKPAPEGENSKPDTQVSPDRLLRAAVLRSRYADVIVKARGILSQGGDKQEELEKLQKEEKARLLAEGNAAMEARRAEAEAEAKRKRDFEREKARQALQEMERTVEINDNLHLKDLEMLGTATAEHIVSSVDETSPEHSQDCMPGFLPGSVNPLEQLGLFMKADEEEDDEEPSSVPSVKEAEEGEIN

SEQ ID NO: 104011 - protein, 155 aa, Setaria italica
  Transcript Sequence Number=SeqID_38037
  Gene Ontology: Mol. function=protein serine/threonine kinase activity; Cellular component=peroxisome; Biological process=protein amino acid phosphorylation
  Homolog annotation: Hit_ID=Q5Z659; Match level="QueryCoverage=72%, HitCoverage=62%, E-value=1e-39, Identity=71%"; Hit description=SERK1 protein-like
  Pfam annotation: Domain name=Pkinase_Tyr; Domain location=57-154; Score=-160.0; E_value=0.0043; Accession=PF07714.9; Description =Protein tyrosine kinase
MNYLRSRSLKRLLSLGRRSNAEESAEECAEIADPPPPYKPTWRCFSYDELHQATDGFHQDNMVGKGGYGEVYRGVLDGGRAVAVKRLAPTAAADEKKEKDFLTELGTVGHVRHPNVSALLGCCVDRGLHLVFEFSTRGSVSANLHDLKLPPRPVD

SEQ ID NO: 104012 - protein, 100 aa, Setaria italica
  misc_feature (20)..(20): Xaa can be any naturally occurring amino acid
  Transcript Sequence Number=SeqID_38038
  Homolog annotation: Hit_ID=Q8SAW5; Match level="QueryCoverage=98%, HitCoverage=8%, E-value=2e-31, Identity=69%"; Hit description =Putative myosin-like protein
KMLKEALSKCNHELQASNTXCAKTSGKLRSLELHMSSANLYKSPTNSYIDTSASSQKGSNPPSLTSMSEDGVDDTRSCEESWANTLVSELLHIKKDKGKQ

SEQ ID NO: 104013 - protein, 262 aa, Setaria italica
  Transcript Sequence Number=SeqID_38039
  Gene Ontology: Cellular component=plasma membrane
  Homolog annotation: Hit_ID=Q0W9E8; Match level="QueryCoverage=100%, HitCoverage=61%, E-value=1e-67, Identity=52%"; Hit description =Putative stress-induced protein
  Pfam annotation: Domain name=DUF1005; Domain location=1-262; Score =232.7; E_value=9.4e-67; Accession=PF06219.4; Description=Protein of unknown function (DUF1005)
MDPQPFVRLSVGQLGLKLPGGNASKASSRLCDCEIRLGGFPVQTAQVPLIHSPEFNLDPFTNAAVFSLDESDLRSLAAPGCFRPPRPCLEVAVYLARFGGARCGVTWRKRLVGVFRVELASSSEWRDGKPVLLHHGWAGIGKGAAEARPELHLRVKMEADPRYIFQFDDEVALNPQVVQLHGSSRQPIFSCKFIRDRRRPSQGDGQYWSSSGGSEETDMEMAMRRERKGWKVVIHDLSGSAVAAAFMATPFVPAPGGDTVAR

SEQ ID NO: 104014 - protein, 55 aa, Setaria italica
  Transcript Sequence Number=SeqID_38040
  Pfam annotation: Domain name=Metallothio_2; Domain location=1-55; Score=68.7; E_value=2.1e-17; Accession=PF01439.10; Description =Metallothionein
MSCSCGSSCNCGSSCKCGKMYPDLEEKSGAAQATVVLGVAPEKKAGQFEAAAESG

SEQ ID NO: 104015 - protein, 102 aa, Setaria italica
  misc_feature (90)..(90): Xaa can be any naturally occurring amino acid
  Transcript Sequence Number=SeqID_38041
  Gene Ontology: Mol. function=protein binding; Cellular component =nucleus; Biological process=ubiquitin-dependent protein catabolic process
  Homolog annotation: Hit_ID=Q7EYK0; Match level="QueryCoverage=100%, HitCoverage=16%, E-value=2e-38, Identity=74%"; Hit description =Putative WD-40 repeat protein family
  Pfam annotation: Domain name=LisH; Domain location=7-33; Score=40.7; E_value=5.8e-09; Accession=PF08513.3; Description=LisH
MGVLTAAELNYLVFRYLQESGFIHAAFTLGYEAGIHKGGIDGNAVPPGALITVVQKGLHYIELESNTEENDEEIEKDFALLEPLEIITRXVEELQQLVKKRK

SEQ ID NO: 104016 - protein, 87 aa, Setaria italica
  Transcript Sequence Number=SeqID_38042
RREKRERSQTDREKDKGKEKERNEEHERRPGGERERDRHDKEKEQVREKDKSEKDREHEKEKEKEKQHTERIDKVKHEEDSLAGGGD

SEQ ID NO: 104017 - protein, 585 aa, Setaria italica
  Transcript Sequence Number=SeqID_38043
  Gene Ontology: Mol. function=serine-type endopeptidase activity; Cellular component=nucleus; Biological process=proteolysis
  Homolog annotation: Hit_ID=Q7EYK0; Match level="QueryCoverage=94%, HitCoverage=99%, E-value=0.0, Identity=66%"; Hit description =Putative WD-40 repeat protein family
  Pfam annotation: Domain name=LisH; Domain location=35-61; Score=40.7; E_value=5.8e-09; Accession=PF08513.3; Description=LisH
  Pfam annotation: Domain name=WD40; Domain location=227-265; Score =47.9; E_value=3.9e-11; Accession=PF00400.24; Description=WD domain, G-beta repeat
  Pfam annotation: Domain name=WD40; Domain location=286-324; Score =30.2; E_value=8.6e-06; Accession=PF00400.24; Description=WD domain, G-beta repeat
  Pfam annotation: Domain name=WD40; Domain location=327-365; Score =41.5; E_value=3.2e-09; Accession=PF00400.24; Description=WD domain, G-beta repeat
  Pfam annotation: Domain name=WD40; Domain location=369-406; Score =23.5; E_value=0.00089; Accession=PF00400.24; Description=WD domain, G-beta repeat
  Pfam annotation: Domain name=WD40; Domain location=410-448; Score =51.1; E_value=4.3e-12; Accession=PF00400.24; Description=WD domain, G-beta repeat
  Pfam annotation: Domain name=WD40; Domain location=452-499; Score =46.3; E_value=1.2e-10; Accession=PF00400.24; Description=WD domain, G-beta repeat
  Pfam annotation: Domain name=WD40; Domain location=503-541; Score =50.5; E_value=6.4e-12; Accession=PF00400.24; Description=WD domain, G-beta repeat
  Pfam annotation: Domain name=WD40; Domain location=545-582; Score =13.3; E_value=1; Accession=PF00400.24; Description=WD domain, G-beta repeat
  Pfam annotation: Domain name=eIF2A; Domain location=376-560; Score= -97.1; E_value=0.0031; Accession=PF08662.3; Description=Eukaryotic translation initiation factor eIF
  Pfam module annotation: Pfam domain module=LisH::WD40::WD40::WD40::WD4 0::WD40::WD40::WD40::WD40::eIF2A; Domain location=35-61::227-265::286- 324::327-365::369-406::410-448::452-499::503-541::545-582::376-560
MRKILLLLFFLLFLLMLPVFFRFIFLFSLILLTAAELNYLVFRYLQESGFIHAAFTLGYEAGIHKGGIDGNAVPPGALITVVQKGLHYIELESNTEENDEEIEKDFALLEPLEIITKDVEELQQLVKKRKRERSQTDREKDKGKEKERNEEHERRPGGERERDRHDKEKEQVREKDKSEKDREHEKEKEKEKQHTERIDKVKHEEDSLAGGGPTPMDVSVTAQEICSTDVTVLEGHSSEVFACAWSPTGSLLASGSGDSTARIWTIPDGPCGSSMQSSLPGVHVLKHFKGRTNEKSKDVTTLDWNGEGTLLATGSYDGQARIWSRDGELKQTLFKHKGPIFSLKWNKKGDFLLSGSVDKTAIVWDTKTWECKQQFEFHSAPTLDVDWRNNNSFATCSTDNMIYVCKIGEQRPVKAFSGHQSEVNAIKWDPTGSFLASCSDDWTAKIWSMKQDKCVFDFKEHTKEIYTIRWSPTGPGTNNPNQQLLLASASFDSTIKLWEVEQGRLLYSLAGHRQPVYSVAFSPDGEYLASGSLDQCLHIWSVKEGRILKTYRGTGGIFEVCWNKEGSKIAACFSNNTVCVMDFRM

SEQ ID NO: 104018 - protein, 47 aa, Setaria italica
  Transcript Sequence Number=SeqID_38044
PQRRKRKRRPRRRRRRRQRKPRRRRRRKPKDKKTKGRTKRHCPLKPR

SEQ ID NO: 104019 - protein, 699 aa, Setaria italica
  Transcript Sequence Number=SeqID_38045
  Gene Ontology: Mol. function=transporter activity; Cellular component= integral to membrane; Biological process=transport
  Homolog annotation: Hit_ID=Q6EPQ3; Match level="QueryCoverage=99%, HitCoverage=100%, E-value=0.0, Identity=74%"; Hit description=SPX (SYG1/Pho81/XPR1) domain-containing protein-like
  Pfam annotation: Domain name=MFS_1; Domain location=255-651; Score =63.3; E_value=8.8e-16; Accession=PF07690.8; Description=Major Facilitator Superfamily
  Pfam annotation: Domain name=SPX; Domain location=5-151; Score=115.3; E_value=2.1e-31; Accession=PF03105.11; Description=SPX domain
  Pfam annotation: Domain name=Sugar_tr; Domain location=255-699; Score= -140.9; E_value=0.002; Accession=PF00083.16; Description=Sugar (and other) transporter
  Pfam module annotation: Pfam domain module=MFS_1::SPX::Sugar_tr; Domain location=255-651::5-151::255-699
SGKMVNFGKRLMVDQVEEWKGYYINYKLMKKMLKQYVEQTQNGGKDREQVLKEFSRILDDQIERIVLFLLQQQGRLASRIEELGEQRTAILEQYDISQVSQLRDAYREVGFDLIKLLRFVDINATGVRKILKKFDKRFGYKFTDYYVTTRANHPYSQLQQVFKQVGIVAVVGALSRNLEYLQHHEGSFVSIYDHPAVTLKDPIIDQVNHAVQKLTHATNFMQFLGQHALIVQEDGQSGSEDLVDDQNYHFMSLMLNLVNTFLYMVNTYIIVPTADDYAVSLGAAATVCGIIIGSMAVAQVFSSVYFSAWSNRSYFRPLVFSSIMLFFGNLLYALAYDLNSLIVLLIGRLLCGLGSARAVNRRYISDCVPLKMRLQASAGFVSASALGMACGPALAGFLQIKFKIYSLNFNQSTLPGWVMCIAWLIYLLWLWLTFKEPEHFSKSVVNKQSSESGHQGNTNLEEGLAQPLLIGRERNQDENSEDNDDSEVASENSHEPATSIASAYRLLTPSVKAQLLIYFMLKYAMEILLSESSVVTTYYFSWSTSAVAIFLAILGLTVLPVNAIVGSYITNLFEDRQILLASEVMVLIGIITSFRFTPHYSIPQYVISALITFVFAEVLEGVNLSLLSRVMSSRLSRGTYNGGLLSTEAGTLARVIADATITAAGYLGTDLLLNVTLLPPLVICIASIAATLYTYNTLY

SEQ ID NO: 104020 - protein, 198 aa, Setaria italica
  Transcript Sequence Number=SeqID_38046
MATLTMQPIGPSPAPAAQEDQRKGENPAADAADLSDIDSGWVVLKNSDIVSADLAAAAISGGQRLGSSAIPSWARWVLGGVVYTVVPFYNRVRQLEEETVGFVENTVEVVEHVAEVTEKLAANVAKQLPKDGSLQKAVEEVEHIAEVVDTDAEKVEAVTEKIDKVSDEIDAAVEPVIKELEKELDQGTTSDNGVNAQK

SEQ ID NO: 104021 - protein, 436 aa, Setaria italica
  misc_feature (10)..(10): Xaa can be any naturally occurring amino acid
  Transcript Sequence Number=SeqID_38047
  Gene Ontology: Mol. function=aminoacyl-tRNA ligase activity; Cellular component=cytoplasm; Biological process=tRNA aminoacylation for protein translation
  Homolog annotation: Hit_ID=Q7EZJ3; Match level="QueryCoverage=99%, HitCoverage=43%, E-value=0.0, Identity=91%"; Hit description =Putative valyl-tRNA synthetase
  Pfam annotation: Domain name=tRNA-synt_1; Domain location=3-436; Score=428.9; E_value=7.8e-126; Accession=PF00133.14; Description =tRNA synthetases class I (I, L, M and V)
  Pfam annotation: Domain name=tRNA-synt_1g; Domain location=3-422; Score=-284.9; E_value=0.016; Accession=PF09334.3; Description=tRNA synthetases class I (M)
  Pfam module annotation: Pfam domain module=tRNA-synt_1::tRNA-synt_1g; Domain location=3-436::3-422
WVHAMFVTLXDIMVRYFRMKGRPTLWIPGTDHAGIATQLVVEKMLAAEGVKRTDLTREEFTKKVWEWKEKYGGTITNQIRRLGASCDWSRERFTLDEQLSRAVVEAFVRLHDKGLVYQGSYLVNWSPNLQTAVSDLEVEYSEEPGSLYFIKYRVAGGTRDDFMTIATTRPETLFGDVAIAVNPEDKRYAKYVGKLAIVPLTFGRHVPIIADRYVDPEFGTGVLKISPGHDHNDYHIARKLGLPILNVMNKDGTLNDVAGLYSGMDRFEAREKLWSDLVETNLAVKKEPYTLRVPRSQRGGEVIEPLISKQWFVTMEPLAEKALRAVEEGQLTILPERFEKIYNHWLTNIKDWCISRQLWWGHRIPVWYIVGKKCEEDYIVARTEEEALAKAQEKYGKSVEIYQDPDVLDTWFSSGLWPFSTLGWPDLSKEDYKHFL

SEQ ID NO: 104022 - protein, 237 aa, Setaria italica
  Transcript Sequence Number=SeqID_38048
  Gene Ontology: Mol. function=zinc ion binding; Cellular component =intracellular
  Homolog annotation: Hit_ID=B6U450; Match level="QueryCoverage=99%, HitCoverage=90%, E-value=1e-59, Identity=56%"; Hit description=Salt tolerance-like protein
  Pfam annotation: Domain name=zf-B_box; Domain location=1-47; Score =42.8; E_value=1.3e-09; Accession=PF00643.16; Description=B-box zinc finger
  Pfam annotation: Domain name=zf-B_box; Domain location=59-106; Score =59.1; E_value=1.7e-14; Accession=PF00643.16; Description=B-box zinc finger
  Pfam module annotation: Pfam domain module=zf-B_box::zf-B_box; Domain location=1-47::59-106
MKVQCDVCAAEAASVFCCADEAALCDACDRRVHRANKLAGKHRRFSLLHPSSSSSAAQTKPPLCDICQERRGFLFCKEDRAILCRECDVPVHTANELTRRHSRFLLTGVRLSSAPVDSPAPSEGEDQEEEELENSGSPCNADSCSGGAGATTAASASDGSSISEYLTKTLPGWHVEDFLVDDASAGACSDDALYQGEQGQIGGLLQEAYTPWTGREQMLADVVVTTDERASRERWVA

SEQ ID NO: 104023 - protein, 103 aa, Setaria italica
  Transcript Sequence Number=SeqID_38049
MGQGAAKAKQGGEEAAAQKTEKKDEKKAHKSNDADELIAFMKKHYDEKVKDVKTFDAFYHAIYELIERFCEERGQLQYRIPTKAELEKQYYKGDPTDTANLTA

SEQ ID NO: 104024 - protein, 121 aa, Setaria italica
  misc_feature (91)..(91): Xaa can be any naturally occurring amino acid
  misc_feature (110)..(110): Xaa can be any naturally occurring amino acid
  Transcript Sequence Number=SeqID_38050
  Gene Ontology: Mol. function=aspartic-type endopeptidase activity; Cellular component=chromatin; Biological process=DNA integration
  Homolog annotation: Hit_ID=Q7XLI2; Match level="QueryCoverage=95%, HitCoverage=36%, E-value=1e-29, Identity=57%"; Hit description =OSJNBa0079F16.14 protein
  Pfam annotation: Domain name=RVT_2; Domain location=1-121; Score= -3.4; E_value=3.2e-17; Accession=PF07727.6; Description=Reverse transcriptase (RNA-dependent DNA pol
HFYGLKQAPRAWYSRFASYLLKLGFVEAKSDTSSFIYRLDDDLIYLLLYVDDIVLTTSSTSLLKRTIDALQQEFSMKDLGQLHHFLGMHVXAHPSGLFLSQRQYMIDILXRASMSDCNLAL

SEQ ID NO: 104025 - protein, 135 aa, Setaria italica
  Transcript Sequence Number=SeqID_38051
  Gene Ontology: Mol. function=structural constituent of cell wall; Cellular component=proteasome core complex; Biological process=lipid transport
  Homolog annotation: Hit_ID=Q41848; Match level="QueryCoverage=67%, HitCoverage=30%, E-value=2e-41, Identity=92%"; Hit description=36.4 kDa proline-rich protein
  Pfam annotation: Domain name=Tryp_alpha_amyl; Domain location=49-130; Score=85.0; E_value=2.7e-22; Accession=PF00234.14; Description =Protease inhibitorseed storageLTP f
  Subcellular localization annotation: CTP_CleavageSite=35; ConfidenceScore=5.03e-01
PTPRPSPPYIPPYVPPTPPYVPPYVPPTPPYVPPSPPYVPPNPPAGRTCPIDALKLNACVDVLSGLIHLVIGQEARSKCCPLVQGIADLDAALCLCTTIRARLLNINIYLPVALELLITCGKHAPPGFKCPPLYD

SEQ ID NO: 104026 - protein, 71 aa, Setaria italica
  Transcript Sequence Number=SeqID_38052
KIHATIAINSSDYQEIDHIYSSKIHATIAINYFKFQTPQSTIRRNYFYSFRGHKCYSDAFQVISCNYEIVK

SEQ ID NO: 104027 - protein, 172 aa, Setaria italica
  Transcript Sequence Number=SeqID_38053
TAKRHRGQDGEMQEEAAADVDVLRSGRGECRWRCVRRYQDQPLLLQECMTQCRSREQQGDGVEEEEGESVGAYNCKKCRERCERRPAGDWQEKQRCLMECRRRDGPIADEEEDNDRCRQRCQHHHDYDRKQQCVRECRRHHQGVAIGYTIASSISMRAIRRADCFHTNGHAD

SEQ ID NO: 104028 - protein, 126 aa, Setaria italica
  Transcript Sequence Number=SeqID_38054
TNVPSCLGLVGCPSLPTATYRRRRGRHGGGDADEDNNYCSDRCQQSCQRHGDRKAQRRCVSWCERQEGCRRRDGPIADDEEDNDRCRQRCQHHRDYSRRQQCVSECRRQHGGGWEAAVAGAVLQVV

SEQ ID NO: 104029 - protein, 353 aa, Setaria italica
  Transcript Sequence Number=SeqID_38055
  Homolog annotation: Hit_ID=Q2R223; Match level="QueryCoverage=83%, HitCoverage=74%, E-value=2e-11, Identity=31%"; Hit description =Embryo-specific protein
DRPAAATAGAAEEVASAAGEVAAAEADRDPKGDLQWCRMGCQWQYGKDQGRRSECERECRQRHRGQDGEMQEEAAADVDVLRSGRGECRWRCVRRYQDQPLLLQECMTQCRSREQQGDGVEEEEGESVGAYNCKKCRERCERRPAGDWQEKQRCLMECRRRDGPIADEEEDNDRCRQRCQHHHDYDRKQQCVRECRRHHQGGRGDADEDNNYCSDRCQQSCQRHGDRETQRQCVSWCERQEGCRRRDGPIADDEEDNDRCRQRCQHHRDYDRKQQCVRECRRHHHGGRGDADEDNNYCSDRCQQSCQRHGDRKAQRRCVSWCERQEGCRRRDGPIADDEEDNDRCRQRCQSPT

SEQ ID NO: 104030 - protein, 180 aa, Setaria italica
  Transcript Sequence Number=SeqID_38056
  Subcellular localization annotation: CTP_CleavageSite=51; ConfidenceScore=5.35e-01
LFYVFVSFILVSFGSFLLVVTAPVRELVRAPGGLPPPRRPHRRRRGGQRPLQAAVPAPPRLLQEAAVRERVPPPTRRRLGGGGGRRRPPGGVTRMAWRTASKIKTAVRRVTGRRRRAYVASWPAETTPHRPSTASRPYIHLYIRARIRLAVRRGGVGIKSGGCVRGDGSPHERAVLYRMR

SEQ ID NO: 104031 - protein, 83 aa, Setaria italica
  Transcript Sequence Number=SeqID_38057
  Subcellular localization annotation: CTP_CleavageSite=48; ConfidenceScore=5.16e-01
LLFSLIMPKLPLHYTSTVARQSLRTRRQTHPLLLDVEARVLVALGAATAATTSPWPTRPRDPSPPVLLSCPLRVLLSNVVVLS

SEQ ID NO: 104032 - protein, 125 aa, Setaria italica
  Transcript Sequence Number=SeqID_38058
IPLHYTSTVARHSLRTRRQTHPLLLDVEARVLVALGAATAGGLGSRGRVGQGEVVAAEPASPAHVLAEVAAPPVVCLVGTASSSACPDPSWQCPARSAPHLRRRRGPRGRRRRRGSERMLPSQIT

SEQ ID NO: 104033 - protein, 135 aa, Setaria italica
  Transcript Sequence Number=SeqID_38059
FSYVLNVVRSKPYPTYFLCTFEARVLVALGAATAGGLGSRGRVGQGEVVAAEPASPAHVLAEVAAPPVVAVARPRRQHVRIHRGSVRHDPRRTCGDDEGHEAGGDEGVQSGCCHLNRLVGFSALRWNVCWKETLK

SEQ ID NO: 104034 - protein, 114 aa, Setaria italica
  Transcript Sequence Number=SeqID_38060
RQTHPLLLDVEARVLVALGAATAGGLGSRGRVGQGEVVAAEPASPAHVLAEVAAPPVVAVARPRRQHVRIHRGSVRHDPRRTCGDDEGHEAGGDEGVQSGCCHLNRLVGFSALR

SEQ ID NO: 104035 - protein, 124 aa, Setaria italica
  Transcript Sequence Number=SeqID_38061
YWSSLFRFLNPFVAACLVALVVAAGAARIVPDTATMDPDMLTTRPCHSNNGWSGHLCKDVCGASGFSRYDFTLANTATGIPVHLLLLPQGLQERVPQRQGVVGGFAVACAGCDEPQCSCNVRGV

SEQ ID NO: 104036 - protein, 140 aa, Setaria italica
  Transcript Sequence Number=SeqID_38062
LLFSLIMPKLPLHYTSTVARHSLRTRRQTHPLLLDVEARVLVALGAATAGGLGSRGRVGQGEVVAAEPASPAHVLAEVAAPPVVAVARPRRQHVRIHRGSVRHDPRRTCGDDEGHEAGGDEGVQSGCCHLNRLVGFSALR

SEQ ID NO: 104037 - protein, 304 aa, Setaria italica
  Transcript Sequence Number=SeqID_38063
  Gene Ontology: Mol. function=calcium ion binding; Cellular component =vacuole
  Homolog annotation: Hit_ID=C3VER2; Match level="QueryCoverage=81%, HitCoverage=79%, E-value=1e-128, Identity=86%"; Hit description =Caleosin
  Pfam annotation: Domain name=Caleosin; Domain location=122-295; Score= 428.1; E_value=1.4e-125; Accession=PF05042.5; Description=Caleosin related protein
MQGATTKQSRKADRAAARAAEGSKDDGDGAKAVDVVRSDDAGDNKTAGDVKGELGDAKGGAVYHGMSATEGKDSQTIVALQSPVTVMRPVRGDLEEHVPKPYLARALAVPDIYHPDGSTDGHRHHHMSVMQQHVAFFDRDDNGIIYPWETYQGCRALGFNMIMSFLIALIVNGTMSYATLPGWLPSPLFPIYVHNIHKSKHGSDSGTYDNEGRFMPVNFENMFSKYARTSPDRLTYRELWSMTEGFREVFDFYGWFAAKLEWTILYVLARDEEGYLSREAMRRVYDGSLFEYVERQRAQHAKMS

SEQ ID NO: 104038 - protein, 137 aa, Setaria italica
  Transcript Sequence Number=SeqID_38064
  Gene Ontology: Mol. function=nutrient reservoir activity
  Pfam annotation: Domain name=Tryp_alpha_amyl; Domain location=31-124; Score=35.6; E_value=2.1e-07; Accession=PF00234.14; Description =Protease inhibitorseed storageLTP f
MKIFIVLALLTLAASSASAQQPGYYGSLHPCGEFLRQRCPAVTGWPYAWSRTWQPSSCMAMHQQCCQQLRQVEPLHRCQEVCSLVETTVQQMMLQGSEYYELQHAALGAKNLPAMCGISLPSYCTTPCAIAGGGACC

SEQ ID NO: 104039 - protein, 69 aa, Setaria italica
  Transcript Sequence Number=SeqID_38065
WYLNFHHNICIILNNLFLVIHTRWYVNFIPWVQHKTYIYLAGTARKGLPPIGWLHHHGCCVPHKWQLHR

SEQ ID NO: 104040 - protein, 110 aa, Setaria italica
  Transcript Sequence Number=SeqID_38066
  Subcellular localization annotation: CTP_CleavageSite=44; ConfidenceScore=5.51e-01
MISSFSPMMGMGSMVPCMQSCMMQRAFTIGGSPLLAMLMQQSPLAMLQQQCCMQSMMQGMMSPQCHCGAMCQMMHLQQIRIAMQLPFMWNTAAMMMQPTYWRQPFPSCAC

SEQ ID NO: 104041 - protein, 64 aa, Setaria italica
  Transcript Sequence Number=SeqID_38067
  Homolog annotation: Hit_ID=B6UH67; Match level="QueryCoverage=82%, HitCoverage=19%, E-value=7e-19, Identity=90%"; Hit description=Late embryogenesis abundant protein D-34
  Pfam annotation: Domain name=SMP; Domain location=3-63; Score=5.2; E _value=0.092; Accession=PF04927.4; Description=Seed maturation protein
PLVLWYGLCAQNAREKMPADRGATGEDAERVVSAEIRNKLDMATTLGGVAEAVTTAARLNQERP

SEQ ID NO: 104042 - protein, 72 aa, Setaria italica
  Transcript Sequence Number=SeqID_38068
MEEEEEAEQEGGQKSRGYKQVKSRIREGSVIVIPAGHPMTLVAGEVLTNLRPFLLTFLVRFFNVSFRFSFTF

SEQ ID NO: 104043 - protein, 142 aa, Setaria italica
  misc_feature (32)..(32): Xaa can be any naturally occurring amino acid
  Transcript Sequence Number=SeqID_38069
  Gene Ontology: Mol. function=nutrient reservoir activity; Cellular component=extracellular region; Biological process=defense response to bacterium
  Homolog annotation: Hit_ID=B6UGJ0; Match level="QueryCoverage=84%, HitCoverage=28%, E-value=6e-37, Identity=66%"; Hit description =Globulin-1 S allele
VVVPVVRFLSSRSFSRRRFFQAAFNTRREEWXQVFEKQSKGEITTASEEQIRELSRSCSRAGRSHGGGESMWDIKLCSLTSKRPLHSNNHGRHYEITGDDCPQLRALDIEVGLTNLSRGSMTAPSYSTHADKLFVVLDGKTD

SEQ ID NO: 104044 - protein, 143 aa, Setaria italica
  Transcript Sequence Number=SeqID_38070
  Gene Ontology: Mol. function=nutrient reservoir activity
  Homolog annotation: Hit_ID=B6UGJ0; Match level="QueryCoverage=56%, HitCoverage=17%, E-value=3e-34, Identity=85%"; Hit description =Globulin-1 S allele
RDRRWCSCSCSPCCAPRSRSRRTRTGDAGGEGRSGSGRPYHFGEERFRQWAQSRQGRFRVLERFTHELLEDAVGNYRVAELEAAPRAFLQPSHYDADEVMFVKEGEGVVALLARGKKGSTLLDVQRKGERYLRTIPRPDDRTY

SEQ ID NO: 104045 - protein, 452 aa, Setaria italica
  Transcript Sequence Number=SeqID_38071
  Gene Ontology: Mol. function=nutrient reservoir activity; Cellular component=extracellular region; Biological process=defense response to bacterium
  Homolog annotation: Hit_ID=B6UGJ0; Match level="QueryCoverage=91%, HitCoverage=93%, E-value=1e-164, Identity=71%"; Hit description =Globulin-1 S allele
  Pfam annotation: Domain name=Cupin_1; Domain location=243-429; Score =132.9; E_value=9.9e-37; Accession=PF00190.14; Description=Cupin
  Pfam annotation: Domain name=Cupin_1; Domain location=48-174; Score =60.7; E_value=5.4e-15; Accession=PF00190.14; Description=Cupin
  Pfam annotation: Domain name=Cupin_2; Domain location=78-154; Score =9.1; E_value=0.039; Accession=PF07883.3; Description=Cupin domain
  Pfam module annotation: Pfam domain module=Cupin_1::Cupin_1::Cupin_2; Domain location=243-429::48-174::78-154
TKRSPLVLLLLLSLLCSSLALASYSYGDAGGEGRSGSGRPYHFGEERFRQWAQSRQGRFRVLERFTHELLEDAVGNYRVAELEAAPRAFLQPSHYDADEVMFVKEGEGVVALLARGKRESFCVKEGDVLVIPAGAVVYSANTHGSKWFRVVMLLNPVSTKGRFEEFFPIGGESPESFFSVFSDDVLQAAFNTRREEWEQVFEKQSKGEITTASEEQIRELSRSCSRAGRSHGGGESMWDIKLCSLTSKRPLHSNNHGRHYEITGDDCPQLRALDIEVGLTNLSRGSMTAPSYSTHADKLFVVLDGSGYFEMACPHLSSGRSSSPRRERGHGSREWGREEEEEAEQEGGQKSRGYKQVKSRIREGSVIVIPAGHPMTLVAGEDNNLAVLYFSVNARHDEKVFLVGSNGLLRQMDEAAKALAFGAEKEKVDRVIGAQSDAVFLRGPNSRRVSSA

SEQ ID NO: 104046 - protein, 308 aa, Setaria italica
  Transcript Sequence Number=SeqID_38072
  Gene Ontology: Mol. function=sucrose synthase activity; Biological process=sucrose metabolic process
  Homolog annotation: Hit_ID=B9SJX1; Match level="QueryCoverage=100%, HitCoverage=35%, E-value=1e-147, Identity=78%"; Hit description =Sucrose synthase, putative
  Pfam annotation: Domain name=Glycos_transf_1; Domain location=88-278; Score=76.0; E_value=1.3e-19; Accession=PF00534.12; Description =Glycosyl transferases group 1
MNTSDFIITSTYQEIAGSKEKPGQYEHHYAFTMPGLCRYATGINVFDPKFNIAAPGADQSIYFPFTQKQKRLTDLHPQIEELLYSKQDTDEHIGYLADRNKPIIFSMARLDKVKNITGLVEWYGQNRRLRDLVNLVVVAGLLEASQSKDREEIEEINKMHNLIDKYQLKGQIRWIKAQTDRVRNGELYRCIADTKGAFVQPALYEAFGLTVIEAMNCGLTTFATNQGGPAEIIVDGVSGFHINPMNGREASNKIADFFQKCKEDPSYWNKVSTAGLQRIYECYTWKIYATKVLNMGSTYTFWKTLNKE

SEQ ID NO: 104047 - protein, 46 aa, Setaria italica
  Transcript Sequence Number=SeqID_38073
TWDYKLISYDMDRKEVCALRTVGCDYGIITPYAPYFSETPVLSKKH

SEQ ID NO: 104048 - protein, 75 aa, Setaria italica
  Transcript Sequence Number=SeqID_38074
NCYLVKSDILNMVSYVIPTNLAAWINLLELYHRLCWCLDIFIFIFLVQLTLLASCFYVCKLASYASCLNDCTSKS

SEQ ID NO: 104049 - protein, 112 aa, Setaria italica
  misc_feature (43)..(43): Xaa can be any naturally occurring amino acid
  Transcript Sequence Number=SeqID_38075
  Gene Ontology: Mol. function=metal ion binding; Biological process =metal ion transport
RHYGTYAQGTKPEGGDGTAPKAAGEEVVIRAPVHCDGCGRKLXRRSLERLDWVGEVSVDSNTNTVVVRGPKVVENPAETVKIVEKRTRRKAVLLSPAPEKLPPPAVKETKKD

SEQ ID NO: 104050 - protein, 381 aa, Setaria italica
  Transcript Sequence Number=SeqID_38076
  Gene Ontology: Mol. function=metal ion binding; Biological process =metal ion transport
  Homolog annotation: Hit_ID=B9RAC5; Match level="QueryCoverage=44%, HitCoverage=47%, E-value=4e-21, Identity=36%"; Hit description=Metal ion binding protein, putative
  Pfam annotation: Domain name=HMA; Domain location=133-194; Score =20.9; E_value=0.0054; Accession=PF00403.18; Description=Heavy-metal -associated domain
  Pfam annotation: Domain name=HMA; Domain location=30-95; Score=22.7; E_value=0.0015; Accession=PF00403.18; Description=Heavy-metal -associated domain
  Pfam module annotation: Pfam domain module=HMA::HMA; Domain location =133-194::30-95
MAKRHYGTYAQGTKPEGGDGTAPKAAGEEVVIRAPVHCDGCGRKLRRSLERLDWVGEVSVDSNTNTVVVRGPKVVENPAETVKIVEKRTRRKAVLLSPAPEKLPPPAVKETKKDDGNKDMYELPEINMKMVVILRINLHCDACCEEIKRRILRIKGVEDAVPHLKSSQVMVKGVVEPATLVGFIRSCTGRKAAIFRAEPLDPLPAPKSPPPEAETKKDGPTDNTGEKKDAQENGKNEEPREEEEKGGGEPEEDKKRTGDDDRAAAEELHQEAHAGEGEKHAATGDGVVLEDQKKDDRLFAAPLPAGVFTVAPETMAISNVTPYHHYSYPSSYYAYAHPSYYYQCQYPQPYYPAYSYACGHGMYGYPPEAFTEENPNACAIV

SEQ ID NO: 104051 - protein, 154 aa, Setaria italica
  Transcript Sequence Number=SeqID_38077
  Gene Ontology: Cellular component=monolayer-surrounded lipid storage body outer lipid monolayer
  Homolog annotation: Hit_ID=Q43770; Match level="QueryCoverage=66%, HitCoverage=64%, E-value=7e-48, Identity=96%"; Hit description =Oleosin
  Pfam annotation: Domain name=Oleosin; Domain location=34-144; Score =207.0; E_value=5.1e-59; Accession=PF01277.9; Description=Oleosin
MADQHRGAMGGGGGGYGDLHRGGERGETQQRQSAMMTALKAATAATAGGSMLVLSGLILAGTVIALTVATPVLVIFSPVLVPAAITLALMAAGFVTSGGLGVAALSVFSWMYKYLTGKHPPGADQLDHAKARLASKARDIKDAAQHRIDQAQGS

SEQ ID NO: 104052 - protein, 185 aa, Setaria italica
  Transcript Sequence Number=SeqID_38078
  Gene Ontology: Mol. function=lyase activity
  Homolog annotation: Hit_ID=Q7EZ49; Match level="QueryCoverage=90%, HitCoverage=48%, E-value=1e-19, Identity=37%"; Hit description =Ribosomal RNA apurinic site specific lyase-like protein
RRLSLMNLTRVSNTTGDDRYATFDAWFRSPVLNRVKEVHFQYLYRYRADELDPLPLPALRFTDLTIASYGRCHFPDNLAGVMFPNLTQLTLHDLTNAERTVHDMISACPQIRSLLLRNNKGFRRVRISSPTLISLGLSVGEHDDEPAMEQLTIVDAPSMERLLIFDTEGGPINIRVIGAPNLRVL

SEQ ID NO: 104053 - protein, 63 aa, Setaria italica
  Transcript Sequence Number=SeqID_38079
  Gene Ontology: Mol. function=serine-type endopeptidase activity; Biological process=proteolysis
  Homolog annotation: Hit_ID=Q2QSI6; Match level="QueryCoverage=88%, HitCoverage=7%, E-value=3e-16, Identity=69%"; Hit description =Subtilase family protein, expressed
EVTASVSPRKLEFTKANEKKTFTVSLTWDANGTKHAEGSLRWVSDKHVVRSPIVLFHITSCRL

SEQ ID NO: 104054 - protein, 143 aa, Setaria italica
  Transcript Sequence Number=SeqID_38080
  Gene Ontology: Mol. function=serine-type endopeptidase activity; Biological process=proteolysis
  Homolog annotation: Hit_ID=Q2QSI6; Match level="QueryCoverage=100%, HitCoverage=19%, E-value=4e-57, Identity=75%"; Hit description =Subtilase family protein, expressed
INPGLVYDTDVEQYILYLCGLGYTDSEVEIITHQKGVCSKGTKIAEAELNYPSIASRASAGKLVVNRTVTNVGDAMSSYTVEIDMPKEVKATVSPTKLEFTEAQESKTFTVSLIWDASKTKNAEGSFKWVSNKHVVRSPIVIF

SEQ ID NO: 104055 - protein, 151 aa, Setaria italica
  Transcript Sequence Number=SeqID_38081
  Gene Ontology: Mol. function=serine-type endopeptidase activity; Biological process=proteolysis
  Homolog annotation: Hit_ID=Q2QSI6; Match level="QueryCoverage=87%, HitCoverage=17%, E-value=5e-48, Identity=69%"; Hit description =Subtilase family protein, expressed
LDGYTDTKCTALHQCHRLDQYISYLCGLDGYTDFRVEIITHRKGVCGEGRKISEAELNYPSIAVKASTGELVVSRTVTNVGDAKSSYTVDIEMPKEVTASLSPSVLEFTKVNEKKTFTVSLTWDANAIKHAEGSFKWISDKHVVRSPIVIF

SEQ ID NO: 104056 - protein, 184 aa, Setaria italica
  Transcript Sequence Number=SeqID_38082
  Gene Ontology: Mol. function=serine-type endopeptidase activity; Biological process=proteolysis
  Homolog annotation: Hit_ID=Q2QSI6; Match level="QueryCoverage=82%, HitCoverage=20%, E-value=5e-48, Identity=57%"; Hit description =Subtilase family protein, expressed
  Pfam annotation: Domain name=Inhibitor_I9; Domain location=32-115; Score=38.5; E_value=2.7e-08; Accession=PF05922.8; Description =Peptidase inhibitor I9
  Subcellular localization annotation: CTP_CleavageSite=45; ConfidenceScore=5.15e-01
MDLTRLLALLVLASLLGCATPTVTRHERPSRSTYIVRVHPPPKFSSDMSSTNLETWYRSLLPPLVSTSRSDTPFIHTYREAILGFAVNLTKDEAEYVTKRHGVLTVYEDYLIPLLTTHTPEFLGLRSNEGAWSSIGMGEGIIIGVLDTGIDVSHSSFDDEGMKPPPAKWRGSCNFGDVNCNKKF

SEQ ID NO: 104057 - protein, 394 aa, Setaria italica
  misc_feature (18)..(18): Xaa can be any naturally occurring amino acid
  Transcript Sequence Number=SeqID_38083
  Gene Ontology: Mol. function=serine-type endopeptidase activity; Cellular component=cell wall; Biological process=proteolysis
  Homolog annotation: Hit_ID=Q2QSI6; Match level="QueryCoverage=95%, HitCoverage=51%, E-value=1e-141, Identity=67%"; Hit description =Subtilase family protein, expressed
  Pfam annotation: Domain name=PA; Domain location=155-238; Score=12.7; E_value=0.018; Accession=PF02225.14; Description=PA domain
  Pfam annotation: Domain name=Peptidase_S8; Domain location=5-376; Score=-7.9; E_value=2.7e-06; Accession=PF00082.14; Description =Subtilase family
  Pfam module annotation: Pfam domain module=PA::Peptidase_S8; Domain location=155-238::5-376
FVLGHGTHTASTAAGRYXKKGRQSVLGSGNGTAAGMAPHAHLAVYKVCNDFGCYGSDILAGMEAAIADGVDILSLSLGGRPQAFHEDIIAIGSFSAMKKGIFVSCSAGNSGPLPKTLSNEEPWVLTVGASTMDRQMKAVVKLGDGRSFVGESAYQPSNLASLPVMFELDGSGNMTGKVVACELEGSQVEIGQFIKDNGGSGMIVLGAEGSGHTTFAAANVLPASFLNSPDATAVRQYIKTSSKPTASIIFNGTALGTAPAPVVAYFSSRGPSTASPGILKPDIIGPGVNVIAAWPFKVGPNTADGHGKVFNSMSGTSMSAPHLSGIAAIIKSAHPDWSPAAIKSAIMTTAYVVYDNTKPILDEKLNPAGHFIIGAGHVNSFSAGTLVICDYLNF

SEQ ID NO: 104058 - protein, 621 aa, Setaria italica
  misc_feature (15)..(15): Xaa can be any naturally occurring amino acid
  Transcript Sequence Number=SeqID_38084
  Gene Ontology: Mol. function=serine-type endopeptidase activity; Biological process=proteolysis
  Homolog annotation: Hit_ID=Q2QSI6; Match level="QueryCoverage=99%, HitCoverage=85%, E-value=0.0, Identity=63%"; Hit description =Subtilase family protein, expressed
  Pfam annotation: Domain name=PA; Domain location=249-333; Score=14.2; E_value=0.013; Accession=PF02225.14; Description=PA domain
  Pfam annotation: Domain name=Peptidase_S8; Domain location=16-464; Score=69.4; E_value=1.4e-17; Accession=PF00082.14; Description =Subtilase family
  Pfam module annotation: Pfam domain module=PA::Peptidase_S8; Domain location=249-333::16-464
YLTVYEDYLVPLLTXHTPEFLGLRPDEGAWSSIGMGEGIIIGVLDTGIDVSHSSFDDEGMKPPPAKWRGSCNFGDVNCNKKLIGGRSLLGGQFPPEDRVGHGTHTASTAAGRSVEGASVLGNGNGTAAGMAPHAHLAMYQVCNRFGCYASDIIAGMDAAIADGVDILSISLGGKSVPFHEDAIAIGTFSAMRKGIFVSCSAGNSGPLSSTVENEAPWVLTVGASTIDRRMEAIVKLGDGRSFVGESAYQPSNLDSLPLVHELDSGDAKGKVIACDLGGSLSQLKLGKTVQDAGGAGMIALGKEESGHNTFAAAHMLPASYVNAIDAAVIRQYIKNSDKPTASIVFNGTSLGNTPSPVVAYFSSRGPSTQTPGILKPDIIGPGVNVIAAWPVKVGPRAEGEKNMAFNTLSGTSMSAPHLSGIAAIIKSAHPDWSPAAIKSAIMTTAYVLDDNKKPILDEKLNPAGHFIIGAGHVNSSQAINPGLIYDTEEEQYIPYLCGLGYTESEVEIITHHKGVCGEGRKISEAELNYPSIAVAASTGKLVVNRTVTNVGDEISSYSVDIEMPKEVTASVSPSVLEFTKANEKKTFTVSLTWDANAIKHAEGSLKWISDKHVVRSPIVIF

SEQ ID NO: 104059 - protein, 186 aa, Setaria italica
  Transcript Sequence Number=SeqID_38085
GGAALRRSPSCRRRRRGAAAEDPADALPSPASDGDHINLFSGRSGAAADFAALASASGGRGAARERDPDANPNQKNPKKRKKEEEVRAVGPDEEKYRLGYGLAGKGVAIPWYMSNPAAAAAKEGRARDAGEGSGGKRSGGKKTIEELREERKKREAKEKERERAVLVAAGRKERQSDRGRQSRWAR

SEQ ID NO: 104060 - protein, 452 aa, Setaria italica
  Transcript Sequence Number=SeqID_38086
  Gene Ontology: Mol. function=aminoacyl-tRNA ligase activity; Cellular component=cytoplasm; Biological process=tRNA aminoacylation for protein translation
  Homolog annotation: Hit_ID=Q7XLG5; Match level="QueryCoverage=94%, HitCoverage=63%, E-value=0.0, Identity=77%"; Hit description =OSJNBa0039C07.11 protein
  Pfam annotation: Domain name=HGTP_anticodon; Domain location=339-427; Score=89.6; E_value=1.1e-23; Accession=PF03129.12; Description =Anticodon binding domain
  Pfam annotation: Domain name=tRNA-synt_2b; Domain location=2-172; Score=40.6; E_value=6.3e-09; Accession=PF00587.17; Description=tRNA synthetase class II core domain (G, H, P, S and T)
  Pfam module annotation: Pfam domain module=HGTP_anticodon::tRNA-synt _2b; Domain location=339-427::2-172
RTIPTLRPVGPIDVWNIRLHRAIFVNFKDLYYYNGQKLPFAAAQIGQAFRNEISPRQGLLRVREFTLAEIEHFVDPEDKSHPKFFDVADLEFLMFPRELQLSGESAKLMKLGEAVSKGTVNNETLGYFIGRVYLFLTRLGIDKGRLRFRQHLPNEMAHYAADCWDAEIECSYGWIECVGIADRSAYDLRAHSEKSGVPLVAHEKFSKPREVEKLVIVPSKKDLGLAFKGNQKMVLEALEAMSEKEALEMKAALESKGETNFKVCTLGKDVVITKKMVSISMEKKLEHQRVFTPSVVEPSFGIGRIIYCLFEHSFYTRPSKSEEEQLNVFRFPPLVAPIKCTVFPLVKNQEFDDAAKVIAKALTTAGISHIIDTTAISIGRRYARTDEIGVPFAVTVDSATNVTIRERDSKEQVRVDIGEVASVVKQLTEGQSTWADVSAKYPAHVGPQGDQE

SEQ ID NO: 104061 - protein, 336 aa, Setaria italica
  Transcript Sequence Number=SeqID_38087
  Gene Ontology: Mol. function=catalytic activity; Biological process =cellular metabolic process
  Homolog annotation: Hit_ID=B6TC31; Match level="QueryCoverage=96%, HitCoverage=97%, E-value=1e-162, Identity=83%"; Hit description =Dihydroflavonol-4-reductase
  Pfam annotation: Domain name=3Beta_HSD; Domain location=10-283; Score= -83.2; E_value=6.9e-05; Accession=PF01073.11; Description=3-beta hydroxysteroid dehydrogenaseisomerase family
  Pfam annotation: Domain name=Epimerase; Domain location=9-255; Score =85.8; E_value=1.5e-22; Accession=PF01370.13; Description=NAD dependent epimerasedehydratase family
  Pfam annotation: Domain name=NAD_binding_4; Domain location=11-239; Score=-47.4; E_value=4.6e-06; Accession=PF07993.4; Description=Male sterility protein
  Pfam annotation: Domain name=adh_short; Domain location=7-139; Score=- 30.9; E_value=0.0015; Accession=PF00106.17; Description=short chain dehydrogenase
  Pfam module annotation: Pfam domain module=3Beta_HSD::Epimerase::NAD _binding_4::adh_short; Domain location=10-283::9-255::11-239::7-139
RTNTAKGKVCVTGASGFIASWLVKRLLESGYHVLGTVRDPGNHKKVGHLWDLEGARERLELVRADLLEEGSFDDAVMACEGVFHTASPILTKSDSKEQMLNSAINGTLNVLRSCKKNPLLKRVVLTSSSSTVRIKDEADLPPNVLLDETSWSSIEYCESLQIWYAVAKILAEKAAWGFAKEHKIDLVTVLPTFVIGPSLSPELGPTASDVLGLFQGETGKFTVYGRMGYVHIDDVASCHILAYEAADAQGRYICNAAVLDCGDLAALLARRFPSYPIPKSLPNIYGEQSYDYDTSKARALGMRGYKGVEEMFDDAVESLVGHGHLPTENASTSSLL

SEQ ID NO: 104062 - protein, 70 aa, Setaria italica
  Transcript Sequence Number=SeqID_38088
DCRGVSLLPNLTYVDLNSNNIEGSIVEDLFHSSSLQYLNNSGNPFGGMHSDNAWQALEHNMFDSMQPPQA

SEQ ID NO: 104063 - protein, 112 aa, Setaria italica
  Transcript Sequence Number=SeqID_38089
  Gene Ontology: Mol. function=voltage-gated potassium channel activity; Cellular component=voltage-gated potassium channel complex; Biological process=potassium ion transport
  Homolog annotation: Hit_ID=B9T3Z0; Match level="QueryCoverage=100%, HitCoverage=25%, E-value=5e-34, Identity=58%"; Hit description =Potassium channel tetramerization domain-containing protein, putative
SLDHSQVNDAAYLDAGTLLIAARERLGKCDGGMAAFSAASGELRHRFRVAHGRQAKSFTAGALAFDQDSSIFASCKGRLNEYGIGVWDRATGEQADFFYEPPGCALGDADKL

SEQ ID NO: 104064 - protein, 48 aa, Setaria italica
  Transcript Sequence Number=SeqID_38090
RIIYELKRKLKTMMQILQYYLSGPVPGLHILNWNSKVAFSLNRELRTG

SEQ ID NO: 104065 - protein, 310 aa, Setaria italica
  misc_feature (245)..(245): Xaa can be any naturally occurring amino acid
  Transcript Sequence Number=SeqID_38091
  Gene Ontology: Mol. function=electron carrier activity; Cellular component=extracellular region; Biological process=response to oxidative stress
  Homolog annotation: Hit_ID=Q7XT82; Match level="QueryCoverage=82%, HitCoverage=61%, E-value=1e-102, Identity=66%"; Hit description =OSJNBa0029H02.5 protein
  Pfam annotation: Domain name=peroxidase; Domain location=27-273; Score=342.5; E_value=8e-100; Accession=PF00141.15; Description =Peroxidase
RRRTSSTLGQLSPSFYAQSCPGVELAVRDVVRSASLLDPSIPGKLLRLVFHDCFVEGCDASVLIQGSGTERTDPANLSLGGFNVIDAAKRLLEVVCPATVSCSDIIVLAARDAVVFTGGPAVPVMLGRRDGLVSLASNVRRNIIDTGFSVDAMAASFTAKGLTLDDLVTLSGGHTIGSAHCNTFRERFQVANGSMAPVDGSMNTDYANELIRACSANGTVSAGTAVDCDSGSASVFDNRYFANLXGGAGLLRTDAVLVQNATTRAKVAEFAQSQDGFFASWADSYARLTGLGVKTGADGEIRRTCSSVNG

SEQ ID NO: 104066 - protein, 135 aa, Setaria italica
  Transcript Sequence Number=SeqID_38092
  Gene Ontology: Mol. function=aspartic-type endopeptidase activity; Cellular component=lysosome; Biological process=lipid metabolic process
  Homolog annotation: Hit_ID=Q42456; Match level="QueryCoverage=94%, HitCoverage=24%, E-value=4e-54, Identity=77%"; Hit description =Aspartic proteinase oryzasin-1
  Pfam annotation: Domain name=SapB_1; Domain location=44-82; Score =60.1; E_value=8.2e-15; Accession=PF05184.7; Description=Saposin-like type B, region 1
MMKLGNQMVSSVGLCTFDGAHGVSAGIRSVVDDEAGESNGLFNEAMCNACETAVVWIRSQLAQNQTQDLVLQYINQLCEKLPSPMGESSVDCSRVASMPDIAFTIGGRKFALKPEQYILKVGEGTAAQCICGRPP

SEQ ID NO: 104067 - protein, 267 aa, Setaria italica
  misc_feature (202)..(202): Xaa can be any naturally occurring amino acid
  misc_feature (209)..(209): Xaa can be any naturally occurring amino acid
  Transcript Sequence Number=SeqID_38093
  Gene Ontology: Mol. function=aspartic-type endopeptidase activity; Cellular component=lysosome; Biological process=lipid metabolic process
  Homolog annotation: Hit_ID=B6TSQ9; Match level="QueryCoverage=89%, HitCoverage=45%, E-value=1e-101, Identity=73%"; Hit description =Aspartic proteinase oryzasin-1
  Pfam annotation: Domain name=Asp; Domain location=3-253; Score=195.6; E_value=1.4e-55; Accession=PF00026.15; Description=Eukaryotic aspartyl protease
  Pfam annotation: Domain name=SapB_2; Domain location=217-251; Score =58.1; E_value=3.3e-14; Accession=PF03489.9; Description=Saposin-like type B, region 2
  Pfam module annotation: Pfam domain module=Asp::SapB_2; Domain location=3-253::217-251
PSWVVPSFLSCLTLSMACYFHARYKAGQSNSYKKNGKPASIRYGTGAISGYFSLDSVKIGDVVVRNQDFIEATREPGITFMVAKFDGILGLGFKEISVGAAVPVWYNMVKQGLVDDPVFSFWFNRHAGEGQGGEIVFGGIDPNHYKGNHTYVPVTRKGYWQFGMGDVLIGGKSTGFCASGCAAIADSGTSLLTGNPTRPKPXLLVINEXIGAAGVVSQECKAVVSQYGQQIIDQLLAETQPSKICSSVGLCTLHIASLKRPFDSPAS

SEQ ID NO: 104068 - protein, 151 aa, Setaria italica
  Transcript Sequence Number=SeqID_38094
  Gene Ontology: Mol. function=aspartic-type endopeptidase activity; Cellular component=lysosome; Biological process=lipid metabolic process
  Homolog annotation: Hit_ID=Q42456; Match level="QueryCoverage=80%, HitCoverage=23%, E-value=2e-53, Identity=83%"; Hit description =Aspartic proteinase oryzasin-1
  Pfam annotation: Domain name=SapB_1; Domain location=86-124; Score =60.1; E_value=8.2e-15; Accession=PF05184.7; Description=Saposin-like type B, region 1
  Pfam annotation: Domain name=SapB_2; Domain location=23-57; Score =58.1; E_value=3.3e-14; Accession=PF03489.9; Description=Saposin-like type B, region 2
  Pfam module annotation: Pfam domain module=SapB_1::SapB_2; Domain location=86-124::23-57
IYTDMQAIITLINEKIGAAGVVSQECKAVVSQYGQQIIDQLLAETQPSKICSSVGLCTFDGAHGVSAGIRSVVDDEAGESNGLFNEAMCNACETAVVWIRSQLAQNQTQDLVLQYINQLCEKLPSPMVKAMSGMDATLLQVPTRIELLPNK

SEQ ID NO: 104069 - protein, 107 aa, Setaria italica
  Transcript Sequence Number=SeqID_38095
  Gene Ontology: Mol. function=aspartic-type endopeptidase activity; Cellular component=lysosome; Biological process=lipid metabolic process
  Homolog annotation: Hit_ID=Q42456; Match level="QueryCoverage=81%, HitCoverage=17%, E-value=1e-34, Identity=75%"; Hit description =Aspartic proteinase oryzasin-1
  Pfam annotation: Domain name=SapB_1; Domain location=12-43; Score =29.7; E_value=1.2e-05; Accession=PF05184.7; Description=Saposin-like type B, region 1
KSYCCLIGLVVDTAVVWIRSQLAQNQTQDLVLQYINQLCEKLPSPMGESSVDCSRVASMPDIAFTIGGRKFALKPEQYILKVGEGTAAQCISGFNKTNRNNTYYYVG

SEQ ID NO: 104070 - protein, 507 aa, Setaria italica
  Transcript Sequence Number=SeqID_38096
  Gene Ontology: Mol. function=aspartic-type endopeptidase activity; Cellular component=lysosome; Biological process=lipid metabolic process
  Homolog annotation: Hit_ID=Q42456; Match level="QueryCoverage=95%, HitCoverage=95%, E-value=0.0, Identity=74%"; Hit description =Aspartic proteinase oryzasin-1
  Pfam annotation: Domain name=Asp; Domain location=82-506; Score =540.9; E_value=1.5e-159; Accession=PF00026.15; Description =Eukaryotic aspartyl protease
  Pfam annotation: Domain name=SapB_1; Domain location=378-416; Score =60.1; E_value=8.2e-15; Accession=PF05184.7; Description=Saposin-like type B, region 1
  Pfam annotation: Domain name=SapB_2; Domain location=315-349; Score =58.1; E_value=3.3e-14; Accession=PF03489.9; Description=Saposin-like type B, region 2
  Pfam module annotation: Pfam domain module=Asp::SapB_1::SapB_2; Domain location=82-506::378-416::315-349
MGTGSVALLLLATVLLQALLAPPAEGLVRVPLKKRPADENGRLHDERRRGFLGNDDAAAASKKAEAEEEGDIVALKNYLNAQYYGEIGIGTPQQKFTVIFDTGSSNLWVPSSKCYLSMACYFHARYKAGQSNSYKKNGKPASIRYGTGAISGYFSLDSVKIGDVVVRNQDFIEATREPGITFMVAKFDGILGLGFKEISVGAAVPVWYNMVKQGLVDDPVFSFWFNRHAGEGQGGEIVFGGIDPNHYKGNHTYVPVTRKGYWQFGMGDVLIGGKSTGFCASGCAAIADSGTSLLTGPTAIITLINEKIGAAGVVSQECKAVVSQYGQQIIDQLLAETQPSKICSSVGLCTFDGAHGVSAGIRSVVDDEAGESNGLFNEAMCNACETAVVWIRSQLAQNQTQDLVLQYINQLCEKLPSPMGESSVDCSRVASMPDIAFTIGGRKFALKPEQYILKVGEGTAAQCISGFTAMDIPPPRGPLWILGDIFMGAYHTVFDYGNLKVGFAEAA

SEQ ID NO: 104071 - protein, 486 aa, Setaria italica
  misc_feature (16)..(16): Xaa can be any naturally occurring amino acid
  misc_feature (28)..(28): Xaa can be any naturally occurring amino acid
  Transcript Sequence Number=SeqID_38097
  Gene Ontology: Mol. function=starch synthase activity; Cellular component=chloroplast; Biological process=glucan biosynthetic process
  Homolog annotation: Hit_ID=B2Z9Y1; Match level="QueryCoverage=100%, HitCoverage=28%, E-value=0.0, Identity=90%"; Hit description=Starch synthase IIIa
  Pfam annotation: Domain name=Glyco_transf_5; Domain location=39-233; Score=246.9; E_value=4.9e-71; Accession=PF08323.3; Description =Starch synthase catalytic domain
  Pfam annotation: Domain name=Glycos_transf_1; Domain location=276 -461; Score=9.5; E_value=0.00012; Accession=PF00534.12; Description =Glycosyl transferases group 1
  Pfam module annotation: Pfam domain module=Glyco_transf_5::Glycos _transf_1; Domain location=39-233::276-461
YIMDFVFSESEEGGIXDNRNGLDYHIPXFGSIAKEPPMHIVHIAVEMAPIAKVGGLGDVVTSLSRAVQDLGHNVEVILPKHDCLNLSNVKNLHIHQNFSWDGSEIKVWRGLVEDLCVYFLEPQNGMFGVGCVYGRNDDRRFGFFCHSALEFLHQRGSSPNIIHCHDWSSAPTAWLYKENYVQSSLANARVVFTIHNLEFGAHHIGKAMKYCDKATTVSNTYSREVSGHGAIAPHLGKFYGILNGIDQDIWDPYSDSFIPVQYTSENVVEGKRAAKRALQQKFGLQQNDVPIVGIISRLTAQKGIHLIKHAIQRTLERNGQVVLLGSAPDPRIQGDFTNLAHDLQNQNHGRARLCLTYDEPLSHLIYAGSDFILVPSIFEPCGLTQLVAMRYGAIPIVRKTGGLYDTVFDVDNDKDRARARGLEPNGFSFDGADSNGVDYALNRAITSWFDARDWFHSLCKRVMEQDWSWNRPALDYIELYRSASKL

SEQ ID NO: 104072 - protein, 222 aa, Setaria italica
  misc_feature (182)..(182): Xaa can be any naturally occurring amino acid
  Transcript Sequence Number=SeqID_38098
  Gene Ontology: Mol. function=kinase activity; Cellular component =cytoplasm; Biological process=protein amino acid autophosphorylation
  Homolog annotation: Hit_ID=Q75K49; Match level="QueryCoverage=95%, HitCoverage=97%, E-value=1e-101, Identity=79%"; Hit description=Cell cycle associated protein Mob1-like protein
  Pfam annotation: Domain name=Mob1_phocein; Domain location=36-212; Score=354.1; E_value=2.6e-103; Accession=PF03637.9; Description =Mob1phocein family
  Subcellular localization annotation: CTP_CleavageSite=28; ConfidenceScore=5.25e-01
MSEKKIMSFFARSSKNQRTFRPKKSGPSGSKGMQLRRHIDNTLGQGDLREAVRLPIGEDLNEWLAVNTVDFFNNVNMLYGTLMEFCTPATCPIMSAGPKYEYRWADGVKVKKPIEVSAPKYVEYLMDWIEAQLDDETIFPQHFGAPFPANFRDVVKTILKRLFRVYAHIYHSHFQMIVKLKXEAHLNTCFKHLTLFTLEFGLIESAELAPLRELIETIRGGQ

SEQ ID NO: 104073 - protein, 52 aa, Setaria italica
  Transcript Sequence Number=SeqID_38099
KVGINNCAHLAIECTTNKPLFCDSSILVIYASNLQHFTLLLSIKHKPSGLIH

SEQ ID NO: 104074 - protein, 115 aa, Setaria italica
  Transcript Sequence Number=SeqID_38100
  Gene Ontology: Mol. function=peptide-N4-(N-acetyl-beta-glucosaminyl)as paragine amidase activity; Cellular component=plasma membrane
  Homolog annotation: Hit_ID=B6UCE2; Match level="QueryCoverage=93%, HitCoverage=18%, E-value=3e-41, Identity=71%"; Hit description =Peptide-N4-asparagine amidase A
RVGPADVIVPISQSLPLNDGLWFQINNGFDVGSASVVVPTNTFRAVLEVYLSYHSDDEFWYTNTPRDNGPFREVNVLIDGDIVGAVWPFPVVYTGGINPLLWRPITGIGSFSLPS

SEQ ID NO: 104075 - protein, 490 aa, Setaria italica
  misc_feature (62)..(62): Xaa can be any naturally occurring amino acid
  misc_feature (385)..(385): Xaa can be any naturally occurring amino acid
  misc_feature (401)..(401): Xaa can be any naturally occurring amino acid
  misc_feature (411)..(411): Xaa can be any naturally occurring amino acid
  misc_feature (429)..(429): Xaa can be any naturally occurring amino acid
  misc_feature (454)..(454): Xaa can be any naturally occurring amino acid
  Transcript Sequence Number=SeqID_38101
  Gene Ontology: Mol. function=starch synthase activity; Cellular component=chloroplast; Biological process=glucan biosynthetic process
  Homolog annotation: Hit_ID=B2Z9Y1; Match level="QueryCoverage=93%, HitCoverage=27%, E-value=0.0, Identity=69%"; Hit description=Starch synthase IIIa
  Pfam annotation: Domain name=SSIII; Domain location=15-164; Score =274.0; E_value=3.5e-79; Accession=PF07036.3; Description=Starch synthase III
  Pfam annotation: Domain name=SSIII; Domain location=186-341; Score =273.6; E_value=4.4e-79; Accession=PF07036.3; Description=Starch synthase III
  Pfam annotation: Domain name=SSIII; Domain location=355-489; Score =200.8; E_value=3.8e-57; Accession=PF07036.3; Description=Starch synthase III
  Pfam module annotation: Pfam domain module=SSIII::SSIII::SSIII; Domain location=15-164::186-341::355-489
LHQLSEEESSWAEDEVETTEDEEQYEVEESSFVSAEQDTQESPQDYLDPQALQRMLQELAEXNYSLGNKLFVFPEVLKADSTIDLYFNRDLSSLANEPDVLIKGAFNGWRWKFFTEKLHKSELGGDWWSCKLYIPKEAYRLDFVFFNGRTMYENNGRKDFVIPIESTMDEHSFADFLVEEKQRELEREARRKSQTEEQQQLEEERAANEADRAQAKAEVQTQKIKLQNVLDSAKASVDNLWYIEPITTMQGATVRLYYNRHSRPLVHSTEIWMHGGYNNWIDGLSFSERLVHIDDKDGDWWYADVALPQRAYVLDCVFADGPPGNARNYDNNGRQDFHAILPNSIMTEEGYWVEEEQRIYTRIQRERREREEAIKMKAERRAKPXKYVLEQTMRMFLVSQXHIVYTEPLEXRAGTTVDVLYNPSNTVLXGKPEVWFRCSFNRWMHPGGVLPPQXMVKAEHGSHLKATVNVPHDAYIMDFVFSESEEGGIF

SEQ ID NO: 104076 - protein, 67 aa, Setaria italica
  Transcript Sequence Number=SeqID_38102
LKSISPIISNINCCKHQHAMLCIFVYQIKLLQDFVYLGEIAPILNKHSRTSKETRLIKQIEILDRNK

SEQ ID NO: 104077 - protein, 198 aa, Setaria italica
  Transcript Sequence Number=SeqID_38103
  Gene Ontology: Mol. function=nutrient reservoir activity; Cellular component=extracellular region; Biological process=defense response to bacterium
  Homolog annotation: Hit_ID=P15590; Match level="QueryCoverage=86%, HitCoverage=30%, E-value=6e-43, Identity=54%"; Hit description =Globulin-1 S allele
  Pfam annotation: Domain name=Cupin_1; Domain location=44-194; Score =73.4; E_value=8.4e-19; Accession=PF00190.14; Description=Cupin
KTEKGKRKQKGKPNERTRRTTNASEGGHGPHWPLPPFGESHGPYSLLDQRPTIANRHGQLYQADARSYRDLAEHDVRVSFVNISAGSMSAPFYDSRSIKLACVLDGEGYIEIICPHLAQRHEGRSERGKGRRGEEESESEEQEQEEAGQGYHTIRARVSRGTAFVVPVGHPVVEVASRSTLSAGCCPGIATFVRTGLV

SEQ ID NO: 104078 - protein, 95 aa, Setaria italica
  Transcript Sequence Number=SeqID_38104
GTLTRSKGRRVGWYVGCFDAQRDQGFLAGPEESSREEREEEEEHEGRRGPKEWEKEEEREARRGREQREKEKERRGHGRREEVAETFLRLATGRL

SEQ ID NO: 104079 - protein, 496 aa, Setaria italica
  Transcript Sequence Number=SeqID_38105
  Gene Ontology: Mol. function=nutrient reservoir activity; Cellular component=extracellular region; Biological process=defense response to bacterium
  Homolog annotation: Hit_ID=P15590; Match level="QueryCoverage=78%, HitCoverage=68%, E-value=1e-150, Identity=68%"; Hit description =Globulin-1 S allele
  Pfam annotation: Domain name=AraC_binding; Domain location=65-204; Score=-2.5; E_value=0.072; Accession=PF02311.11; Description=AraC -like ligand binding domain
  Pfam annotation: Domain name=Cupin_1; Domain location=234-416; Score =134.4; E_value=3.5e-37; Accession=PF00190.14; Description=Cupin
  Pfam annotation: Domain name=Cupin_1; Domain location=36-163; Score =100.5; E_value=5.9e-27; Accession=PF00190.14; Description=Cupin
  Pfam annotation: Domain name=Cupin_2; Domain location=67-143; Score =28.0; E_value=3.9e-05; Accession=PF07883.3; Description=Cupin domain
  Pfam module annotation: Pfam domain module=AraC_binding::Cupin _1::Cupin_1::Cupin_2; Domain location=65-204::234-416::36-163::67-143
RRGDRRGEGSGDEREREQEQEQEQSRRPYVFDRRSFRRVVRSEQGSVRALRPFHEASKLLRGIRNYRVAILEANPRSFIVPSHTDAHSIGYVAQGEGVVTTIENGERRSYTVKEGDVFVAPAGAVTYLANPDGRRKLVIVKILHTISVPGKFQFFFGPGGRNPESILSSFSKSVQRAAYKTSSDRLERLFGKQDKGIIVRASEEQVRELRRHASEGGHGPHWPLPPFGESHGPYSLLDQRPTIANRHGQLYQADARSYRDLAEHDVRVSFVNISAGSMSAPFYDSRSIKLACVLDGEGYIEIICPHLAQRHEGRSERGKGRRGEEESESEEQEQEEAGQGYHTIRARVSRGTAFVVPVGHPVVEVASRGSNLQIVYFEIHADKNERVFLAGANNVLKKLDDTAKELAFAARAREVDEVLDAQRDQGFLAGPEESSREEREEEEEHEGRRGPKEWEKEEEREARRGREQREKEKERRGHGRREEVAETFLRLATGRL

SEQ ID NO: 104080 - protein, 140 aa, Setaria italica
  Transcript Sequence Number=SeqID_38106
  Gene Ontology: Mol. function=nutrient reservoir activity
  Homolog annotation: Hit_ID=P15590; Match level="QueryCoverage=38%, HitCoverage=9%, E-value=3e-14, Identity=66%"; Hit description =Globulin-1 S allele
PCLVLVVTFVVFLLPTRTNSREIHADKNERVFLAGANNVLKKLDDTAKELAFAARAREVDEVLDAQRDQGFLAGPEESSREEREEEEEHEGRRGPKEWEKEEEREARRGREQREKEKERRGHGRREEVAETFLRLATGRL

SEQ ID NO: 104081 - protein, 245 aa, Setaria italica
  Transcript Sequence Number=SeqID_38107
  Gene Ontology: Mol. function=oxidoreductase activity; Biological process=oxidation reduction
  Homolog annotation: Hit_ID=B4FNZ9; Match level="QueryCoverage=99%, HitCoverage=79%, E-value=1e-118, Identity=83%"; Hit description =General stress protein 39
  Pfam annotation: Domain name=adh_short; Domain location=1-168; Score =43.7; E_value=7.2e-10; Accession=PF00106.17; Description=short chain dehydrogenase
SGIGRAVCLCFALEGATVAFTYVKGHEEKDAEETLHALRGIKSRTGAARDPMAVPADLGYEENCRRVVEEVAGAYGGRIDVLVNNAAEQYERPSLSDITEANLDRVFRTNIYSYFLVTKHALPHMREGSSVINTSSVNAYKGNKTLTDYTATKGAIVAFTRALALQLADKGIRVNGVAPGPIWTPLIPASFGKEKVEQFGSEVPMKRAGQPAEVAPSFVFLASEQDSSYMSGQFLHVNGGVIVNG

SEQ ID NO: 104082 - protein, 135 aa, Setaria italica
  Transcript Sequence Number=SeqID_38108
  Gene Ontology: Mol. function=aspartic-type endopeptidase activity; Cellular component=chromatin; Biological process=chromatin assembly or disassembly
  Homolog annotation: Hit_ID=Q01KK6; Match level="QueryCoverage=99%, HitCoverage=9%, E-value=7e-56, Identity=70%"; Hit description =OSIGBa0118P15.5 protein
PRLPHHQQNAMEELIQHLMEAHMIRPSVSPYSSPVILVKKKDSTWGLCVDFRQLNSNTVKNKYPIPIIEDLLDELFGAQVFSKIDLRSGYHHIRMKESDIHKTAFTTHVGHFEYLVMPFGLTNAPTTFQTLMNNV

SEQ ID NO: 104083 - protein, 52 aa, Setaria italica
  Transcript Sequence Number=SeqID_38109
  Gene Ontology: Mol. function=glucose-1-phosphate adenylyltransferase activity; Cellular component=chloroplast; Biological process =glycogen biosynthetic process
  Homolog annotation: Hit_ID=A5Y3Y6; Match level="QueryCoverage=86%, HitCoverage=10%, E-value=2e-13, Identity=77%"; Hit description =Glucose-1-phosphate adenylyltransferase (Fragment)
ELIPTQKPVGSDLESMRVDTNFLSYAIGDTQKYPYIASMGVYVFKSASLLKT

SEQ ID NO: 104084 - protein, 150 aa, Setaria italica
  Transcript Sequence Number=SeqID_38110
  Gene Ontology: Mol. function=glucose-1-phosphate adenylyltransferase activity; Cellular component=chloroplast; Biological process =glycogen biosynthetic process
  Homolog annotation: Hit_ID=A5Y3Y6; Match level="QueryCoverage=86%, HitCoverage=30%, E-value=8e-64, Identity=87%"; Hit description =Glucose-1-phosphate adenylyltransferase (Fragment)
LGVYVFKRDALLDLLKSKYNQLHDFGSEILPRAVLEHNVQAYIFTGYWEDVGTIKSFFDANLALTEQPSKFEFYDPQTPFFTAPRYLPPTQLDKCKIKDAFISDGCLLSECTIKHSVIGVCSRLRSGCELMVHTSPRCMLMFYTCFASKH

SEQ ID NO: 104085 - protein, 255 aa, Setaria italica
  Transcript Sequence Number=SeqID_38111
  Gene Ontology: Mol. function=glucose-1-phosphate adenylyltransferase activity; Cellular component=chloroplast; Biological process =glycogen biosynthetic process
  Homolog annotation: Hit_ID=P55241; Match level="QueryCoverage=92%, HitCoverage=45%, E-value=1e-116, Identity=84%"; Hit description =Glucose-1-phosphate adenylyltransferase large subunit 1, chloroplastic/amyloplastic
  Pfam annotation: Domain name=NTP_transferase; Domain location=1-173; Score=51.1; E_value=4.3e-12; Accession=PF00483.15; Description =Nucleotidyl transferase
WVLEDYYNHKDIEHIVILSGDQLYRMNYMELVQKHVDDNAEITISCAPVNESRASNYGLVKFDYTGRVLQFFCSKPVGADLESMRVDTNFLSYAIGDTQKYPYIASMGVYVFKRDALLDLLKSKYNQLHDFGSEILPRAVLEHNVQAYIFTGYWEDVGTIKSFFDANLALTEQPSKFEFYDPQTPFFTAPRYLPPTQLDKCKIKDAFISDGCLLSECTIKHSVIGVCSRLRSGCELMVHTSPRCMLMFYTCFASK

SEQ ID NO: 104086 - protein, 166 aa, Setaria italica
  Transcript Sequence Number=SeqID_38112
  Gene Ontology: Mol. function=glucose-1-phosphate adenylyltransferase activity; Cellular component=chloroplast; Biological process =glycogen biosynthetic process
  Homolog annotation: Hit_ID=P55241; Match level="QueryCoverage=87%, HitCoverage=28%, E-value=2e-67, Identity=82%"; Hit description =Glucose-1-phosphate adenylyltransferase large subunit 1, chloroplastic/amyloplastic
YKNNKYKLHDFGSEILPRAVLEHNVQAYIFTGYWEDVGTIKSFFDANLALTEQPSKFEFYDPQTPFFTAPRYLPPTQLDKCKIKDAFISDGCLLSECTIKHSVIGVCSRLRSGCELMDTMMMGADIYETEEETSKLHLAGKVPIGIIEFKLGRLLSEGPSLHQRMI

SEQ ID NO: 104087 - protein, 205 aa, Setaria italica
  misc_feature (198)..(198): Xaa can be any naturally occurring amino acid
  Transcript Sequence Number=SeqID_38113
  Gene Ontology: Mol. function=glucose-1-phosphate adenylyltransferase activity; Cellular component=chloroplast; Biological process =glycogen biosynthetic process
  Homolog annotation: Hit_ID=P55241; Match level="QueryCoverage=99%, HitCoverage=38%, E-value=8e-81, Identity=73%"; Hit description =Glucose-1-phosphate adenylyltransferase large subunit 1, chloroplastic/amyloplastic
  Pfam annotation: Domain name=NTP_transferase; Domain location=87-205; Score=-62.2; E_value=0.0012; Accession=PF00483.15; Description =Nucleotidyl transferase
MQFTLALDGNTSPHLMRRSGEGGGSEMLMERLNIGVINQEKALRNRCFSGGGARTTQCVLNSGACSETLHFQTHSSRKSYADANRVSAVILGGGIGAQLFPLTSTRATPAVPVGGCHRLIDIPMSNCFNSGINKIFVMTQFNSASLNRHIHRTYLGGGITFTDGSVQVLAATQMPEEPAGWFQGTADAIRNLSGYLEXYYNHKIL

SEQ ID NO: 104088 - protein, 519 aa, Setaria italica
  misc_feature (263)..(263): Xaa can be any naturally occurring amino acid
  misc_feature (418)..(418): Xaa can be any naturally occurring amino acid
  Transcript Sequence Number=SeqID_38114
  Gene Ontology: Mol. function=glucose-1-phosphate adenylyltransferase activity; Cellular component=chloroplast; Biological process =glycogen biosynthetic process
  Homolog annotation: Hit_ID=P55241; Match level="QueryCoverage=100%, HitCoverage=100%, E-value=0.0, Identity=81%"; Hit description =Glucose-1-phosphate adenylyltransferase large subunit 1, chloroplastic/amyloplastic
  Pfam annotation: Domain name=Hexapep; Domain location=467-484; Score =18.3; E_value=0.032; Accession=PF00132.16; Description=Bacterial transferase hexapeptide (th
  Pfam annotation: Domain name=NTP_transferase; Domain location=87-365; Score=388.3; E_value=1.3e-113; Accession=PF00483.15; Description =Nucleotidyl transferase
  Pfam module annotation: Pfam domain module=Hexapep::NTP_transferase; Domain location=467-484::87-365
MQFTLALDGNTSPHLMRRSGEGGGSEMLMERLNIGVINQEKALRNRCFSGGGARTTQCVLNSGACSETLHFQTHSSRKSYADANRVSAVILGGGIGAQLFPLTSTRATPAVPVGGCHRLIDIPMSNCFNSGINKIFVMTQFNSASLNRHIHRTYLGGGITFTDGSVQVLAATQMPEEPAGWFQGTADAIRKFVWVLEDYYNHKDIEHIVILSGDQLYRMNYMELVQKHVDDNAEITISCAPVNESRASNYGLVKFDYTGRVLXFFEKPVGADLESMRVDTNFLSYAIGDTQKYPYIASMGVYVFKRDALLDLLKSKYNQLHDFGSEILPRAVLEHNVQAYIFTGYWEDVGTIKSFFDANLALTEQPSKFEFYDPQTPFFTAPRYLPPTQLDKCKIKDAFISDGCLLSECTIKHSVIGXVCSRLRSGCELMDTMMMGADIYETEEETSKLHLAGKVPIGIGENTKIRNCIIDMNARIGKNVVIANSKGIQEADHPEEGYYIRSGIVVILKNAIIKDGSVI

SEQ ID NO: 104089 - protein, 102 aa, Setaria italica
  Transcript Sequence Number=SeqID_38115
  Gene Ontology: Mol. function=transferase activity, transferring glycosyl groups; Cellular component=perinuclear region of cytoplasm; Biological process=biosynthetic process
  Homolog annotation: Hit_ID=B9SI01; Match level="QueryCoverage=82%, HitCoverage=20%, E-value=1e-25, Identity=65%"; Hit description=Alpha- 1,3-mannosyltransferase, putative
IKFLLLIPLLKLKASSKIVFYCHFPDLLLAQHTTMLRRLYRKPIDMIEEYTTGMADLILVNSKFTAATFARTFRAVHARGIEPGVLYPAVSVEQFHEPHAYK

SEQ ID NO: 104090 - protein, 138 aa, Setaria italica
  Transcript Sequence Number=SeqID_38116
  Gene Ontology: Mol. function=transferase activity, transferring glycosyl groups; Cellular component=perinuclear region of cytoplasm; Biological process=biosynthetic process
  Homolog annotation: Hit_ID=B9SI01; Match level="QueryCoverage=100%, HitCoverage=35%, E-value=1e-45, Identity=64%"; Hit description=Alpha- 1,3-mannosyltransferase, putative
FPDLLLAQHTTMLRRLYRKPIDMIEEYTTGMADLIKVNSKFTAATFARTFRAVHARGIEPGVLYPAVSVEQFHEPHAYKLNFLSINRFERKKNLDLAISAFALLRSGGALQDATLTVAGGYDKRLKENVDYLEELKRL

SEQ ID NO: 104091 - protein, 111 aa, Setaria italica
  misc_feature (33)..(33): Xaa can be any naturally occurring amino acid
  Transcript Sequence Number=SeqID_38117
  Gene Ontology: Mol. function=transferase activity, transferring glycosyl groups; Cellular component=perinuclear region of cytoplasm; Biological process=biosynthetic process
  Homolog annotation: Hit_ID=Q9ZV98; Match level="QueryCoverage=79%, HitCoverage=21%, E-value=8e-23, Identity=61%"; Hit description =F9K20.16 protein
TTTRLAIPACQPLYRKPIDMIEEYTTGMADLIXVSKFTAATFARTFRAVHARGIEPGVLYPAVSVEQFHEPHAYKLNFLSINRFERKKNLDLANSAFALLRSTVVLCKMQL

SEQ ID NO: 104092 - protein, 413 aa, Setaria italica
  Transcript Sequence Number=SeqID_38118
  Gene Ontology: Mol. function=transferase activity, transferring glycosyl groups; Cellular component=nucleus; Biological process =biosynthetic process
  Homolog annotation: Hit_ID=B9SI01; Match level="QueryCoverage=94%, HitCoverage=97%, E-value=1e-169, Identity=70%"; Hit description =Alpha-1,3-mannosyltransferase, putative
  Pfam annotation: Domain name=Glycos_transf_1; Domain location=208 -386; Score=176.4; E_value=8e-50; Accession=PF00534.12; Description =Glycosyl transferases group 1
MAAAGGGAGGSSPSGTKTKKLKVAVIHPDLGIGGAERLIVDAACELASHGHDVHVFTSHHDKNRCFEETVSGPFPVTVYGDFLPRHVFYRFHAVCAYLRCIFVALCVLLWWPSFDVILVDQVSVVIPLLKLKASSKIVFYCHFPDLLLAQHTTMLRRLYRKPIDMIEEYTTGMADLILVNSKFTAATFARTFRAVHARGIEPGVLYPAVSVEQFHEPHAYKLNFLSINRFERKKNLDLAISAFALLRSGGALQDATLTVAGGYDKRLKENVDYLEELKRLAVTEGVSGQVKFVTSCSTSERNELLSNCLCVLYTPKDEHFGIVPLEAMAAHKPVIACNSGGPVETVVNEVTGFLCDPSPAEFSKAMLKLVNDPDLALRMGKQARDHVVQKFSTKTFGDLLNSYVLNVYHERME

SEQ ID NO: 104093 - protein, 151 aa, Setaria italica
  Transcript Sequence Number=SeqID_38119
  Gene Ontology: Mol. function=RNA binding
  Homolog annotation: Hit_ID=B6TW67; Match level="QueryCoverage=80%, HitCoverage=31%, E-value=2e-35, Identity=62%"; Hit description=CFM6
MTSHQADSISAYSFKMPFHLDTRFNHQALEKSKYEQSLETVRRFIAVSEKELELYYRHVALYGIPQSQKADLVCGDNREASLLKMGGLDQAKDQLPYLGTNHFSDLHISDISESDEEDTSGSEYNVNDDDTEDMNNISEDAISDLGLANRE

SEQ ID NO: 104094 - protein, 437 aa, Setaria italica
  Transcript Sequence Number=SeqID_38120
  Gene Ontology: Mol. function=aspartic-type endopeptidase activity; Cellular component=extracellular region; Biological process =proteolysis
  Homolog annotation: Hit_ID=B9SA53; Match level="QueryCoverage=80%, HitCoverage=79%, E-value=5e-22, Identity=25%"; Hit description =Aspartic proteinase nepenthesin-2, putative
  Subcellular localization annotation: CTP_CleavageSite=69; ConfidenceScore=5.10e-01
MEMKVMTALAIITPLFLHHLSFTIADHTRAFSNSSAGFSLPIFAKQSPDRTIRRGTDGFLYLQHSLSASAANITTVGPVDDRLHLTEVHFGTGDGRRKLLLELDATAPLTWIQCIPCHPVATQTGPLFDGELSPTFQHVHSSVCTPPFHPDPTIHRCQFSISNPMGLLVQGLLSVDQYTREDGLVFPRFFFGCVHETHNFHNINTFAGIFAYRKFAVQAMANRLTRSSYCLFRETNRQGFLRFGTEADIPHKPHYQTTRILPANDVHESAYYVSLAGVSVGERRLSGVRPEMFARRKDGQGGSIIDLGTPLMEIVEEVYHVVEEAVWSDLERYGAERVEQAGYGLCIQATEAIKGRLQSLSLHFAEEEATLVISPKQLFLMMDNKQAGQIACLAMVPGPRTIIGALQQVDTRFVYDLKDNKLSFAPESCIQDTVPVV

SEQ ID NO: 104095 - protein, 244 aa, Setaria italica
  Transcript Sequence Number=SeqID_38121
  Homolog annotation: Hit_ID=B6TJU9; Match level="QueryCoverage=99%, HitCoverage=59%, E-value=1e-129, Identity=88%"; Hit description =Kelch motif family protein
  Pfam annotation: Domain name=Kelch_2; Domain location=123-171; Score =22.0; E_value=0.0025; Accession=PF07646.7; Description=Kelch motif
CSPGGKTADYSALAFSVDRSSHQYTVAIARSNQDPSEYYQWEFTIHLYESVTGNWVTPFTGVLLGWRGGDECVICDGILYYLVYSTGVLVNNNEHRHCLVMYDLAARPNHSSLMSMAIPVPCALTCGRLMNLSERLVLVGGIGKQDRPGIIKGIGIWELHNKEWREVARMPHKFFQGFGEFDDVFASCGADDLIYIQSYGSPALLTFEMNQKLWKWSVKSPVSKRFPLQLFTGFSFEPRLDIAS

SEQ ID NO: 104096 - protein, 92 aa, Setaria italica
  Transcript Sequence Number=SeqID_38122
  Gene Ontology: Mol. function=phosphatase activity; Biological process= metabolic process
  Homolog annotation: Hit_ID=B6UCU8; Match level="QueryCoverage=98%, HitCoverage=25%, E-value=5e-27, Identity=71%"; Hit description=4 -nitrophenylphosphatase
AASPAPHRGVARRSVMAAAGAAPAAKLEDADALIDSVETFIFDCDGVIWKGDKLIDGVPETLDLLRSKGKRLVFVTNNSTKSRKQYGKKFET

SEQ ID NO: 104097 - protein, 69 aa, Setaria italica
  Transcript Sequence Number=SeqID_38123
  Homolog annotation: Hit_ID=Q7XF93; Match level="QueryCoverage=88%, HitCoverage=18%, E-value=2e-12, Identity=60%"; Hit description =Phosphate-induced protein 1 conserved region containing protein
PNRETPGRPVEVAAACPGVYGRGAYPGYPGAVRQDKVTGAGYNVVGRNGRKYLVPALVDPDNYSCIILS

SEQ ID NO: 104098 - protein, 87 aa, Setaria italica
  Transcript Sequence Number=SeqID_38124
APSGSWAGPFGYSFRTSRLRLLHSHKLVLHVVSSGAKHEVNEGDLRQVQLGVEIGDDAGWQTGCRRGRQCHGKQGRRRPGSCGLTER

SEQ ID NO: 104099 - protein, 198 aa, Setaria italica
  Transcript Sequence Number=SeqID_38125
NKIPVENNQSIVAAIPYREINEFHWKCEAQDNEYLDEVLSYLKNMNVDLPVCGTVELVQCARALKADNTLWKFVHAKRRELVVGWVIPDELLPDRGTDRAVFFQVCLKDLQVKYGDGGGDLVENIRNNGQHLVEENTLKELDPPASGYTVLFKYFQVMHIFGHHYPRVFCQFFLGMHAQGCVPSSSSKNLSHIIKQYQ

SEQ ID NO: 104100 - protein, 172 aa, Setaria italica
  Transcript Sequence Number=SeqID_38126
  Homolog annotation: Hit_ID=B9T5G8; Match level="QueryCoverage=99%, HitCoverage=32%, E-value=2e-12, Identity=28%"; Hit description=DNA double-strand break repair rad50 ATPase, putative
SYFLEESIESLYERMFTAENASQLFLGTSKELIGKITTIQVSLSASIHREDDLKSKLEESLMKLNANQSTREILPGDNDNNTSQEAVEIQVLSPPEFLTLRNKVQQLEEWLRDSGSHPQWSLLSRGATEEEQSTAQSEISTFGNIISDLKLAISNAESRTQKAETRCTQLNQ

SEQ ID NO: 104101 - protein, 70 aa, Setaria italica
  Transcript Sequence Number=SeqID_38127
FHRNFGDDVEVISVQEPVAPKPPLYAHITFYNQETLFHILAGRPRVKFVIRGKHLWARKFVPKRKKAQNF

SEQ ID NO: 104102 - protein, 328 aa, Setaria italica
  Transcript Sequence Number=SeqID_38128
  Homolog annotation: Hit_ID=Q9XI97; Match level="QueryCoverage=94%, HitCoverage=88%, E-value=9e-17, Identity=26%"; Hit description =F13F21.27 protein
MAPGIFSATRSVHMIVRQLFIRLVFSLQFESSLSMEIISFWMWLEGIGHADFLASIDALDNHDLRSIALAAKMLIETLRRNSGHQPNHRSVQGGYFCIEALKGIVLYLNNVCCKVLEDILQVATAKERICHRAHQAQPQQNVMARAPMSTRDLLSRIKASYISARSHEAEGSSSRSIMPSPPKTHTLKDIENPIEQCLSSYPLATLFESLTITEEEEEEPAADAIQIQQPPSVPRDERTLFVTFSNGYPFTADELYEFFTRNFGDDVEVISVQEPVAPKPPLYAHITFYNQETLFHILAGRPRVKFVIRGKHLWARKFVPKRKKAQNF

SEQ ID NO: 104103 - protein, 398 aa, Setaria italica
  Transcript Sequence Number=SeqID_38129
  Gene Ontology: Mol. function=cysteine-type peptidase activity; Biological process=proteolysis
  Homolog annotation: Hit_ID=B6TBN8; Match level="QueryCoverage=88%, HitCoverage=95%, E-value=7e-31, Identity=29%"; Hit description=F-box domain containing protein
  Pfam annotation: Domain name=F-box; Domain location=21-71; Score =22.5; E_value=0.0018; Accession=PF00646.25; Description=F-box domain
MSQPEARRRRRSREPRREEPRSPQQLVEDTVGEIVLRLPPDDPALLVRASAVNKTWRRAVAEPSFPASYRAFHKKPPVLGIFRTDAILIPTTSFCPAAAGYRDCQVLDCRHGRVLLENLDCGDIDVWNPITGDQYTLPEAPEDISLVCNGAVLCAAADDDCDHLACHTGPFLVALVGASAEGQIHACLYSSESGEWSGLTSIDLDYIAPDHFTTTCITVDVVPAALMENALYFIGDFGNEILKYEFDPEEPSLTAIDPPPGVETCCDGVVVMPEADGRLGFAYVEAHRLHMWSMQAGPDGNPQWEKRRVIPLELLLPPIRRASPYLTGFVHAINCIVVTTEDEVYTIELKSYKTRKICNKDMSYSGFLFTAFCIPDFAFVPPPPPGPPPPPPPAANED

SEQ ID NO: 104104 - protein, 77 aa, Setaria italica
  Transcript Sequence Number=SeqID_38130
NNAHSCVTITYPPPRYSFENCKTLGKLLHNPKSGDILLSLWHIRVHYPKDLNSYPCIIPTSGKVNMKIKERATYYTK

SEQ ID NO: 104105 - protein, 174 aa, Setaria italica
  Transcript Sequence Number=SeqID_38131
  Homolog annotation: Hit_ID=Q6MW71; Match level="QueryCoverage=87%, HitCoverage=11%, E-value=6e-11, Identity=31%"; Hit description =B1340F09.12 protein
NQVLHVPKLTEKQFESLPKDKAGQYIFRVNLKKRTTLVLNFLLLEKCNIPDNYRGQFSMFLKSIKDLVGYYRRSKNRMMDARDKPQIFHGQPQIINLSGDQAPSGGGPSHQKQQEQLVHSQLRENIISTTSAAQEMNHNHLFGVARSCFPEKSRGSLQSLPIRLSYSRYLFCHT

SEQ ID NO: 104106 - protein, 63 aa, Setaria italica
  Transcript Sequence Number=SeqID_38132
ALKGEHLLVALSEIHVNSLVQHDYIRIIRIQHSIVMLIYKRHGNCKYRFRVNLKKKFSTSVVL

SEQ ID NO: 104107 - protein, 131 aa, Setaria italica
  Transcript Sequence Number=SeqID_38133
  Gene Ontology: Mol. function=DNA-directed RNA polymerase activity; Cellular component=chloroplast; Biological process=transcription
  Homolog annotation: Hit_ID=Q8RVV8; Match level="QueryCoverage=84%, HitCoverage=50%, E-value=4e-40, Identity=73%"; Hit description=DCL protein
RRKEEGKRESDAGSSLDGLVEDEEAPEEEGIQGRRKAPEREWVDWEDLILEDTVPLVGFVRMILHSGKYESGDRLSPEHEKAILERLLPYHPQYEKKIGCGIDYITVGLHPEFENSRCLFIVRKDGERVDF

SEQ ID NO: 104108 - protein, 118 aa, Setaria italica
  Transcript Sequence Number=SeqID_38134
  Gene Ontology: Mol. function=DNA-directed RNA polymerase activity; Cellular component=chloroplast; Biological process=transcription
  Homolog annotation: Hit_ID=Q8RVV8; Match level="QueryCoverage=88%, HitCoverage=47%, E-value=3e-40, Identity=70%"; Hit description=DCL protein
KFQDKCRESKKKVLIHNILFHCRYESGDRLSPEHEKAILERLLPYHPQYEKKIGCGIDYITVGLHPEFENSRCLFIVRKDGERVDFSFWKCVKGLIRQKYPMYADSFILRHFRRRQDY

SEQ ID NO: 104109 - protein, 156 aa, Setaria italica
  Transcript Sequence Number=SeqID_38135
  Gene Ontology: Mol. function=metal ion binding; Biological process =metal ion transport
  Homolog annotation: Hit_ID=Q6K791; Match level="QueryCoverage=85%, HitCoverage=61%, E-value=7e-23, Identity=44%"; Hit description =Putative farnesylated protein
  Pfam annotation: Domain name=HMA; Domain location=18-80; Score=27.9; E_value=4.2e-05; Accession=PF00403.18; Description=Heavy-metal -associated domain
LFFVFLSSLPVVFLGWLSCKVALFHCEVCAQWIRKRILKMKGVQSAELDLKASEVTVKGVLEEAKLAKYMYKRIGKNVSIIKSEPVAPLESPGGDDMVKEEKKVEGVEEKEKEGDGNTGGEEDKMDKEMDAAAIATANLYNVTNPTSLDNYPRTVN

SEQ ID NO: 104110 - protein, 341 aa, Setaria italica
  Transcript Sequence Number=SeqID_38136
  Gene Ontology: Mol. function=metal ion binding; Biological process =metal ion transport
  Homolog annotation: Hit_ID=B6U4D0; Match level="QueryCoverage=82%, HitCoverage=82%, E-value=2e-48, Identity=57%"; Hit description=ATFP3
  Pfam annotation: Domain name=HMA; Domain location=159-221; Score =31.7; E_value=2.9e-06; Accession=PF00403.18; Description=Heavy-metal- associated domain
  Pfam annotation: Domain name=HMA; Domain location=59-123; Score=44.5; E_value=4.3e-10; Accession=PF00403.18; Description=Heavy-metal -associated domain
  Pfam module annotation: Pfam domain module=HMA::HMA; Domain location =159-221::59-123
HSTTRQGKEAMGEEVRKEEVEKPKAGVEEKPKDAVAEAKPKNGEEKKEEAPPPPPEEVEMRVYMHCKGCALKVKKILKRFNGVEGVIADSKTHKVVVKGKKVAADPTKVIEHVQKKTGHKVELLSPIPPPVEEKKEEERKEELEPPKPEEKEEPPVIQVVLKVHIHCEVCAQWIRKRILKMKGVQSAELDLKASEVTVKGVLEEAKLAKYMYKRIGKNVSIIKSEPVAPLESPGGDDMVKEEKKVEGVEEKEKEGDGNTGGEEDKMDKEMDAAAIATANLYMYYPQFAFPGGYYSPPTLLPPGYIYQAAYPPPSYTAYAPHHQMMAPQTFSDENPNACSII

SEQ ID NO: 104111 - protein, 357 aa, Setaria italica
  Transcript Sequence Number=SeqID_38137
  Gene Ontology: Mol. function=DNA binding; Biological process =regulation of transcription
  Homolog annotation: Hit_ID=Q7XJ90; Match level="QueryCoverage=91%, HitCoverage=94%, E-value=7e-68, Identity=43%"; Hit description=NAM -related protein 1
  Pfam annotation: Domain name=NAM; Domain location=32-160; Score =274.1; E_value=3.2e-79; Accession=PF02365.7; Description=No apical meristem (NAM) protein
MADQGVFAHEQGTTGDQHQQPHGIGVGDDLELPPGFRFYPSDEEIVTFYLKPKVEQRSFTCIAIGEVDLKRTEPCELPGKAKTGEKEWYFFYEKDRKYRTGLRMNRATEGGYWKATGKDKEIYRAMTGVLIGMKKTLVFYTGRAPRGQKTTWVMHEYRLEGNNKSPHPSSSSTSTTIKSSSASEATDEWVVCRVFRKATGIKKAPTPPPYNHAIVDSGIDQHSIPMPPPLQLPMLPNFTMDPVGSYYSIAGVSSSSLSPVIPPITAGTGNDMLQMNSALFGNMMAVPPPMPFSHQLGIGTASASTFMAAPQSEASSILSQKDVGMSLHQTNAMDISSMVSATLKSMGTMDMDGFWKY

SEQ ID NO: 104112 - protein, 74 aa, Setaria italica
  Transcript Sequence Number=SeqID_38138
  Subcellular localization annotation: CTP_CleavageSite=27; ConfidenceScore=5.04e-01
FSHIRGMCTMYTSNGCNRIKFHPRRVRALEVVGREAIRSVRFSLSTTEQYFSLTTNQPFQLFSRFISPAEQVDY

SEQ ID NO: 104113 - protein, 104 aa, Setaria italica
  Transcript Sequence Number=SeqID_38139
  Subcellular localization annotation: CTP_CleavageSite=20; ConfidenceScore=5.09e-01
GGRRVNFARTIGTQTHGVFRCKTFKTSCPRWTQQRVVFLSKKIMHPNEITSKIHRILRALPWEEPKTLNPDAEAPGLEVVRTWWLAGQHEPAVLGHGSAPDQTK

SEQ ID NO: 104114 - protein, 156 aa, Setaria italica
  Transcript Sequence Number=SeqID_38140
  Gene Ontology: Mol. function=calcium ion binding; Cellular component =nucleus; Biological process=regulation of transcription, DNA -dependent
  Homolog annotation: Hit_ID=Q7XI44; Match level="QueryCoverage=94%, HitCoverage=12%, E-value=3e-34, Identity=54%"; Hit description =Putative anther ethylene-upregulated protein ER1
  Pfam annotation: Domain name=CG-1; Domain location=1-53; Score=32.9; E_value=1.5e-07; Accession=PF03859.8; Description=CG-1 domain
VKEAHEKLKAGSIDVLHCYYAHGEENENFQRRTYWLLEEDFTHIVLVHYLEVKGCKQSFSRVKEEFMQLSNVDSPSCSNSITSQNHMGPQTMEAAESPISGQISDYEDTESDNFRASSRSDNFRASSRYHPLAEMQQPVDGFMTENMLYAFFLLTC

SEQ ID NO: 104115 - protein, 441 aa, Setaria italica
  Transcript Sequence Number=SeqID_38141
  Gene Ontology: Mol. function=calcium ion binding; Cellular component =nucleus; Biological process=regulation of transcription, DNA -dependent
  Homolog annotation: Hit_ID=Q7XI44; Match level="QueryCoverage=100%, HitCoverage=40%, E-value=1e-149, Identity=61%"; Hit description =Putative anther ethylene-upregulated protein ER1
  Pfam annotation: Domain name=CG-1; Domain location=19-137; Score =294.2; E_value=2.9e-85; Accession=PF03859.8; Description=CG-1 domain
MAENRRFVLPGQPPDFSQILQEARKRWLRPTEICEILSNYKLFSIAAEPPSRPPSGSLFLFDRKVLRYFRKDGHNWRKKKDGKTVKEAHEKLKAGSIDVLHCYYAHGEENENFQRRTYWLLEEDFTHIVLVHYLEVKGCKQSFSRVKEEFMQLSNVDSPSCSNSITSQNHMGPQTMEAAEKPNTWMEAAESPISGQISEAEFGAADNFRASSRYHPLAEMQQPVDGFMTENMLYASSSTVGSRQGYHGEMLPTTANVDNHSFSHHDIARMFDNANTGLSSVSRILFDSVPFNEPFTDYSTGFTEPTLHSSFACLEANNLEDSSHLQTFTSEALYTNHLSKEEADALSFAGIPSSEVNGSRCTESSIKHPLLKQSSLDLLTIEPTGLKKHDSFSRWMSKELKEVVDLGIKSTSDAFWSNIETVKVPDRCNVLTNEQLDAYVV

SEQ ID NO: 104116 - protein, 63 aa, Setaria italica
  misc_feature (49)..(49): Xaa can be any naturally occurring amino acid
  Transcript Sequence Number=SeqID_38142
IRFGDLMDDPLACMLGSPIRDMESHNPSENTRAVLKRTEPRNRKRSHRXHHRHQNADNLVAAS

SEQ ID NO: 104117 - protein, 442 aa, Setaria italica
  misc_feature (16)..(16): Xaa can be any naturally occurring amino acid
  Transcript Sequence Number=SeqID_38143
  Gene Ontology: Mol. function=hydrolase activity; Cellular component =mitochondrion; Biological process=cell redox homeostasis
  Homolog annotation: Hit_ID=Q54LP9; Match level="QueryCoverage=81%, HitCoverage=57%, E-value=2e-54, Identity=35%"; Hit description=RNA -binding region-containing protein (RNP-1)
  Pfam annotation: Domain name=4HBT; Domain location=114-193; Score =14.4; E_value=0.016; Accession=PF03061.14; Description=Thioesterase superfamily
  Pfam annotation: Domain name=4HBT; Domain location=311-393; Score =8.7; E_value=0.054; Accession=PF03061.14; Description=Thioesterase superfamily
  Pfam module annotation: Pfam domain module=4HBT::4HBT; Domain location=114-193::311-393
GREAEDGESGEGGGGXAIDAGKSARRPLSLWPGMYHSPVTNALWEARSSIFERMMDAGNSGAAADAADAGEQRAPTELLVKTPAQSRTSIVYKFATDDILREQYRDPWNEVRIGKLLEDLDALAGTIAVKHCSDEDSTTRPLLVVTASVDKMELKKPIRVDTDLKIAGAVTYVGRSSIDIQIEVTQVDQDGDNDSDPIALTANFTFVARDSKTGKSAPVNRLSPETEREKQLFSEREARDKMRKRKREEQKGGLENGIHKLRAEAERLNALLAEGRVFSDLPALADRDSILLKDTRLENSLVCQPQQRNLHGRIFGGFLMHRAFELAFSTAYAFVGQRPCFLEVDHVDFLKPVDVGDFLRFKSCVLYTQLDNPEQPLVNVEVVAHVTRPELRKSEVSNTFHFTFTVCSNILKNGLKIRNVVPSTEEEARRILERMEAEGLCN

SEQ ID NO: 104118 - protein, 345 aa, Setaria italica
  Transcript Sequence Number=SeqID_38144
  Gene Ontology: Mol. function=DNA binding; Cellular component=nucleus; Biological process=regulation of transcription
  Homolog annotation: Hit_ID=Q7XJ90; Match level="QueryCoverage=95%, HitCoverage=94%, E-value=4e-80, Identity=48%"; Hit description=NAM -related protein 1
  Pfam annotation: Domain name=NAM; Domain location=19-151; Score =270.3; E_value=4.3e-78; Accession=PF02365.7; Description=No apical meristem (NAM) protein
MGGQKVQPKGMSIKDGLQLPPGFRFYPSDEEIITFYLKPKVHQSNFSCTAIGEVDLNRIEPWELSGKAKMGDKEWYFFYLKDRKYPTGKRTNRATKGGYWKATGKDREIYRAATKDELPLLVGMKKTLVFYKGRAPTGKKTDWVMHEFRLEGTNKVPCPASSSTSTTTIKSSSSEDEWVVCRVFDKTTRVKREPALPLFNVAMNGGGIDQSSISMPMPLQFSMLSDFTMDPAASYYSTIDARSLAVPPVMPPLSGMGNIGLQVASTLFGNSMVVAPPMSIYHQMGMGAEGASSFLGASKSGPSLMVSQKDTGVDHDQANANEISQMISANPEFVATKDMDGIWKY

SEQ ID NO: 104119 - protein, 120 aa, Setaria italica
  Transcript Sequence Number=SeqID_38145
MSSMPFDDEYEKRRAKAYRDYDIIRKQFPVLVEKTAALDPPKKKTRRSAKKRKTEAEKKTGDPPAPALTPETRARYKELAGIIKGFLKELGDDVDEAAAAAGGSTSQAAPPPPAAAGDKQ

SEQ ID NO: 104120 - protein, 111 aa, Setaria italica
  Transcript Sequence Number=SeqID_38146
  Subcellular localization annotation: CTP_CleavageSite=33; ConfidenceScore=5.67e-01
MTMQQHGHRTSTAASGAWSPSTASSSSAASTPRGSKTWRRRPAKEALEEAQAKGTLVDRIGVLEDRVLKMEEDMDINITTMSAGSSSSRKKSKGIKSLVKSCVRGKLKTKE

SEQ ID NO: 104121 - protein, 166 aa, Setaria italica
  Transcript Sequence Number=SeqID_38147
  Subcellular localization annotation: CTP_CleavageSite=90; ConfidenceScore=5.82e-01
GSLAGSGLISTPSTTSTFSISIDFSTPISSSTVAIFLTSKGFSTPTSSTTSLAITKPSALCSFQGLSSSTLTTLAGSISFTLPSCTITIVASLTDSGLTLTPSIGITFSISVGFTTPMYPTAAEIVSTSKGLLTPKSSTASLALASPSTSCSFQGLSSITHSTLAG

SEQ ID NO: 104122 - protein, 122 aa, Setaria italica
  Transcript Sequence Number=SeqID_38148
  Subcellular localization annotation: CTP_CleavageSite=65; ConfidenceScore=5.95e-01
GLTSTPFTTTIFSLSVAFSTPMSSIATTIFLTSNGFSTPTSSTASVAIAKSSIFCSFPELPSSILSTLAESTSFTLPARATWIDASIELLTILVGLTLLATKLDLEFTTIVALHAGSGLAAS

SEQ ID NO: 104123 - protein, 57 aa, Setaria italica
  Transcript Sequence Number=SeqID_38149
  Subcellular localization annotation: CTP_CleavageSite=41; ConfidenceScore=5.73e-01
SPSGSDFFFLSSTNLFTTFASTVTSTFAISVGFSTLISSIAASKFSTSKGFSRSTYF

SEQ ID NO: 104124 - protein, 406 aa, Setaria italica
  misc_feature (160)..(160): Xaa can be any naturally occurring amino acid
  misc_feature (173)..(173): Xaa can be any naturally occurring amino acid
  misc_feature (308)..(308): Xaa can be any naturally occurring amino acid
  misc_feature (311)..(311): Xaa can be any naturally occurring amino acid
  Transcript Sequence Number=SeqID_38150
  Pfam annotation: Domain name=Candida_ALS; Domain location=12-396; Score=-219.3; E_value=0.09; Accession=PF05792.5; Description=Candida agglutinin-like protein (ALS)
  Subcellular localization annotation: CTP_CleavageSite=79; ConfidenceScore=5.84e-01
GLTSTPFTTTIFSLSVAFSTPMSSIATTIFLTSNGFSTPTSSTASVAIAKSSIFCSFPELPSSILSTLAESTSFTLPARATTIVALHAGSGLAASSSTPTSFFVDSFVASSPPKATISLFSSFSKANGHLASAKGANKSSSSATTIVTTGTPTSFFLPNXTTISTSITYLLTXSPSKSGFSTTSVTFASTTIPSSSSLGSPLSSPFSVSGEAIVSSSSPNSPLSNLGSAISVGVDFVIERSTSFSHTTSSLLPSSFMASAVPKALPSASSIASSSSPPPSPPLSPSISSFSTSITFVTASNVPSSSTXLHXSTTSISFSTSSGSIFSLLDFGTNSRDKIPSTFEETILSTFVGFSTLTPSTITSTFAISVGFSTLISSIAASKFSTSKGFSRSTYFIASLLVAWPS

SEQ ID NO: 104125 - protein, 555 aa, Setaria italica
  Transcript Sequence Number=SeqID_38151
EDDAKVAVAEYEKLEQQGEKGKEVGYGGEDGGELDKENKAKVSVVSVEIAAPEDNVAILVEPNGELGYEKEINNDIVVVEGEETVKESTEKDGVEDEVAKPEPTSEPTSKVVDDGSIKEVHPASEDYVLKYSLAKEQDVEGQAIASEVVEVVSAEKPLKVENIDAGVEDISVDEPTKIENVAIIAKDGDVEKPMEVENVAACSGDSILSRELALEPSKENNDPKEYQCATEVVDHEEQVDDDCITEAMLVVANAKNDEVKGYRGRDDGGKMEKAEEDAKGESLSVVEAVKDDDSSELVAQHTEPGVSVLQPAPVLTAQSKSENSELGKDDASVASHDTSKGEDKGELCDKQEEKVGVTIEANVANKYEDDAKVAVAEYEKLEQQGEKGKEVGYGGEDGGELDKENKAKVSVVSVEIAAPEDNVAILVEPNSELGYEKEENNDIVVMRDGEAPKELIEMDVNFEDRATKTELMREASTTVVHDGSIKEVDPASVDSMLEDSPGKEQNIEDLAIATEAVEDVGVEKPLEVKNIAAVEEDIGVEKSIEIENVEVVEGV

SEQ ID NO: 104126 - protein, 345 aa, Setaria italica
  Transcript Sequence Number=SeqID_38152
GQRGGCGIEGKGGGFGSLEAENDEAQGEGEDDGGEEEEEDAKGESSGVGEAIKDDGGREPAMHDTEVVVDVLEVAPALESKLENNEFGVDDTTLASPDVLEGVDKGKLQEAWEEEEVGVTVEAKVVNKLVDDRKKKSEPEGDQEEEVGYKGWVGGELGEEKEVDHSAVSVEAVEDKGAPFAKANGELGYEKEINNDIVVVEGEETVKESTEKDGVEDEVAKPEPTSKVVDDGSIKEVHPASEDYVLKYSLAKEQDVEGQAIASEVVEVVSAEKPLKVENIDAGVEDISVDEPTKIENVAIIAKDGDVEKPMEVENVAACSGDSILSRELALEKKLGQLRNQRQRK

SEQ ID NO: 104127 - protein, 67 aa, Setaria italica
  Transcript Sequence Number=SeqID_38153
  Subcellular localization annotation: CTP_CleavageSite=38; ConfidenceScore=5.21e-01
RKHLIITGTLPTTTLGPIAAAMAAKIFALFTLLALSVSAATAVFLPQGSLAATAAIPQYLPRLSHVG

SEQ ID NO: 104128 - protein, 61 aa, Setaria italica
  Transcript Sequence Number=SeqID_38154
  Subcellular localization annotation: CTP_CleavageSite=23; ConfidenceScore=5.03e-01
FLITAAYLQQQQLLPNVFNQLALASPVAQLQQQQQLLSVNPLGVMNPAAFWQQPIIGSAIF

SEQ ID NO: 104129 - protein, 119 aa, Setaria italica
  Transcript Sequence Number=SeqID_38155
  Gene Ontology: Mol. function=nutrient reservoir activity
  Homolog annotation: Hit_ID=Q5EN77; Match level="QueryCoverage=89%, HitCoverage=73%, E-value=2e-12, Identity=46%"; Hit description=Zein -like seed storage protein (Fragment)
  Subcellular localization annotation: CTP_CleavageSite=34; ConfidenceScore=5.25e-01
TNLINLKTQLSSLLLATMAAKIFALFTLLALSVSAATAVFLPQGSLAATAAIPQYLPHVTALGYENPIVQSYRLQQALAANILSSPALFLPQQSALLQQQSLSHLTVQSITAQQQRILS

SEQ ID NO: 104130 - protein, 126 aa, Setaria italica
  misc_feature (91)..(91): Xaa can be any naturally occurring amino acid
  Transcript Sequence Number=SeqID_38156
  Gene Ontology: Mol. function=nutrient reservoir activity
  Homolog annotation: Hit_ID=Q5EN77; Match level="QueryCoverage=91%, HitCoverage=79%, E-value=5e-19, Identity=51%"; Hit description=Zein -like seed storage protein (Fragment)
  Subcellular localization annotation: CTP_CleavageSite=28; ConfidenceScore=5.10e-01
LKPTSSLLLATMAAKIFALFTLLALSVSAATAVFLPQGSLAATAAIPQYLPHVTALGYENPIVQSYRLQQALAASILPSSAMFLPQQSALXQQQSLSHLTVQSITAQQQRILSPLNQLALPNPPHT

SEQ ID NO: 104131 - protein, 154 aa, Setaria italica
  Transcript Sequence Number=SeqID_38157
  Gene Ontology: Mol. function=nutrient reservoir activity
  Homolog annotation: Hit_ID=C0L971; Match level="QueryCoverage=77%, HitCoverage=41%, E-value=4e-16, Identity=49%"; Hit description=Alpha- coixin 7
  Pfam annotation: Domain name=Zein; Domain location=8-154; Score=5.0; E_value=0.00039; Accession=PF01559.8; Description=Zein seed storage protein
  Subcellular localization annotation: CTP_CleavageSite=23; ConfidenceScore=5.02e-01
QPLISNNGSKIFALFTLLALSVSAATAVFLPQGSLAATAAIPQYLPHVTALGYENPIVQSYRLQQALAANILSSPALFLQQPWALSQQQSFAHVTVQSTTAQQQQFLPAFSQLALGRPAAYWQQQQLLPFNQLAVANAYWQQQQLLPFNQTRTN

SEQ ID NO: 104132 - protein, 159 aa, Setaria italica
  misc_feature (8)..(8): Xaa can be any naturally occurring amino acid
  Transcript Sequence Number=SeqID_38158
  Gene Ontology: Mol. function=nutrient reservoir activity
  Homolog annotation: Hit_ID=A9XEB5; Match level="QueryCoverage=98%, HitCoverage=89%, E-value=3e-18, Identity=50%"; Hit description=22kD alpha canein 5
  Pfam annotation: Domain name=Zein; Domain location=1-158; Score=38.3; E_value=3.1e-08; Accession=PF01559.8; Description=Zein seed storage protein
MAAKIFAXFTLLALSVSAATAVFLPQGSLAATAAIPQYLPHVTALGYENPIVQSYRLQQALAANILSSPALFLQQPWALSQQQSFAHVTVQSTTAQQQQFLPAFSQLALASPAAYWQQQQLLPFNQLAITNPAAFWQQQQLLRVNPLAAMNAATFLQLT

SEQ ID NO: 104133 - protein, 162 aa, Setaria italica
  Transcript Sequence Number=SeqID_38159
  Gene Ontology: Mol. function=nutrient reservoir activity
  Homolog annotation: Hit_ID=A9XEB5; Match level="QueryCoverage=82%, HitCoverage=80%, E-value=3e-17, Identity=53%"; Hit description=22kD alpha canein 5
  Pfam annotation: Domain name=Zein; Domain location=1-162; Score=34.0; E_value=6e-07; Accession=PF01559.8; Description=Zein seed storage protein
SKVLFCLLFTLLALSVSAATAVFLPQGSLAATAAIPQYLPHVTALGYENPIVQSYRLQQALAANILSSPALFLQQPWALSQQQSFAHVTVQSTTAQQQQFLPAFSQLALASPAAYWQQQQLLPFNQLAITNPAAFWQQQQLLRVNPLAAMNAATFLQQPIIG

SEQ ID NO: 104134 - protein, 222 aa, Setaria italica
  misc_feature (172)..(172): Xaa can be any naturally occurring amino acid
  Transcript Sequence Number=SeqID_38160
  Gene Ontology: Mol. function=nutrient reservoir activity
  Homolog annotation: Hit_ID=A9XEB5; Match level="QueryCoverage=86%, HitCoverage=91%, E-value=7e-27, Identity=41%"; Hit description=22kD alpha canein 5
  Pfam annotation: Domain name=Zein; Domain location=9-222; Score =147.4; E_value=4.5e-41; Accession=PF01559.8; Description=Zein seed storage protein
QPLISNNGSKDILLFFTLLALSVSAATAVFLPQGSLAATAAIPQYLPHVTALGYENPIVQSYRLQQALAANILSSPALFLQQPWALSQQQSFAHVTVQSTTAQQQQFLPAFSQLALASPAAYWQQQQLLPFNQLAVANAYWQQQQLLPFNQLAIANPAAYWQQQQLLPSHPXVDTKQLLLLPLHLANSATYWQQQQLLSVNPLGVMNPAAFWQQPIIGSAIF

SEQ ID NO: 104135 - protein, 204 aa, Setaria italica
  Transcript Sequence Number=SeqID_38161
  Gene Ontology: Mol. function=nutrient reservoir activity
  Homolog annotation: Hit_ID=A9XEB5; Match level="QueryCoverage=100%, HitCoverage=100%, E-value=2e-32, Identity=42%"; Hit description=22kD alpha canein 5
  Pfam annotation: Domain name=Zein; Domain location=1-204; Score =168.3; E_value=2.3e-47; Accession=PF01559.8; Description=Zein seed storage protein
MAAKIFALFTLLALSVSAATAVFLPQGSLAATAAIPQYLPHVTALGYENPIVQSYRLQQALAANILSSPALFLQQPWALSQQQSFAHVTVQSTTAQQQQFLPAFSQLALASPAAYWQQQQLLPFNQLAVANAYWQQQQLLPFNQLAIANPAAYWQQQQLLPFNPLHLANSATYWQQQQLLSVNPLGVMNPAAFWQQPIIGSAIF

SEQ ID NO: 104136 - protein, 159 aa, Setaria italica
  misc_feature (94)..(94): Xaa can be any naturally occurring amino acid
  Transcript Sequence Number=SeqID_38162
RWRRGRGPVAGPGELDRRGKLLSAQRDSTILSCISCAEELEEKAAEEERRRREEEERRKEGPGEREEEKEKRQREEEERRKEEEKERGSERRKXEEERQRRKEEERERREQEEKQRREEEERARREEEQRQREEEERQREEEERRREEEEGGGGHGDEP

SEQ ID NO: 104137 - protein, 112 aa, Setaria italica
  Transcript Sequence Number=SeqID_38163
  Gene Ontology: Mol. function=nutrient reservoir activity
  Homolog annotation: Hit_ID=Q10QG3; Match level="QueryCoverage=61%, HitCoverage=10%, E-value=6e-20, Identity=66%"; Hit description=Cupin family protein, expressed
NLLKGFETEVLRLGFGVQREVAEAIKSAKIPPLIIPYNPHEKGDEEKPNWTEDIVDALLGVRDPEEFINNKKKDKHKKKEKDKKSRSRGSGRRKKGKGRKKNGGGRRKRVAA

SEQ ID NO: 104138 - protein, 492 aa, Setaria italica
  Transcript Sequence Number=SeqID_38164
  Gene Ontology: Mol. function=nutrient reservoir activity
  Homolog annotation: Hit_ID=Q10QG3; Match level="QueryCoverage=80%, HitCoverage=59%, E-value=1e-143, Identity=64%"; Hit description =Cupin family protein, expressed
  Pfam annotation: Domain name=Cupin_1; Domain location=207-390; Score =140.3; E_value=5.8e-39; Accession=PF00190.14; Description=Cupin
  Pfam annotation: Domain name=Cupin_2; Domain location=17-95; Score =6.8; E_value=0.065; Accession=PF07883.3; Description=Cupin domain
  Pfam module annotation: Pfam domain module=Cupin_1::Cupin_2; Domain location=207-390::17-95
VTAVDVADAAGTAYRLHFITMDAGALFLPVQLHADMVFYVHSGRGKVTYIEEESSERSSLEVERGDVYNLDQGSIIFIQSYPNATRQRLRIYAIFTSEGINADDPSKPKVEAYSSVSNLLKGFETEVLRLGFGVQREVAEAIKSAKIPPLIIPYNPHEKGDEEKPNWTEDIVDALLGVRDPEEFINNKKKDKHKKKEKDKKSRSKAFNFYSGKPDVHNCYGWSRTMTNKDLDALHGSNIGMFMVNLTTGSMVGPHWNPKATEIAIVTEGTGIVQTVCPSSSNPSGESRRGHRGDERGRPGGRGDEEGEGKGWVRCRNTVFRVKEGDVFVVPRFHPMAQMSFNNDSFVFVGFSTHMGQNHPQFLAGKGSVLQAIGKEVLALSLGQENSTAVGKLLSAQRDSTILSCISCAEELEEKAAEEERRRREEEEGGGKGPGEREEEKERREREEEERRKEEEKERREREEEERKREQEERERKEEEERQRREKGERGE

SEQ ID NO: 104139 - protein, 64 aa, Setaria italica
  Transcript Sequence Number=SeqID_38165
EPSRLAKETAYEISCLPAPPKCKRAREATGKSSLATRMISPYHHARSPLSSIYLSTLVINILII

SEQ ID NO: 104140 - protein, 87 aa, Setaria italica
  Transcript Sequence Number=SeqID_38166
  Gene Ontology: Mol. function=cysteine-type endopeptidase activity; Cellular component=vacuole; Biological process=proteolysis
  Homolog annotation: Hit_ID=Q5QL06; Match level="QueryCoverage=87%, HitCoverage=15%, E-value=7e-29, Identity=78%"; Hit description =Vacuolar processing enzyme 1
LVKKRFVQVKERTSDSNSYGAGSHVMEYGDKTFKGEKLYLYQGFNPENADITYKLLWQGQKSVVNQRDADILFLWKRVSSCAIPITH

SEQ ID NO: 104141 - protein, 101 aa, Setaria italica
  Transcript Sequence Number=SeqID_38167
  Gene Ontology: Mol. function=cysteine-type endopeptidase activity; Cellular component=vacuole; Biological process=proteolysis
  Homolog annotation: Hit_ID=Q5QL06; Match level="QueryCoverage=86%, HitCoverage=17%, E-value=4e-37, Identity=83%"; Hit description =Vacuolar processing enzyme 1
MKLLDSETHNLKEETIKEQYEAVKERTSDSNSYGAGSHVMEYGDKTFKGEKLYLYQGFNPENADITYKLLWQGQKSVVNQRDADILFLWKRVSSCAIPITH

SEQ ID NO: 104142 - protein, 430 aa, Setaria italica
  Transcript Sequence Number=SeqID_38168
  Gene Ontology: Mol. function=cysteine-type endopeptidase activity; Cellular component=vacuole; Biological process=proteolysis
  Homolog annotation: Hit_ID=Q5QL06; Match level="QueryCoverage=99%, HitCoverage=86%, E-value=0.0, Identity=85%"; Hit description =Vacuolar processing enzyme 1
  Pfam annotation: Domain name=Peptidase_C13; Domain location=1-268; Score=569.8; E_value=3e-168; Accession=PF01650.10; Description =Peptidase C13 family
AFASSGFGNVGLQADICHAYQILLKGGLKEENIVVFMYDDVANSVLNPRQGVIINHPEGEDVYAGVPKDYTGEQVTAKNFYAVLLGNKDAVTGGSRKVINSKPNDHIFIYYSDHGGPGVLGMPNLPYIYAGDFMKVLREKHASNSYAKMVIYVEACESGSIFEGLMPEDLNIYVTTASNAEESSWGTYCPGMIPSPPSEYITCLGDLYSVSWMEDSETHNLKEETIKEQYEAVKERTSDSNSYGAGSHVMEYGDKTFKGEKLYLYQGFNPENADITYKLLWQGQKSVVNQRDADILFLWKRYELLNEKSKEKLEVLREITGTVTHRKHLDSSVDFIGKLLFGVENGPSTLGAVRSPGQPLVDDWDCLKRMVRIFESHCGSLTQYGMKHMRAFANICNRGTPATAMKEASISACGSYNSARWSPLVQGYSA

SEQ ID NO: 104143 - protein, 418 aa, Setaria italica
  Transcript Sequence Number=SeqID_38169
  Gene Ontology: Mol. function=magnesium ion binding; Biological process=metabolic process
  Homolog annotation: Hit_ID=Q5GJ60; Match level="QueryCoverage=100%, HitCoverage=76%, E-value=1e-161, Identity=65%"; Hit description =Terpene synthase 6
  Pfam annotation: Domain name=Terpene_synth; Domain location=1-82; Score=-69.6; E_value=0.0052; Accession=PF01397.13; Description =Terpene synthase, N-terminal domain
  Pfam annotation: Domain name=Terpene_synth_C; Domain location=95-363; Score=316.5; E_value=5.6e-92; Accession=PF03936.8; Description =Terpene synthase family, metal binding domain
  Pfam module annotation: Pfam domain module=Terpene_synth::Terpene _synth_C; Domain location=1-82::95-363
LKFKDKHGNFVNADTRSLLSLYNAAYLPTHGEALLDEAISFTGRCLQSRLENLESPLAEEVSCALDTPLFRRVGILETRNYIPIYEKEATRNEAILEFAKLNFNLLQLIYCEELKEVTMWWKKLNVEANFHFVRNRIVEMYFWMNGACHEPQYSHSRIILAKIMGFITILDDFIDTYATTEESMQLGEAIFRWDKNATTLLPEYTRDFYLYLLNTFCSFEEELGTGKSYRVFYLKEALKQLVQAYIDELKWRDENYIPETLSEHLGLSMRSSGGSPILCASLVGMGEIVTRETLDWFLSYPHLVRSFDTFVRLSDDMASTEREQKGDHNVSTVQCYMKEHGTTMHESCKRIKELTEDLWKDMLQHHLARTEQTMIVSHMVLNLARTGNYMYHNNVDKFTSSHTIKDAIKRLFVEPIPM

SEQ ID NO: 104144 - protein, 171 aa, Setaria italica
  misc_feature (74)..(74): Xaa can be any naturally occurring amino acid
  Transcript Sequence Number=SeqID_38170
  Homolog annotation: Hit_ID=P93615; Match level="QueryCoverage=100%, HitCoverage=75%, E-value=9e-58, Identity=71%"; Hit description=ABA induced plasma membrane protein PM 19
  Pfam annotation: Domain name=AWPM-19; Domain location=14-171; Score =224.1; E_value=3.5e-64; Accession=PF05512.3; Description=AWPM-19 -like family
MAGVGRNMVAPLMVLNLIMYLVVIGFASWNLNHFINGQTNYPGTFAWFLVFPLAGWSLISLYVVIMPGACFLNXIAGVAGNGATFYFLVFAILAGVVGAASKLAGVHHVRAWSHDSLATNAASSLIAWAITALAFGLACKEIHIGGHRGWRLRVLEAFVIILAFTQLLYVL

SEQ ID NO: 104145 - protein, 180 aa, Setaria italica
  Transcript Sequence Number=SeqID_38171
  Homolog annotation: Hit_ID=P93615; Match level="QueryCoverage=91%, HitCoverage=92%, E-value=8e-66, Identity=78%"; Hit description=ABA induced plasma membrane protein PM 19
  Pfam annotation: Domain name=AWPM-19; Domain location=23-152; Score =297.1; E_value=3.8e-86; Accession=PF05512.3; Description=AWPM-19 -like family
GEASFRVPQWPGLGGNMVAPLMVLNLIMYLVVIGFASWNLNHFINGQTNYPGVAGNGATFYFLVFAILAGVVGAASKLAGVHHVRAWSHDSLATNAASSLIAWAITALAFGLACKEIHIGGHRGWRLRVLEAFVIILAFTQLLYVLMLHTGLFGGSGGYRDHDYGAGAATAGEPKNAPRV

SEQ ID NO: 104146 - protein, 174 aa, Setaria italica
  misc_feature (156)..(156): Xaa can be any naturally occurring amino acid
  Transcript Sequence Number=SeqID_38172
  Gene Ontology: Mol. function=electron carrier activity; Cellular component=integral to membrane; Biological process=oxidation reduction
  Homolog annotation: Hit_ID=B0L4E2; Match level="QueryCoverage=100%, HitCoverage=26%, E-value=2e-48, Identity=68%"; Hit description =Respiratory burst oxidase protein D variant beta
MHSHRPGADAGAGGDIVEMSSAAAAPHEGRDRERVIPHSGPLSKKTGARKSARFAESVSAPLSAPPPRASPSATDDDDYVEITLDVRDDSVAVHSVKPAAHGGAGGEDPDVTLLARTLENRRSSSYGHNVIRNASSRIKQVSQELRRLASINRHGXGGRTLDRSKSAAAHALKG

SEQ ID NO: 104147 - protein, 65 aa, Setaria italica
  misc_feature (1)..(13): Xaa can be any naturally occurring amino acid
  Transcript Sequence Number=SeqID_38173
XXXXXXXXXXXXXRLSVRSLNLSMNSTMPAEQNRGKPKHATPSSGKSQQNNQQNGDKDDLPSSTM

SEQ ID NO: 104148 - protein, 57 aa, Setaria italica
  Transcript Sequence Number=SeqID_38174
  Pfam annotation: Domain name=Nodulin_late; Domain location=1-38; Score=-7.5; E_value=0.096; Accession=PF07127.3; Description=Late nodulin protein
MAKLLNLFLVLVFVVAMSIEGTQAACGDGLKDLIKECQQYVMPPKDPKIPPSDGITY

SEQ ID NO: 104149 - protein, 118 aa, Setaria italica
  Transcript Sequence Number=SeqID_38175
  Gene Ontology: Mol. function=peptidase activity
  Homolog annotation: Hit_ID=B4FFB8; Match level="QueryCoverage=81%, HitCoverage=88%, E-value=7e-22, Identity=53%"; Hit description=5a2 protein
  Pfam annotation: Domain name=Tryp_alpha_amyl; Domain location=21-96; Score=27.3; E_value=6.3e-05; Accession=PF00234.14; Description =Protease inhibitorseed storageLTP f
NLFLVLVFVVAMSIEGTQAACGDGLKDLIKECQQYVMPPKDPKIPPSDGCCGLVKKVDVPCLCSKVTKAIEAIVSMEKVAFVAEKCGRPLEHGYKTKCSVVPAKRSLPKYLKISKLSN

SEQ ID NO: 104150 - protein, 47 aa, Setaria italica
  misc_feature (30)..(30): Xaa can be any naturally occurring amino acid
  Transcript Sequence Number=SeqID_38176
  Homolog annotation: Hit_ID=B4FFB8; Match level="QueryCoverage=100%, HitCoverage=42%, E-value=3e-10, Identity=63%"; Hit description=5a2 protein
DVPCLCSKVTKAIEAIVSMEKVAFVAENAXRPLEHGYKCGSYTVPAK

SEQ ID NO: 104151 - protein, 115 aa, Setaria italica
  Transcript Sequence Number=SeqID_38177
  Gene Ontology: Mol. function=peptidase activity
  Homolog annotation: Hit_ID=B4FFB8; Match level="QueryCoverage=81%, HitCoverage=86%, E-value=5e-26, Identity=58%"; Hit description=5a2 protein
  Pfam annotation: Domain name=Nodulin_late; Domain location=1-57; Score=-6.1; E_value=0.066; Accession=PF07127.3; Description=Late nodulin protein
  Pfam annotation: Domain name=Tryp_alpha_amyl; Domain location=26-101; Score=33.5; E_value=8.7e-07; Accession=PF00234.14; Description =Protease inhibitorseed storageLTP f
  Pfam module annotation: Pfam domain module=Nodulin_late::Tryp_alpha _amyl; Domain location=1-57::26-101
MAKLLNLFLVLVFVVAMSIEGTQAACGDGLKDLIKECQQYVMPPKDPKIPPSDGCCGLVKKVDVPCLCSKVTKAIEAIVSMEKVAFVAEKCGRPLEHGYKCGSYTVPANRIDSKR

SEQ ID NO: 104152 - protein, 109 aa, Setaria italica
  Transcript Sequence Number=SeqID_38178
  Gene Ontology: Mol. function=peptidase activity
  Homolog annotation: Hit_ID=B4FFB8; Match level="QueryCoverage=86%, HitCoverage=86%, E-value=3e-25, Identity=57%"; Hit description=5a2 protein
  Pfam annotation: Domain name=Nodulin_late; Domain location=1-57; Score=-6.1; E_value=0.066; Accession=PF07127.3; Description=Late nodulin protein
  Pfam annotation: Domain name=Tryp_alpha_amyl; Domain location=26-101; Score=33.5; E_value=8.7e-07; Accession=PF00234.14; Description =Protease inhibitorseed storageLTP f
  Pfam module annotation: Pfam domain module=Nodulin_late::Tryp_alpha _amyl; Domain location=1-57::26-101
MAKLLNLFLVLVFVVAMSIEGTQAACGDGLKDLIKECQQYVMPPKDPKIPPSDGCCGLVKKVDVPCLCSKVTKAIEAIVSMEKVAFVAEKCGRPLEHGYKCGSYTVPAK

SEQ ID NO: 104153 - protein, 109 aa, Setaria italica
  Transcript Sequence Number=SeqID_38179
  Gene Ontology: Mol. function=peptidase activity
  Homolog annotation: Hit_ID=B4FFB8; Match level="QueryCoverage=88%, HitCoverage=88%, E-value=4e-18, Identity=50%"; Hit description=5a2 protein
  Pfam annotation: Domain name=Tryp_alpha_amyl; Domain location=26-101; Score=33.7; E_value=7.3e-07; Accession=PF00234.14; Description =Protease inhibitorseed storageLTP f
MAKLRSMFLVLAFVVAMSIEGTQAACDDNLSDLIKECQQYVMPPKDPKIPPSDSCCRVVQKADFPCLCSKVTKIIEGIVCMEKAVYVAEKCGRQVPHGFKCGSYTVPAK

SEQ ID NO: 104154 - protein, 137 aa, Setaria italica
  Transcript Sequence Number=SeqID_38180
EKKKNREKAARTKHSMEICAFSRLLNPTAAQVWCFLLQRVNLDNGVEETAILSNEGVVDNAVLQDDGDQEMVQENEHISGMKEDEGTEDRLHEMIADMRHAKELGGKILECIKEHINYKVSLRSKYTTNFTIFVLFS

SEQ ID NO: 104155 - protein, 74 aa, Setaria italica
  misc_feature (9)..(9): Xaa can be any naturally occurring amino acid
  misc_feature (27)..(27): Xaa can be any naturally occurring amino acid
  Transcript Sequence Number=SeqID_38181
  Homolog annotation: Hit_ID=Q01MB4; Match level="QueryCoverage=100%, HitCoverage=7%, E-value=1e-13, Identity=41%"; Hit description =OSIGBa0132O24.3 protein
MDRCWIHGXIYLPPSMEFVKIRYSDDXTILCPYRQCLNQSKCIVDVVSLHLLLNGMASTYTRWIHHGETFEHRV

SEQ ID NO: 104156 - protein, 302 aa, Setaria italica
  Transcript Sequence Number=SeqID_38182
  Gene Ontology: Mol. function=protein kinase activity; Cellular component=plasma membrane; Biological process=protein amino acid phosphorylation
  Homolog annotation: Hit_ID=Q9MAY6; Match level="QueryCoverage=93%, HitCoverage=70%, E-value=1e-95, Identity=59%"; Hit description =Protein kinase 1
  Pfam annotation: Domain name=Pkinase; Domain location=1-262; Score =106.8; E_value=7.4e-29; Accession=PF00069.17; Description=Protein kinase domain
  Pfam annotation: Domain name=Pkinase_Tyr; Domain location=1-262; Score=89.0; E_value=1.7e-23; Accession=PF07714.9; Description =Protein tyrosine kinase
  Pfam module annotation: Pfam domain module=Pkinase::Pkinase_Tyr; Domain location=1-262::1-262
AKVYKGFHNGTNEEVAIKRLDLQGQQGDREFITEAVMLSSLHHPNLVKLVGYCADLGQRILVYEYMPLGSLYSHIHDLPPGRQPLDWSTRIQILLGAAKGLEYLHNKVKPPIINRDVKCANILLGEGYHPKLSDFGLAKLGPTGDNTHVSTRVMGTPGYCAPEYLMTGKLTVSTDIYSFGVVMLEVLTGRIARDESLPESERNLASWAVNPTLRPDITNLVDPALQGQCSASRLYHAFLLAARCVSELPAMRPAITEVVRTLDKISKPATKKRQLERGGPSTTARTSSGGNQAQVKDQGQGS

SEQ ID NO: 104157 - protein, 138 aa, Setaria italica
  misc_feature (15)..(15): Xaa can be any naturally occurring amino acid
  misc_feature (94)..(94): Xaa can be any naturally occurring amino acid
  Transcript Sequence Number=SeqID_38183
  Gene Ontology: Mol. function=diacylglycerol kinase activity; Cellular component=vacuole; Biological process=activation of protein kinase C activity
  Homolog annotation: Hit_ID=B6TYH8; Match level="QueryCoverage=95%, HitCoverage=26%, E-value=1e-39, Identity=59%"; Hit description=D -erythro-sphingosine kinase/ diacylglycerol kinase
FQASDWRFVDGPFVXSVWINNVPWAAEDIMAAPEAKFADGYMDAVILRDCPKADLLALLMKMSDGSYVKSPYVTYLKVRSFKLSPGPLVGNPKXGGIIDVDGEVIARGEGTYGRSQHQDVMAYGPPIQLTVHQALATN

SEQ ID NO: 104158 - protein, 80 aa, Setaria italica
  Transcript Sequence Number=SeqID_38184
  Gene Ontology: Mol. function=diacylglycerol kinase activity; Biological process=activation of protein kinase C activity
  Homolog annotation: Hit_ID=B6TYH8; Match level="QueryCoverage=88%, HitCoverage=14%, E-value=9e-13, Identity=48%"; Hit description=D -erythro-sphingosine kinase/ diacylglycerol kinase
QGNEPPYCDFLQVRSFKLSPGPLVGNPKKGGIIDVDGEVIARGEGTYGRSQHQDVMAYGPPIQLTVHQALATVYCPNKIR

SEQ ID NO: 104159 - protein, 171 aa, Setaria italica
  Transcript Sequence Number=SeqID_38185
  Gene Ontology: Cellular component=anchored to membrane
  Homolog annotation: Hit_ID=A1DZD6; Match level="QueryCoverage=96%, HitCoverage=24%, E-value=6e-77, Identity=81%"; Hit description =Brittle stalk-2-like protein 5
GPTRQYNWHVINNYKSGWSVRMTIFNWQDYTFKDWFAAVTMGDHYSGYENVYSFNGTRMDAPFNNTIFMQGVPGLAYLEPITDGKTPADPRVPGKQQSVISFKRKDAPNINIAKGEGFPKRVYFDGEECALPDRIPKVSSARRRAGTASLGQVAMAAALVMLVALVDSWRL

SEQ ID NO: 104160 - protein, 43 aa, Setaria italica
  Transcript Sequence Number=SeqID_38186
LLRINPLAAMNPITAAYLQQQQLLPNVFNQLALVSPVAHLVEH

SEQ ID NO: 104161 - protein, 94 aa, Setaria italica
  Transcript Sequence Number=SeqID_38187
  Gene Ontology: Mol. function=nutrient reservoir activity
  Homolog annotation: Hit_ID=A9XEB5; Match level="QueryCoverage=95%, HitCoverage=43%, E-value=4e-11, Identity=45%"; Hit description=22kD alpha canein 5
  Subcellular localization annotation: CTP_CleavageSite=31; ConfidenceScore=5.47e-01
QQQQLLRVNPFSAMNPAAFWQQQQLLRVNPVAAMNPAAFWQQQQLLRINPLAAMNPTALWQQQQLLRINPLATMNPAAFLQQPIIGSGTFLDQL

SEQ ID NO: 104162 - protein, 238 aa, Setaria italica
  Transcript Sequence Number=SeqID_38188
  Homolog annotation: Hit_ID=B4FFZ9; Match level="QueryCoverage=100%, HitCoverage=100%, E-value=1e-129, Identity=91%"; Hit description =Lipoprotein
  Pfam annotation: Domain name=DUF1264; Domain location=31-201; Score =393.7; E_value=3.3e-115; Accession=PF06884.3; Description=Protein of unknown function (DUF1264)
MAESCHDVEVPGKPTEVGTALLETATGTIQGFAPVNQIHQHLCAFHFYADDMSRQVEAHHFCAHLNEDVRQCLVFDGPGAGARLIGVEYIVSEPVFLTLPDTEKPLWHTHEFEVKGGVLFMPGVPGVVERRDLEKVCRTYGKTVHFWQVDRGDALPLGLPQIMMALTREGQLRQDLADCVEKKFGVSFQKERENRAYMSGLEHGIHPLANAAGKGLKTEIREVDIPATTTAGAARVFT

SEQ ID NO: 104163 - protein, 56 aa, Setaria italica
  Transcript Sequence Number=SeqID_38189
NQIKNKNKERTKQQHNSRNNQTNVVNSMCYPSGGFSMSHYIPFFPIKLNKYVPRLI

SEQ ID NO: 104164 - protein, 116 aa, Setaria italica
  Transcript Sequence Number=SeqID_38190
  Pfam annotation: Domain name=PAH; Domain location=51-97; Score=35.0; E_value=2.9e-07; Accession=PF02671.13; Description=Paired amphipathic helix repeat
MFFNFFSFRCACVWFPLRTPEPPVRVRPLAPARAEAARFLEVLLREFADKPDKVNEFRAVLLDYYYTSIDMSSVVGRMQIVLQGYPDLIRGFNTFLPRGYALKLDDQQGGGGAVDA

SEQ ID NO: 104165 - protein, 99 aa, Setaria italica
  Transcript Sequence Number=SeqID_38191
FGNHSVWCLYILIFLVYATTCLSKCVILYLVFVRKRGGVLWIEWNGDHLYQVGYVLSCSKGFFVPHLFIEDNTAVCILMPYKLCIEVQSSPPLEFGIEG

SEQ ID NO: 104166 - protein, 331 aa, Setaria italica
  misc_feature (320)..(320): Xaa can be any naturally occurring amino acid
  Transcript Sequence Number=SeqID_38192
  Gene Ontology: Mol. function=phospholipase A2 activity; Cellular component=chloroplast; Biological process=phospholipid metabolic process
  Homolog annotation: Hit_ID=Q60E60; Match level="QueryCoverage=100%, HitCoverage=66%, E-value=0.0, Identity=93%"; Hit description =Putative NAD kinase 3
  Pfam annotation: Domain name=NAD_kinase; Domain location=19-300; Score=185.8; E_value=1.2e-52; Accession=PF01513.13; Description=ATP -NAD kinase
TAERSNKQILLKWESPPQTVLFVTKPNSNSVLALCAEMVRWLKEHNNMNVFVEPRVSKELVTEDSYFNFIQTWNNDQEAKTLHTKVDLIVTLGGDGTVLWAASLFKGPVPPVVAFSLGSLGFMTPFPREQYRECLGNVLKRPFSITLRSRLKCHVVRDAAKDEVETEEPILVLNEVTIDRGMSSYLTYLECYCDSSFVTCVQGDGLIISTTSGSTAYSLAAGGSMVHPQVPGILFTPICPHSLSFRPLILPEYVTLRVQVPFNSRGQAWASFDGKGRIQLGPGDALICSISPWPVPTACLVDSTTDFLRSIHEGLHWNLXRKSQSFDGPSA

SEQ ID NO: 104167 - protein, 101 aa, Setaria italica
  Transcript Sequence Number=SeqID_38193
  Subcellular localization annotation: CTP_CleavageSite=81; ConfidenceScore=5.12e-01
GIYLSPSVTKFADVSFIKNISTQKLLACARNVTDFAINACLSHLLSSNSFSIGELYMLKFFCTYFVMVYHNVLFHSLKYFSSTNLSPCKPFLLGVQLIRIF

SEQ ID NO: 104168 - protein, 141 aa, Setaria italica
  misc_feature (120)..(120): Xaa can be any naturally occurring amino acid
  Transcript Sequence Number=SeqID_38194
  Gene Ontology: Mol. function=DNA binding; Biological process =regulation of transcription
  Homolog annotation: Hit_ID=Q8RUX5; Match level="QueryCoverage=84%, HitCoverage=49%, E-value=3e-22, Identity=46%"; Hit description=One repeat myb transcriptional factor
  Pfam annotation: Domain name=Myb_DNA-binding; Domain location=91-138; Score=42.2; E_value=2e-09; Accession=PF00249.23; Description=Myb-like DNA-binding domain
WFPWKERHQVIEFYVELVVEMMSLTQSGNHSVVAIDNSVNNNSGIPVEDPSIDNMDLLFAHMTDKIPEAMQMVDEVSKSKAIIPPKGRNKGSFWTNEEHRQFLYGLRKYGRGKWKDISRXFVTTRTPVQVSSHAQKYFHRQ

SEQ ID NO: 104169 - protein, 277 aa, Setaria italica
  Transcript Sequence Number=SeqID_38195
  Gene Ontology: Mol. function=DNA binding; Biological process =regulation of transcription
  Homolog annotation: Hit_ID=Q8RUX5; Match level="QueryCoverage=83%, HitCoverage=80%, E-value=1e-38, Identity=42%"; Hit description=One repeat myb transcriptional factor
  Pfam annotation: Domain name=Myb_DNA-binding; Domain location=136 -183; Score=39.8; E_value=1e-08; Accession=PF00249.23; Description =Myb-like DNA-binding domain
MDRKFNGEWSACDIKIVKSLIASRNANNNYADDLNKKHNDIVNDIQARFPWKERDQVIELYVELVVEMISPTQSGNQFVVATNNSVNDNFGIPVEDPNMDTLYAYMSNKTPESMRMVVEAPQSQAIIPQQERQQKGRFWTIEEHRQFLCGLREYGRGKWKDISRDFVTTKTPVQVSSHAQKYFRRQNTSEKQRYSINDVSLYDAEPWAQNNSSNWEALAFAGGAYNPNYYGSGSQVATMNNLAQVWPPFMYSADQASSSQATTWAGQQMGATALALE

SEQ ID NO: 104170 - protein, 373 aa, Setaria italica
  Transcript Sequence Number=SeqID_38196
  Gene Ontology: Mol. function=catechol O-methyltransferase activity; Biological process=lignin biosynthetic process
  Homolog annotation: Hit_ID=Q96565; Match level="QueryCoverage=98%, HitCoverage=97%, E-value=1e-144, Identity=67%"; Hit description=N -methyltransferase
  Pfam annotation: Domain name=Dimerisation; Domain location=40-90; Score=59.7; E_value=1.1e-14; Accession=PF08100.3; Description =Dimerisation domain
  Pfam annotation: Domain name=Methyltransf_11; Domain location=214 -304; Score=3.5; E_value=0.044; Accession=PF08241.4; Description =Methyltransferase domain
  Pfam annotation: Domain name=Methyltransf_2; Domain location=101-349; Score=401.8; E_value=1.1e-117; Accession=PF00891.10; Description=O -methyltransferase
  Pfam module annotation: Pfam domain module=Dimerisation::Methyltransf_ 11::Methyltransf_2; Domain location=40-90::214-304::101-349
MENIAPFPGRTTLVANVAPDDEDQVCLQAQELMFAYNNSLVLRAAIQLGLLDALYAAPTALTADELAEQIKAADKTEATASVDRILRYLACFNVVRCSTETTGVGGAVLRRYTPAPVCRWLTKNDGKGSLAPFAVFLGDPDHMLPWHHIADTVVSGGLLSSSFERTKGMPFFDYLGKNKRLGTLFDNAMAEHSVILVTKMLERFRGFDDVRLLVDVGGGTGNTLEMITSQYKHIKGINFDLPHVISQAPSLPGVEHVAGNMYESVPYGDAVLLQWILLMQTDEQCLKILKNCHKALPEGGKVIVIDGLLPENPDANSPAAKDAFTLDMCMFVLFKGKERTEREFAKLARETGFTGAIRTTYIILNFYAIEFTK

SEQ ID NO: 104171 - protein, 80 aa, Setaria italica
  Transcript Sequence Number=SeqID_38197
LASSSCISCAVVNLALVLHQRFIFLNSIVHLVHVDFGDINAQHNVSYRVLNILSLPNLGIIVLAALRIEICLIFSFKRNI

SEQ ID NO: 104172 - protein, 645 aa, Setaria italica
  Transcript Sequence Number=SeqID_38198
  Gene Ontology: Mol. function=serine-type endopeptidase activity; Cellular component=cell wall; Biological process=negative regulation of catalytic activity
  Homolog annotation: Hit_ID=P93204; Match level="QueryCoverage=99%, HitCoverage=85%, E-value=1e-133, Identity=42%"; Hit description=SBT1 protein
  Pfam annotation: Domain name=PA; Domain location=250-337; Score=29.8; E_value=1.1e-05; Accession=PF02225.14; Description=PA domain
  Pfam annotation: Domain name=Peptidase_S8; Domain location=3-472; Score=66.4; E_value=1.1e-16; Accession=PF00082.14; Description =Subtilase family
  Pfam module annotation: Pfam domain module=PA::Peptidase_S8; Domain location=250-337::3-472
PGFVGLDPKNGAWNETNFGDGVIIGFIDTGIWPESVSFNDSGLGPVRASWKGKCVDTEDFNASLCNNKLVGAKAFSAGADARAIRKSGGGVSSPRDKVGHGTHTSSTAAGAEVSDAGLNMFSLGTARGMAPKARIAMYKACDPDGCSGADIVAAIDAAVKDGVDIISISLGGPPRSFHSDAVAIATFGAERQGIFVVLSGGNAGPESSTVINFAPWMATVGAATVDRLFPANLTLGNGVVLEGQSLYIMKAKGTAMIPLVSSGSPDDWTPDTVMGKIVVCMDGATDAYGILLQNAGGAGIVDVDPREWSRDGSTAYPFTLPGLTLSYTSGEKLRAYMASEPNPVASFSFGCETVISKNRAPVVAGFSSRGPNPIVPELLKPDVVAPGVNILAAWSGDASVSGDDRVRDGRTADYNIISGTSMACPHVAGIAALIKKEYPSWTPAMVRSALMTTAWTLDNRGRRIRDDGATAGRHDEVRAATPLVAGAGYVHPDLALDPGLVYDAGERDYVDFLCALNYTPEQLRVFVPNFVGCTRTLAGGPAGLNYPSFVVVFDSRTAVRTLTRTLTKVSDEAETYNVTVKAPKHVKVIVTPRTLEFKEPKETKSYTVEFRNEARGNQKTEWGFGYISWENENHRVRSPVAFHWN

SEQ ID NO: 104173 - protein, 151 aa, Setaria italica
  Transcript Sequence Number=SeqID_38199
  Gene Ontology: Mol. function=drug transporter activity; Cellular component=membrane; Biological process=multidrug transport
  Homolog annotation: Hit_ID=Q6K702; Match level="QueryCoverage=74%, HitCoverage=19%, E-value=2e-43, Identity=78%"; Hit description=MATE efflux protein-like
LAALAAHVAMLALFVGALGWGLRGAAAAYDVTSWGVAVAQAVYVTRWCRGQGWEGLSWRAFRGLWAFAKLSLASAVMLCLEIWYMMVLVVIAGRLDDAEIAVGSVSICMNVNGWGAMLFIGLNAAISVRVSNELGSGRPRAAKHAVAAVVA

SEQ ID NO: 104174 - protein, 63 aa, Setaria italica
  Transcript Sequence Number=SeqID_38200
FVCAVDRGVPEEEHEEELTASPSPRTSSTSRSSRKALKTASPISSFNAYSIPSFSNITYWPVL

SEQ ID NO: 104175 - protein, 80 aa, Setaria italica
  Transcript Sequence Number=SeqID_38201
  Gene Ontology: Mol. function=transcription cofactor activity; Biological process=regulation of transcription, DNA-dependent
  Homolog annotation: Hit_ID=Q8H6Q7; Match level="QueryCoverage=86%, HitCoverage=5%, E-value=3e-11, Identity=54%"; Hit description=CTV.22
  Subcellular localization annotation: CTP_CleavageSite=37; ConfidenceScore=5.47e-01
STGQAGHQQTSLAHQSQSIAVNTPGISASPLLAEFTSADGSQANVPTQVPTKSNAAERPLDRLLKAVSISPTSYLVPFDN

SEQ ID NO: 104176 - protein, 37 aa, Setaria italica
  Transcript Sequence Number=SeqID_38202
MQQRLQTSAGMLLQQNNIDQKQYIQAQRGLQEVSSST

SEQ ID NO: 104177 - protein, 100 aa, Setaria italica
  Transcript Sequence Number=SeqID_38203
EHRPMSRIIHKSRSIQFSAFTPFPCILGPLMGWIISNSFLFEPFFLLGAVLLEMTTFLAEMASLASFPSSLCCCYLQEMASQLLSLLPFAAATCRNRQPF

SEQ ID NO: 104178 - protein, 117 aa, Setaria italica
  misc_feature (107)..(107): Xaa can be any naturally occurring amino acid
  Transcript Sequence Number=SeqID_38204
  Subcellular localization annotation: CTP_CleavageSite=41; ConfidenceScore=5.34e-01
HQQQQQQQQIKQQQQQQQQQLLGTTPNVANSQRMHMLQPAKAMQQPQQQQHAQQPSMGMMQPQSQQNQLQQSQQHMMSQFQSQSNQLQQQLGMQQRLQTSAGMLLQXNNIDQSNIFR

SEQ ID NO: 104179 - protein, 167 aa, Setaria italica
  Transcript Sequence Number=SeqID_38205
  Gene Ontology: Mol. function=transcription cofactor activity; Biological process=regulation of transcription, DNA-dependent
  Homolog annotation: Hit_ID=B9SWU1; Match level="QueryCoverage=50%, HitCoverage=6%, E-value=3e-24, Identity=67%"; Hit description =Transcription cofactor, putative
MDGAANSRPTQGADPAAVAAAGGVDPNAAAPAGGDWRTLLPPEARSRIVNKIMEALKKHRPVSAPEELSELQKIAVRFEEKIYTAATNPSDYLRKISLKMLSMENPGNAQVIPNQNPPGPDRGVPEEEHEEEFDREPEPEDQQHEPELPEGLSDAYDPTSGPKYMGM

SEQ ID NO: 104180 - protein, 56 aa, Setaria italica
  Transcript Sequence Number=SeqID_38206
KKKNLITAATNPSDYLRKISLKMLSMENPGNAQVIPNQKPPRSRSRSTRGGARGGV

SEQ ID NO: 104181 - protein, 426 aa, Setaria italica
  Transcript Sequence Number=SeqID_38207
  Gene Ontology: Mol. function=transcription cofactor activity; Biological process=regulation of transcription, DNA-dependent
  Homolog annotation: Hit_ID=B9SWU1; Match level="QueryCoverage=39%, HitCoverage=14%, E-value=2e-32, Identity=47%"; Hit description =Transcription cofactor, putative
  Pfam annotation: Domain name=KIX; Domain location=31-109; Score=-2.7; E_value=0.094; Accession=PF02172.8; Description=KIX domain
MDGAANWRPTQGADPAAVAAAGGVDPNAAAPAGGDWRTQLQPEARSRIVNKIMETLKKHLPVSVPEGLSELQKIAVRFEEKIYTAATNQSDYLRKISLKMLSMESQTKTQQNPGNAQVIPNQNPPGPAPGLPPQGSNPAQSSAIPLMSQQQTRQPNASASVQGSLPSIGQSLPGVSQTSTLQNMSGMPQNTMNSGLAQGAPQDMYAAQRQMAGRQQQQQQQQQQAQNQLIYQQQKILMNQKLQQNSLMQPHIQQQQSLLQSTQMQSSQQPMMQMSPGLQPAQSIISQTQPMAMQSATQSGIQQNPLNSVQSVQSLLQQPTQSVMRQQQHPQSMHQQPSLQQTQQIQQPNIPLQQQQPQLMGQQSNLQQNQLMSHQNGAGLPVQSNNLLNMQQTQQMLNQQSMPLHQSQQLAPQGNMSSLHQQQQQQ

SEQ ID NO: 104182 - protein, 744 aa, Setaria italica
  Transcript Sequence Number=SeqID_38208
  Gene Ontology: Mol. function=transcription cofactor activity; Biological process=regulation of transcription, DNA-dependent
  Homolog annotation: Hit_ID=Q8H6Q7; Match level="QueryCoverage=100%, HitCoverage=54%, E-value=1e-149, Identity=49%"; Hit description =CTV.22
FVHKISMKIQHVDNHMPAQKSSDQYEKMKNFKALLERTLHFLQVNKSSIQPGFREKIPIYERQIVNILNSQRRKPVPAPGQQQFQQPGGQASGSNISQQHQNSQGLQQHDSHTNQMPQASLPSMSTGVQSSGAPGIQHVPAPQATNFGVSTTQQNVTNAPQAGSNLEGAQGNNFNPVQHGSMGAALQQGSTGPMQGAMNAQQQSSSNLLSNNAMSTMQPNTNSMQANASSLQQLKQQHQEHQIMQSQQMKRQQMLHQQIHQKQLHQSQLPIQQQLQKQQQQGQMQVPQLHSGNDMNELKVRQGAAMKSGMYQQLGQRNYYQQMKQGSAFPISSPQNLQASSPQISHHSPQVDQHNLLQSQIKTGTPLHSANSPFVPSPSPPVAPSPIPVDSDKPLSNLSSLTSTGQAGHQQTSLAHQSQSIAVNTPGISASPLLAEFTSADGSQANVPTQVPTKSNAAERPLDRLLKALRTTQRQSLTAAVSDIGSVVSMIDRIAGSAPGNGSRAAVGEDLVAMTKCRLQARNFITHDGSGTSKKMKRDTSAMPLNVSSPGSVNDSLKQSYSMDTPELQSTATSRVKWQKAEVNHALMEEIQEINQQLIDTELHVSEDDAESFAATSEGAEGMVIRCTFTAVAVSPSLKSMFASAQMSPILPLRLLVPASYPKCSPVLLDKFPDEQSRNSDDLSTKAKSKFGILLRGLAEPMSLREIARTWDACARKVIAEYAQQTGGGSFSSSYGCWESCVGA

SEQ ID NO: 104183 - protein, 68 aa, Setaria italica
  Transcript Sequence Number=SeqID_38209
  Gene Ontology: Mol. function=electron carrier activity; Cellular component=integral to membrane; Biological process=oxidation reduction
  Homolog annotation: Hit_ID=C0KHM0; Match level="QueryCoverage=92%, HitCoverage=11%, E-value=5e-27, Identity=77%"; Hit description =Putative ferulate 5-hydroxylase
AEEFMPERFLEGGSAAAVDFRGNDFQFVPFGAGRRICPGLNFGMATVEIMLANLVYRFDWELPAGMER

SEQ ID NO: 104184 - protein, 56 aa, Setaria italica
  misc_feature (2)..(2): Xaa can be any naturally occurring amino acid
  Transcript Sequence Number=SeqID_38210
  Subcellular localization annotation: CTP_CleavageSite=38; ConfidenceScore=5.66e-01
TXPSCTITILSSLASSGLTSTPSIATTFSISINFSTLMSSMTTAIFSTSKGFLTPM

SEQ ID NO: 104185 - protein, 260 aa, Setaria italica
  Transcript Sequence Number=SeqID_38211
  Gene Ontology: Mol. function=iron-sulfur cluster binding; Cellular component=mitochondrial inner membrane; Biological process =tricarboxylic acid cycle
  Homolog annotation: Hit_ID=B9T7U2; Match level="QueryCoverage=90%, HitCoverage=74%, E-value=1e-104, Identity=72%"; Hit description =Succinate dehydrogenase, putative
KGNGKGNKKERNGRRGARPEATTVKEFQVYRWNPDSPGRRPFLQSYFVDLAACRPMVLDVLQKIKAEHDPTLTFRRSCREGICGSCSMCIDGVNTVACLKPVDTDASRASMITPLPHMFVVKDLVVDLTGFYQQYKSVEPWLKTKRPPPGGREHPQSPAQRKKLDGLYECILCACCSTACPSYWWNSEAFLGPAALLHAYRWVSDSRDDYGQERVQSLAEGWDKLYRCRMIKSCTATCPKSLDPAAAISSMKTLHQLRKA

SEQ ID NO: 104186 - protein, 77 aa, Setaria italica
  Transcript Sequence Number=SeqID_38212
IVVTRFLNSNGLSLFGPCIMVSNAYTVLLLYIKLNRRVPKIRSFCKTGRQDPRSCISQCQWRVIENLLILFSLLKIQ

SEQ ID NO: 104187 - protein, 98 aa, Setaria italica
  Transcript Sequence Number=SeqID_38213
VTGTIALMEGSRRSRKPFKELTNITILGTQTLDHVDPNERDREGKRRKTEQGAIQHIPNNHQDDSVHMEADENDRWLHRGDLGENKDILHVGTEGYFW

SEQ ID NO: 104188 - protein, 54 aa, Setaria italica
  Transcript Sequence Number=SeqID_38214
LNPAAILQQQLSPLNPLALANPAAFWQQQQLVNQLALTSPAAFLQQPIVGSALF

SEQ ID NO: 104189 - protein, 270 aa, Setaria italica
  misc_feature (99)..(99): Xaa can be any naturally occurring amino acid
  Transcript Sequence Number=SeqID_38215
  Gene Ontology: Mol. function=oxidoreductase activity; Biological process=metabolic process
  Homolog annotation: Hit_ID=Q2TM26; Match level="QueryCoverage=96%, HitCoverage=72%, E-value=1e-105, Identity=68%"; Hit description=STO-1
  Pfam annotation: Domain name=adh_short; Domain location=49-217; Score= 36.8; E_value=5.2e-08; Accession=PF00106.17; Description=short chain dehydrogenase
MDQVVNAVMDLVVPPASMVMLAFAWPTLSFLRGVEWVLKTLTKEDMLGKVVVITGASSAIGEQIAYEYARRNANLVLVARREHRLFAIRDNARLLGAGXVLVIAADVVKEDDCRRLVSDTFTYFGQLNHLVNTVSLGHDFNFEEAGDTTAFPHLMDINFWGNVYPTYAALPYLRRSHGRVVVNASVESWLPMPRMSLYSAAKAAVVDFYETLRYEVKDEVGVTVATHGWVGGDAGGGKFTLEEGAAEMQWKEEREATLSGGQVGRVVTSS

SEQ ID NO: 104190 - protein, 169 aa, Setaria italica
  misc_feature (140)..(140): Xaa can be any naturally occurring amino acid
  Transcript Sequence Number=SeqID_38216
  Gene Ontology: Mol. function=cysteine-type endopeptidase activity; Cellular component=endoplasmic reticulum lumen; Biological process =proteolysis
  Homolog annotation: Hit_ID=Q9SXM1; Match level="QueryCoverage=86%, HitCoverage=39%, E-value=9e-57, Identity=74%"; Hit description =Cysteine endopeptidase
  Pfam annotation: Domain name=Inhibitor_I29; Domain location=42-99; Score=57.0; E_value=7.2e-14; Accession=PF08246.4; Description =Cathepsin propeptide inhibitor domain (
MAQVAKRLLLVALLVVSAVELCRAMPFDKKDLESDEALWDLYERWQAHHRVHRHHGEKGRRFGTFKENVRFIHAHNTRGDRPHYRLRLNRFGDMGREEFRSAFADSRINDLRREPHAAAAVPGFMYEDVAYLPSSVDWRXQEGAVTAVKNQGKCGSCWAFSTVVAVEGD

SEQ ID NO: 104191 - protein, 92 aa, Setaria italica
  Transcript Sequence Number=SeqID_38217
  Subcellular localization annotation: CTP_CleavageSite=70; ConfidenceScore=5.87e-01
NPQSHPNSTSPTDPPSSRARSDLASTRRCPARPTIATTSSPARSAPPATASTSAEDRGCARVQPWRARICCGGRRSSTLPSSIPLKVTASGR

SEQ ID NO: 104192 - protein, 122 aa, Setaria italica
  Transcript Sequence Number=SeqID_38218
  Homolog annotation: Hit_ID=B9S449; Match level="QueryCoverage=67%, HitCoverage=16%, E-value=6e-21, Identity=56%"; Hit description =Phenazine biosynthesis protein, putative
RTHVDEDELIALNAWRRIDRQTREAIKRNFLPDLLEIYEERVRTFIEDTSDKDVLVLNVQDPFQRLLLHGVCEFYNVTSTTLSSVRDGKPWKTTTIKKRQGTGVPSRITLVTFLRTKKNGSQ

SEQ ID NO: 104193 - protein, 246 aa, Setaria italica
  Transcript Sequence Number=SeqID_38219
  Homolog annotation: Hit_ID=Q9ZVS6; Match level="QueryCoverage=81%, HitCoverage=76%, E-value=3e-63, Identity=59%"; Hit description =F15K9.15 protein
MASADLLRREEEFYSSLFDSAKGDGVRSRSQLIERKIEALEDMATKVSNRRSRRWLNDRLLIELVPRLHVEEIKGLFAPPPWGEELPLSAFCRTSVGEWDAFRSIDMDTEARLMQHMKRSSEKQRTHVDEDELIALNAWRRIDRQTREAIKRNFLPDLLEIYEERVRTFIEDASDKDVLVLNVQDPFQRLLLHGVCEFYNVTSTTTSCVRDGKLWRTTSIKKRQGTGVPSRITLASFLRKKKNGSQ

SEQ ID NO: 104194 - protein, 55 aa, Setaria italica
  misc_feature (52)..(52): Xaa can be any naturally occurring amino acid
  Transcript Sequence Number=SeqID_38220
NMFIYFTYLLSLETKNSKPVRCGMRMINNLHELVYTDIQLHNQQLTDVFFTXETN

SEQ ID NO: 104195 - protein, 72 aa, Setaria italica
  Transcript Sequence Number=SeqID_38221
NHLEVKGLPGHRVWGDRRSLEQNLGGYLDFLPFKNWLISYIFYFGFYFPCLHLDQTILLDCWSKLDVWVVDW

SEQ ID NO: 104196 - protein, 291 aa, Setaria italica
  misc_feature (13)..(13): Xaa can be any naturally occurring amino acid
  misc_feature (144)..(144): Xaa can be any naturally occurring amino acid
  misc_feature (282)..(282): Xaa can be any naturally occurring amino acid
  Transcript Sequence Number=SeqID_38222
  Gene Ontology: Mol. function=metal ion binding; Cellular component =intracellular
  Homolog annotation: Hit_ID=B9RNG3; Match level="QueryCoverage=21%, HitCoverage=5%, E-value=2e-18, Identity=61%"; Hit description=DNA replication regulator dpb11, putative
TRVRNTAAKRSRXSDINTSNEPLVDKTGTVATGSLFDDLFPSDNEDYPKKLSSCASASDCGTLSSKTVSNGRTRNAVAKRKMKTVEDKSGSKCGKVGSVIASVAEAVSSKRTEEISCNSNKITTDQDSDKSNKDVIKDASGLFXQDSGTVDKQGGSYNFNLRSSKRNKALTSDHEKENRLDHSNLNSISNRTSSLQSKFDAKSIEKSTRVLSDSEHQGVKVSESGTLIVSEPALFILSGNREQRRDCRSILRRLKGRVCRDSHHWSYQATHFIALYPLRRTXRVLSAAAAG

SEQ ID NO: 104197 - protein, 149 aa, Setaria italica
  Transcript Sequence Number=SeqID_38223
  Homolog annotation: Hit_ID=Q5VN46; Match level="QueryCoverage=67%, HitCoverage=28%, E-value=2e-17, Identity=47%"; Hit description=BURP domain-containing protein 10
  Pfam annotation: Domain name=BURP; Domain location=38-149; Score= -93.7; E_value=0.0028; Accession=PF03181.7; Description=BURP domain
MVWSCWEQEHYWSVQSDQLNKEDAKIFHNWAHLIASEKLLYPETTFTPGSKINLYIDRAAALHSAWLRPDSADSIPISRKNFNDIVTMSAPVSNSMAHGMWSTLSSCEHPREVAGEQKACVASVESMHGFAASALWTRRGGRLFSELKP

SEQ ID NO: 104198 - protein, 170 aa, Setaria italica
  Transcript Sequence Number=SeqID_38224
  Homolog annotation: Hit_ID=Q5VN46; Match level="QueryCoverage=80%, HitCoverage=40%, E-value=1e-11, Identity=33%"; Hit description=BURP domain-containing protein 10
IGLFLLFFVPLLVAMVSAALAMGAEGMTVPYYASASELNAYWQSVFPNRTIPSAILDHISTPSGNERNVKEQEHYWSVQSDQLNKEDAKIFHNWAHLIASEKLLYPETTFTPGSKINLYIDRAAALHSAWLRPDSADSIPISRKNFNDIVTMSAPVSNSMAHGMWSTLSS

SEQ ID NO: 104199 - protein, 338 aa, Setaria italica
  Transcript Sequence Number=SeqID_38225
  Gene Ontology: Biological process=response to stress
  Homolog annotation: Hit_ID=Q5VN46; Match level="QueryCoverage=89%, HitCoverage=85%, E-value=1e-57, Identity=40%"; Hit description=BURP domain-containing protein 10
  Pfam annotation: Domain name=BURP; Domain location=101-335; Score =227.0; E_value=4.6e-65; Accession=PF03181.7; Description=BURP domain
MGVLLFFVPLLVAMVSAALAMGAEGMTVPYYASASELNAYWQSVFPNRTIPSAILDHISTPSGNERNVKEQEHYWSVQSDQLNKEDAKIFHNWAHLIASEKLLYPETTFTPGSKINLYIDRAAALHSAWLRPDSADSIPISRKNFNDIVTMSAPVSNSMAHGMWSTLSSCEHPREVAGEQKACVASVESMHGFAASALRTNDLRALSTSLDVPEEGISSPSHMYRVAAVRVVTAGGAKPAAVDTVTCHSMSFPFALFYCHAVNPTRIYEVTLQKEETAAVPAPRRPAVVRALAVCHVNTSGFDPTLKYWVKLGVKPGEAPVCHFLTRGDVLWAPASAA

SEQ ID NO: 104200 - protein, 70 aa, Setaria italica
  misc_feature (13)..(13): Xaa can be any naturally occurring amino acid
  Transcript Sequence Number=SeqID_38226
ETDSTPVAAADGXRKEKKSKESEEPAVAAAEGEKKKKKKKSDVDGEDVVMQNEDSGKKDKKKKKKHADDE

SEQ ID NO: 104201 - protein, 106 aa, Setaria italica
  misc_feature (11)..(11): Xaa can be any naturally occurring amino acid
  misc_feature (73)..(73): Xaa can be any naturally occurring amino acid
  Transcript Sequence Number=SeqID_38227
IKTLRLRYLKXFSMEWKDIRLLLGDIEYMEIVTKDEKLMKDVNKDQKDIEEESKLVKDVEIKGQKDRGKSPSXVKEKKIIYSTLDENGVWVKDQKEEDNLRLISTS

SEQ ID NO: 104202 - protein, 57 aa, Setaria italica
  Transcript Sequence Number=SeqID_38228
TYEHRLYCRDFRSKLEVEEFLETNGPATGIFRGRKLQKKKIVGPDGDGPAGSCPSTI

SEQ ID NO: 104203 - protein, 92 aa, Setaria italica
  Transcript Sequence Number=SeqID_38229
TYEHRLYCRDFRSKLEVEEFLETNGPATGIFRGRKHQKKKIVGPDGDGPAGTTNKSTRGRKAAKYATEMFRFPKSFNQARYASGFSVGSGYK

SEQ ID NO: 104204 - protein, 113 aa, Setaria italica
  Transcript Sequence Number=SeqID_38230
ESRLKNYEEGDWKAFVNPRAYGCHKDWTYEHRLYRREFRSKPDVKEFLETNGPATGMFRGTKLQKKKIVGPGADGPAGKAKSTRGRKATNYATENVSLGPSRSIRPDMPQGFL

SEQ ID NO: 104205 - protein, 208 aa, Setaria italica
  Transcript Sequence Number=SeqID_38231
MTLSGSPPPAVSKAEEEQTIPALQNPVNIPDPQMKGTDLDPLEAVPLRMVLVPYGGKEPIPFDKNMLARLRYQSVPVKEQSVRDGRQEVEVPPSLKLLKNYKEGDWKAFIKPRSYGCHKDRTYEHRLYCRDFRSKLEVEEFLETNGPATGIFRGRKLQKKKIVGPDGDGPAGTTNKSTRGRKAAKYATENVSVAPSHSIKPDLPHGFL

SEQ ID NO: 104206 - protein, 61 aa, Setaria italica
  Transcript Sequence Number=SeqID_38232
  Gene Ontology: Mol. function=nucleic acid binding; Cellular component= nucleus
  Homolog annotation: Hit_ID=Q6YVX9; Match level="QueryCoverage=98%, HitCoverage=8%, E-value=8e-18, Identity=71%"; Hit description=Zinc finger CCCH domain-containing protein 16
MLQFTDEEIEQSYEEFYEDVHTEFLKFGELANFKVCRNGSFHLRGNVYVHYKSLDSALLAY

SEQ ID NO: 104207 - protein, 61 aa, Setaria italica
  misc_feature (43)..(43): Xaa can be any naturally occurring amino acid
  Transcript Sequence Number=SeqID_38233
  Gene Ontology: Mol. function=nucleic acid binding; Cellular component= nucleus
  Homolog annotation: Hit_ID=Q6YVX9; Match level="QueryCoverage=100%, HitCoverage=8%, E-value=2e-21, Identity=81%"; Hit description=Zinc finger CCCH domain-containing protein 16
QVKDEEIEQSYVEFNEDVHTEFLKFGELANFKVCRNGSFHLRXNVYVHYKSLDSALLAYAA

SEQ ID NO: 104208 - protein, 55 aa, Setaria italica
  Transcript Sequence Number=SeqID_38234
  Gene Ontology: Mol. function=nucleic acid binding; Cellular component= nucleus
  Homolog annotation: Hit_ID=Q6YVX9; Match level="QueryCoverage=65%, HitCoverage=5%, E-value=2e-13, Identity=94%"; Hit description=Zinc finger CCCH domain-containing protein 16
MTIRVTDEEIEQSYEEFYEDVHTEFLKFGELANFKVCRNGSFHLRGNVYVHYKSL

SEQ ID NO: 104209 - protein, 455 aa, Setaria italica
  misc_feature (427)..(427): Xaa can be any naturally occurring amino acid
  Transcript Sequence Number=SeqID_38235
  Gene Ontology: Mol. function=nucleic acid binding; Cellular component= nucleus; Biological process=RNA splicing
  Homolog annotation: Hit_ID=Q6YVX9; Match level="QueryCoverage=83%, HitCoverage=52%, E-value=1e-103, Identity=57%"; Hit description=Zinc finger CCCH domain-containing protein 16
  Pfam annotation: Domain name=zf-CCCH; Domain location=52-80; Score =25.3; E_value=0.00025; Accession=PF00642.16; Description=Zinc finger C-x8-C-x5-C-x3-H type (and similar)
CKVCRNGSFHLRGNVYVHYKSLDSALLAYSSMNGRYFAGKQITCEFVAVTRWKASICGEYMRSRYKTCSHGVACNFIHCFRNPGGDYEWADWDNPPPRYWIRKMVALFGPAADATHDKASDTRDFERLQHSNRKRLKSSSDRYVPRRSMDEDVHTRYSSQDYSHSKQERSSHSMNYEYSQHRRGSSAADRHHGQDTKTNGRQFSTKENESQVHKHKHEERRRSDHSDGGKYDKISSRKHQSDQRGSCEPGSSDWPSDLTDTDASKGPSGGKSSSKYDDPKKSMRKSSEAHNLERRYTAHKSAGKEHSTRRGSQRGTEDDYYDEKDDGRVKSRKHKDDHNYSDDRWVATYSDGDSDVDRYQRSSSEGTKFGGKGDAHSDAEAQHQRSSSRTKDDKRRRKSHSGNKRRSTTEEDTRDSDTRGLSSDSCXGRSRSSEENFSTHRSKRKLSRSKEKSSS

SEQ ID NO: 104210 - protein, 42 aa, Setaria italica
  Transcript Sequence Number=SeqID_38236
QFWLGEILRITLKHNIIAYDYSVALYDTFDIYHMIIFLSLGY

SEQ ID NO: 104211 - protein, 110 aa, Setaria italica
  Transcript Sequence Number=SeqID_38237
  Pfam annotation: Domain name=GRP; Domain location=22-94; Score=-3.0; E_value=0.00016; Accession=PF07172.3; Description=Glycine rich protein family
RSLFTYCDDVRPSVRPTHQPAMASKALLLLALLASAAVLAAAADQQTHDNEPEKATASDAGGVEDDWHGGSGSVDQYGHACENGCCHRVYHGGCQRCCPPGGARRPEVKN

SEQ ID NO: 104212 - protein, 80 aa, Setaria italica
  misc_feature (11)..(11): Xaa can be any naturally occurring amino acid
  Transcript Sequence Number=SeqID_38238
  Gene Ontology: Mol. function=molecular_function; Cellular component =integral to membrane; Biological process=retrograde vesicle-mediated transport, Golgi to ER
  Homolog annotation: Hit_ID=B6U157; Match level="QueryCoverage=97%, HitCoverage=40%, E-value=2e-30, Identity=85%"; Hit description=RER1A protein
  Pfam annotation: Domain name=Rer1; Domain location=1-70; Score=19.9; E_value=5.5e-15; Accession=PF03248.5; Description=Rer1 family
SCFRYAITKAXFCIAFVMTFFSVFDVPVFWPILLCYWIVLFFLTMKRQIMHMIKYKYVPFTFGKQRYGEKKEPAASASKD

SEQ ID NO: 104213 - protein, 122 aa, Setaria italica
  Transcript Sequence Number=SeqID_38239
  Gene Ontology: Mol. function=molecular_function; Cellular component =integral to membrane; Biological process=retrograde vesicle-mediated transport, Golgi to ER
  Homolog annotation: Hit_ID=B6U157; Match level="QueryCoverage=100%, HitCoverage=64%, E-value=1e-58, Identity=89%"; Hit description=RER1A protein
  Pfam annotation: Domain name=Rer1; Domain location=1-112; Score =222.2; E_value=1.3e-63; Accession=PF03248.5; Description=Rer1 family
LLNLFIGFLSPMVDPELEALDAGPGLPTRGSDEFRPFVRRLPEFKFWYAITKAFCIAFVMTFFSVFDVPVFWPILLCYWIVLFFLTMKRQIMHMIKYKYVPFTFGKQRYGEKKEPAASASKD

SEQ ID NO: 104214 - protein, 41 aa, Setaria italica
  Transcript Sequence Number=SeqID_38240
  Pfam annotation: Domain name=Gamma-thionin; Domain location=1-41; Score=17.4; E_value=0.0014; Accession=PF00304.12; Description=Gamma -thionins family
STYFLSPCISDRHCSDDCIKQRGGWTAGYCRRATCTCQKAC

SEQ ID NO: 104215 - protein, 86 aa, Setaria italica
  Transcript Sequence Number=SeqID_38241
  Gene Ontology: Cellular component=extracellular region; Biological process=defense response
  Homolog annotation: Hit_ID=P21923; Match level="QueryCoverage=54%, HitCoverage=100%, E-value=4e-13, Identity=72%"; Hit description =Defensin-like protein 1
  Pfam annotation: Domain name=Gamma-thionin; Domain location=40-86; Score=39.7; E_value=1.2e-08; Accession=PF00304.12; Description=Gamma- thionins family
MELKSRATVCALLLLLLVLSHDGGYGGGGGGGRMLAVEARVCTGKSEHHSFPCISDRHCSDDCIKQRGGWTAGYCRRATCTCQKAC

SEQ ID NO: 104216 - protein, 53 aa, Setaria italica
  Transcript Sequence Number=SeqID_38242
  Gene Ontology: Cellular component=extracellular region; Biological process=defense response
  Homolog annotation: Hit_ID=P21923; Match level="QueryCoverage=88%, HitCoverage=100%, E-value=6e-13, Identity=72%"; Hit description =Defensin-like protein 1
  Pfam annotation: Domain name=Gamma-thionin; Domain location=7-53; Score=39.7; E_value=1.2e-08; Accession=PF00304.12; Description=Gamma- thionins family
MLAVEARVCTGKSEHHSFPCISDRHCSDDCIKQRGGWTAGYCRRATCTCQKAC

SEQ ID NO: 104217 - protein, 125 aa, Setaria italica
  Transcript Sequence Number=SeqID_38243
  Gene Ontology: Mol. function=potassium ion transmembrane transporter activity; Cellular component=membrane; Biological process=potassium ion transport
  Homolog annotation: Hit_ID=Q75G84; Match level="QueryCoverage=100%, HitCoverage=15%, E-value=1e-50, Identity=76%"; Hit description =Potassium transporter 21
SREKPSGRHAIYAEEMITPIQSFSELTTLSNGVSNRLPQFQVSKMNIAELAKIEEEQKFIQRETERGVVYILGETEVVARPQSSLLKKIVVNYIYSFLRKNFMQGEKMLSIPHGKLLKVGISYEI

SEQ ID NO: 104218 - protein, 535 aa, Setaria italica
  misc_feature (33)..(33): Xaa can be any naturally occurring amino acid
  Transcript Sequence Number=SeqID_38244
  Gene Ontology: Mol. function=metal ion binding
  Homolog annotation: Hit_ID=B9RU00; Match level="QueryCoverage=52%, HitCoverage=52%, E-value=1e-71, Identity=53%"; Hit description=Ring finger protein, putative
  Pfam annotation: Domain name=zf-C3HC4; Domain location=478-519; Score= 37.6; E_value=4.8e-08; Accession=PF00097.17; Description=Zinc finger, C3HC4 type (RING finger)
  Subcellular localization annotation: CTP_CleavageSite=71; ConfidenceScore=5.85e-01
DLGASKAAAASSSLSSSSAASEVGGEVKRGSGXSKGRRARSLLPLPSSSCFRGSTTPGEGDASAAPPPAVESNKGGETASLPSLIHSAKSDEDAVTVPKSRPGEETAAPSSDSERDQDDDALQNAAATSTAAAAASQLPNPSDRPRPRFGSNFGLSRAVSLGSSVACSILSSGLSSANPGESHGEANNSSDAVIAQQGGALTAGIDSTLDMLRDSVTAQARAARQARRNLLESEGASLRNSYRRTGSQEPFEGSVRFSRTLSVGRLRDRVLRRTPFSDGLFTHSLLYDRAVWPSGNGSARQDSAMMQRTNSDRSSELRSDPSTNSVYNSSSETLREANNRDLLERRSAFLERRRRIRSQVRALQRLGSRFENLSGHERSCILSGQHRTGNCNCRTSGRPGNPDEETGTRASISRIVMLAEALFEVLDEIHQQSAALSSSRPSFSSIGSVPAPREIVECLPVKVYRKPLKHRTEEAAQCYICLVEYEEGDCVRILPCNHEFHLTCVDKWLKEIHRVCPLCRGDVCRSDASSIGKVG

SEQ ID NO: 104219 - protein, 194 aa, Setaria italica
  Transcript Sequence Number=SeqID_38245
  Gene Ontology: Mol. function=transcription regulator activity; Cellular component=nucleus; Biological process=regulation of transcription
  Homolog annotation: Hit_ID=Q9FXA3; Match level="QueryCoverage=32%, HitCoverage=20%, E-value=3e-17, Identity=65%"; Hit description =Transcription factor bHLH95
  Pfam annotation: Domain name=HLH; Domain location=122-172; Score =43.3; E_value=9.7e-10; Accession=PF00010.18; Description=Helix-loop -helix DNA-binding domain
MLAALHDGEDKNATSELTIQMVSNAGEDNNAGSKFASPAAVNADDNNVEKGKNNIVGEGGDNIAAGGGGGGAPSNTSKKLTSDGGGAYDAVKDASTAVASRGRGRGRGRGNGKGKGVATEEEKGLHIWTERERRKKMKNMFSTLHALLPRLPEKVDKSTIVAEAVTYIRSLEGTIKSLEKLKQDRIRAQQEAVL

SEQ ID NO: 104220 - protein, 102 aa, Setaria italica
  Transcript Sequence Number=SeqID_38246
  Gene Ontology: Mol. function=nucleic acid binding; Cellular component= nucleus; Biological process=response to stress
  Homolog annotation: Hit_ID=Q03878; Match level="QueryCoverage=79%, HitCoverage=52%, E-value=1e-19, Identity=57%"; Hit description =Glycine-rich RNA-binding protein
  Pfam annotation: Domain name=RRM_1; Domain location=20-89; Score =101.4; E_value=3.2e-27; Accession=PF00076.14; Description=RNA recognition motif. (a.k.a. RRM, RBD, o
MAAPWWDSDWKERSEREYRCYVSNLSYGTSEASLKGAFSNYGPLNSEIVVDRETGRSRGFGFVQFEDKKSMDNAIQDMNGQEVGGRNVRVSEAKQRPRRWRA

SEQ ID NO: 104221 - protein, 36 aa, Setaria italica
  Transcript Sequence Number=SeqID_38247
RNKEYDHFSYDFCPNNFCSVVLKQAKGLKARRCFHG

SEQ ID NO: 104222 - protein, 131 aa, Setaria italica
  Transcript Sequence Number=SeqID_38248
YWIGDGVIDMASTPSLSQIRARSTDLSPAIQPRPTTSQLQIEALQAQVEEARKKQEEMVAQMEEMRRRMEEENQIRMEQMFQYMQNFASSMGQSLPPPPPMLFPPPQPSTTTPNQSVASNNEDQDLSQWSP

SEQ ID NO: 104223 - protein, 71 aa, Setaria italica
  Transcript Sequence Number=SeqID_38249
FLPTGSKAACNVLIGIAMNVYSLDNAHFVMFHHCVSVIHHKIKSYSKTFLGSCIYHVCLKLPCLPVLRVSD

SEQ ID NO: 104224 - protein, 49 aa, Setaria italica
  Transcript Sequence Number=SeqID_38250
YKAAITGFFDRIIPHSTDYCSECYYITNKMVFFLTILQPAKGLGLNPTT

SEQ ID NO: 104225 - protein, 50 aa, Setaria italica
  Transcript Sequence Number=SeqID_38251
  Pfam annotation: Domain name=LEA_5; Domain location=1-46; Score=19.8; E_value=0.0059; Accession=PF00477.9; Description=Small hydrophilic plant seed protein
GGQTRSEQLGHEGYSEMGRKGGLSTKEESGGERAAREGIEIDESKFRTKS

SEQ ID NO: 104226 - protein, 82 aa, Setaria italica
  Transcript Sequence Number=SeqID_38252
VNFTLISFLKYLPKSNAVRHQSMAEGRECTKYIRMIGLGLQLLALQCKNFTSLDVSYTMVSAAGFHYCRTELLLWYPLYGCD

SEQ ID NO: 104227 - protein, 99 aa, Setaria italica
  Transcript Sequence Number=SeqID_38253
  Pfam annotation: Domain name=Defensin_2; Domain location=46-82; Score= 9.9; E_value=0.077; Accession=PF01097.10; Description=Arthropod defensin
  Pfam annotation: Domain name=Gamma-thionin; Domain location=44-85; Score=9.0; E_value=0.0082; Accession=PF00304.12; Description=Gamma -thionins family
  Pfam annotation: Domain name=SLR1-BP; Domain location=3-85; Score= -10.8; E_value=0.016; Accession=PF07333.4; Description=S locus -related glycoprotein 1 bindin
  Pfam module annotation: Pfam domain module=Defensin_2::Gamma -thionin::SLR1-BP; Domain location=46-82::44-85::3-85
MSFNKNLVVAGFTLALLVASSYGDFPGAMASSYGGMAGNYCYERTETECTSDETCRTICLEKGDSYVGGYCSKVASSSCICIKKCAAQFPHGAAGPASA

SEQ ID NO: 104228 - protein, 115 aa, Setaria italica
  Transcript Sequence Number=SeqID_38254
  Gene Ontology: Mol. function=oxidoreductase activity; Biological process=oxidation reduction
  Homolog annotation: Hit_ID=B6UGU4; Match level="QueryCoverage=99%, HitCoverage=32%, E-value=8e-54, Identity=91%"; Hit description =Steroleosin
GKILTKEGEMKVDQDERDAILGPTPAEPVGDFARAVVRDVCRGARYVFEPRWYMGVYLLRVCLPEVLAWNSRLLTVGRAGATSTTDTLGKWLVELPGVRRAVQPPSLRSPEIKEQ

SEQ ID NO: 104229 - protein, 335 aa, Setaria italica
  Transcript Sequence Number=SeqID_38255
  Gene Ontology: Mol. function=oxidoreductase activity; Biological process=oxidation reduction
  Homolog annotation: Hit_ID=B6UGU4; Match level="QueryCoverage=91%, HitCoverage=87%, E-value=1e-152, Identity=86%"; Hit description =Steroleosin
  Pfam annotation: Domain name=adh_short; Domain location=48-216; Score= 57.6; E_value=4.6e-14; Accession=PF00106.17; Description=short chain dehydrogenase
MTVMSKLAGAALQASLMALLAVLLPPYYVWKLTTYLLGAVFPEDVAGKVVLITGASSGIGEHLAYEYAKRRAYLALVARREMSLREVGDRALGLGSPGVLVLPADVSKPEDCEKFIDDTIRYFGRLDHLVNNASIWQVCMFEEVEDVNHFRTLMDINFWGHVYPTRLAIPHLKKTHGRIVGVTSNSSYIFIGRNTFYNASKAAALNFYDTLRMELGGDIRITEVVPGVVESEITKGKILTKEGEMKVDQDERDAILGPTPAEPVGDFARAVVRDVCRGARYVFEPRWYMGVYLLRVCLPEVLAWNSRLLTVGRAGATSTTDTLGKWLAELPRKEN

SEQ ID NO: 104230 - protein, 92 aa, Setaria italica
  Transcript Sequence Number=SeqID_38256
FLAVIVKEAAELLSKAKVAMADEETADALLYKSARLLSAAVALRPTSLVAVGQLGNTYLLHGELKLKISRELRTLLASSGAFLNGRERVSRS

SEQ ID NO: 104231 - protein, 66 aa, Setaria italica
  Transcript Sequence Number=SeqID_38257
ESWNLSYTASAITCKFLCLPHLNRKLEQYEFCCMLVPVCNSDVFLFCFFELFGGVIFPCHSVGLHC

SEQ ID NO: 104232 - protein, 53 aa, Setaria italica
  Transcript Sequence Number=SeqID_38258
NVFRKILRTCTVFSTLEVWKFYMNYQASLNALTFSIDSSSNFLVIVPIEVIVD

SEQ ID NO: 104233 - protein, 85 aa, Setaria italica
  Transcript Sequence Number=SeqID_38259
SIVIAGANFIFRLETMHQADSMILNTHQPVHHYLDSTKPKLQTRSDVLHAYALLISTLLRLNFLTSDVTALATTDLQQFVSEQGK

SEQ ID NO: 104234 - protein, 114 aa, Setaria italica
  Transcript Sequence Number=SeqID_38260
LSGRVGFLAARHLEHGLGSRGTCSSSSSFSCQFPQLVGDEPAGCAGERAHPGVGRGGRLRQRASGNKGSVPSVMRRLTGSSYTFDEERGRQSLHEGNTRGFRNTRKVQILVHRN

SEQ ID NO: 104235 - protein, 189 aa, Setaria italica
  Transcript Sequence Number=SeqID_38261
  Gene Ontology: Mol. function=drug transporter activity; Cellular component=membrane; Biological process=multidrug transport
  Homolog annotation: Hit_ID=Q6K702; Match level="QueryCoverage=97%, HitCoverage=34%, E-value=3e-56, Identity=56%"; Hit description=MATE efflux protein-like
  Pfam annotation: Domain name=MatE; Domain location=1-120; Score=21.8; E_value=0.00015; Accession=PF01554.10; Description=MatE
  Subcellular localization annotation: CTP_CleavageSite=30; ConfidenceScore=5.04e-01
MLFIGLNAAISVRVSNELGSGRPRAAKHAVAAVVAQSLAMGLVAMAVVLAYRNSFAALFTGDREMQAAVGKVAYLLAATMVLNSVQPVISGVAIGGGWQALVAYINLGCYYAFGLPLGFCLGYFLRLGPQGIWAGMLCGTALQTVILLLVIWNTDWEAEAAQANERIRAWGGEDDCDSEHLGTKEVFRV

SEQ ID NO: 104236 - protein, 52 aa, Setaria italica
  Transcript Sequence Number=SeqID_38262
QLKHDWEILALDIFFVFLGSYLFILLYGMWATSYYYLHLYISFFMPRLAQVA

SEQ ID NO: 104237 - protein, 79 aa, Setaria italica
  Transcript Sequence Number=SeqID_38263
GAASASAAAWPRRGQKQQADAGAAAPGVHGLGQRRRLLDVHTDRLTPAAAGLLIARTNRRLAAVQRSLLAIERRKNRLI

SEQ ID NO: 104238 - protein, 46 aa, Setaria italica
  Transcript Sequence Number=SeqID_38264
YEMVLGWASLVYIFCSCVWLFLVILIPFRILLFQNLFVNYERFVSL

SEQ ID NO: 104239 - protein, 49 aa, Setaria italica
  Transcript Sequence Number=SeqID_38265
ELGSCAGQLSCKPAAWFRTDCLTSLEPASTTSVKHAEMDAIVSLESSFQ

SEQ ID NO: 104240 - protein, 160 aa, Setaria italica
  Transcript Sequence Number=SeqID_38266
  Gene Ontology: Mol. function=protein serine/threonine kinase activity; Cellular component=ubiquitin ligase complex; Biological process=protein amino acid phosphorylation
  Homolog annotation: Hit_ID=Q8GZ84; Match level="QueryCoverage=77%, HitCoverage=27%, E-value=9e-15, Identity=36%"; Hit description=U-box domain-containing protein 36
SAARAHAAHNRNGICKGRSQRGVGSEQESHQNASGRQKELQRELKQCITEMESARKDHKEELVTSNYLVKKLQADNKKLHYDLVELLQSDKETLQKDLQAALTEAVDLRRKSLLSSASEADSTSPPSYFVCPISQEVMSDPHVAADGFTYGGEEIRGWLD

SEQ ID NO: 104241 - protein, 81 aa, Setaria italica
  Transcript Sequence Number=SeqID_38267
  Gene Ontology: Mol. function=catalytic activity; Biological process =cellular metabolic process
  Homolog annotation: Hit_ID=Q8VWI9; Match level="QueryCoverage=76%, HitCoverage=17%, E-value=2e-21, Identity=72%"; Hit description =Cinnamoyl-CoA reductase
LSRWFDILYGFFPEYPVPERCSDEVNPRKKPYKISNQRLRDLGLEFTPTAQALYETVICFQEKGILPVPAAAPAPSSSPQP

SEQ ID NO: 104242 - protein, 81 aa, Setaria italica
  Transcript Sequence Number=SeqID_38268
NTEHIIGKEHTMNYILLVLFLKINIFCRLKMFQFLFSVNMFSNRMSSIAGNSHNILHFLYSLHVAMYTNIENNSFQGWCIV

SEQ ID NO: 104243 - protein, 135 aa, Setaria italica
  Transcript Sequence Number=SeqID_38269
  Gene Ontology: Mol. function=catalytic activity
  Homolog annotation: Hit_ID=Q7XAP3; Match level="QueryCoverage=57%, HitCoverage=10%, E-value=2e-19, Identity=65%"; Hit description =Plastid (P)ppGpp synthase
  Subcellular localization annotation: CTP_CleavageSite=74; ConfidenceScore=5.76e-01
PAAVVGVGAGFGGGGYSHPQSSSASPSPFKLRDHLHRSPASLFHSPASSPASRSPSVSWLAGRERDRLFSSFVRNALGSCIDYAPVTSLPLGVPAAAGVDAAELAFELDENLSAAEPSCEPYAHELLAGAQARHR

SEQ ID NO: 104244 - protein, 119 aa, Setaria italica
  misc_feature (36)..(36): Xaa can be any naturally occurring amino acid
  Transcript Sequence Number=SeqID_38270
  Homolog annotation: Hit_ID=Q7XKW2; Match level="QueryCoverage=95%, HitCoverage=30%, E-value=3e-48, Identity=80%"; Hit description =OSJNBa0073E02.7 protein
EVVKIGQPLRRVLSPQLVEQLRATFPNEKFLLNQKXNKTYMVLEQSASGEDALRGWLVAAFASEMERSGVGSRDAVLNEAYEKMERVFPTFVSEVRSRGWYTDQFLDGNGSRIAFAKFQ

SEQ ID NO: 104245 - protein, 103 aa, Setaria italica
  Transcript Sequence Number=SeqID_38271
VGPAALPDQAFHEKQDGVGPAALPDHAFHEKQDGVGPAALPDHPFHEKQDAVWPAALPDHPFHEKQDGVGPAAPFHEKQEAVQPTGEPDPDDASHQAWGKVLP

SEQ ID NO: 104246 - protein, 79 aa, Setaria italica
  Transcript Sequence Number=SeqID_38272
  Homolog annotation: Hit_ID=B6SJ28; Match level="QueryCoverage=93%, HitCoverage=41%, E-value=1e-20, Identity=71%"; Hit description=Late embryogenesis abundant protein, group 3
TTKGRTVVAGKDKTGAILQQAGETVMSTAVGAKDKVVSAAVGAKDAVVNSLGMAGENNDGTTNARKDTSTYKPGTGRDY

SEQ ID NO: 104247 - protein, 60 aa, Setaria italica
  Transcript Sequence Number=SeqID_38273
  Pfam annotation: Domain name=Dehydrin; Domain location=1-60; Score= -0.9; E_value=0.00027; Accession=PF00257.11; Description=Dehydrin
EKLPGGRKDDQHATATGGTYGQQGHTGMTGTGTGGAYGTEGTGEKKGIMDKIKEKLPGQH

SEQ ID NO: 104248 - protein, 71 aa, Setaria italica
  Transcript Sequence Number=SeqID_38274
  Pfam annotation: Domain name=Metallothio_PEC; Domain location=4-69; Score=77.5; E_value=4.7e-20; Accession=PF02068.8; Description=Plant PEC family metallothionein
RRQRYCRCLSRRGGGGGSGGQREHTTCTCGEHCECSPCTCGRATLPSGRESRRANCSCGPNCNCASCSATA

SEQ ID NO: 104249 - protein, 105 aa, Setaria italica
  Transcript Sequence Number=SeqID_38275
  Subcellular localization annotation: CTP_CleavageSite=48; ConfidenceScore=5.16e-01
WSNGSKHDLSMSIPALSNFFNRYLERHGPPCPVPSPAFFFVWVGLVPLAAEEPNAFLSTKDSFGSGTAVAETAAAVASLVKQLFLTSAYLDEKMFGKTASPSCVT

SEQ ID NO: 104250 - protein, 116 aa, Setaria italica
  Transcript Sequence Number=SeqID_38276
  Subcellular localization annotation: CTP_CleavageSite=12; ConfidenceScore=5.02e-01
NTIKHYFPFILSASTNSVHFQAPIARFQAPCQKENASGSEKPRARSGFGEKDRGAQIKGLDLGEEECRRFACELRGLPPRQEVGVVECVAVAATAGRKRPQRLPERKNSQLLNPSE

SEQ ID NO: 104251 - protein, 162 aa, Setaria italica
  misc_feature (44)..(44): Xaa can be any naturally occurring amino acid
  Transcript Sequence Number=SeqID_38277
  Gene Ontology: Mol. function=pseudouridine synthase activity; Biological process=pseudouridine synthesis
GLLDKHGKPNEKTPAEWLRNVVLPTGGDVAIASIAAAPEPEKVXKVELEAAVTDEVKEKKKKRQKDEEDNDADASVPSKKIKVEEAAETVEGEKSEKKKKKKKDKGESGSAEAVEVKEEVDVADEKGSGKKKKKKKSKEGSDAADPESAQNGDGAEAEKSEN

SEQ ID NO: 104252 - protein, 145 aa, Setaria italica
  Transcript Sequence Number=SeqID_38278
  Gene Ontology: Mol. function=oxidoreductase activity; Cellular component=extracellular region; Biological process=lignin catabolic process
  Homolog annotation: Hit_ID=Q2QUP7; Match level="QueryCoverage=100%, HitCoverage=16%, E-value=1e-71, Identity=83%"; Hit description =Retrotransposon protein, putative, Ty1-copia subclass, expressed
  Pfam annotation: Domain name=Cu-oxidase_2; Domain location=4-129; Score=178.2; E_value=2.4e-50; Accession=PF07731.6; Description =Multicopper oxidase
FDYTADASDNATLKYTPKSTKVKTLRYNETVEMVLQNTRLIAKESHPMHLHGFNFFVLAQGFGNYNEAAAKPQFNLVNPQERNTVAVPTGGWAVIRFLANNPGMWFMHCHFDAHLDLGLAMVFEVQDGPTAETSVPPPPLDLPQC

SEQ ID NO: 104253 - protein, 335 aa, Setaria italica
  Transcript Sequence Number=SeqID_38279
  Gene Ontology: Mol. function=oxidoreductase activity; Cellular component=extracellular region; Biological process=lignin catabolic process
  Homolog annotation: Hit_ID=Q0IP28; Match level="QueryCoverage=94%, HitCoverage=54%, E-value=1e-103, Identity=60%"; Hit description =Laccase-25
  Pfam annotation: Domain name=Cu-oxidase_2; Domain location=182-319; Score=201.5; E_value=2.2e-57; Accession=PF07731.6; Description =Multicopper oxidase
SNAAYTAPYDTDVVVIAPGQTVDALMVAGAAPGQYYMAASPYVSATPPNRGPRFSMSNATAVVEYAGSTTTAPPQPPTMPPYTDTATAFRFFTSLKAPVPSGAPAVPLSVDTRMFVTVGLGISDCQPAQLLCNPTGTRTLPVLAASMNNASFVLPPAGSVSMLQAHYDADGSAPAPSVYTRDFPDRPPVIFNYTADASDIPTLQYTTKSTKVKTLRYNETVEMVLQSTRLLANESHPMHLHGVNFYVLAQGVGNYDEAAAAPRFNLENPQERNTVAVPPGGWAVIRFQANNPGVWFMHCHIEDHLDVGLAMAFEVQDGPTPETSVPPPPLDLPQC

SEQ ID NO: 104254 - protein, 73 aa, Setaria italica
  Transcript Sequence Number=SeqID_38280
VEISCNHQCTPECLLALLFAIPHLITLMPPLLRRASCRFQPPITAFLLSWWFLWTRMAVAPMSSVLQLLPRLS

SEQ ID NO: 104255 - protein, 47 aa, Setaria italica
  Transcript Sequence Number=SeqID_38281
MVEKMLGVVDGYATDHFIDDDDDDDDDEISDDHRSGGGADDDDDDDD

SEQ ID NO: 104256 - protein, 257 aa, Setaria italica
  Transcript Sequence Number=SeqID_38282
  Pfam annotation: Domain name=PMEI; Domain location=36-211; Score=0.0; E_value=0.017; Accession=PF04043.7; Description=Plant invertasepectin methylesterase inhibitor
LRTCIGMMAAPTATAISAAVLLCAAAFLATGGAAKASAADVVADACANVTNRYHQYRGPGLTRDSCEIALWSDKRSASAKHPRDLALVAMALVQEGAAVAGAKVAGALSSGDAAKLSKDTKLNLRYCRLDYEAVAHTVAVCREMVQEYNPGVQGHDGDGNMIPYNYLECANRLMNAASGCWAHISHDYETKKAVWKEVNEVASRANLAKAMVEKMLGVVDGYATDHFIDDDDDDDDDEISDDHRSGGGADDDDDDDD

SEQ ID NO: 104257 - protein, 92 aa, Setaria italica
  misc_feature (54)..(54): Xaa can be any naturally occurring amino acid
  Transcript Sequence Number=SeqID_38283
PRRSGFGIEFRQGLLRPPQALRQDVLLTNLFSDNAIYSWITDGISKKVVAIYMXCSSTQNREALRSSLMHVVLEFVLPCVKVLPALELLLDG

SEQ ID NO: 104258 - protein, 110 aa, Setaria italica
  Transcript Sequence Number=SeqID_38284
  Gene Ontology: Mol. function=hydrolase activity, acting on acid anhydrides, in phosphorus-containing anhydrides
  Homolog annotation: Hit_ID=Q53PH9; Match level="QueryCoverage=96%, HitCoverage=10%, E-value=6e-38, Identity=77%"; Hit description =DEAD/DEAH box helicase family protein, expressed
KLAPLVSTSRLSYCSILNLMNRVEGQFTSEHVTRNSFHQFQYEKVCFRTFYRCFVMLEGEATLLDYSGETDLAKYHKLGLDISELEKKIMSGMIRPEGALLYLVPGSKSH

SEQ ID NO: 104259 - protein, 132 aa, Setaria italica
  Transcript Sequence Number=SeqID_38285
  Gene Ontology: Mol. function=hydrolase activity, acting on acid anhydrides, in phosphorus-containing anhydrides
  Homolog annotation: Hit_ID=Q53PH9; Match level="QueryCoverage=90%, HitCoverage=11%, E-value=2e-45, Identity=78%"; Hit description =DEAD/DEAH box helicase family protein, expressed
MQAGGRQTGKMEMSVIKDMVIGKLAPLVSTSRLSYCSILNLMNRVEGQFTSEHVTRNSFHQFQYEKVCFRTFYRCFVMLEGEATLLDYSGETDLAKYHKLGLDISELEKKIMSGMIRPEGALLYLVPGSKSH

SEQ ID NO: 104260 - protein, 706 aa, Setaria italica
  Transcript Sequence Number=SeqID_38286
  Gene Ontology: Mol. function=hydrolase activity, acting on acid anhydrides, in phosphorus-containing anhydrides; Cellular component =spliceosome; Biological process=mRNA processing
  Homolog annotation: Hit_ID=Q53PH9; Match level="QueryCoverage=99%, HitCoverage=70%, E-value=0.0, Identity=88%"; Hit description =DEAD/DEAH box helicase family protein, expressed
  Pfam annotation: Domain name=DSHCT; Domain location=517-706; Score =329.3; E_value=7.7e-96; Accession=PF08148.4; Description=DSHCT (NUC185) domain
  Pfam annotation: Domain name=Helicase_C; Domain location=100-184; Score=44.6; E_value=3.9e-10; Accession=PF00271.23; Description =Helicase conserved C-terminal domain
  Pfam module annotation: Pfam domain module=DSHCT::Helicase_C; Domain location=517-706::100-184
MQAGGRQRGGGPKASGRIAKGGSASGNSDIYRIVKMIMERKFQPVIIFSFSRRECEHHAMSMSKLDFNTEDEKECIEQVFHNAIGCLVEEDRSLPAIELMLPLLKRGIAVHHSGLLPIIKELVELLFQEGLVKALFATETFAMGLNMPAKTVVFTSVKKWDGDTNRYIGSGEYIQMSGRAGRRGKDERGICVIMIDEKMEMSVIKDMVLGKPAPLVSTFRLSYYSILNLMSRVEGQFTAEHVIRHSFHQFQYEKALPEIVQKITRLEDEATLLDSSGEIDLAEYHKLGLDISELEKKIMSEMIRPERALLYLVPGRLVKVRDGSTDWGWGVVVNVVKKPPASGTLPPALSASRSNSYIVDTLLHCSSSSNENGSRSKPCPPRPGEKGEMHVVPVPLPLISGISSVRINIPPDLRPPEARQNILFAVQELGKRYPQGLPKLHPINDMGIQEPELVDLVHKLEELEQKQCSHRLHKSGQSEQELSWYQRKADLNSEIQQLKSKMRDSQLQKFRDELRNRSRVLKMLGHIDADGVLQLKGRAACLIDTGDELLITELMFNGTFNDLDHHQVASLASCFVPCDKSSEQIRLRNELSGPMMQLQEAARKIAEVQRECKLEVNVEEYVESTCRPYLMDVIYCWSRGATFAEVMEMTDIFEGSVIRLARRLDEFLNQLRAAAEAVGEVNLEEKFKKASESLRRGIMFSNSLYL

SEQ ID NO: 104261 - protein, 108 aa, Setaria italica
  Transcript Sequence Number=SeqID_38287
ILEVYKCSKIMSAWGHRRQPSIIPENAAILQFEEIMVDDTIIASQERSPKEDTPYVGNEIKYQSSEELSTNKKVNNKNILGDGKGINDKEGVKDLASQVKTSLTIKDT

SEQ ID NO: 104262 - protein, 124 aa, Setaria italica
  Transcript Sequence Number=SeqID_38288
  Gene Ontology: Mol. function=oxidoreductase activity, acting on paired donors, with incorporation or reduction of molecular oxygen, 2-oxoglutarate as one donor, and incorporation of one atom each of oxygen into both ...
  Gene Ontology: Mol. function=donors; Cellular component=plasma membrane; Biological process=protein metabolic process
  Homolog annotation: Hit_ID=B6TAV1; Match level="QueryCoverage=91%, HitCoverage=38%, E-value=2e-58, Identity=88%"; Hit description =Oxidoreductase
ESWSYLARCFQGGHLQYKDETWSDCARSGLAVKPKKGDALLFFSLHVNATTDTSSLHGSCPVIEGEKWSATKWIHVRSFDNPPNVRTDAPCSDDNDLCPKWAAIGECYKNPTYMVGTKDTLGFC

SEQ ID NO: 104263 - protein, 219 aa, Setaria italica
  misc_feature (14)..(14): Xaa can be any naturally occurring amino acid
  Transcript Sequence Number=SeqID_38289
  Gene Ontology: Mol. function=oxidoreductase activity, acting on paired donors, with incorporation or reduction of molecular oxygen, 2-oxoglutarate as one donor, and incorporation of one atom each of oxygen into both ...
  Gene Ontology: Mol. function=donors; Cellular component=plasma membrane; Biological process=protein metabolic process
  Homolog annotation: Hit_ID=B6TAV1; Match level="QueryCoverage=100%, HitCoverage=73%, E-value=1e-115, Identity=87%"; Hit description =Oxidoreductase
  Pfam annotation: Domain name=2OG-FeII_Oxy; Domain location=40-162; Score=70.0; E_value=8.8e-18; Accession=PF03171.12; Description=2OG -Fe(II) oxygenase superfamily
  Pfam annotation: Domain name=ShK; Domain location=177-217; Score =29.1; E_value=1.8e-05; Accession=PF01549.16; Description=ShK domain -like
  Pfam module annotation: Pfam domain module=2OG-FeII_Oxy::ShK; Domain location=40-162::177-217
KSVMSQVRTSSGTXLAKHEDEIVSGIEKRVAAWTFLPEENAESMQVLHYEIGQKYDAHFDYFHDKNNLKRGGHRIATVLMYLSDVKKGGETVFPSAEGGHLQYKDETWSDCARSGLAVKPKKGDALLFFSLHVNATTDTSSLHGSCPVIEGEKWSATKWIHVRSFDNPPNVRTDAPCSDDNDLCPKWAAIGECYKNPTYMVGTKDTLGFCRKSCGLCDA

SEQ ID NO: 104264 - protein, 157 aa, Setaria italica
  Transcript Sequence Number=SeqID_38290
  Gene Ontology: Mol. function=small conjugating protein ligase activity; Cellular component=cytosol; Biological process=ubiquitin -dependent protein catabolic process
  Homolog annotation: Hit_ID=Q8LGF7; Match level="QueryCoverage=100%, HitCoverage=100%, E-value=1e-84, Identity=93%"; Hit description =Probable ubiquitin carrier protein E2 21
  Pfam annotation: Domain name=UQ_con; Domain location=7-148; Score =201.6; E_value=2.1e-57; Accession=PF00179.18; Description=Ubiquitin -conjugating enzyme
MQASRARLFKEYKEVQREKSADPDIQLICDDSNIFKWTALIKGPSETPFEGGVFQLAFSIPEQYPLLPPQVRFLTKIFHPNVHFKTGEICLDILKNAWSPAWTLQSVCRAIIALMAHPEPDSPLNCDSGNLLRSGDIRGYQSMARMYTRLAAMPKKG

SEQ ID NO: 104265 - protein, 248 aa, Setaria italica
  misc_feature (125)..(125): Xaa can be any naturally occurring amino acid
  Transcript Sequence Number=SeqID_38291
  Gene Ontology: Mol. function=nutrient reservoir activity
  Homolog annotation: Hit_ID=C0L964; Match level="QueryCoverage=55%, HitCoverage=42%, E-value=3e-32, Identity=56%"; Hit description=Gamma- coixin
  Pfam annotation: Domain name=Tryp_alpha_amyl; Domain location=127 -238; Score=41.8; E_value=2.7e-09; Accession=PF00234.14; Description =Protease inhibitorseed storageLTP f
QDHEKHQPQQHHHHQQQHHHQVHMQQQHHQQQYVHVQQQPQQQNHEQPQQQHHQQYQIHEHEVPLQRQHKQPNHQSRHYLEQQPQQQQQQLCQQGFEQQPGQQDNKKQQIKRCGYNTYISNQNLXNCREFLRQQCNPLAMPFLQSRLLQPSNCQVLQQHCCHELRQIEPRYLHQAICNIVQSITHQQQQQEKQQQQQHSCELCGSQQASEGELAIRMVAQHLPSMCGIYHSWSQDSTCGNKDARGVRN

SEQ ID NO: 104266 - protein, 118 aa, Setaria italica
  misc_feature (73)..(73): Xaa can be any naturally occurring amino acid
  Transcript Sequence Number=SeqID_38292
  Subcellular localization annotation: CTP_CleavageSite=67; ConfidenceScore=5.09e-01
RRWLHPTGTESAPASAAAWRSAATEAIPWISAPAAACPPASSSPASRARRSPSAGPTPSPGASSAPACAAAWXAAAAKAIPWSPAAPSAPSIATTPRTSSRSPPPPAGPTPPPRLSSC

SEQ ID NO: 104267 - protein, 157 aa, Setaria italica
  Transcript Sequence Number=SeqID_38293
  Gene Ontology: Mol. function=iron-sulfur cluster binding; Biological process=oxidation reduction
  Homolog annotation: Hit_ID=Q8LHR9; Match level="QueryCoverage=100%, HitCoverage=11%, E-value=7e-65, Identity=77%"; Hit description =Putative aldehyde oxidase
ACTLLKKTIVPKEGTRHAAYRSSLAVAFLFSFLCPVTKETLKPVKAVHLNGSVPSGTNGNPNCGPDACVDASLKKINNVKPGSYGNDCILEYSKQKIEINKDYLPVGIPAKKVGAALQASGEAVFVDDIPSPKDCLYGAFIYSTKPLAHVRSIELNP

SEQ ID NO: 104268 - protein, 85 aa, Setaria italica
  Transcript Sequence Number=SeqID_38294
ARTRVEFLHRMEDFRKIYMGRISSSPSIWQSKESESIQMNIIEEKEDLFVICNMRAFMRRETTKLTSPEEVANHKTGKHFILKCR

SEQ ID NO: 104269 - protein, 76 aa, Setaria italica
  Transcript Sequence Number=SeqID_38295
ILRNSSQAMKKFCPCRSYESPPYDEEILHASLLNLGLDPIDLCNIFVVNLQGEGKVGSMQVSQVYCLAWWSMKVSS

SEQ ID NO: 104270 - protein, 220 aa, Setaria italica
  Transcript Sequence Number=SeqID_38296
  Gene Ontology: Mol. function=protein binding
  Subcellular localization annotation: CTP_CleavageSite=3; ConfidenceScore=5.00e-01
RISSSSSSNTTASSSWLLSNIFPEEVINVLLKWHVPLSDQGTNNTSSTSVHGGSRSISHNSDIPTLKIGVLVMPHESSDDIDPAADSYALEVIDGEEQGIIHANAHLQDLGEKLLPKAADYLHQNSESELYQLSLKSRHGTAHICLEKASIRIQSAAMVKSEAARRAQQDKSATLQQDMERWKQISGDLLKLWVVRGSDKLQGLTHGHSQLGLDTGSVYA

SEQ ID NO: 104271 - protein, 102 aa, Setaria italica
  Transcript Sequence Number=SeqID_38297
  Gene Ontology: Mol. function=protein binding; Cellular component =cytoplasm
  Homolog annotation: Hit_ID=B6TXW1; Match level="QueryCoverage=94%, HitCoverage=26%, E-value=5e-22, Identity=63%"; Hit description =BES1/BZR1 protein
  Subcellular localization annotation: CTP_CleavageSite=47; ConfidenceScore=5.10e-01
PIPRSSDESDVCSTVDSGRWISFQMSAATTAPASPTYNLVNPSGGASASNSMELDGMAAADIGRGGPAEFEFDKGRVTPWEGERIHEVAAEELDLTLGVGTK

SEQ ID NO: 104272 - protein, 79 aa, Setaria italica
  Transcript Sequence Number=SeqID_38298
MRPAEEGGKAAIVRYVVRRAAAVLPANKVATREDAEKVAAAAARNEGKRAGAGGGGGKGSSGVVDAVAAAADMNEGRMM

SEQ ID NO: 104273 - protein, 71 aa, Setaria italica
  Transcript Sequence Number=SeqID_38299
GDAKTTLYVFVVFLSLNTQVLGTQADSCCTIGRKIHLVRVSVLCSGALSNIHINTVQLCIYHISRKLWRNV

SEQ ID NO: 104274 - protein, 152 aa, Setaria italica
  misc_feature (67)..(67): Xaa can be any naturally occurring amino acid
  Transcript Sequence Number=SeqID_38300
  Gene Ontology: Mol. function=metal ion transmembrane transporter activity; Cellular component=integral to membrane; Biological process=metal ion transport
  Homolog annotation: Hit_ID=B6T9K8; Match level="QueryCoverage=100%, HitCoverage=41%, E-value=3e-70, Identity=88%"; Hit description=Zinc transporter 1
  Pfam annotation: Domain name=Zip; Domain location=1-149; Score=23.5; E_value=2e-07; Accession=PF02535.14; Description=ZIP Zinc transporter
QVLELGILVHSVIIGVSLGTSVRSSTIRPLVGALSFHQLFEGIGLGGCIVQANFKLRATVMMAIFFXLTAPIGIALGIGISSSYNGHSATAFVVEGVFNSASAGILIYMSLVDLLATDFNNPKLQTNTKLQLMTYLALFLGAGMMSMLAIWA

SEQ ID NO: 104275 - protein, 320 aa, Setaria italica
  misc_feature (18)..(18): Xaa can be any naturally occurring amino acid
  Transcript Sequence Number=SeqID_38301
  Homolog annotation: Hit_ID=Q7XKB6; Match level="QueryCoverage=83%, HitCoverage=38%, E-value=1e-09, Identity=21%"; Hit description =OSJNBa0064G10.15 protein
  Pfam annotation: Domain name=DUF639; Domain location=1-319; Score= -308.9; E_value=0.00021; Accession=PF04842.4; Description=Plant protein of unknown function (DUF639)
  Pfam annotation: Domain name=Reticulon; Domain location=163-314; Score=-39.1; E_value=0.051; Accession=PF02453.9; Description =Reticulon
  Pfam module annotation: Pfam domain module=DUF639::Reticulon; Domain location=1-319::163-314
YNLESPIHKWEVHSRISXLGVIRLHAAREMLRMSPPSPSSFLVFSLYDDLPKGDFVLEQLASNLKQTSTITRLSASYVFKGLSKSSYVIPLSAEIAKDHDTDSSGHEQPLASLENKIDQAKDEAREVTAANAAIEGMQEEGITDSLLVLVGLVGPIGKLRPLVQQIISWERPFVTGSVLAVTLLTIYNEWFNYMLAASLILAVGVMVWARQRKIGKICSEVIIDTSSDKTTMESIVEAQQSLRKVHEYIKTANVVILRLWSIALARSPKHTETMIWMLTGSAVVAAVIPFKFILIGLAAGGFVANTRVAKAVSNPLGRSG

SEQ ID NO: 104276 - protein, 216 aa, Setaria italica
  misc_feature (55)..(55): Xaa can be any naturally occurring amino acid
  misc_feature (58)..(58): Xaa can be any naturally occurring amino acid
  misc_feature (74)..(74): Xaa can be any naturally occurring amino acid
  Transcript Sequence Number=SeqID_38302
  Gene Ontology: Mol. function=nucleotide binding; Biological process =defense response
  Homolog annotation: Hit_ID=Q2R1F9; Match level="QueryCoverage=99%, HitCoverage=27%, E-value=2e-40, Identity=40%"; Hit description=NB -ARC domain containing protein, expressed
  Pfam annotation: Domain name=LRR_1; Domain location=124-147; Score =3.7; E_value=60; Accession=PF00560.25; Description=Leucine Rich Repeat
  Pfam annotation: Domain name=LRR_1; Domain location=19-40; Score=2.6; E_value=97; Accession=PF00560.25; Description=Leucine Rich Repeat
  Pfam annotation: Domain name=LRR_1; Domain location=42-64; Score =11.8; E_value=1.7; Accession=PF00560.25; Description=Leucine Rich Repeat
  Pfam annotation: Domain name=LRR_1; Domain location=65-85; Score=0.1; E_value=2.9e+02; Accession=PF00560.25; Description=Leucine Rich Repeat
  Pfam module annotation: Pfam domain module=LRR_1::LRR_1::LRR_1::LRR _1; Domain location=124-147::19-40::42-64::65-85
WENLKDDDMVQICSSQFFLLKYLSIRCTRVSWLPPQIIELGYLETLDISHTQIRXLPXQVWELLELQALDLRNXQVKLLPRYVPCRAHGLRRQCLRRLLVNDHQMDKIVTEVPKDIVNWRFLEALETVDLSNCSASFIENLADLRFLEVLAVKWSFHQCYDEKCTSALQSAIHRSGCLKSLTIHCELGCSMEFLDSLADASRQSLQNVRIMGSFLL

SEQ ID NO: 104277 - protein, 280 aa, Setaria italica
  Transcript Sequence Number=SeqID_38303
  Homolog annotation: Hit_ID=B6TK80; Match level="QueryCoverage=95%, HitCoverage=67%, E-value=2e-36, Identity=36%"; Hit description=F-box domain containing protein
RLLLGRPPQGKKDGYWFPDLTVCDPLSRRSLLLPRIPGDLISSAAEKKRCILPALLPCGHEEEDTSSFRVISTMYCVEKLVVFIFSSSSGCWNIGKSTTWDALGLAIPIPPGRNIVPLSLHSDYACGCVYWKLLGMNKLLQFNINSLEFCTVDFPLDHNMTTKPVIVETAEARLGMFNVTSNQESLYYATRQNGGLRSNEWKTEDIISLPEGYRFLIAGALGGYIILLASPVTRPHSAYFSLEVKTMKIERIGRAERCNGRIYPYIGFPPSISPRGHEMD

SEQ ID NO: 104278 - protein, 71 aa, Setaria italica
  misc_feature (1)..(35): Xaa can be any naturally occurring amino acid
  Transcript Sequence Number=SeqID_38304
XXXXXXXXXXXXXXXXXXXXXXXXXXXXXXXXXXXFFFFFFVIIIVNSELEFAYTSRPVILVHNRRPGDRV

SEQ ID NO: 104279 - protein, 57 aa, Setaria italica
  Transcript Sequence Number=SeqID_38305
  Subcellular localization annotation: CTP_CleavageSite=32; ConfidenceScore=5.14e-01
PSIASLLWNACSTTTTCIRWHDGTRWTHGNFVARRKRSGCLSFLPAPRTLFFFELMH

SEQ ID NO: 104280 - protein, 102 aa, Setaria italica
  Transcript Sequence Number=SeqID_38306
  Gene Ontology: Mol. function=nucleobase, nucleoside, nucleotide kinase activity; Cellular component=chloroplast envelope; Biological process=nucleobase, nucleoside, nucleotide and nucleic acid metabolic process
  Homolog annotation: Hit_ID=B9SC22; Match level="QueryCoverage=86%, HitCoverage=14%, E-value=3e-19, Identity=51%"; Hit description =Adenylate kinase, putative
ASFETCYSFRLLYYAGSFYPIMGALRLGYCYRMAYPNKYEIYRRVDEPDGKEKYALIAEFTDKPTPDDITSCFQRTEKYVGFSQFYTGTTKRHLQDSGNLWP

SEQ ID NO: 104281 - protein, 72 aa, Setaria italica
  misc_feature (42)..(42): Xaa can be any naturally occurring amino acid
  Transcript Sequence Number=SeqID_38307
  Gene Ontology: Mol. function=nucleobase, nucleoside, nucleotide kinase activity; Cellular component=chloroplast envelope; Biological process=nucleobase, nucleoside, nucleotide and nucleic acid metabolic process
  Homolog annotation: Hit_ID=B9SC22; Match level="QueryCoverage=93%, HitCoverage=11%, E-value=3e-24, Identity=79%"; Hit description =Adenylate kinase, putative
QSLESLKIRPDIFIVLEVPDDILINRCVGRRLDPVTGKIYHXKNFPPENEEISARLITRSDDTFEKVLALPT

SEQ ID NO: 104282 - protein, 99 aa, Setaria italica
  misc_feature (10)..(10): Xaa can be any naturally occurring amino acid
  misc_feature (24)..(24): Xaa can be any naturally occurring amino acid
  Transcript Sequence Number=SeqID_38308
  Gene Ontology: Mol. function=nucleobase, nucleoside, nucleotide kinase activity; Cellular component=chloroplast envelope; Biological process=nucleobase, nucleoside, nucleotide and nucleic acid metabolic process
  Homolog annotation: Hit_ID=B9SC22; Match level="QueryCoverage=57%, HitCoverage=9%, E-value=7e-20, Identity=77%"; Hit description =Adenylate kinase, putative
INIGAVGANXVDKEDDMFVLIAPXNAVGNCIIDDMRAMTDAAGDRPVILVNPRLKVLTKKYILFPLLSSLNIVIMSNLKRSYVYIVPIWWDIGGSSSKN

SEQ ID NO: 104283 - protein, 167 aa, Setaria italica
  Transcript Sequence Number=SeqID_38309
  Gene Ontology: Mol. function=nucleobase, nucleoside, nucleotide kinase activity; Cellular component=chloroplast envelope; Biological process=nucleobase, nucleoside, nucleotide and nucleic acid metabolic process
  Homolog annotation: Hit_ID=B9SC22; Match level="QueryCoverage=100%, HitCoverage=27%, E-value=3e-70, Identity=71%"; Hit description =Adenylate kinase, putative
  Pfam annotation: Domain name=DUF1995; Domain location=2-144; Score =113.1; E_value=9e-31; Accession=PF09353.2; Description=Domain of unknown function (DUF1995)
TFINIGAVGASEVDKEDDMFVLIAPQNAVGNCIIDDMRAMTDAAGDRPVILVNPRLKDMPGSSGVMQTMGRDMRLKYAASFETCYSFRLLYYAGSFYPIMGALRMAYPNKYEIYRRVDEPDGKEKYALIAEFTDKPTPDDITSAFKGRKKDDEKAPSGFWGFLSGIL

SEQ ID NO: 104284 - protein, 277 aa, Setaria italica
  misc_feature (219)..(219): Xaa can be any naturally occurring amino acid
  Transcript Sequence Number=SeqID_38310
  Gene Ontology: Mol. function=phosphotransferase activity, phosphate group as acceptor; Cellular component=chloroplast envelope; Biological process=nucleobase, nucleoside, nucleotide and nucleic acid metabolic process
  Homolog annotation: Hit_ID=Q8VYL1; Match level="QueryCoverage=69%, HitCoverage=32%, E-value=3e-82, Identity=74%"; Hit description =Putative adenylate kinase
  Pfam annotation: Domain name=ADK; Domain location=88-267; Score =244.9; E_value=2e-70; Accession=PF00406.14; Description=Adenylate kinase
  Subcellular localization annotation: CTP_CleavageSite=69; ConfidenceScore=5.64e-01
MAAFSPAKTSPPLAAPGTHRCHGPAIRRISPSPSCYPSLALSSSPVVPSVCAPAGALKPKPWGLGLRCRAAEEASMPARGNAPLKVMISGAPASGKGTQCRMIVEKYGLVHISTGDLLRAEVSSGTEIGKKAKEYMGSGKLVPDQVVTDMVVSRLSQPDVQERGWLLDGYPRSFSQAQSLESLKIRPDIFIVLEVPDDILINRCVGRRLDPVTGKIYHXKNFPPENEEISARLITRSDDTFEKVKSRLDTYKQNSEAILPAYSDFLNQIDGNRLLKS

SEQ ID NO: 104285 - protein, 329 aa, Setaria italica
  Transcript Sequence Number=SeqID_38311
  Gene Ontology: Mol. function=nucleobase, nucleoside, nucleotide kinase activity; Cellular component=chloroplast envelope; Biological process=nucleobase, nucleoside, nucleotide and nucleic acid metabolic process
  Homolog annotation: Hit_ID=B9SC22; Match level="QueryCoverage=91%, HitCoverage=50%, E-value=1e-128, Identity=72%"; Hit description =Adenylate kinase, putative
  Pfam annotation: Domain name=ADK_lid; Domain location=29-60; Score =7.0; E_value=0.088; Accession=PF05191.6; Description=Adenylate kinase, active site lid
  Pfam annotation: Domain name=DUF1995; Domain location=142-328; Score =166.4; E_value=8.4e-47; Accession=PF09353.2; Description=Domain of unknown function (DUF1995)
  Pfam module annotation: Pfam domain module=ADK_lid::DUF1995; Domain location=29-60::142-328
FLVVLLVLLFLFVVLEVPDDILINRCVGRRLDPVTGKIYHVKNFPPENEEISARLITRSDDTFEKVKSRLDTYKQNSEAILPAYSDFLNQIDGNRPVEVIFQEIDSLLQKICENTSANKLIKANGKSPASVDTGSKNEWRGIPTRLNNIPHSREIRKYFYDDVLQATKRAIEDKKTRLQIDINIPELNPEMDVYRIGTLMELVRELSLSFADDGKRVKVCVQGSMGQGAFAGIPLQLAGTRKILEFMDWGDYGAKGTFINIGAVGASEVDKEDDMFVLIAPQNAVGNCIIDDMRAMTDAAGDRPVILVNPRLKDMPLVNWYCFIRSYLG

SEQ ID NO: 104286 - protein, 187 aa, Setaria italica
  Transcript Sequence Number=SeqID_38312
  Gene Ontology: Mol. function=DNA binding; Cellular component =cytoplasm; Biological process=regulation of transcription, DNA -dependent
  Homolog annotation: Hit_ID=P26307; Match level="QueryCoverage=86%, HitCoverage=23%, E-value=2e-62, Identity=78%"; Hit description =Regulatory protein viviparous-1
  Pfam annotation: Domain name=B3; Domain location=14-117; Score=90.3; E_value=6.9e-24; Accession=PF02362.13; Description=B3 DNA binding domain
AAGGEVGTKNLRYLLQKVLKQSDVGSLGRIVLPKKEAEVHLPELKTRDGISIPMEDIGTSRVWNMRYRFWPNNKSRMYLLENTGEFVRSNELQEGDFIVIYSDVKSGKYLIRGVKVRPAHQDQGNGSSAVGKNKHGSPGPEKAGGSSDDGIVIADGTNKPDGACKGRSQQGARRARHQGAASMAVSI

SEQ ID NO: 104287 - protein, 66 aa, Setaria italica
  Transcript Sequence Number=SeqID_38313
PLAKGTTRAAVHGSRSPTNTTVEGREEAEEAIKKRKEEKRKVREQVEAKVDDAQIGSSSPAPPRRK

SEQ ID NO: 104288 - protein, 85 aa, Setaria italica
  misc_feature (45)..(45): Xaa can be any naturally occurring amino acid
  Transcript Sequence Number=SeqID_38314
PSCTHKSFHPPASENWYDPARKKPRTRSIDRCVAWEWDAGLLDGXRVVEAVHARERAAGALPTRRRGRRRGPAVRLLPFLLLVLR

SEQ ID NO: 104289 - protein, 105 aa, Setaria italica
  Transcript Sequence Number=SeqID_38315
  Subcellular localization annotation: CTP_CleavageSite=25; ConfidenceScore=5.24e-01
GIHANLSSTPSLQSSDADTPSRPPPAVAESPGMLGTQVEQNLHPDIAPSTSLSGVQLQGMFLDERSPAGCRSDGVTDLSEESETEYLTGATCNLATVPVYREAEN

SEQ ID NO: 104290 - protein, 46 aa, Setaria italica
  Transcript Sequence Number=SeqID_38316
QLQRNQWIVIYVILDSLESRSSYLYSLQSFFFILMACSYHGLSPDT

SEQ ID NO: 104291 - protein, 55 aa, Setaria italica
  Transcript Sequence Number=SeqID_38317
DVSSRSSTKWPVLCIFNLVHFRMVKRSLSLIDEQDNILQRVSHCCQHKIKSEVDH

SEQ ID NO: 104292 - protein, 138 aa, Setaria italica
  Transcript Sequence Number=SeqID_38318
  Gene Ontology: Biological process=response to stress
  Homolog annotation: Hit_ID=B6U2R1; Match level="QueryCoverage=95%, HitCoverage=71%, E-value=5e-54, Identity=78%"; Hit description =Ethylene-responsive protein
  Pfam annotation: Domain name=Usp; Domain location=10-131; Score=44.2; E_value=5.3e-10; Accession=PF00582.18; Description=Universal stress protein family
NVVRCHPDASLVVVHAQHAVDHFVYPIATHGNASIAYARPAAVESMRKAQEENSRRILARALGMCKERQVDATAAVVEGDAKEAICQAVERFQAGLLVLGSRGLGKIKRAFLGSVSDYLSHHACCPVLVVKPTKAHAK

SEQ ID NO: 104293 - protein, 138 aa, Setaria italica
  Transcript Sequence Number=SeqID_38319
AHPGGAKAGSKLPRGDYVPVYVALGLIALSVTLGLSTARQQLAHAPNVRVDKKKRETVPEVAAPDLALDEGERFVGNSLFRKVAHVQDDRSLAAGVADPVAEYPTKKAVTLKDVGVETPGIEQSREGIIDRIFKKNHA

SEQ ID NO: 104294 - protein, 115 aa, Setaria italica
  Transcript Sequence Number=SeqID_38320
  Gene Ontology: Mol. function=oxidoreductase activity; Cellular component=extracellular region; Biological process=lignin catabolic process
  Homolog annotation: Hit_ID=Q2QUP7; Match level="QueryCoverage=97%, HitCoverage=13%, E-value=2e-41, Identity=73%"; Hit description =Retrotransposon protein, putative, Ty1-copia subclass, expressed
VVVAPGQTVDALMVAGAAVGRYYMAASPYDSAIPVGPPFSMSTATAIVEYAGSAAEAPPQLPSRPEYNDTDTAFRFLSNLTALVLPGKPTVPLSVDTRMFVTVGLGNSDCLPKQS

SEQ ID NO: 104295 - protein, 64 aa, Setaria italica
  Transcript Sequence Number=SeqID_38321
KSEQLYVQGKKLLHFQISERTFPPDILLFHVQSKEGGICLATEQMVKLTCSYLRTGAHDSACHT

SEQ ID NO: 104296 - protein, 70 aa, Setaria italica
  Transcript Sequence Number=SeqID_38322
GCTSQFFTGAKWMDALRSCMCVAMQMNARPWRPDRGSEPDEEDGELGARAAALGRDHVQRLRVPGADEVV

SEQ ID NO: 104297 - protein, 269 aa, Setaria italica
  Transcript Sequence Number=SeqID_38323
  Gene Ontology: Mol. function=hydrolase activity; Cellular component =cell wall
  Homolog annotation: Hit_ID=B6U0A3; Match level="QueryCoverage=95%, HitCoverage=70%, E-value=1e-120, Identity=81%"; Hit description =Catalytic/ hydrolase
  Pfam annotation: Domain name=Abhydrolase_1; Domain location=1-247; Score=10.4; E_value=0.00082; Accession=PF00561.12; Description =alphabeta hydrolase fold
HGVLRTRAGYGDSDANPRRCLKSDATDVEELADALRLGDKFYVVGCSMGGYVAWSCLNYIPHRLAGVALVVPAVNYWWPLPDDVRRIAYGKLDARDQRTFWIAHHAPWLFHAWLTQKWLPVSPIIRGERGAFTAMDWEILTDLRRKQRESGQVDPAKTTQQGTYESLCRDATTLFGTWEFDPTEVKNPFPDGEGVVSIWQGYKDRIVQVEIQRYVARKLPWVRYHEHPEAGHLLPDMDGVGDEIVRELLLGGAPPGSQLQSEPRQDQDG

SEQ ID NO: 104298 - protein, 132 aa, Setaria italica
  Transcript Sequence Number=SeqID_38324
  Subcellular localization annotation: CTP_CleavageSite=21; ConfidenceScore=5.36e-01
LTCSSPFFSSGRINSTTLFVCTASVPQLESKAFLLLRRNLILLDLLESFTTQTLGPRQKLSSTRNSRLPLQLRTTDLRLLPLTRAVGGLTPGGGVPVPDGHLSLLPIRRAGPGLLVQHQEADGAYDAESDDR

SEQ ID NO: 104299 - protein, 268 aa, Setaria italica
  Transcript Sequence Number=SeqID_38325
  Gene Ontology: Mol. function=hydrolase activity; Cellular component =cytoplasm; Biological process=nuclear-transcribed mRNA catabolic process, nonsense-mediated decay
  Homolog annotation: Hit_ID=B6T785; Match level="QueryCoverage=99%, HitCoverage=68%, E-value=2e-50, Identity=45%"; Hit description=Dcp1 -like decapping family protein
  Pfam annotation: Domain name=DCP1; Domain location=1-84; Score=53.7; E_value=6.9e-13; Accession=PF06058.5; Description=Dcp1-like decapping family
QEWNRKPVEGSLFVVKRNTQPRFQLVVMNQLNTENLVEDLLTDFDVEVQVPYVMYRNAADEILGILFNNPKECEEVGHLFKRIKNAYSRASPKAKLPSKSVFEEQEAASVSSALPAAEDTLERSTSLTMIADDVEEFLLTPSKVAACVDMIGGTGAVQPNQSFRTISSSSHELHNASAPQACSLHSMLPSRTSSVTLRPFDAHRPQSSATTQSASLLNVKPQLLAPMASTQPTLPNAASSLSTVPPPHPPFANHQPQVVPLLHPFSLP

SEQ ID NO: 104300 - protein, 222 aa, Setaria italica
  Transcript Sequence Number=SeqID_38326
  Gene Ontology: Mol. function=serine-type endopeptidase inhibitor activity; Cellular component=extracellular region
  Homolog annotation: Hit_ID=P12940; Match level="QueryCoverage=65%, HitCoverage=95%, E-value=7e-22, Identity=45%"; Hit description =Bowman-Birk type trypsin inhibitor
  Pfam annotation: Domain name=Bowman-Birk_leg; Domain location=150 -174; Score=26.8; E_value=8.7e-05; Accession=PF00228.12; Description =Bowman-Birk serine protease inhibitor family
  Pfam annotation: Domain name=Bowman-Birk_leg; Domain location=176 -203; Score=16.0; E_value=0.022; Accession=PF00228.12; Description =Bowman-Birk serine protease inhibitor family
  Pfam annotation: Domain name=Bowman-Birk_leg; Domain location=69-93; Score=32.7; E_value=1.5e-06; Accession=PF00228.12; Description =Bowman-Birk serine protease inhibitor family
  Pfam annotation: Domain name=Bowman-Birk_leg; Domain location=95-117; Score=15.3; E_value=0.029; Accession=PF00228.12; Description=Bowman -Birk serine protease inhibitor family
  Pfam module annotation: Pfam domain module=Bowman-Birk_leg::Bowman -Birk_leg::Bowman-Birk_leg::Bowman-Birk_leg; Domain location=150 -174::176-203::69-93::95-117
MARGVASNPLMLSLEAAVLLLVAAGVPAAALRDDMDAIRVPTHVRGVADLVTAVARATKGDDEKRPWKCCDLAMCMRSWPPICRCLDEVERCSGACRNCEETGDSRRTCVDWYKGQPGPQCHHKDAAERQAAAAADAEKKGGDEKRPWKCCSLPICTRSQPPICHCWDEVKRCSSACVHCEVVEGSSGGPRRYRCLDTHHGDPGPRCREKQWAPTVATSYRF

SEQ ID NO: 104301 - protein, 58 aa, Setaria italica
  Transcript Sequence Number=SeqID_38327
DNSHSTVMNKTKVLHYCSMDYTEICGCVHSGLYPFFFFRIMICTSLACSIKKMYTTER

SEQ ID NO: 104302 - protein, 64 aa, Setaria italica
  Transcript Sequence Number=SeqID_38328
HIEVHILAQMPVHCQLNKFRILVKAAIIFNLYSEQMVPDNRSTSLEALLVSCRLHKSVGVLMTP

SEQ ID NO: 104303 - protein, 142 aa, Setaria italica
  Transcript Sequence Number=SeqID_38329
  Gene Ontology: Mol. function=aspartic-type endopeptidase activity; Cellular component=mitochondrion; Biological process=DNA integration
  Homolog annotation: Hit_ID=Q6Z0A7; Match level="QueryCoverage=91%, HitCoverage=43%, E-value=3e-40, Identity=60%"; Hit description=PPR protein-like
  Pfam annotation: Domain name=PPR; Domain location=3-37; Score=18.7; E_ value=0.024; Accession=PF01535.12; Description=PPR repeat
  Pfam annotation: Domain name=PPR; Domain location=38-72; Score=30.6; E_value=6.3e-06; Accession=PF01535.12; Description=PPR repeat
  Pfam annotation: Domain name=PPR; Domain location=73-107; Score=1.3; E_value=6.2; Accession=PF01535.12; Description=PPR repeat
  Pfam module annotation: Pfam domain module=PPR::PPR::PPR; Domain location=3-37::38-72::73-107
KIGTLNIMIGTLLKGGRKGEAMNLFSYILANRLAPDVVTYTLVMVHFIEEGLLEESDSLFLSMQENGCAPDSRMLNSVVRRLLQRGEVSRAGFYLSKIDENHFSLEASTSSLLTSLGTGGKYRHHRKFLPEKYRSSMDSTNG

SEQ ID NO: 104304 - protein, 137 aa, Setaria italica
  Transcript Sequence Number=SeqID_38330
MASAASSAAGAGKSLFQGLRRFLKKPWEITGPCASPEYRSALPNALEYRDKCPATIRDDRDKAIVPTSDPETVYDIKYFTRDRRRNRPPVRRTLLRKPDLERYMAAKQFDPTKDFPVPYVNTTVEEDDNTIGGGYQK

SEQ ID NO: 104305 - protein, 60 aa, Setaria italica
  Transcript Sequence Number=SeqID_38331
  Gene Ontology: Mol. function=ATP-dependent helicase activity
  Homolog annotation: Hit_ID=Q0DLB9; Match level="QueryCoverage=63%, HitCoverage=6%, E-value=3e-13, Identity=97%"; Hit description=DEAD -box ATP-dependent RNA helicase 17
GELKKIFMVKKLHLGHVARSFGLKEQPSLVGRSHQVQLKKRKKEQKRERPAKRRKLPSKK

SEQ ID NO: 104306 - protein, 167 aa, Setaria italica
  Transcript Sequence Number=SeqID_38332
  Gene Ontology: Mol. function=ATP-dependent helicase activity; Cellular component=nucleolus; Biological process=ribosomal large subunit assembly and maintenance
  Homolog annotation: Hit_ID=Q0DLB9; Match level="QueryCoverage=79%, HitCoverage=22%, E-value=7e-66, Identity=89%"; Hit description=DEAD -box ATP-dependent RNA helicase 17
RGEALLFLQPIELDYLKDLESHGVSLTEYPFQKVLDSFPVNGQKPHKRKMISLDMHPWIMSLQRSLEGFVTAEDATKKLARDAFCSWVRAYTAHRGELKKIFMVKKLHLGHVARSFGLKEQPSLVGRSHQVQLKKRKKEQKRERPSHFGCASSLLGGELSSFFGLGP

SEQ ID NO: 104307 - protein, 427 aa, Setaria italica
  Transcript Sequence Number=SeqID_38333
  Gene Ontology: Mol. function=serine-type endopeptidase activity; Cellular component=extracellular region; Biological process=negative regulation of catalytic activity
  Homolog annotation: Hit_ID=O65351; Match level="QueryCoverage=99%, HitCoverage=56%, E-value=7e-83, Identity=42%"; Hit description =Subtilisin-like protease
  Pfam annotation: Domain name=PA; Domain location=18-122; Score=20.4; E_value=0.0029; Accession=PF02225.14; Description=PA domain
  Pfam annotation: Domain name=Peptidase_S8; Domain location=6-265; Score=-74.6; E_value=0.01; Accession=PF00082.14; Description =Subtilase family
  Pfam module annotation: Pfam domain module=PA::Peptidase_S8; Domain location=18-122::6-265
TVGAATVDRVFPVSATLGNGQVLTGQSLYAQAAKQTPMVRLLPSDCTGNDLVPDRIMGKIVVCSSNFGVSPPYGVAVQRAGGSGLVSVATVEQHMDGLMVQAFTLPAVSLSAREAEKLAAYIHSEPYPVASFRFTCSTVTGENRAPMVATFSSRGPNQLVREILKPDVIAPGTNILAAWPGESPLTRADGDTRRSSFNIISGTSMACPHVAGVAALLKKKHPDWTPAMVRSALMTTATMLDSHGRPITDNARPGGSTTPMAAGAGLVRPQLALYPGLVYDAVEQDYVDFFCTMNYTTAQIRMFVPDFAGCTRTLPGGVGDLNYPSFVVDFSNGTDVRVLTRNVTRVSEGPEIYTVRVVVPDELVAVTVTPATLEFGELNETKSYKVVFQSKNSSAGAHGAGSKMQFGHIVWENDAHRVRSPVVFTWN

SEQ ID NO: 104308 - protein, 107 aa, Setaria italica
  Transcript Sequence Number=SeqID_38334
  Pfam annotation: Domain name=DUF1677; Domain location=2-69; Score= -23.9; E_value=0.0035; Accession=PF07911.5; Description=Protein of unknown function (DUF1677)
MEVEKAKCECCGFTEECTPPHGRKVAAGPGAPTEPTPEARALAVAAGSAAARTLAKLPACSAAAAAAGNDWVIGGLELVVELITCSCTRIKTMAACGSSARVGRLHS

SEQ ID NO: 104309 - protein, 223 aa, Setaria italica
  Transcript Sequence Number=SeqID_38335
  Gene Ontology: Mol. function=glutathione transferase activity
  Homolog annotation: Hit_ID=O24595; Match level="QueryCoverage=100%, HitCoverage=100%, E-value=4e-99, Identity=83%"; Hit description =Glutathione transferase
  Pfam annotation: Domain name=GST_C; Domain location=101-197; Score =62.6; E_value=1.5e-15; Accession=PF00043.17; Description=Glutathione S-transferase, C-terminal domain
  Pfam annotation: Domain name=GST_N; Domain location=6-79; Score=80.3; E_value=7e-21; Accession=PF02798.12; Description=Glutathione S -transferase, N-terminal domain
  Pfam module annotation: Pfam domain module=GST_C::GST_N; Domain location=101-197::6-79
MAGEKKGLQLLDFWVSPFGQRCRIALAEKGLPYEYLEQDLSNKSELLLRSNPIHKKIPVLLHDGRPVCESLIIVQYIDEAFPGQGAPLLPADPYARAQARFWADYVDKKVYDCGSRLWKLKGEAQQQARKEMVEILKTLEGALGDGKFFGGEAFGFLDVAFVPFTAWFLTYERYGEFSVEEECPRLAAWAKRCAERESVAKNLYPPEKVYEFVGGMKKRLGIE

SEQ ID NO: 104310 - protein, 179 aa, Setaria italica
  Transcript Sequence Number=SeqID_38336
  Subcellular localization annotation: CTP_CleavageSite=69; ConfidenceScore=5.81e-01
DTRSLGCSNSHSGSSVAVASICTPTTSSVTGLVLMVTSSCNISTATSPSTLLCSVLSSGTGKPLTSVVPMSMPGDTISLLGSTPSIPVRLPSSVLSPLSDTDNSWTRASTILGTISSSSHNAGVADMDSSKSFGSNTASMVIYSLSSSFCALLSNTNDSWPDSWKRNSPSGIVSSSSLD

SEQ ID NO: 104311 - protein, 47 aa, Setaria italica
  Transcript Sequence Number=SeqID_38337
  Gene Ontology: Mol. function=protein kinase activity; Biological process=protein amino acid phosphorylation
  Homolog annotation: Hit_ID=B6SV38; Match level="QueryCoverage=95%, HitCoverage=7%, E-value=4e-17, Identity=91%"; Hit description =BRASSINOSTEROID INSENSITIVE 1-associated receptor kinase 1
KHQFSKENIIGTGRTGTMYKAVLPDGSFLAVKRLQDSQHSESQFTAE

SEQ ID NO: 104312 - protein, 79 aa, Setaria italica
  Transcript Sequence Number=SeqID_38338
  Gene Ontology: Mol. function=protein kinase activity; Biological process=protein amino acid phosphorylation
  Homolog annotation: Hit_ID=B6SV38; Match level="QueryCoverage=83%, HitCoverage=10%, E-value=2e-24, Identity=84%"; Hit description =BRASSINOSTEROID INSENSITIVE 1-associated receptor kinase 1
  Pfam annotation: Domain name=LRR_1; Domain location=33-55; Score =13.6; E_value=0.77; Accession=PF00560.25; Description=Leucine Rich Repeat
  Pfam annotation: Domain name=LRR_1; Domain location=9-31; Score=13.8; E_value=0.68; Accession=PF00560.25; Description=Leucine Rich Repeat
  Pfam module annotation: Pfam domain module=LRR_1::LRR_1; Domain location=33-55::9-31
PDISLQVPFLTSLDLSYNGFSGEIPVLIYNITYLNTLNLQHNQLSGQIPGQFSLFARLQSLNVADNRANKLNCPGISEE

SEQ ID NO: 104313 - protein, 311 aa, Setaria italica
  Transcript Sequence Number=SeqID_38339
  Gene Ontology: Mol. function=protein kinase activity; Cellular component=plasma membrane; Biological process=protein amino acid phosphorylation
  Homolog annotation: Hit_ID=B6SV38; Match level="QueryCoverage=98%, HitCoverage=50%, E-value=1e-131, Identity=75%"; Hit description =BRASSINOSTEROID INSENSITIVE 1-associated receptor kinase 1
  Pfam annotation: Domain name=LRR_1; Domain location=25-47; Score =13.8; E_value=0.68; Accession=PF00560.25; Description=Leucine Rich Repeat
  Pfam annotation: Domain name=LRR_1; Domain location=49-71; Score =13.6; E_value=0.77; Accession=PF00560.25; Description=Leucine Rich Repeat
  Pfam annotation: Domain name=LRR_1; Domain location=73-95; Score =15.8; E_value=0.19; Accession=PF00560.25; Description=Leucine Rich Repeat
  Pfam annotation: Domain name=Pkinase_Tyr; Domain location=199-311; Score=-176.3; E_value=0.053; Accession=PF07714.9; Description =Protein tyrosine kinase
  Pfam module annotation: Pfam domain module=LRR_1::LRR_1::LRR _1::Pkinase_Tyr; Domain location=25-47::49-71::73-95::199-311
MTALDLSSNNFTGPIPPDISLQVPFLTSLDLSYNGFSGEIPVLIYNITYLNTLNLQHNQLSGQIPGQFSLFARLQSLNVADNRLSGTIPPTLQKFPPSNFAGNPGLCGPPLGDCQASAKSKSNAAIIGAVVGVVLVVIIGAIVVFFCLRRIPAKKKAKDEDDNKWAKSIKGTKTIKVSMFENPVSKMKLSDLMKATDQFSKENIIGTGRTGTMYKAVLPDGSFLAVKRLQDSQHSESQFTAEMKTLGQVRHRNLVPLLGFCIAKKEKLLVYKHMPKGSLYGQLNQEEGSKMDWPLRLRIGIGAAKGACISP

SEQ ID NO: 104314 - protein, 213 aa, Setaria italica
  Transcript Sequence Number=SeqID_38340
  Gene Ontology: Mol. function=protein kinase activity; Cellular component=integral to membrane; Biological process=protein amino acid phosphorylation
  Homolog annotation: Hit_ID=B6SV38; Match level="QueryCoverage=99%, HitCoverage=35%, E-value=1e-114, Identity=92%"; Hit description =BRASSINOSTEROID INSENSITIVE 1-associated receptor kinase 1
  Pfam annotation: Domain name=Pkinase; Domain location=2-179; Score= -84.0; E_value=0.0017; Accession=PF00069.17; Description=Protein kinase domain
  Pfam annotation: Domain name=Pkinase_Tyr; Domain location=2-179; Score=-133.2; E_value=7.1e-05; Accession=PF07714.9; Description =Protein tyrosine kinase
  Pfam module annotation: Pfam domain module=Pkinase::Pkinase_Tyr; Domain location=2-179::2-179
PLRLRIGIGAAKGLAYLHHTCNPRVLHRNISSKCILLDEDYEPKISDFGLARLMNPIDTHLSTFVNGEFGDLGYVAPEYARTLMATPKGDVYSFGVVLLELITGEKPTQVSTAPENFRGSLVEWINYLSNNALLQDAIDKSLIGKDADGELMQFLKVACSCTLATPKERPTMFEVYQLLRAIGERYHFTADDELVLSPLNTDGETLDELIVAK

SEQ ID NO: 104315 - protein, 228 aa, Setaria italica
  Transcript Sequence Number=SeqID_38341
LDRNSQQGTPLPLQSLRPYENPPPSLHHTTLHQITSLLPLEHTVQALAPKTMPMQGQLPQHAPAPTEKKRFVGALTMGVPCILETARVGLLAAVVEPPASAHLVRVAEPARTSARDITLGLSAKLCCITRTTPSHAVDMSFLTCNLCRRNTNGRTVYVYMSMGFCSRGCRDDYHLGELDKNRKRQAVALMGRSKMARIVTRVDAGKATEAGEASCSRPTFFTCAEEAE

SEQ ID NO: 104316 - protein, 94 aa, Setaria italica
  Transcript Sequence Number=SeqID_38342
ILELHKGILFHSPFSPCRGELRIDTWSMGFCSRGCRDDYHLGELDKNRKRQAVALMGRSKMARIVTRVDAGKATEAGEASCSRPTFFTCAEEAE

SEQ ID NO: 104317 - protein, 143 aa, Setaria italica
  misc_feature (11)..(11): Xaa can be any naturally occurring amino acid
  misc_feature (73)..(73): Xaa can be any naturally occurring amino acid
  Transcript Sequence Number=SeqID_38343
  Gene Ontology: Mol. function=binding; Cellular component =mitochondrial inner membrane; Biological process=transport
  Homolog annotation: Hit_ID=P29518; Match level="QueryCoverage=98%, HitCoverage=25%, E-value=1e-52, Identity=73%"; Hit description =Protein brittle-1, chloroplastic/amyloplastic
  Pfam annotation: Domain name=Mito_carr; Domain location=25-142; Score= 105.0; E_value=2.5e-28; Accession=PF00153.19; Description =Mitochondrial carrier protein
CAQHFTYDTAXKFLTPKADEPPKVPIPTPLVAGAMAGVASTLCTYPMELIKTRVTVEVNQMTSHLLMITSNSXQLNANHRVMHGVQKDAYDNVAHAFVKILRDEGPSELYRGLAPSLIGVVPYAACNFYAYETLKRLYRRATG

SEQ ID NO: 104318 - protein, 251 aa, Setaria italica
  misc_feature (22)..(22): Xaa can be any naturally occurring amino acid
  misc_feature (57)..(57): Xaa can be any naturally occurring amino acid
  Transcript Sequence Number=SeqID_38344
  Gene Ontology: Mol. function=binding; Cellular component =mitochondrial inner membrane; Biological process=transport
  Homolog annotation: Hit_ID=P29518; Match level="QueryCoverage=80%, HitCoverage=65%, E-value=1e-108, Identity=64%"; Hit description =Protein brittle-1, chloroplastic/amyloplastic
  Pfam annotation: Domain name=Mito_carr; Domain location=149-237; Score=115.9; E_value=1.4e-31; Accession=PF00153.19; Description =Mitochondrial carrier protein
  Pfam annotation: Domain name=Mito_carr; Domain location=54-142; Score= 106.3; E_value=1.1e-28; Accession=PF00153.19; Description =Mitochondrial carrier protein
  Pfam module annotation: Pfam domain module=Mito_carr::Mito_carr; Domain location=149-237::54-142
ATSRASSAPPCPGNRRPARRRXGGGGREEEEEGRQEAAGPGRRPEEGEGQDRQSAPXRLVSGAIAGAVSRTFVAPLETIRTHLMVGSSGADSMAGVFQWIMQNEGWTGLFRGNAVNVLRVAPSKAIEHFTYDTAKKFLTPKADEPPKVPIPTPLVAGAMAGVASTLCTYPMELIKTRVTVEKDAYDNVAHAFVKILRDEGPSELYRGLAPSLIGVVPYAACNFYAYETLKRLYRRATGRRPGADVGAAATL

SEQ ID NO: 104319 - protein, 95 aa, Setaria italica
  misc_feature (32)..(32): Xaa can be any naturally occurring amino acid
  Transcript Sequence Number=SeqID_38345
  Homolog annotation: Hit_ID=Q7X8Z9; Match level="QueryCoverage=88%, HitCoverage=10%, E-value=4e-12, Identity=42%"; Hit description =OSJNBa0006A01.19 protein
EAHDCKKPSIPAAERAQRNLWRKLGISNDEMXPIEEVLRDFISMFCGLLPEHIVVAMTAIFDLDDEGADMLDEALIRHAGAAVADLQEVNAMLAI

SEQ ID NO: 104320 - protein, 101 aa, Setaria italica
  Transcript Sequence Number=SeqID_38346
  Gene Ontology: Mol. function=RNA-directed DNA polymerase activity; Biological process=RNA-dependent DNA replication
  Homolog annotation: Hit_ID=Q7X8Z9; Match level="QueryCoverage=90%, HitCoverage=11%, E-value=1e-15, Identity=45%"; Hit description =OSJNBa0006A01.19 protein
MMTVRRSARLAKKPSIPAAERAQRNLWRKLGISNDEMAPIEEVLRDFISMFCGLLPEHIVVAMTAIFDLDDEGADMLDEALIRHAGAAVADLQEVNAMLAI

SEQ ID NO: 104321 - protein, 315 aa, Setaria italica
  misc_feature (279)..(279): Xaa can be any naturally occurring amino acid
  Transcript Sequence Number=SeqID_38347
  Gene Ontology: Mol. function=triacylglycerol lipase activity; Biological process=lipid metabolic process
  Homolog annotation: Hit_ID=Q1RN82; Match level="QueryCoverage=100%, HitCoverage=70%, E-value=1e-115, Identity=63%"; Hit description =Calmodulin binding heat shock protein
  Pfam annotation: Domain name=Lipase_3; Domain location=1-119; Score =67.3; E_value=5.7e-17; Accession=PF01764.17; Description=Lipase (class 3)
NKLGQRRFDGGYVHNGLLKAAEWVFDAECDVLRDLLEKNPGYTLTFAGHSLGSGVVAMLALVAVHNRERLGGIERKMIRCFAMAPARCMSLNLAVRYADVINAVILQDDFLPRTDIPLEDIFKSLVCLPCLLCGRCLIDTCIPESVMLRDPRRLYAPGRLYHIVERQPFSCGRYPPVVRTAVPVDGRFEHIVLSCNATSDHAIIWIEREAQRALDLLLENEKTMEAPEVQRMGNEITISRDHDEEQQAALRRAVALGVADVNVPSTYGTFDENPTAVRXESSPLLSDSGRRRAVWNEWIARIFEKDESGQMVPRR

SEQ ID NO: 104322 - protein, 91 aa, Setaria italica
  Transcript Sequence Number=SeqID_38348
KNSGWQYSFQDWHERLATTFMYSVSSNKDVSWFFWNLEGLQVHSDCARSDAKQRGFQRLQICKSTMTAQFSFFVHKWFIIGHITFLHKQVH

SEQ ID NO: 104323 - protein, 269 aa, Setaria italica
  misc_feature (196)..(196): Xaa can be any naturally occurring amino acid
  misc_feature (207)..(207): Xaa can be any naturally occurring amino acid
  Transcript Sequence Number=SeqID_38349
  Gene Ontology: Mol. function=drug transporter activity; Cellular component=membrane; Biological process=RNA-dependent DNA replication
  Homolog annotation: Hit_ID=B9RSJ7; Match level="QueryCoverage=92%, HitCoverage=79%, E-value=2e-75, Identity=59%"; Hit description =Multidrug resistance pump, putative (Fragment)
  Pfam annotation: Domain name=MatE; Domain location=2-153; Score =109.9; E_value=8.2e-30; Accession=PF01554.10; Description=MatE
SFMLSLVTQMFVGHLGELELAGASITNIGIQGLAYGIMIGMASAVQTVCGQAYGARRYTAMGVVCQRALVLQLATAIPIAFLYWYAGPFLRLIGQEADVAVAGQLYARGLLPQLLAFALFCPMQRFLQAQNIVNPVAYITLAVLIFHSLASWLAVFVLGSGLLGAALTLSFSWWVLVVLTWGYIVCSPACKRPGPXLSLLAFRGLSXKVKLAFASAIMLALEIWYVQGFVLLTGFLPNSEIALDSLSICINYWNWDFQIMLGLSYAASI

SEQ ID NO: 104324 - protein, 244 aa, Setaria italica
  misc_feature (238)..(238): Xaa can be any naturally occurring amino acid
  Transcript Sequence Number=SeqID_38350
  Pfam annotation: Domain name=UPF0565; Domain location=1-244; Score =163.1; E_value=8e-46; Accession=PF10561.1; Description =Uncharacterised protein family UPF0565
HGDRVRGTGDPAIERLSDAAHIAGVLAGKLSGETNAWVVDAACFTGPFAVYRELVPSVDAAGHPKGYNPTGFPAAAGIANILAHGIAEIQNKFLGCSAKESAVNQHRSATLSSYCPPRTIILGFSKGGIVVNQLMAELSFWASESMKNLFDVSQPNPSHSSHNLLVPTSISDVLPSVSEFHYVDVGLNCAGAYITDQAVIKKIGDYVLHTGRNLRFVLHGTPRQWSDPNRLWICKEKXIMLQLL

SEQ ID NO: 104325 - protein, 98 aa, Setaria italica
  Transcript Sequence Number=SeqID_38351
  Gene Ontology: Mol. function=DNA binding; Biological process =regulation of transcription
  Homolog annotation: Hit_ID=B6T0L0; Match level="QueryCoverage=96%, HitCoverage=33%, E-value=2e-15, Identity=47%"; Hit description=MYB -like transcription factor DIVARICATA
KDKRRSSIHDITTINLPDEDRGNASPSPPSAATAATNPSVADQFAALVDAKPFMAPLPGALGVAHPYGNVKLEPKSALVAGLGFDDSILVQMQCAAQL

SEQ ID NO: 104326 - protein, 118 aa, Setaria italica
  Transcript Sequence Number=SeqID_38352
  Gene Ontology: Mol. function=nucleic acid binding; Cellular component= integral to membrane; Biological process=transport
  Homolog annotation: Hit_ID=Q2R9P7; Match level="QueryCoverage=88%, HitCoverage=18%, E-value=2e-22, Identity=54%"; Hit description =Ankyrin repeat family protein, putative, expressed
  Pfam annotation: Domain name=Ank; Domain location=32-76; Score=2.1; E_ value=18; Accession=PF00023.22; Description=Ankyrin repeat
  Pfam annotation: Domain name=Ank; Domain location=77-112; Score=31.5; E_value=3.5e-06; Accession=PF00023.22; Description=Ankyrin repeat
  Pfam module annotation: Pfam domain module=Ank::Ank; Domain location =32-76::77-112
ESFFVAARMGHHRVVNEILEWCPDAAELRDDNGGTFVHAAAKEKSDSFAKEKHRHSVVSLAIENPMLRGLLDVQDKDGNTPLHLAVAAGAPRVVDELLRKGKVRADILNHTKGTTTDN

SEQ ID NO: 104327 - protein, 43 aa, Setaria italica
  Transcript Sequence Number=SeqID_38353
NVIHYCSQTPGVSLSDEYYFSLMQCTVKLLPPPFPIYKAWHMT

SEQ ID NO: 104328 - protein, 72 aa, Setaria italica
  Transcript Sequence Number=SeqID_38354
  Gene Ontology: Mol. function=serine-type endopeptidase inhibitor activity; Cellular component=extracellular region
  Homolog annotation: Hit_ID=P19860; Match level="QueryCoverage=91%, HitCoverage=97%, E-value=7e-17, Identity=66%"; Hit description =Bowman-Birk type major trypsin inhibitor
  Pfam annotation: Domain name=Bowman-Birk_leg; Domain location=12-37; Score=8.2; E_value=0.38; Accession=PF00228.12; Description=Bowman -Birk serine protease inhibitor family
  Pfam annotation: Domain name=Bowman-Birk_leg; Domain location=39-64; Score=35.5; E_value=2.1e-07; Accession=PF00228.12; Description =Bowman-Birk serine protease inhibitor family
  Pfam module annotation: Pfam domain module=Bowman-Birk_leg::Bowman -Birk_leg; Domain location=12-37::39-64
MPGDYAERPWKCCDMQVCTLSVVLPSCWCHDRLERCSLACKECSKVRGSDPPRYVCKDMYRGEPAPMCTTHA

SEQ ID NO: 104329 - protein, 212 aa, Setaria italica
  misc_feature (81)..(81): Xaa can be any naturally occurring amino acid
  misc_feature (91)..(91): Xaa can be any naturally occurring amino acid
  misc_feature (133)..(133): Xaa can be any naturally occurring amino acid
  Transcript Sequence Number=SeqID_38355
  Gene Ontology: Mol. function=helicase activity
  Homolog annotation: Hit_ID=Q1EPC6; Match level="QueryCoverage=58%, HitCoverage=8%, E-value=1e-18, Identity=38%"; Hit description=DNA helicase homolog, putative
MEFGNQKITVALEEEDLDCLEPKVGDIDIYEDDEARVFHERAIRYEPCRDSDVVVLDHDQYDAVYKDLPTAHHILRKSAEXVEYCGAIKFXVKVNIYIPNVPIELRHLFTSQIDRDALYFRKNIRYFNSHFSXLDRRLATAAGTDVYTFKVHGQIYHKLDQLKPSAKSPRHMQLYFYDTDGTMAREAHWSPHLDAKLIRTILDIQIQNNNPY

SEQ ID NO: 104330 - protein, 115 aa, Setaria italica
  Transcript Sequence Number=SeqID_38356
  Gene Ontology: Biological process=positive regulation of growth rate
  Homolog annotation: Hit_ID=UPI000186CC33; Match level="QueryCoverage =77%, HitCoverage=55%, E-value=2e-13, Identity=40%"; Hit description =Inner membrane protein ygdD, putative
  Pfam annotation: Domain name=DUF423; Domain location=23-104; Score =100.8; E_value=4.6e-27; Accession=PF04241.7; Description=Protein of unknown function (DUF423)
MVAPMDPMLWHKVAAVSGVAALGLGTYGAHMFRPKNPAYKEVWHTASLYHLVHTAALLGAPITKRPNIFGGLLTAGIVFFSGTCYTVAYLEDRKFSSPAPLGGFAFIAAWASLLF

SEQ ID NO: 104331 - protein, 140 aa, Setaria italica
  misc_feature (12)..(12): Xaa can be any naturally occurring amino acid
  Transcript Sequence Number=SeqID_38357
  Gene Ontology: Mol. function=oxidoreductase activity; Biological process=oxidation reduction
  Homolog annotation: Hit_ID=B6SHP9; Match level="QueryCoverage=94%, HitCoverage=40%, E-value=6e-43, Identity=65%"; Hit description =Flavonol synthase/flavanone 3-hydroxylase
  Pfam annotation: Domain name=2OG-FeII_Oxy; Domain location=3-88; Score=51.6; E_value=3.1e-12; Accession=PF03171.12; Description=2OG -Fe(II) oxygenase superfamily
HRGDKVGLAPHXSDYGFLTILLQSSPGLEVTPHGDDAWTAVPLIPGALHVHIGDHLEVLSNGQLKSLVHQAVLNPDEARISIASIHGLSKDEKVRCAKELVDEENPEMYRESSFQDFLDFLPSNINNYRRFIESLKINRA

SEQ ID NO: 104332 - protein, 255 aa, Setaria italica
  Transcript Sequence Number=SeqID_38358
  Gene Ontology: Mol. function=triacylglycerol lipase activity; Biological process=lipid metabolic process
  Homolog annotation: Hit_ID=B9T2A9; Match level="QueryCoverage=97%, HitCoverage=53%, E-value=5e-77, Identity=54%"; Hit description =Triacylglycerol lipase, putative
  Pfam annotation: Domain name=Lipase_3; Domain location=1-139; Score =70.8; E_value=5e-18; Accession=PF01764.17; Description=Lipase (class 3)
FLGSSLGRHTVYDLVTDLIALSDKKVSPKGFSTHFGTYEAARWYLRHELGIIRKCLEKHKDYKLRLVGHSLGGASAALLAIMLRKKSKEEPGFSPDIISAVGYGTPPCISKEAAESCASYVSTVVLQDDIIPRLSAASLARLRNEILKTDWVSVLEKEDLKHIVDIVTNAKLVVSSIQDVARKLGDYAKIVSASTNSDVAKDPADSTKVLSSNSTNDVFVPEDLFLPGTLYYLQRDIENINGIEDESYTLWKGDP

SEQ ID NO: 104333 - protein, 140 aa, Setaria italica
  Transcript Sequence Number=SeqID_38359
EELYLDGKTKENKTSTAAANVNKSKETTIESSKPEGVQSICRNSTTIIGEDRVKGIQKPPIKHVYKRRESSNSVRIEASEMEGKRELNMEEIALVGMNKKSEEVGECREKEENSVTLVATTINSEKKISEGSSETERTQF

SEQ ID NO: 104334 - protein, 75 aa, Setaria italica
  Transcript Sequence Number=SeqID_38360
DSLTQAHELHIARSHMLHARVLHSMHSVLYELINLLHSQTDQHYTTTLHSPTLLPLLSFSHSHSHHHTFYSTRQP

SEQ ID NO: 104335 - protein, 129 aa, Setaria italica
  Transcript Sequence Number=SeqID_38361
  Gene Ontology: Mol. function=DNA binding
  Homolog annotation: Hit_ID=B9T2G2; Match level="QueryCoverage=98%, HitCoverage=38%, E-value=6e-11, Identity=32%"; Hit description =Transcription factor, putative
MEGNLSPQALIPSGAPFDLGQPLHFAAQPQVVQVHQGVIAATTMNKIQEFGNVVEASLREEEGADDGKAAVSASQWPRVKWTSDMVKLLVSAVSYIDPDHGTSSGRRKHTMLKMKGKWRLVSSAMTEVV

SEQ ID NO: 104336 - protein, 151 aa, Setaria italica
  Transcript Sequence Number=SeqID_38362
  Gene Ontology: Mol. function=catalytic activity; Cellular component =nucleus; Biological process=base-excision repair
  Homolog annotation: Hit_ID=B6U6Y8; Match level="QueryCoverage=76%, HitCoverage=39%, E-value=7e-62, Identity=94%"; Hit description=DNA-3- methyladenine glycosylase 1
  Pfam annotation: Domain name=HhH-GPD; Domain location=1-123; Score =40.0; E_value=9.1e-09; Accession=PF00730.17; Description=HhH-GPD superfamily base excision DNA repair protein
SAAASDAVTPAAVLALAAADLRTIGVSGRKASYLHDLAIRFAAGELSDSAVAAMDESALLAELTKVKGVGEWTVHMFMIFSLHRPDVLPCGDLGVRKGVQELYKLKALPKPEEMAALCERWRPYRSVGAWYMWRLMESKGAAAKKKGKASS

SEQ ID NO: 104337 - protein, 162 aa, Setaria italica
  misc_feature (31)..(31): Xaa can be any naturally occurring amino acid
  Transcript Sequence Number=SeqID_38363
  Gene Ontology: Mol. function=protein dimerization activity
  Homolog annotation: Hit_ID=Q8S7R0; Match level="QueryCoverage=85%, HitCoverage=15%, E-value=5e-35, Identity=54%"; Hit description =Putative transposase protein, 5'-partial (Fragment)
  Pfam annotation: Domain name=hATC; Domain location=50-139; Score =14.4; E_value=0.001; Accession=PF05699.6; Description=hAT family dimerisation domain
EVNTDFLLGMASIDPANSFYPYDKDKLLKLXARFYPIDFSRKDLSNLPIHLTRFIADMREDERFREVKSFVELSVMLVETRKSLKHPIVYKLLKLVLVLPIATASVERVFYAVDLVMNKLRNRVGEQLLYDCLVTFPSRVVSGTERHSSGPGFDSPWERISG

SEQ ID NO: 104338 - protein, 249 aa, Setaria italica
  Transcript Sequence Number=SeqID_38364
  Gene Ontology: Mol. function=DNA binding; Cellular component=nucleus; Biological process=regulation of transcription
  Homolog annotation: Hit_ID=B6STE3; Match level="QueryCoverage=89%, HitCoverage=73%, E-value=9e-91, Identity=74%"; Hit description=NAC domain-containing protein 77
  Pfam annotation: Domain name=NAM; Domain location=2-135; Score=285.5; E_value=1.1e-82; Accession=PF02365.7; Description=No apical meristem (NAM) protein
FLPPGFRFHPTDEEVITSYLLEKFLNPSFDPQAIGEVDLNKCEPWDLPSKAKMGEKEWFFFCHKDMKYPTGMRTNRATKEGYWKATGKDREIFKPAAAAGAGRELVGMKKTLVFYMGRAPRGSKTNWVMHEFRLEGKSRHNNSKLRFNPKDEWVVCKVHHKNGEAKKPAEEYSAGTPNVSSVISDDAGEGDDFLDSMINSMYFNSAGSSLPSTTNVNAAPPHNADYAISSTAAGATTGTTSSFVNLPNY

SEQ ID NO: 104339 - protein, 60 aa, Setaria italica
  Transcript Sequence Number=SeqID_38365
VGVKGVNSVGILGHCLDSVVVLGQSSFLGPVVRSAHVVNFYDMWCCVESICFHLVSSIMK

SEQ ID NO: 104340 - protein, 68 aa, Setaria italica
  misc_feature (10)..(10): Xaa can be any naturally occurring amino acid
  Transcript Sequence Number=SeqID_38366
  Gene Ontology: Mol. function=substrate-specific transmembrane transporter activity; Cellular component=integral to membrane; Biological process=transmembrane transport
  Homolog annotation: Hit_ID=B6SQT5; Match level="QueryCoverage=98%, HitCoverage=100%, E-value=1e-17, Identity=68%"; Hit description =Membrane protein
  Pfam annotation: Domain name=RAMP4; Domain location=1-63; Score =116.2; E_value=1.1e-31; Accession=PF06624.4; Description=Ribosome associated membrane protein RAMP4
MTTSRRVADXKIARFEKNITKRGAVPETIKKANDYPVGPILLGFFVFVVVGSSLFQIIRTASGAGLFF

SEQ ID NO: 104341 - protein, 227 aa, Setaria italica
  Transcript Sequence Number=SeqID_38367
  Gene Ontology: Mol. function=transcription factor activity; Cellular component=transcription factor complex; Biological process =regulation of transcription, DNA-dependent
  Homolog annotation: Hit_ID=B6U2N4; Match level="QueryCoverage=99%, HitCoverage=47%, E-value=5e-94, Identity=74%"; Hit description=E2F -related protein
TLKNMIRWKGFDMSKPKEIECQISSLKEELESLYDEEFRLDDEIREARDKLQALTLDEDKRKFLYLSKEDINKIPHFQGSTLIAVNGPHGTCVEVLDPNADLYLYGNLGLQEKHYKIVLRSSMGPIDCYLISDHQEILNPDQQVASDKLEPVVAAGSSQAVQEMDCDPNQTPEKGHSNAVCTHASELSRKHEIMSGILRIVPSHSDANSDYWLASDVDASMTDAWGT

SEQ ID NO: 104342 - protein, 122 aa, Setaria italica
  Transcript Sequence Number=SeqID_38368
  Gene Ontology: Mol. function=protein serine/threonine kinase activity; Biological process=protein amino acid phosphorylation
  Homolog annotation: Hit_ID=Q53J40; Match level="QueryCoverage=62%, HitCoverage=11%, E-value=2e-16, Identity=53%"; Hit description =Protein kinase domain containing protein
MPWYIHIIDNDMINSSIKICMFRVLVVTFVSLTILVILLCLLYMEYRRRIRRGHFDKNGGKILEGAANIVTFSEDELRKITNNFSKDRQIGRGAFGMVYKGTTDDNKRVAVKRPIVEGEKSR

SEQ ID NO: 104343 - protein, 377 aa, Setaria italica
  misc_feature (9)..(9): Xaa can be any naturally occurring amino acid
  misc_feature (45)..(45): Xaa can be any naturally occurring amino acid
  misc_feature (332)..(332): Xaa can be any naturally occurring amino acid
  Transcript Sequence Number=SeqID_38369
  Gene Ontology: Mol. function=protein serine/threonine kinase activity; Biological process=protein amino acid phosphorylation
  Homolog annotation: Hit_ID=Q53QC7; Match level="QueryCoverage=95%, HitCoverage=51%, E-value=1e-99, Identity=50%"; Hit description =Protein kinase domain containing protein, expressed
AWGFDFNIXCNHSFNPPRPYYGGGDDLEPLEVMNISLEAGEMRVXSPVAYICYNSSDTTDSTGFINWTFKFFPFLISPTRNVFTGIGCDTLAFLNGREDSSFFSGCITSCDSLHAAARDGEECTGLGCCQSSIPTNLSRIKIYWGNDESYTPSNNAWGYSPCNYAFIAEKGWYHFKQRDLITHVADKTFNDRFGDRRIPMVLDWAVRDGGSCQAPTKDAGAPTAPACISRNSLCANATQGPGYVCNCSTGYTGNPYVTDGCTNINECDLRKSNPAIYEKLCGSNSKCHDTQGDYECKCKFGHKGDGKSEEGCQPIIEGYAIAIVDDVFGEGXFDKNGGKILEGAANIVTFSEDELRKITNNFSLVVIGGCPFVSTYC

SEQ ID NO: 104344 - protein, 90 aa, Setaria italica
  Transcript Sequence Number=SeqID_38370
  Subcellular localization annotation: CTP_CleavageSite=60; ConfidenceScore=5.22e-01
GNNCPDTKSASCSKSSDIAAQNGGEDQAPRLVIQLALFLVLNTSSQYSVVTKRVSITVFRLNSLSNDKTNSGTWFSLSHVTMPTPKDGVA

SEQ ID NO: 104345 - protein, 55 aa, Setaria italica
  Transcript Sequence Number=SeqID_38371
  Subcellular localization annotation: CTP_CleavageSite=35; ConfidenceScore=5.36e-01
SKSPVSISNARPTSPPPIPQLPTGPTPIPRQLATKAARKSAPATGGVKKPHRFRP

SEQ ID NO: 104346 - protein, 68 aa, Setaria italica
  misc_feature (50)..(50): Xaa can be any naturally occurring amino acid
  Transcript Sequence Number=SeqID_38372
  Subcellular localization annotation: CTP_CleavageSite=51; ConfidenceScore=5.33e-01
RRLVAAEFQPPNQPRRKAKGGGRKSPRRGEMARTKQTARKSTGGKAPRRXLAALVARKSAPTTGGVKK

SEQ ID NO: 104347 - protein, 47 aa, Setaria italica
  Transcript Sequence Number=SeqID_38373
LTPPVAGADLRAALVASCFLGALPPVDLRAVCLVRAIGAERRIGGAS

SEQ ID NO: 104348 - protein, 94 aa, Setaria italica
  misc_feature (82)..(82): Xaa can be any naturally occurring amino acid
  Transcript Sequence Number=SeqID_38374
  Gene Ontology: Mol. function=DNA binding; Cellular component =chromosome; Biological process=nucleosome assembly
  Homolog annotation: Hit_ID=P59169; Match level="QueryCoverage=91%, HitCoverage=63%, E-value=6e-42, Identity=97%"; Hit description =Histone H3.3
  Pfam annotation: Domain name=Histone; Domain location=16-90; Score =129.3; E_value=1.3e-35; Accession=PF00125.16; Description=Core histone H2AH2BH3H4
KSCVLLCSEIRKYQKSTELFIRKLPFQRLVREIAQDFKTDLRFQSHAVLALQEAAEAYLVGLFEDTNLCAIHAKRVTIMPKXIQLARRIRGERA

SEQ ID NO: 104349 - protein, 70 aa, Setaria italica
  Transcript Sequence Number=SeqID_38375
MGRGRTTTGTVIACLLKLRIDHGRPIRIPSCQNNHEDANDAAYSTGEDTADYNGHLSSESWKTRTFVLKS

SEQ ID NO: 104350 - protein, 76 aa, Setaria italica
  Transcript Sequence Number=SeqID_38376
  Gene Ontology: Mol. function=DNA binding; Cellular component =chromosome; Biological process=nucleosome assembly
  Homolog annotation: Hit_ID=P59169; Match level="QueryCoverage=92%, HitCoverage=58%, E-value=4e-18, Identity=64%"; Hit description =Histone H3.3
  Pfam annotation: Domain name=Histone; Domain location=6-76; Score =32.7; E_value=1.5e-06; Accession=PF00125.16; Description=Core histone H2AH2BH3H4
LRFQSHAVLALQEVRLEVLRDLADKALERELADQELRFQSHAVLALQEAAEAYLVGLFEDTNLCAIHAKRVTIMPK

SEQ ID NO: 104351 - protein, 45 aa, Setaria italica
  Transcript Sequence Number=SeqID_38377
CFSFPGERYSFKGWLQQRPEIQTMKWSVRLRPGRFSLYRMSRKQH

SEQ ID NO: 104352 - protein, 47 aa, Setaria italica
  Transcript Sequence Number=SeqID_38378
  Gene Ontology: Mol. function=DNA binding; Cellular component =chromosome; Biological process=nucleosome assembly
  Homolog annotation: Hit_ID=P59169; Match level="QueryCoverage=93%, HitCoverage=32%, E-value=2e-16, Identity=100%"; Hit description =Histone H3.3
  Subcellular localization annotation: CTP_CleavageSite=24; ConfidenceScore=5.09e-01
QQSTKQTARKSTGGKAPRKQLATKAARKSAPTTGGVKKPHRYRPGTV

SEQ ID NO: 104353 - protein, 71 aa, Setaria italica
  misc_feature (65)..(65): Xaa can be any naturally occurring amino acid
  Transcript Sequence Number=SeqID_38379
  Gene Ontology: Mol. function=DNA binding; Cellular component =chromosome; Biological process=nucleosome assembly
  Homolog annotation: Hit_ID=P59169; Match level="QueryCoverage=100%, HitCoverage=52%, E-value=9e-32, Identity=98%"; Hit description =Histone H3.3
  Subcellular localization annotation: CTP_CleavageSite=53; ConfidenceScore=5.40e-01
MARTKQTARKSTGGKAPRKQLATKAARKSAPTTGGVKKPHRYRPGTVALREIRKYQKSTELLIRXLPFQRL

SEQ ID NO: 104354 - protein, 63 aa, Setaria italica
  Transcript Sequence Number=SeqID_38380
  Gene Ontology: Mol. function=hydrolase activity
  Homolog annotation: Hit_ID=B6E208; Match level="QueryCoverage=61%, HitCoverage=15%, E-value=7e-11, Identity=82%"; Hit description =Putative HAD superfamily hydrolase
VFVFCHAYSAPFDGRLTFYSFCRHVVMVPDARLDVSHHKEADQVHSSLLDFNPSSWGLPLFKD

SEQ ID NO: 104355 - protein, 85 aa, Setaria italica
  misc_feature (74)..(74): Xaa can be any naturally occurring amino acid
  Transcript Sequence Number=SeqID_38381
  Gene Ontology: Mol. function=DNA binding; Cellular component =chromosome; Biological process=nucleosome assembly
  Homolog annotation: Hit_ID=B0X778; Match level="QueryCoverage=96%, HitCoverage=51%, E-value=4e-26, Identity=74%"; Hit description =Histone H3
  Pfam annotation: Domain name=CBFD_NFYB_HMF; Domain location=12-77; Score=4.4; E_value=0.069; Accession=PF00808.15; Description=Histone -like transcription factor (CBFNF-Y) and archaeal histone
  Pfam annotation: Domain name=Histone; Domain location=6-81; Score =121.3; E_value=3.3e-33; Accession=PF00125.16; Description=Core histone H2AH2BH3H4
  Pfam module annotation: Pfam domain module=CBFD_NFYB_HMF::Histone; Domain location=12-77::6-81
NLRKKTTELLIRKLPFQRLVREIAQDFKTDLRFQSSAVAALQEAAEAYLVGLFEDTNLCAIHAKRVTIMPKDIXKLARRIRGERA

SEQ ID NO: 104356 - protein, 53 aa, Setaria italica
  Transcript Sequence Number=SeqID_38382
  Gene Ontology: Mol. function=DNA binding; Cellular component =chromosome; Biological process=nucleosome assembly
  Homolog annotation: Hit_ID=P59169; Match level="QueryCoverage=100%, HitCoverage=38%, E-value=6e-20, Identity=94%"; Hit description =Histone H3.3
  Subcellular localization annotation: CTP_CleavageSite=24; ConfidenceScore=5.19e-01
MARTKQTARKSTGGKAPRKQLATKAARKSAPTTGGVKKPHRYRPGTVALRFVK

SEQ ID NO: 104357 - protein, 144 aa, Setaria italica
  Transcript Sequence Number=SeqID_38383
  Gene Ontology: Mol. function=DNA binding; Cellular component =chromosome; Biological process=nucleosome assembly
  Homolog annotation: Hit_ID=B0XDJ5; Match level="QueryCoverage=100%, HitCoverage=90%, E-value=9e-61, Identity=82%"; Hit description =Histone H3
  Pfam annotation: Domain name=Histone; Domain location=66-140; Score =141.6; E_value=2.4e-39; Accession=PF00125.16; Description=Core histone H2AH2BH3H4
  Subcellular localization annotation: CTP_CleavageSite=39; ConfidenceScore=5.66e-01
SQPPRPAPMARTKQTARKSTGGKAPRKQLATKAARKSAPATGGVKKPHRFRPGTVALREIRKYQKSTELLIWKLPFQRLVREIAQDFKTDLRFQSSAVAALQEAAEAYLVGLFEDTNLCAIHAKRVTIMPKDIQLARRIRGERA

SEQ ID NO: 104358 - protein, 218 aa, Setaria italica
  Transcript Sequence Number=SeqID_38384
  Gene Ontology: Mol. function=4 iron, 4 sulfur cluster binding; Biological process=tRNA processing
  Homolog annotation: Hit_ID=Q8H8N3; Match level="QueryCoverage=87%, HitCoverage=29%, E-value=5e-42, Identity=63%"; Hit description=tRNA wybutosine-synthesizing protein 1 homolog
  Pfam annotation: Domain name=Flavodoxin_1; Domain location=55-197; Score=100.6; E_value=5.2e-27; Accession=PF00258.17; Description =Flavodoxin
  Subcellular localization annotation: CTP_CleavageSite=76; ConfidenceScore=5.75e-01
SFPFPYGRTTASATSHLALLVLLSSSSLFFLYKSIRLRRKPSPASGPARTTTPTLLYASVTGTSKTLATRLSDRLTANAGVPILATDASSFEPDDLPSVPLLLLVVPTHDGGAPPPSAAFLARWLEESTADFRAGALLLSGLRFAVFGVGSRVYGETFNAASRNFSRWLRALGAVEVVPLGEGDVDGGELEAVFEDWSGKVLRVVKGEELNEGVLGES

SEQ ID NO: 104359 - protein, 138 aa, Setaria italica
  misc_feature (16)..(16): Xaa can be any naturally occurring amino acid
  misc_feature (39)..(39): Xaa can be any naturally occurring amino acid
  misc_feature (128)..(128): Xaa can be any naturally occurring amino acid
  Transcript Sequence Number=SeqID_38385
  Gene Ontology: Mol. function=DNA binding; Cellular component =chromosome; Biological process=nucleosome assembly
  Homolog annotation: Hit_ID=P59169; Match level="QueryCoverage=100%, HitCoverage=100%, E-value=1e-67, Identity=94%"; Hit description =Histone H3.3
  Pfam annotation: Domain name=Histone; Domain location=58-134; Score =114.3; E_value=4.1e-31; Accession=PF00125.16; Description=Core histone H2AH2BH3H4
  Subcellular localization annotation: CTP_CleavageSite=24; ConfidenceScore=5.38e-01
MARTKQTARKSTGGKXPRKQLATKAARKSAPTTGGVKKXHRYRPGTVALREIRKYQKSTELLIRKLPFQRLVREIAQDFKTDLRFQSHAVLALQEAAEAYLVGLFEDTNLCAIHAKRVTIMPKDIPVXRPVRIRGERA

SEQ ID NO: 104360 - protein, 153 aa, Setaria italica
  Transcript Sequence Number=SeqID_38386
  Gene Ontology: Mol. function=DNA binding; Cellular component =chromosome; Biological process=nucleosome assembly
  Homolog annotation: Hit_ID=B0X778; Match level="QueryCoverage=100%, HitCoverage=94%, E-value=2e-61, Identity=79%"; Hit description =Histone H3
  Pfam annotation: Domain name=CBFD_NFYB_HMF; Domain location=81-146; Score=5.1; E_value=0.059; Accession=PF00808.15; Description=Histone -like transcription factor (CBFNF-Y) and archaeal histone
  Pfam annotation: Domain name=Histone; Domain location=75-149; Score =139.8; E_value=8.3e-39; Accession=PF00125.16; Description=Core histone H2AH2BH3H4
  Pfam module annotation: Pfam domain module=CBFD_NFYB_HMF::Histone; Domain location=81-146::75-149
  Subcellular localization annotation: CTP_CleavageSite=70; ConfidenceScore=5.74e-01
NPQITVASGLFHPNPPAMARTKQTARKSTGGKAPRKQLATKAARKSAPATGGVKKPHRFRPGTVALREIRKYQKSTELLIRKLPFQRLVREIAQDFKTDLRFQSSAVAALQEAAEAYLVGLFEDTNLCAIHAKRVTIMPKDIQLARRIRGERA

SEQ ID NO: 104361 - protein, 166 aa, Setaria italica
  Transcript Sequence Number=SeqID_38387
  Gene Ontology: Mol. function=DNA binding; Cellular component =chromosome; Biological process=nucleosome assembly
  Homolog annotation: Hit_ID=B0WZ74; Match level="QueryCoverage=82%, HitCoverage=81%, E-value=2e-61, Identity=86%"; Hit description =Histone H3
  Pfam annotation: Domain name=CBFD_NFYB_HMF; Domain location=94-159; Score=5.1; E_value=0.059; Accession=PF00808.15; Description=Histone -like transcription factor (CBFNF-Y) and archaeal histone
  Pfam annotation: Domain name=Histone; Domain location=88-162; Score =139.8; E_value=8.3e-39; Accession=PF00125.16; Description=Core histone H2AH2BH3H4
  Pfam module annotation: Pfam domain module=CBFD_NFYB_HMF::Histone; Domain location=94-159::88-162
  Subcellular localization annotation: CTP_CleavageSite=83; ConfidenceScore=5.76e-01
KSPVSISNARPTSPPPIPQLPTGPTPIPSAMARTKQTARKSTGGKAPRKQLATKAARKSAPATGGVKKPHRFRPGTVALREIRKYQKSTELLIRKLPFQRLVREIAQDFKTDLRFQSSAVAALQEAAEAYLVGLFEDTNLCAIHAKRVTIMPKDIQLARRIRGERA

SEQ ID NO: 104362 - protein, 136 aa, Setaria italica
  Transcript Sequence Number=SeqID_38388
  Gene Ontology: Mol. function=DNA binding; Cellular component =chromosome; Biological process=nucleosome assembly
  Homolog annotation: Hit_ID=P59169; Match level="QueryCoverage=100%, HitCoverage=100%, E-value=1e-72, Identity=100%"; Hit description =Histone H3.3
  Pfam annotation: Domain name=Histone; Domain location=58-132; Score =141.1; E_value=3.5e-39; Accession=PF00125.16; Description=Core histone H2AH2BH3H4
  Subcellular localization annotation: CTP_CleavageSite=24; ConfidenceScore=5.41e-01
MARTKQTARKSTGGKAPRKQLATKAARKSAPTTGGVKKPHRYRPGTVALREIRKYQKSTELLIRKLPFQRLVREIAQDFKTDLRFQSHAVLALQEAAEAYLVGLFEDTNLCAIHAKRVTIMPKDIQLARRIRGERA

SEQ ID NO: 104363 - protein, 164 aa, Setaria italica
  Transcript Sequence Number=SeqID_38389
  Gene Ontology: Mol. function=DNA binding; Cellular component =chromosome; Biological process=nucleosome assembly
  Homolog annotation: Hit_ID=B0X778; Match level="QueryCoverage=81%, HitCoverage=84%, E-value=3e-59, Identity=85%"; Hit description =Histone H3
  Pfam annotation: Domain name=CBFD_NFYB_HMF; Domain location=92-157; Score=5.1; E_value=0.059; Accession=PF00808.15; Description=Histone -like transcription factor (CBFNF-Y) and archaeal histone
  Pfam annotation: Domain name=Histone; Domain location=86-160; Score =139.8; E_value=8.3e-39; Accession=PF00125.16; Description=Core histone H2AH2BH3H4
  Pfam module annotation: Pfam domain module=CBFD_NFYB_HMF::Histone; Domain location=92-157::86-160
  Subcellular localization annotation: CTP_CleavageSite=81; ConfidenceScore=5.72e-01
NSHSNFPSPQILQSPRAAARSHPPRPAPMARTKQTARKSTGGKAPRKQLATKAARKSAPATGGVKKPHRFRPGTVALREIRKYQKSTELLIRKLPFQRLVREIAQDFKTDLRFQSSAVAALQEAAEAYLVGLFEDTNLCAIHAKRVTIMPKDIQLARRIRGERA

SEQ ID NO: 104364 - protein, 137 aa, Setaria italica
  misc_feature (20)..(20): Xaa can be any naturally occurring amino acid
  Transcript Sequence Number=SeqID_38390
  Gene Ontology: Mol. function=DNA binding; Cellular component =chromosome; Biological process=nucleosome assembly
  Homolog annotation: Hit_ID=B0X778; Match level="QueryCoverage=100%, HitCoverage=86%, E-value=2e-59, Identity=85%"; Hit description =Histone H3
  Pfam annotation: Domain name=CBFD_NFYB_HMF; Domain location=65-130; Score=5.1; E_value=0.059; Accession=PF00808.15; Description=Histone -like transcription factor (CBFNF-Y) and archaeal histone
  Pfam annotation: Domain name=Histone; Domain location=59-133; Score =139.8; E_value=8.3e-39; Accession=PF00125.16; Description=Core histone H2AH2BH3H4
  Pfam module annotation: Pfam domain module=CBFD_NFYB_HMF::Histone; Domain location=65-130::59-133
  Subcellular localization annotation: CTP_CleavageSite=54; ConfidenceScore=5.41e-01
MARTKQTARKSTGGKAPRKXQLATKAARKSAPATGGVKKPHRFRPGTVALREIRKYQKSTELLIRKLPFQRLVREIAQDFKTDLRFQSSAVAALQEAAEAYLVGLFEDTNLCAIHAKRVTIMPKDIQLARRIRGERA

SEQ ID NO: 104365 - protein, 136 aa, Setaria italica
  Transcript Sequence Number=SeqID_38391
  Gene Ontology: Mol. function=DNA binding; Cellular component =chromosome; Biological process=nucleosome assembly
  Homolog annotation: Hit_ID=B0X778; Match level="QueryCoverage=100%, HitCoverage=86%, E-value=8e-61, Identity=86%"; Hit description =Histone H3
  Pfam annotation: Domain name=CBFD_NFYB_HMF; Domain location=64-129; Score=5.1; E_value=0.059; Accession=PF00808.15; Description=Histone -like transcription factor (CBFNF-Y) and archaeal histone
  Pfam annotation: Domain name=Histone; Domain location=58-132; Score =139.8; E_value=8.3e-39; Accession=PF00125.16; Description=Core histone H2AH2BH3H4
  Pfam module annotation: Pfam domain module=CBFD_NFYB_HMF::Histone; Domain location=64-129::58-132
  Subcellular localization annotation: CTP_CleavageSite=53; ConfidenceScore=5.45e-01
MARTKQTARKSTGGKAPRKQLATKAARKSAPATGGVKKPHRFRPGTVALREIRKYQKSTELLIRKLPFQRLVREIAQDFKTDLRFQSSAVAALQEAAEAYLVGLFEDTNLCAIHAKRVTIMPKDIQLARRIRGERA

SEQ ID NO: 104366 - protein, 117 aa, Setaria italica
  misc_feature (15)..(15): Xaa can be any naturally occurring amino acid
  Transcript Sequence Number=SeqID_38392
  Gene Ontology: Mol. function=DNA binding; Cellular component =chromosome; Biological process=nucleosome assembly
  Homolog annotation: Hit_ID=P59169; Match level="QueryCoverage=100%, HitCoverage=100%, E-value=6e-55, Identity=82%"; Hit description =Histone H3.3
  Pfam annotation: Domain name=Histone; Domain location=39-113; Score =121.1; E_value=3.5e-33; Accession=PF00125.16; Description=Core histone H2AH2BH3H4
  Subcellular localization annotation: CTP_CleavageSite=24; ConfidenceScore=5.27e-01
MARTKQTARKSTGGXAPRKQLATKAARKSAPTTGGVKKPHRYRPWYAPVQRLVREIAQDFKTDLRFQSHAVLALQEAAEAYLVGLFEDTNLCAIHAKRVTIMPKDIQLARRIRGERA

SEQ ID NO: 104367 - protein, 136 aa, Setaria italica
  misc_feature (8)..(8): Xaa can be any naturally occurring amino acid
  Transcript Sequence Number=SeqID_38393
  Gene Ontology: Mol. function=DNA binding; Cellular component =chromosome; Biological process=nucleosome assembly
  Homolog annotation: Hit_ID=A9CSG2; Match level="QueryCoverage=100%, HitCoverage=97%, E-value=1e-52, Identity=78%"; Hit description =Histone H3 (Fragment)
  Pfam annotation: Domain name=CBFD_NFYB_HMF; Domain location=64-129; Score=5.1; E_value=0.059; Accession=PF00808.15; Description=Histone -like transcription factor (CBFNF-Y) and archaeal histone
  Pfam annotation: Domain name=Histone; Domain location=58-132; Score =139.8; E_value=8.3e-39; Accession=PF00125.16; Description=Core histone H2AH2BH3H4
  Pfam module annotation: Pfam domain module=CBFD_NFYB_HMF::Histone; Domain location=64-129::58-132
  Subcellular localization annotation: CTP_CleavageSite=53; ConfidenceScore=5.33e-01
MARTKQTXGSPPAARRPARQLATKAARKSAPATGGVKKPHRFRPGTVALREIRKYQKSTELLIRKLPFQRLVREIAQDFKTDLRFQSSAVAALQEAAEAYLVGLFEDTNLCAIHAKRVTIMPKDIQLARRIRGERA

SEQ ID NO: 104368 - protein, 176 aa, Setaria italica
  misc_feature (119)..(119): Xaa can be any naturally occurring amino acid
  Transcript Sequence Number=SeqID_38394
  Gene Ontology: Mol. function=DNA binding; Cellular component =chromosome; Biological process=nucleosome assembly
  Homolog annotation: Hit_ID=B6SYV0; Match level="QueryCoverage=95%, HitCoverage=90%, E-value=3e-61, Identity=75%"; Hit description =Histone H3
  Pfam annotation: Domain name=Histone; Domain location=58-132; Score =81.4; E_value=3.3e-21; Accession=PF00125.16; Description=Core histone H2AH2BH3H4
  Subcellular localization annotation: CTP_CleavageSite=53; ConfidenceScore=5.45e-01
MARTKQTARKSTGGKAPRKQLATKAARKSAPATGGVKKPHRFRPGTVALREIRKYQKSTELLIRKLPFQRLVREIAQDFKTDLRFQSSAVAALQEAAEAYLVGLFEDTNLCAIHAKRVXPSCPRTSSSPAASVVRGPRRRRRGGGSCSTSSCWHQCPIRRCRDVVGSLEKSGRIME

SEQ ID NO: 104369 - protein, 136 aa, Setaria italica; identical to SEQ ID NO: 104362
  Transcript Sequence Number=SeqID_38395
  Gene Ontology: Mol. function=DNA binding; Cellular component =chromosome; Biological process=nucleosome assembly
  Homolog annotation: Hit_ID=P59169; Match level="QueryCoverage=100%, HitCoverage=100%, E-value=1e-72, Identity=100%"; Hit description =Histone H3.3
  Pfam annotation: Domain name=Histone; Domain location=58-132; Score =141.1; E_value=3.5e-39; Accession=PF00125.16; Description=Core histone H2AH2BH3H4
  Subcellular localization annotation: CTP_CleavageSite=24; ConfidenceScore=5.41e-01

SEQ ID NO: 104370 - protein, 1224 aa, Setaria italica
  Transcript Sequence Number=SeqID_38396
  Homolog annotation: Hit_ID=A2Q1S2; Match level="QueryCoverage=99%, HitCoverage=99%, E-value=0.0, Identity=56%"; Hit description=[2Fe -2S]-binding (Fragment)
QNKRLSPQIDGAPNYRQAGSLRVHGVAMPTMEGIANVLNHIGAKKKGKQTRILWHSLREEPVIYINGRPFVLRDVEKPFSNLEYTGINRERVEQMEFRLKEDILQEASRYGNKILVTDELPSGQMVDQWESVVSDTVKTPLEVYEELQHQGYLVDYERVPITDEKAPKEGDFDNLVRRISQVDLETEIVFNCQMGRGRTTTGMVIATLVYLNRIGASGIPRTGSIGKVFYAGNDVDDYMPSSEEAILRGEYAVIRSLVRVLEGGVEGKRQVDKVIDKCDSMQNLREAIATYRNSILRQSDEMKREASLSFFVEYLERYYFLICFAVYVHSVSSAHQTTFSVEVSFSDWMRARPELYSILRRLLRRDPMGALGYSSSKPPLTKIVESADGRPQDMDVVAAMRNGEVLGRQTVLKSDHCPGCHNLNLPERVEGAPNFREIPGFPVYGVANPTVDGIRAVIQRISTSKGGRPILWHNMREEPVIYINGKPFVLREVERPCKNMLEYTGIDRERVERMEARLKEDILREAERYGGAIMVIHETDNGEIFDTWENVDNEAVLTPLEVYKHLECEGLQIKYARVPITDGKAPKSSDFDTIALNVASASKDTAFVFNCQMGRGRTTTGTVIACLLKLRIDHGRPIRIPSCQNNHEDANDAAYSTGEDTADYNGHLSSESWKTRTLTKLNSGFGIKDILLLRKITRLFDNGIECRQTLDTVIDRCSALQNIRQAVLKYTKVINQQHVEPRVRRVALNRGAEYLERYLKLIAFSAYLGSEAFDGFCGQGEVKISFKGWLQQRPEIQTMKWSVRLRPGRFFTVPHEQKATYPPPQGDVTMETVVKARNGSVLGKGSILKMYFFPGQKRSSSVNFRGAPHVFKVDGYPVYSMATPTIDGASDVLSYLGSKDTTGRSIAQKVVVTDLREEVVVYIKGTPFVLRELDQPVDTLKHVGISGPMVESIETRLKEDILAEVKQLGGRLLLHQEEFNADTNQCNVVGYWERIDLEDVMTPAEVYGTLRGKGYDINYKRIPLTREREALAADVDAIQSLIDESARYYLFISHTGYGGVAYAMAITCLTLGADAKFVMEETAETHFVSTSLTKNVSIKTSTDIALRQVDYRDILNLIRVLVHGPKSKEEVDAVIDRCSGAGNLREDILQYRKALQDFSHDDDDDDEELSYLTDMGTKALRRYFFLITFRSYLYCATPREATFRSWMKARPELGHLCDNLKLDK

SEQ ID NO: 104371 - protein, 153 aa, Setaria italica
  misc_feature (34)..(34): Xaa can be any naturally occurring amino acid
  Transcript Sequence Number=SeqID_38397
  Gene Ontology: Mol. function=DNA binding; Cellular component =chromosome; Biological process=nucleosome assembly
  Homolog annotation: Hit_ID=P59169; Match level="QueryCoverage=89%, HitCoverage=100%, E-value=2e-70, Identity=98%"; Hit description =Histone H3.3
  Pfam annotation: Domain name=Histone; Domain location=75-149; Score =141.1; E_value=3.5e-39; Accession=PF00125.16; Description=Core histone H2AH2BH3H4
  Subcellular localization annotation: CTP_CleavageSite=70; ConfidenceScore=5.08e-01
RRKAKGGGRKSPRRGEMARTKQTARKSTGGKAPXAKQLATKAARKSAPTTGGVKKPHRYRPGTVALREIRKYQKSTELLIRKLPFQRLVREIAQDFKTDLRFQSHAVLALQEAAEAYLVGLFEDTNLCAIHAKRVTIMPKDIQLARRIRGERA

SEQ ID NO: 104372 - protein, 137 aa, Setaria italica
  misc_feature (17)..(17): Xaa can be any naturally occurring amino acid
  Transcript Sequence Number=SeqID_38398
  Gene Ontology: Mol. function=DNA binding; Cellular component =chromosome; Biological process=nucleosome assembly
  Homolog annotation: Hit_ID=P59169; Match level="QueryCoverage=100%, HitCoverage=100%, E-value=3e-71, Identity=99%"; Hit description =Histone H3.3
  Pfam annotation: Domain name=Histone; Domain location=59-133; Score =141.1; E_value=3.5e-39; Accession=PF00125.16; Description=Core histone H2AH2BH3H4
  Subcellular localization annotation: CTP_CleavageSite=54; ConfidenceScore=5.39e-01
MARTKQTARKSTGGKAXPRKQLATKAARKSAPTTGGVKKPHRYRPGTVALREIRKYQKSTELLIRKLPFQRLVREIAQDFKTDLRFQSHAVLALQEAAEAYLVGLFEDTNLCAIHAKRVTIMPKDIQLARRIRGERA

SEQ ID NO: 104373 - protein, 234 aa, Setaria italica
  misc_feature (217)..(217): Xaa can be any naturally occurring amino acid
  Transcript Sequence Number=SeqID_38399
  Gene Ontology: Mol. function=GTP binding
NVATRDGASDTVEIRDNFDEPESVAYDGHNKVDEEADGDHEASDDLASMPISASDDTVDLLVKEPEDNVPASKGTRFGVDDSDDVEVNGDDEYEEEVNGKEIELFDYAALVELLRAANISSGQGKAKVFPFESSEPKHLPPTVTSIPRTDVASTERDDPEKEMTDEEKKIYRKVDLVRIKYMRLIHRLGYDTNHLVPVQVLYRLSLVEGGSLGRCLXNSSELENAWKRALQLEE

SEQ ID NO: 104374 - protein, 114 aa, Setaria italica
  Transcript Sequence Number=SeqID_38400
  Gene Ontology: Mol. function=indole-3-glycerol-phosphate synthase activity; Cellular component=chloroplast; Biological process =tryptophan metabolic process
  Homolog annotation: Hit_ID=B6UGU8; Match level="QueryCoverage=97%, HitCoverage=28%, E-value=7e-46, Identity=81%"; Hit description =Indole-3-glycerol phosphate synthase
IPSIRRRCRPRYPSEGVGADRAVPRNVLEQIIWDKEVEVSQRKAKTPLQKVMESAERAPPPRDFVGALDAARHRNGVPALIAEVKKASPIKGLLREHFNPVEIAHAYEKNGAAC

SEQ ID NO: 104375 - protein, 340 aa, Setaria italica
  Transcript Sequence Number=SeqID_38401
  Pfam annotation: Domain name=EB_dh; Domain location=24-266; Score =204.1; E_value=3.7e-58; Accession=PF09459.2; Description =Ethylbenzene dehydrogenase
TCSGGSARVLAEFRPGEVTVDGHSDDWDGVEASEFALLPALDPDEDKAYSGGKVAVKAVHDGVNVFFMLQVDGAYAYSKGKSSKCPSVALMFQVGDNATYYNMGGCKDMPGSCTSKSCRGHEVDIMHFEIGNAIPGRLYGGNHIDNAAGNGGDRFGHLVDVYAWNPHCRYLDGLGPKENNSNAQNDWHGAWWHSSLTVHSGFVDDDNPYGKQDEKGTYYFEFSRPLRTMDQFQQDAQFTIGQPSNMAVAFWYPTDGKEWSDSEHYSSSCNWLILDIQPSSEATYYRPAPNRSWDAVTGFALLLSVVAICLSIFVGHRVSKNRSAAQFTPLEQIQFAEERH

SEQ ID NO: 104376 - protein, 84 aa, Setaria italica
  Transcript Sequence Number=SeqID_38402
YQKCQLRRSAEYQLPNKKLCSCRAKSGTCRLCHGPKIHIYQLSFSSPFTTKCKPVKLVSHAFTIFVRPSRQCLQIVGKSVLRIS

SEQ ID NO: 104377 - protein, 145 aa, Setaria italica
  Transcript Sequence Number=SeqID_38403
  Gene Ontology: Mol. function=DNA binding; Cellular component=nucleus; Biological process=regulation of transcription
  Homolog annotation: Hit_ID=B9RS48; Match level="QueryCoverage=63%, HitCoverage=8%, E-value=3e-23, Identity=52%"; Hit description=Myb, putative
  Pfam annotation: Domain name=Myb_DNA-binding; Domain location=21-66; Score=37.0; E_value=7.3e-08; Accession=PF00249.23; Description=Myb -like DNA-binding domain
GRSRKQCRDRWTHYLDPAVNQMPWSEQEEIDLIRAHKIHGNKWCELAKFFPGRTGKAIKNYWTGAMKKKIKSNLGSGSPEQLSPCPNDSLIPVGRDSTATSSQDSSNNIPISSADLPVRLKSKHGLTEACRNACTLKEKGPRFYT

SEQ ID NO: 104378 - protein, 167 aa, Setaria italica
  Transcript Sequence Number=SeqID_38404
  Gene Ontology: Mol. function=hydrolase activity, acting on acid anhydrides, catalyzing transmembrane movement of substances; Cellular component=integral to membrane; Biological process =metabolic process
  Homolog annotation: Hit_ID=A3RG91; Match level="QueryCoverage=99%, HitCoverage=17%, E-value=4e-62, Identity=72%"; Hit description =Plasma membrane H+-ATPase LilHA2
KENDKELMAALYLQVSIISQALIFVTRSRSWSFVERPGALLVIAFLAAQLVATCIAVYANWEFCKMQGIGWGWGAAIWVFSIVTYFPLDVLKFAIRYALSGKAWNNINNKTAFTNRTDYGKGEREAQWATAQRTLHGLNQATTSSDLFGDTNSYRELSELAEQAAKR

SEQ ID NO: 104379 - protein, 219 aa, Setaria italica
  misc_feature (70)..(70): Xaa can be any naturally occurring amino acid
  Transcript Sequence Number=SeqID_38405
  Gene Ontology: Mol. function=aspartic-type endopeptidase activity; Cellular component=endoplasmic reticulum membrane; Biological process=DNA integration
  Homolog annotation: Hit_ID=Q25AF6; Match level="QueryCoverage=99%, HitCoverage=14%, E-value=1e-77, Identity=62%"; Hit description =H0512B01.8 protein
  Pfam annotation: Domain name=RVT_2; Domain location=2-85; Score= -87.7; E_value=1.4e-10; Accession=PF07727.6; Description=Reverse transcriptase (RNA-dependent DNA pol
RVVVGVYVDDLIITGASAVNIEAFKEDMRRAFRMSDLGLLSFYLGIEVKQGRSAITLGQAAYAKKLLEKXGMNNCNPCQTPMEARLQLSTRSTSPEVDATMYRSLVGSLRYLVHTRPDISFAVGYVSRFMEKPQQEHLVAVKHLLRYIAGMVEYGIVYPKYSGSNNKLLGYSDSDFGRDVDDRKSTTRVMFFIGEMPISWQSHKQTAVALSTCEAEYMA

SEQ ID NO: 104380 - protein, 64 aa, Setaria italica
  Transcript Sequence Number=SeqID_38406
SLRSWARTCSSCGRITRLCTGPDVWIAGLWLSTPRHCRLAWRDVWIAGLWLSTPRHCRLAWRDD

SEQ ID NO: 104381 - protein, 42 aa, Setaria italica
  Transcript Sequence Number=SeqID_38407
  Homolog annotation: Hit_ID=B6TDW7; Match level="QueryCoverage=92%, HitCoverage=17%, E-value=4e-10, Identity=82%"; Hit description =Secretory protein
PYLIVALLNAKMRYGYTDDLFAQILGKDVQQLWQDYKAMYGA

SEQ ID NO: 104382 - protein, 226 aa, Setaria italica
  Transcript Sequence Number=SeqID_38408
  Gene Ontology: Mol. function=nucleoside-triphosphatase activity; Cellular component=intrinsic to membrane
  Homolog annotation: Hit_ID=B6TDW7; Match level="QueryCoverage=89%, HitCoverage=89%, E-value=1e-84, Identity=72%"; Hit description =Secretory protein
  Pfam annotation: Domain name=BSP; Domain location=20-220; Score =323.1; E_value=5.6e-94; Accession=PF04450.4; Description=Plant Basic Secretory Protein
MKLLRVAAVASLLLALAATAGAIVTIDVTNTASNTLGGQRFDREVGLDFPRQIISEASMFIWMTFNQTNPADRKPVDAIALVVADVGGVAFTSNDVITLSAQYIGNYSGNVRIEVASVLFHETTHVWQWDGQGQASRGLIEGIADYIVYTAGYRPAYWVQQGQGERWDEGYSVTAMFLVYCDTLRPGFVALLNAKMRYGYTDDLFAQILGKDVQQLWQDYKAMYGA

SEQ ID NO: 104383 - protein, 86 aa, Setaria italica
  Transcript Sequence Number=SeqID_38409
  Gene Ontology: Mol. function=nucleic acid binding; Cellular component= intracellular
  Homolog annotation: Hit_ID=Q762A1; Match level="QueryCoverage=100%, HitCoverage=30%, E-value=8e-21, Identity=66%"; Hit description=BRI1 -KD interacting protein 113 (Fragment)
  Pfam annotation: Domain name=Lsm_interact; Domain location=65-85; Score=13.1; E_value=0.064; Accession=PF05391.3; Description=Lsm interaction motif
SREAGPSSKGYDNLPQSGDDGAKAPGSSRPEKEVPKGDVKITGKNTAFAPRSVVKPLGWTTKDEKPDGGAGELKSNEEFRNLLLKK

SEQ ID NO: 104384 - protein, 572 aa, Setaria italica
  Transcript Sequence Number=SeqID_38410
  Gene Ontology: Mol. function=nucleic acid binding; Cellular component= intracellular; Biological process=RNA processing
  Homolog annotation: Hit_ID=B9SPA3; Match level="QueryCoverage=99%, HitCoverage=67%, E-value=1e-157, Identity=49%"; Hit description =Squamous cell carcinoma antigen recognized by T-cells, putative
  Pfam annotation: Domain name=Lsm_interact; Domain location=551-571; Score=13.1; E_value=0.064; Accession=PF05391.3; Description=Lsm interaction motif
  Pfam annotation: Domain name=Mad3_BUB1_I; Domain location=17-136; Score=-50.7; E_value=0.043; Accession=PF08311.4; Description =Mad3BUB1 homology region 1
  Pfam annotation: Domain name=RRM_1; Domain location=406-475; Score =71.9; E_value=2.4e-18; Accession=PF00076.14; Description=RNA recognition motif. (a.k.a. RRM, RBD, o
  Pfam module annotation: Pfam domain module=Lsm_interact::Mad3_BUB1 _I::RRM_1; Domain location=551-571::17-136::406-475
VWCPSNVVSAYKKANDMYNERKQYEDQLSNAGASEADKLQEFLKYLKFEESSGDPARVQVLYERAVSELPVSTDVWIGYTSYLDRTLKVPSVLRSVYHRATRNCTWVGELWVHYLLSLERVRASEEELRNVFERAVQCSFPTIQEYLNIYLTRVHSLRRRISDGLDFQLIRQTFKNAAEFLSPQLGTKELLHLNAYWAKLERSLGKDLSAARVVWENAIKKSGSVLEVWQQYISMEVEMGHIHEARSLYKRCYSKRFAGSGSEDICHAWIRFEEEHGTLDDYDLAVKKVTPRLKELMVFKSQEEAKVEAYSMLNDNSNADDSSQKRKASKMTNKQQPPAKKRKENPPKSVKSSDDQEKTQSGHSGAVTAVEVGEASTEMKVDSNCRTGNTGSNEPKPSFYNDKCTVFVSNIDLKATEDDLRRFFSDIGGATAIRLLKDKFTKKSRGLAYVDFSDNKHLEAALQKNKHRLLGKKVSIARSDPSRSKKSREAGPSSKGYDNLPQSGDDGAKAPGSSRPEKEVPKGDVKITGKNTAFAPRSVVKPLGWTTKDEKPDGGAGELKSNEEFRNLLLKK

SEQ ID NO: 104385 - protein, 132 aa, Setaria italica
  Transcript Sequence Number=SeqID_38411
EEEKERREREEEERRKEEEKERREREEEERKREQEERERKEEEERQRRKEEERERREQEEKQRREEEERARREEEQRQREEEERQREEEERRREEEEGGGGHGDEPESDEPLLYRLSKKLKKRYRAGTFKSG

SEQ ID NO: 104386 - protein, 128 aa, Setaria italica
  misc_feature (9)..(9): Xaa can be any naturally occurring amino acid
  Transcript Sequence Number=SeqID_38412
  Gene Ontology: Cellular component=integral to membrane; Biological process=response to stress
  Homolog annotation: Hit_ID=Q07764; Match level="QueryCoverage=98%, HitCoverage=92%, E-value=1e-52, Identity=80%"; Hit description =Protein HVA22
  Pfam annotation: Domain name=TB2_DP1_HVA22; Domain location=1-95; Score=171.0; E_value=3.4e-48; Accession=PF03134.11; Description =TB2DP1, HVA22 family
LITHLHTVXGPSITLLYPLYASVCAMESPSKVDDEQWLSYWIIYSFITLLEMVAEPVLYWIPIWYPVKLLFVAWLVLPQFKGASFIYEKLVREQLRKYRARHLRTGAAAAAADDQKVHIAKTEGDHLQ

SEQ ID NO: 104387 - protein, 76 aa, Setaria italica
  misc_feature (14)..(14): Xaa can be any naturally occurring amino acid
  misc_feature (48)..(48): Xaa can be any naturally occurring amino acid
  Transcript Sequence Number=SeqID_38413
  Homolog annotation: Hit_ID=B5LEC3; Match level="QueryCoverage=52%, HitCoverage=30%, E-value=2e-10, Identity=80%"; Hit description =Thioredoxin h
  Pfam annotation: Domain name=Thioredoxin; Domain location=2-76; Score= -29.4; E_value=0.051; Accession=PF00085.12; Description=Thioredoxin
LALQAVIYFSASWXGPCRFIEPALKQMASTFADVEFIKIDVDELAVRXPACGPDSVFVSSFACAFRGLVVNSAAAM

SEQ ID NO: 104388 - protein, 133 aa, Setaria italica
  misc_feature (30)..(30): Xaa can be any naturally occurring amino acid
  Transcript Sequence Number=SeqID_38414
  Gene Ontology: Mol. function=protein disulfide oxidoreductase activity; Cellular component=cytoplasm; Biological process=cell redox homeostasis
  Homolog annotation: Hit_ID=B6T375; Match level="QueryCoverage=84%, HitCoverage=80%, E-value=2e-32, Identity=62%"; Hit description =Thioredoxin H-type 5
  Pfam annotation: Domain name=AhpC-TSA; Domain location=17-112; Score=- 16.9; E_value=0.02; Accession=PF00578.13; Description=AhpCTSA family
  Pfam annotation: Domain name=DUF953; Domain location=25-126; Score= -38.4; E_value=0.072; Accession=PF06110.3; Description=Eukaryotic protein of unknown function (DUF953)
  Pfam annotation: Domain name=Glutaredoxin; Domain location=47-103; Score=4.6; E_value=0.079; Accession=PF00462.16; Description =Glutaredoxin
  Pfam annotation: Domain name=Thioredoxin; Domain location=20-127; Score=104.7; E_value=3.1e-28; Accession=PF00085.12; Description =Thioredoxin
  Pfam module annotation: Pfam domain module=AhpC-TSA::DUF953::Glutaredo xin::Thioredoxin; Domain location=17-112::25-126::47-103::20-127
RACLASPSEPSAEADDLDSRVVSLHKKAYXDLHMAGLKENAQAKLAVIYFSASWCGPCRFIEPALKQMASTFADVEFIKIDVDELAEVAREWKVEAMPTFILVKRGKEVSRVVGANKGELERNVEKQRLLISA

SEQ ID NO: 104389 - protein, 132 aa, Setaria italica
  Transcript Sequence Number=SeqID_38415
  Gene Ontology: Mol. function=protein disulfide oxidoreductase activity; Cellular component=cytoplasm; Biological process=cell redox homeostasis
  Homolog annotation: Hit_ID=B6T375; Match level="QueryCoverage=99%, HitCoverage=98%, E-value=9e-54, Identity=82%"; Hit description =Thioredoxin H-type 5
  Pfam annotation: Domain name=Thioredoxin; Domain location=22-123; Score=135.0; E_value=2.3e-37; Accession=PF00085.12; Description =Thioredoxin
MGSFLSSLVTPPPAADDPNCAVVAAHSKATYDEQWAAAKSSGKLMVIDFSASWCGPCRFIEPAFKEMASKYTDVAFVKIDVDELADVARTWKVEAMPTFVLAKGGKEVSRVVGAKKDELERKIGMFRSSSSY

SEQ ID NO: 104390 - protein, 153 aa, Setaria italica
  Transcript Sequence Number=SeqID_38416
  Gene Ontology: Mol. function=zinc ion binding; Cellular component =nucleus; Biological process=regulation of transcription
  Homolog annotation: Hit_ID=B6TNI4; Match level="QueryCoverage=92%, HitCoverage=44%, E-value=5e-52, Identity=72%"; Hit description=Dof domain, zinc finger family protein
  Pfam annotation: Domain name=zf-Dof; Domain location=42-104; Score =129.9; E_value=8.2e-36; Accession=PF02701.7; Description=Dof domain, zinc finger
MHHRDIVVVTRMLSPHYDNVLPPYAAGRRAAALLDHRRYRPNVEVAPNCPRCDSPNTKFCYYNNYSLSQPRYFCKGCRRYWTKGGSLRNVPVGGGCRKNRRGKPVRAMPVDAAATGTAGGATAPYYQRSSSFPGTLRPDLLLEGMVGSPAGLC

SEQ ID NO: 104391 - protein, 73 aa, Setaria italica
  misc_feature (62)..(62): Xaa can be any naturally occurring amino acid
  Transcript Sequence Number=SeqID_38417
  Gene Ontology: Mol. function=serine-type carboxypeptidase activity; Biological process=proteolysis
  Homolog annotation: Hit_ID=B6TM29; Match level="QueryCoverage=47%, HitCoverage=7%, E-value=6e-11, Identity=91%"; Hit description=Serine carboxypeptidase K10B2.2
MAAAAVLVAVLALSCRAASGMATAAVTAEAEADRIASLPGQPPVKFSMYSGYVTVDAAAGRXLFYWLIEAAGA

SEQ ID NO: 104392 - protein, 208 aa, Setaria italica
  misc_feature (113)..(113): Xaa can be any naturally occurring amino acid
  Transcript Sequence Number=SeqID_38418
  Gene Ontology: Mol. function=serine-type carboxypeptidase activity; Cellular component=extracellular region; Biological process =proteolysis
  Homolog annotation: Hit_ID=B6U5U4; Match level="QueryCoverage=77%, HitCoverage=34%, E-value=3e-85, Identity=96%"; Hit description =Virulence-related protein Nf314
  Pfam annotation: Domain name=Peptidase_S10; Domain location=25-206; Score=30.2; E_value=1.7e-16; Accession=PF00450.14; Description =Serine carboxypeptidase
VSVVVAAAVATADQERESDRIRELPGQPPNVEFSQYSGYVTVNPARGRALFYWLVEAVPAAGPIAPLVLWLNGGPGCSSVGYGASEEVGPFRIRPDGQTLYLNPNSWNKAANXLLFLESPAGVGFSYSNSSLDLYTAGDAKTALDAYAFLVNWLERFPQYKYREFYIAGESYAGQASVGEVLNSVLASSIKIQLRALMFALCRTLCSS

SEQ ID NO: 104393 - protein, 99 aa, Setaria italica
  Transcript Sequence Number=SeqID_38419
  Gene Ontology: Mol. function=serine-type carboxypeptidase activity; Cellular component=extracellular region; Biological process =proteolysis
  Homolog annotation: Hit_ID=B6TM29; Match level="QueryCoverage=100%, HitCoverage=21%, E-value=2e-44, Identity=83%"; Hit description =Serine carboxypeptidase K10B2.2
AAGKRIWVFSGDADAVVPLPGTRYSIDALFLPTISNWYAWYDQGEVGGWCQVYKGLTLVTIRGAGHEVPLHRPRLGLKLFEHFLRDEPMPKPADSIQTF

SEQ ID NO: 104394 - protein, 398 aa, Setaria italica
  misc_feature (295)..(295): Xaa can be any naturally occurring amino acid
  Transcript Sequence Number=SeqID_38420
  Gene Ontology: Mol. function=serine-type carboxypeptidase activity; Cellular component=extracellular region; Biological process =proteolysis
  Homolog annotation: Hit_ID=B6TM29; Match level="QueryCoverage=96%, HitCoverage=83%, E-value=0.0, Identity=87%"; Hit description=Serine carboxypeptidase K10B2.2
  Pfam annotation: Domain name=Peptidase_S10; Domain location=2-385; Score=583.3; E_value=2.7e-172; Accession=PF00450.14; Description =Serine carboxypeptidase
CPVGRSVVRLRYFLVFNGGPGCSSVGYGASEELGAFRINPDGRSLSRNPYPWNKVANMLFLDSPAGVGYSYSNTTADLYTAGDNKTAHDAYNFLVNWLERFPQYKHRDFYITGESYAGHYVPQLSQLVYENNKGIEKPILNFKGFMVGNAVIDDYHDYIGTFEYWWTHGLISDETYQKLRLACEFDSAEHPSKECNKINDIAEAEHGSIDAYSIYTPTCKKTSLHKRRQIRGRTPWLPRGYDPCTEKYSEKYYNLPEVQKALHANVTGIPYAWVACSDPIYDYWKDSPKSMLPTXCELIAAGIRIWVFSGDADAVVPLPGTRYSIDALFLPTISNWYAWYDQGEVGGWCQVYKGLTLVTIRGAGHEVPLHRPRLGLKLFEHFLRDEPMPKPADSIQTF

SEQ ID NO: 104395 - protein, 446 aa, Setaria italica
  Transcript Sequence Number=SeqID_38421
  Gene Ontology: Mol. function=serine-type carboxypeptidase activity; Cellular component=extracellular region; Biological process =proteolysis
  Homolog annotation: Hit_ID=B6TM29; Match level="QueryCoverage=97%, HitCoverage=93%, E-value=0.0, Identity=83%"; Hit description=Serine carboxypeptidase K10B2.2
  Pfam annotation: Domain name=Peptidase_S10; Domain location=19-433; Score=733.2; E_value=2e-217; Accession=PF00450.14; Description =Serine carboxypeptidase
MATAAVTAEAEADRIASLPGQPPVKFSMYSGYVTVDAAAGRALFYWLIEAAGAPAASAPLVLWLNGGPGCSSVGYGASEELGAFRINPDGRSLSRNPYPWNKVANMLFLDSPAGVGYSYSNTTADLYTAGDNKTAHDAYTFLVNWLERFPQYKQRDFYITGESYGGHYVPQLSQLVYRNNKGVKKPVLNLKGFMVGNAVIDDYHDYIGTFEYLWTHGLISDETYEKLRLTCEFEVSEHPSKECEKILEVASAEQGKIDTYSIYTPTCKKTSLHRHRLIRGRTPWLPRGYDPCTTQYSTKYYNLPEVQKALHANVTGIPYAWVACSDPIYKYWKDSPRSMLPIYRELIAAGKRIWVFSGDADAVVPLPGTRYSIDALFLPTISNWYAWYDQGEVGGWCQVYKGLTLVTIRGAGHEVPLHRPRLGLKLFEHFLRDEPMSKAADSIQTF

SEQ ID NO: 104396 - protein, 111 aa, Setaria italica
  Transcript Sequence Number=SeqID_38422
  Homolog annotation: Hit_ID=Q7X7V8; Match level="QueryCoverage=100%, HitCoverage=21%, E-value=1e-17, Identity=46%"; Hit description =OSJNBa0088K19.14 protein
ERMKVEKEEGRGRDVADIVDPPAATVATTDTNAARAARPEAAAAHTTPVDGAATAKAKAGNPEMSKSRVVRLSKRLKQLNGYSSLCNVLSLMSLTWHLVHLARRINTGTAC

SEQ ID NO: 104397 - protein, 85 aa, Setaria italica
  Transcript Sequence Number=SeqID_38423
GACASVTDKMGAEEPGCPPGRFKPCTGAQEEGGEVSKPFLSLSGEHYKPLCQHSLCYLNDIASSQKLKTKRCVKPIGQPFAEKFQ

SEQ ID NO: 104398 - protein, 369 aa, Setaria italica
  Transcript Sequence Number=SeqID_38424
  Gene Ontology: Mol. function=aspartic-type endopeptidase activity; Cellular component=extracellular region; Biological process =proteolysis
  Homolog annotation: Hit_ID=Q8L9B9; Match level="QueryCoverage=64%, HitCoverage=49%, E-value=4e-16, Identity=28%"; Hit description =Chloroplast nucleoid DNA binding protein, putative
NLPSRTMEAKLTTSLAILTALLIMHHPSITAAATIAHHTTTPANASLAAGFSLQLVVPDHDDLDHTVRRGSDGFLHLQSLRTDLPPRPPSGANSSSAASATTLRPEMTYTPLRLPKALVIGVGTGAGHQDYLFQVVDTSSHLIWMQCMGCDPHSPQRHRLFDSTTSPTYHLVAGTDPFCRPPYWSEFNGEACAFRFDGPRDMSVEGYLGTDQLTYNNAVHQNVPFGCAHKAHHFQNDGVFAGVIGAAAVARGLTRFSYCLFHGGETNRQGFLRFGTDVPRNPRYRTTEILPAAALDAAHDSSGHYVSLVGVSLGARRLDGIRPEMFARREDGQGGCVVDLGTPVTVMARAAYDVVEEAVWSDLERHGAE

SEQ ID NO: 104399 - protein, 91 aa, Setaria italica
  Transcript Sequence Number=SeqID_38425
MAPKRRSSGKVVGSVVKTKVVQETVEVTTAIVADGEPEQQLAPGALALAPRTGEVSRSKVVHVEITTPDSDNTTGRSSAKQQPTAKGRGGR

SEQ ID NO: 104400 - protein, 64 aa, Setaria italica
  Transcript Sequence Number=SeqID_38426
  Homolog annotation: Hit_ID=Q9SBW9; Match level="QueryCoverage=100%, HitCoverage=62%, E-value=5e-25, Identity=90%"; Hit description=LIM1 protein
  Pfam annotation: Domain name=Tryp_alpha_amyl; Domain location=4-62; Score=38.8; E_value=2.2e-08; Accession=PF00234.14; Description =Protease inhibitorseed storageLTP f
GRQCVPQLNRLLACRAYLVPGAPDPSADCCGALSAVSHECACSTMGIINSLPGRCSLAPVNCSA

SEQ ID NO: 104401 - protein, 255 aa, Setaria italica
  Transcript Sequence Number=SeqID_38427
  Gene Ontology: Cellular component=chloroplast envelope
  Homolog annotation: Hit_ID=Q8DIT8; Match level="QueryCoverage=28%, HitCoverage=46%, E-value=9e-13, Identity=52%"; Hit description =Tll1493 protein
  Subcellular localization annotation: CTP_CleavageSite=29; ConfidenceScore=5.35e-01
APSKSSGPKRQQRQQVPQPAPPLSSAAVSASAAMVPLLLALPPDALAVEGEFGILEGRSFALLHPLVMGGLFAYTLWAGYLGWQWRRVRTIQDEINDLKKQLKPAAAATPAAVGAGSGDASSSSTPPPAPKSPVEIKIEELTEERKKLLKGSFRDRHFNAGSILLGLGVLESVGGALNTWFRTGKLFPGPHLFAGAAITVLWAGAAALVPAMQKGDETARSLHIALNTINVLLFIWQIPTGLEIVGKVFEFTTWP

SEQ ID NO: 104402 - protein, 111 aa, Setaria italica
  Transcript Sequence Number=SeqID_38428
  Subcellular localization annotation: CTP_CleavageSite=37; ConfidenceScore=5.26e-01
PPAVAGGKGGGGAQRPVAHVGAGRRQGGERPVGAFTSCQTGGGSSPRRCLPDEGGRLGSSELDARAREGAMAVRNRAVAQQRRWISPANKDGRTWRWWREVSDYLPRRHGE

SEQ ID NO: 104403 - protein, 304 aa, Setaria italica
  Transcript Sequence Number=SeqID_38429
  Gene Ontology: Mol. function=transcription factor activity; Cellular component=nucleus; Biological process=regulation of transcription, DNA-dependent
  Homolog annotation: Hit_ID=B4FHR0; Match level="QueryCoverage=93%, HitCoverage=93%, E-value=1e-102, Identity=72%"; Hit description =Nuclear transcription factor Y subunit A-3
  Pfam annotation: Domain name=CBFB_NFYA; Domain location=164-220; Score=146.4; E_value=8.7e-41; Accession=PF02045.7; Description=CCAAT- binding transcription factor (CBF-BNF-YA) subunit B
TSTEQIIKVNAGFIHHISVKDHPVHPMSKSNHGVLSGNDHEMKHLGHKIHDRDSSSGSGQSHQEASAVSETSLNEHTSIQSDNDEGHGKHNQFTVKPVLSMGKQGSAFSPPKLDYNASFACVPYNADAYYGGVLTGYPPHAVVHPQQNQTTNAPVVLPVEPAAEEPIYVNAKQYHAILRRRQTRAKLEAQNKLVKGRKPYLHESRHRHAMKRARGSGGRFLNTKQLQEQNQQHQASGGSSCSKVIGNTISSQSDPNPTTPSAPASSDTASASRTNQDRTCFPSVGFRPAMNFSEQGGGSAKLVR

SEQ ID NO: 104404 - protein, 77 aa, Setaria italica
  Transcript Sequence Number=SeqID_38430
  Gene Ontology: Mol. function=transcription factor activity; Cellular component=nucleus; Biological process=regulation of transcription, DNA-dependent
MTKKLTSAMAGKQDFIRKAQFDDQRGGGESAAAGFGGRLVSHEQEDAIIVAALRHVVSGYSTPPPEVVTVAGGEACG

SEQ ID NO: 104405 - protein, 69 aa, Setaria italica
  Transcript Sequence Number=SeqID_38431
CLRMCSGKSSNLDQRCSKEYIVLICRSDMNFCQSEVSKCQHSFHIYNLCWYLGLWQVRSSAELYITLMS

SEQ ID NO: 104406 - protein, 197 aa, Setaria italica
  Transcript Sequence Number=SeqID_38432
  Pfam annotation: Domain name=DUF2052; Domain location=1-197; Score =211.9; E_value=1.7e-60; Accession=PF09747.1; Description=Coiled-coil domain containing protein
EEAMREREPYLHHEYLGRFQDPLGRAMARPGERWSETLMRRAEEAVIVEKIRGEQIRRGVDPSEWVGGGPEEAMQEQEEEEEEEEEEEEEDEEEQSMKEKETEVVKPIATEVVANESAPMDSSNGRGSAAGTFNQTLSCEEMQDQLEQFTYVMQQKFLTGEDTEHMDYSQIDNDEMLDDHWSREANYDAEEKYFEED

SEQ ID NO: 104407 - protein, 80 aa, Setaria italica
  Transcript Sequence Number=SeqID_38433
  Homolog annotation: Hit_ID=B6SHN1; Match level="QueryCoverage=100%, HitCoverage=52%, E-value=3e-13, Identity=59%"; Hit description =Oleosin
  Pfam annotation: Domain name=Oleosin; Domain location=1-73; Score =56.9; E_value=7.8e-14; Accession=PF01277.9; Description=Oleosin
GTVLALIVATPLLVIFSPVLVPAAITLALLTAGFVSSGGFGAAAVGVLAWMYRHLQTAPDQQQLSSKDWAHHRIEQARAH

SEQ ID NO: 104408 - protein, 110 aa, Setaria italica
  misc_feature (40)..(40): Xaa can be any naturally occurring amino acid
  misc_feature (92)..(92): Xaa can be any naturally occurring amino acid
  Transcript Sequence Number=SeqID_38434
  Homolog annotation: Hit_ID=B6T8R2; Match level="QueryCoverage=70%, HitCoverage=34%, E-value=2e-27, Identity=79%"; Hit description=Cold acclimation WCOR413-like protein gamma form
  Pfam annotation: Domain name=WCOR413; Domain location=4-108; Score= -14.3; E_value=1.1e-08; Accession=PF05562.3; Description=Cold acclimation protein WCOR413
IIVLLDQIRRQFTSCSVDSESTYVIKVYSCLYLHLTIIGXLELPLSTMLLVSVAPYQLMNLRGTQGGAVLSLAIAGYLAFQHFTRVGGLGKXEQGSVIATLAIICITVIP

SEQ ID NO: 104409 - protein, 156 aa, Setaria italica
  Transcript Sequence Number=SeqID_38435
  Homolog annotation: Hit_ID=B6T8R2; Match level="QueryCoverage=98%, HitCoverage=68%, E-value=4e-69, Identity=84%"; Hit description=Cold acclimation WCOR413-like protein gamma form
  Pfam annotation: Domain name=WCOR413; Domain location=1-149; Score =188.5; E_value=1.8e-53; Accession=PF05562.3; Description=Cold acclimation protein WCOR413
RTAVCHSSAHLSARTMQWISAGASAVLLLAKGTAIHKSFLVPFFALQAPCSIISWIKSDYGQWTAFLALLVRLFFFIPGELELPLSTMLLVSVAPYQLMNLRGTQGGAVLSLAIAGYLAFQHFTRVGGLGKAFEQGSVIATLAIICITVIPLMLLF

SEQ ID NO: 104410 - protein, 53 aa, Setaria italica
  Transcript Sequence Number=SeqID_38436
KNDPPLNAHLQFQGKMERFFRGVLKIVPSVSYEWHTICHSGPPSVISDDHTCR

SEQ ID NO: 104411 - protein, 59 aa, Setaria italica
  Transcript Sequence Number=SeqID_38437
HKKGETQAIDRQRKQRITTTTGSKDCKIHASSNLLHLFIPALPKVKYRHTHTSATLFIN

SEQ ID NO: 104412 - protein, 150 aa, Setaria italica
  Transcript Sequence Number=SeqID_38438
  Gene Ontology: Mol. function=inositol or phosphatidylinositol phosphatase activity
  Homolog annotation: Hit_ID=B9S7E6; Match level="QueryCoverage=86%, HitCoverage=30%, E-value=2e-33, Identity=53%"; Hit description=Type I inositol polyphosphate 5-phosphatase, putative
VFFVFLVGVFAWTLKADSYDIYVLGFQEIVQLNARNVLGPKQRSAAMKWQLLIEDALNNRRSAQDGGGEEAMDQERDVFRCVMSKQMVGIFVSVWTRSGLRRHVRHAGASTVGAGVLGRLGNKGAVSVRFLLHDTSFCFVCFLSYLGAAV

SEQ ID NO: 104413 - protein, 100 aa, Setaria italica
  Transcript Sequence Number=SeqID_38439
PESALRAIFPLELGVHVCVENYHDLFRENRLASCPYSDCTGKQWFWSPDPKRMERAYKCITIYQFFDSEAGDPGHPSTSDARRDMWNFRVGIQAYSDRPR

SEQ ID NO: 104414 - protein, 62 aa, Setaria italica
  Transcript Sequence Number=SeqID_38440
  Gene Ontology: Mol. function=alpha-amylase inhibitor activity; Cellular component=extracellular region; Biological process=defense response
  Homolog annotation: Hit_ID=Q09198; Match level="QueryCoverage=72%, HitCoverage=95%, E-value=4e-14, Identity=84%"; Hit description =Defensin-like protein 21
  Pfam annotation: Domain name=Gamma-thionin; Domain location=16-62; Score=73.4; E_value=8.2e-19; Accession=PF00304.12; Description=Gamma- thionins family
RARAEESSVAPAAEARVCRQRSAGFRGPCLSDHNCAQVCLQEGWGGGNCDGFRRQCKCARQC

SEQ ID NO: 104415 - protein, 79 aa, Setaria italica
  Transcript Sequence Number=SeqID_38441
  Gene Ontology: Mol. function=alpha-amylase inhibitor activity; Cellular component=extracellular region; Biological process=defense response
  Homolog annotation: Hit_ID=Q09198; Match level="QueryCoverage=59%, HitCoverage=100%, E-value=8e-16, Identity=85%"; Hit description =Defensin-like protein 21
  Pfam annotation: Domain name=Gamma-thionin; Domain location=33-79; Score=73.4; E_value=8.2e-19; Accession=PF00304.12; Description=Gamma- thionins family
MWTTKAAARVAVLLLLLIVVAQESSVAPAAEARVCRQRSAGFRGPCLSDHNCAQVCLQEGWGGGNCDGFRRQCKCARQC

SEQ ID NO: 104416 - protein, 50 aa, Setaria italica
  Transcript Sequence Number=SeqID_38442
CPVLNKSLIMRNQLSLYGYQCSRPAFENCSSSVCKGLQLTRRKLKSHVHP

SEQ ID NO: 104417 - protein, 112 aa, Setaria italica
  Transcript Sequence Number=SeqID_38443
SRQATSSLRPPIMSGEDGETTTVMVGPWGEREVNSPLQFTPKRLVAMAFQTGRVIVTLGFTCVDVAGKRHTIGLVGGDRGKNTNFPFLFLFPRADQVCTNGVCDGIRWINHC

SEQ ID NO: 104418 - protein, 149 aa, Setaria italica
  misc_feature (135)..(135): Xaa can be any naturally occurring amino acid
  Transcript Sequence Number=SeqID_38444
  Gene Ontology: Mol. function=protein serine/threonine kinase activity; Biological process=defense response
  Homolog annotation: Hit_ID=Q2QVI2; Match level="QueryCoverage=89%, HitCoverage=51%, E-value=2e-22, Identity=41%"; Hit description =Jasmonate-induced protein, putative
  Pfam annotation: Domain name=Jacalin; Domain location=52-149; Score= -24.5; E_value=0.0061; Accession=PF01419.9; Description=Jacalin-like lectin domain
MASRKSVIPRPIPIAYDEETSGNKDEESYPLQPTITGQTPPIKIGMWGGGFAAGFDVPVGAPPKRLDSVMIRAGEIIDAFGFSYTDQSGEKFTRGPYGGSGGSLTTIQLEPSEYVKNVSGTTGTWDGYPVVASLXYRTNFRVYGPYGKA

SEQ ID NO: 104419 - protein, 34 aa, Setaria italica
  Transcript Sequence Number=SeqID_38445
YDHLILTETHWKAELAEDEGPGLFEVPSRALAQT

SEQ ID NO: 104420 - protein, 367 aa, Setaria italica
  misc_feature (84)..(84): Xaa can be any naturally occurring amino acid
  misc_feature (91)..(91): Xaa can be any naturally occurring amino acid
  misc_feature (118)..(118): Xaa can be any naturally occurring amino acid
  misc_feature (220)..(220): Xaa can be any naturally occurring amino acid
  misc_feature (300)..(300): Xaa can be any naturally occurring amino acid
  Transcript Sequence Number=SeqID_38446
  Gene Ontology: Mol. function=protein serine/threonine kinase activity; Biological process=defense response
  Homolog annotation: Hit_ID=Q2R1E7; Match level="QueryCoverage=95%, HitCoverage=62%, E-value=1e-45, Identity=34%"; Hit description =Jacalin-like lectin domain containing protein
  Pfam annotation: Domain name=Jacalin; Domain location=122-257; Score =75.8; E_value=1.6e-19; Accession=PF01419.9; Description=Jacalin-like lectin domain
QARGTRIGLVGGDRGKNTNIKFAPTEYVTEFAGSTIVDTDGTSAVKYLRIQTNLKTYEINEKGSNASDTEHPFRVPLPENSTIXGFFGRQXYVKDMYIQFGIYVNSTTQVVPLGAWGXGDGGEAFDVSAPPLRLESMTIRAGNTVDAFGFSYVDEAGRRHIRGPSGGTGGQLTTIRLAPTEFVNSISGTIGRSFGSQSRSLVASLQIGTNVRTYGPYGRXEPGDDPFSIPLPENFCVVGFWGRAGNLLDAIGVYIGQRKSVIPRPIPIAYDEETSGNKDEESYPLQPTITGQTPPIKIGXWGGGFAAGFDVPVGAPPKRLDSVMIRAGEIIDAFGFSYTDQSGEKFTRGPYGGSGGSLTTVSELCRL

SEQ ID NO: 104421 - protein, 210 aa, Setaria italica
  Transcript Sequence Number=SeqID_38447
  Gene Ontology: Mol. function=nucleotide binding; Biological process =defense response
  Homolog annotation: Hit_ID=Q8LL09; Match level="QueryCoverage=75%, HitCoverage=44%, E-value=5e-13, Identity=34%"; Hit description =Hessian fly response gene 1 protein
  Pfam annotation: Domain name=Jacalin; Domain location=18-159; Score= -14.8; E_value=0.0011; Accession=PF01419.9; Description=Jacalin-like lectin domain
MSGEDGETTTVMVGPWGEREVNSPLQFTPKRLVAMAFQTGRVIVTLGFTCVDVAGKRHTIGLVGGDRGKNTNIKFAPTEYVTEFAGSTIVDTDGTSAVKYLRIQTNLKTYEINEKGSNASDTEHPFRVPLPENSTIVGFFGRQHIVKGHVYSIGIYVNSTTQESQDTYPPDISVPVFISYSFRPCINSVASTNSHAFKAQGWRRDIKCFT

SEQ ID NO: 104422 - protein, 356 aa, Setaria italica
  Transcript Sequence Number=SeqID_38448
  Gene Ontology: Mol. function=protein serine/threonine kinase activity; Biological process=defense response
  Homolog annotation: Hit_ID=Q2R1E7; Match level="QueryCoverage=87%, HitCoverage=62%, E-value=1e-42, Identity=36%"; Hit description =Jacalin-like lectin domain containing protein
  Pfam annotation: Domain name=Jacalin; Domain location=174-309; Score =76.0; E_value=1.4e-19; Accession=PF01419.9; Description=Jacalin-like lectin domain
MSGEDGETTTVMVGPWGEREVNSPLQFTPKRLVAMAFQTGRVIVTLGFTCVDVAGKRHTIGLVGGDRGKNTNIKFAPTEYVTEFAGSTIVDTDGTSAVKYLRIQTNLKTYEINEKGSNASDTEHPFRVPLPENSTIVGFFGRQHIVKGHVYSIGIYVNSTTQVVPLGAWGGDGGEAFDVSAPPLRLESMTIRAGNTVDAFGFSYVDEAGRRHIRGPSGGTGGQLTTIRLAPTEFVNSISGTIGRSFGSQSRSLVASLQIGTNVRTYGPYGRRNPGDDPFSIPLPENFCVVGFWGRAGNLLDAIGVYIGQRKSVIPRPIPIAYDEETSGNKDEESYPLQPTITGQVLCPFVRHYIPC

SEQ ID NO: 104423 - protein, 337 aa, Setaria italica
  Transcript Sequence Number=SeqID_38449
  Gene Ontology: Mol. function=protein serine/threonine kinase activity; Cellular component=cellular_component; Biological process =defense response
  Homolog annotation: Hit_ID=Q2R1E7; Match level="QueryCoverage=98%, HitCoverage=62%, E-value=2e-53, Identity=37%"; Hit description =Jacalin-like lectin domain containing protein
  Pfam annotation: Domain name=Jacalin; Domain location=16-151; Score =76.0; E_value=1.4e-19; Accession=PF01419.9; Description=Jacalin-like lectin domain
  Pfam annotation: Domain name=Jacalin; Domain location=200-333; Score =63.2; E_value=1e-15; Accession=PF01419.9; Description=Jacalin-like lectin domain
  Pfam module annotation: Pfam domain module=Jacalin::Jacalin; Domain location=16-151::200-333
YNLQVVPLGAWGGDGGEAFDVSAPPLRLESMTIRAGNTVDAFGFSYVDEAGRRHIRGPSGGTGGQLTTIRLAPTEFVNSISGTIGRSFGSQSRSLVASLQIGTNVRTYGPYGRRNPGDDPFSIPLPENFCVVGFWGRAGNLLDAIGVYIGQRKSVIPRPIPIAYDEETSGNKDEESYPLQPTITGQTPPIKIGMWGGGFAAGFDVPVGAPPKRLDSVMIRAGEIIDAFGFSYTDQSGEKFTRGPYGGSGGSLTTIQLEPSEYVKNVSGTTGTWDGYPVVASLTIETNFRVYGPYGKAQDMHFRVPLPENACVVGFFGMYETNHLDAIGVYVSGCVPN

SEQ ID NO: 104424 - protein, 228 aa, Setaria italica
  misc_feature (129)..(129): Xaa can be any naturally occurring amino acid
  misc_feature (150)..(150): Xaa can be any naturally occurring amino acid
  misc_feature (161)..(161): Xaa can be any naturally occurring amino acid
  Transcript Sequence Number=SeqID_38450
  Gene Ontology: Mol. function=protein binding; Cellular component =nucleus; Biological process=regulation of transcription, DNA -dependent
  Homolog annotation: Hit_ID=Q9SYM8; Match level="QueryCoverage=56%, HitCoverage=18%, E-value=3e-21, Identity=39%"; Hit description =T30F21.13 protein
DLLNNGQGLGNADRVNGRLHSHGQSSVVRFHMPKFSKIEGDGMAKVVESNKILSQNKHARKMVVSKEAQDVMGTDSSTSNYDSFDSGSSWSGSDGDDIETFSDAVVFRYCLDSTYDRSKFLRGAAPTLXKDDLVKLADQVSLYSGCSHHXRNQILMSKRLXQEGADTWSMISKNNERALWSSAIPGIITKFTDISHSVNRGLSEQDLEVLRGIAGCGEGIIRKKERKL

SEQ ID NO: 104425 - protein, 67 aa, Setaria italica
  Transcript Sequence Number=SeqID_38451
DEPRYDADAAAGSAGSVAGAAKKSFEMGKETVEQAAATAARATGDAVEATKEKVKGAGSPSSSDSEL

SEQ ID NO: 104426 - protein, 129 aa, Setaria italica
  Transcript Sequence Number=SeqID_38452
NNQNRTHTKAIDKPIESITHTRAQPLAAAWPSESDEPTRSLALSTSSSSSLAGSSHGAQYGWPRGCQGATRLRARLPPTPPPRPVNGLACMQTAERQVTHACMSPIHLTAATVGCSVAGRRSSSHENYY

SEQ ID NO: 104427 - protein, 141 aa, Setaria italica
  Transcript Sequence Number=SeqID_38453
SIRSACRSPLCVSYSDYFIPFHPIESITHTRAQPLAAAWPSESDEPTRSLALSTSSSSSLAGSSHGAQYGWPRGCQGATRLRARLPPTPPPRPVNGLACMQTAERQVTHACMWPIHLTAATVGCSVAGPAVLLHMRITTEY

SEQ ID NO: 104428 - protein, 229 aa, Setaria italica
  Transcript Sequence Number=SeqID_38454
  Gene Ontology: Mol. function=aspartyl esterase activity; Cellular component=cell wall; Biological process=cell wall modification
  Pfam annotation: Domain name=Pectinesterase; Domain location=1-205; Score=303.2; E_value=5.4e-88; Accession=PF01095.11; Description =Pectinesterase
VGVENTAGARNHQAVALRVQSDMSAFYECRFDGYQDTLYTHTSRQYYRDCVVTGTIDFIFGNAQVVFQNCLIQVRKCMDNQQNIVTAQGRKERRSAGGTVIHNCTVEPHPEFESSAGRLKTYLGRPWKEHSRTLYIQSEIGGFVDPQGWLPWLGDFGLSTCYYAEVENHGPGADTSKRAKWKGVKNITYQQAQQKYTVERFIQGQTWLPKLGVPFIPGLLPQNQTGRIH

SEQ ID NO: 104429 - protein, 120 aa, Setaria italica
  misc_feature (37)..(37): Xaa can be any naturally occurring amino acid
  Transcript Sequence Number=SeqID_38455
  Gene Ontology: Mol. function=binding; Cellular component=protein phosphatase 4 complex; Biological process=signal transduction
  Homolog annotation: Hit_ID=Q9M7X4; Match level="QueryCoverage=80%, HitCoverage=11%, E-value=8e-24, Identity=54%"; Hit description =F3E22.19 protein
  Pfam annotation: Domain name=DUF625; Domain location=4-112; Score= -1.4; E_value=9.1e-10; Accession=PF04802.7; Description=Protein of unknown function (DUF625)
CPFVVIVFLVGFVLLLHNHRASVQKQVVFKEAIPIKXAYVASKIHQTYRIRYIKDVILPKVLDEATAESIDSIIRGNNVLVVCVLRDDASFIQDLFAKMKSSNISAESKSKLGSCKKRCV

SEQ ID NO: 104430 - protein, 140 aa, Setaria italica
  Transcript Sequence Number=SeqID_38456
  Gene Ontology: Mol. function=receptor activity
  Homolog annotation: Hit_ID=B6SGF3; Match level="QueryCoverage=100%, HitCoverage=100%, E-value=8e-50, Identity=71%"; Hit description =Glyoxalase family protein superfamily
  Pfam annotation: Domain name=Glyoxalase; Domain location=11-134; Score=47.4; E_value=5.4e-11; Accession=PF00903.17; Description =GlyoxalaseBleomycin resistance proteinDioxygenase superfamily
MASGDASPDALYAYTIVYVTDVEKAAAFYAAAFGYAVRRLDQSHKWAELESGATTIAFTPLHQRETDGLSGQVQLPDATAARGPVEICFVYADVDAAYRRAVEHGATPVSAPEQKPWGQKSGFVRDMDGNVVRIGSHVRE

SEQ ID NO: 104431 - protein, 90 aa, Setaria italica
  Transcript Sequence Number=SeqID_38457
GVLEKRNRFWPRGPTAVMLSSTLKDGVSLHHERFLGPVADAPCLAKLWRSSSHSVLFHLSKVIDSFRLAVFAFPMFLCHFARRRTEMRKT

SEQ ID NO: 104432 - protein, 68 aa, Setaria italica
  Transcript Sequence Number=SeqID_38458
RLTYESPICSDVLVLHYHPPESLEGSRFEFRNMLLVYYRMCWFQYPGFELDNRNVPNLLNSPGIASTG

SEQ ID NO: 104433 - protein, 139 aa, Setaria italica
  misc_feature (35)..(35): Xaa can be any naturally occurring amino acid
  Transcript Sequence Number=SeqID_38459
HPWTSPDREADRGAAPEFVALDIRGEAESPGSEHXNRMEPSFAAKGFERERSGDANSSSTGVAGVHEKQAVPVHVDGSPRDQYLPSTPKRRRASRRVPGWRDPRKILFAFAALSSVGTLILLYFTLSMGKMTGGQADDQ

SEQ ID NO: 104434 - protein, 154 aa, Setaria italica
  Transcript Sequence Number=SeqID_38460
  Gene Ontology: Mol. function=triacylglycerol lipase activity; Cellular component=extracellular region; Biological process=lipid metabolic process
  Homolog annotation: Hit_ID=Q1XBG1; Match level="QueryCoverage=96%, HitCoverage=35%, E-value=8e-47, Identity=57%"; Hit description =Triacylglycerol lipase 2, putative
NDGLTNVWIANNRGTRWSRRHVSLDPSSRLYWNWSWDDLVVNDLPAMVDYICSQTRQKPHYVGHSMGTLVALAAFSEGRLVDQLKSAALLTPVAYLAHITTPIGILLARAFVGELLSDLLGVAEFNPLAPPVTNLIRAFCRRPGWNCYDLVGSI

SEQ ID NO: 104435 - protein, 173 aa, Setaria italica
  Transcript Sequence Number=SeqID_38461
  Gene Ontology: Mol. function=shikimate 5-dehydrogenase activity; Cellular component=cytoplasm; Biological process=oxidation reduction
  Homolog annotation: Hit_ID=B6TSW1; Match level="QueryCoverage=91%, HitCoverage=29%, E-value=2e-54, Identity=68%"; Hit description =Shikimate dehydrogenase
  Pfam annotation: Domain name=Shikimate_DH; Domain location=10-126; Score=102.7; E_value=1.2e-27; Accession=PF01488.12; Description =Shikimate  quinate 5-dehydrogenase
AIEDAIRASHPVDPTTSPLARRLFVVIGAGGAAKAVAYGAKEKGARVVIANRTFARAQELARLIGGTALTMAELESYHPEDGMILANATSVGMYPNVNETPLSKEALRNYSVVFDAVYIPKETRLLREAAECGTTVVNGLEMLARLAVVQFELFTGGMPAPQRLIHDAMTKTQ

SEQ ID NO: 104436 - protein, 95 aa, Setaria italica
  Transcript Sequence Number=SeqID_38462
  Homolog annotation: Hit_ID=B6SS11; Match level="QueryCoverage=100%, HitCoverage=17%, E-value=3e-27, Identity=71%"; Hit description =Glycosyltransferase
AEDPLQAEGGGGGGGGGRMKELRGRLADYACHHRKHGHDALLRMLAGFALVSCLLLLLPGSPISAAMDELLQLGRRTRPDEEAAALCADVANGTV

SEQ ID NO: 104437 - protein, 707 aa, Setaria italica
  misc_feature (12)..(12): Xaa can be any naturally occurring amino acid
  misc_feature (100)..(100): Xaa can be any naturally occurring amino acid
  misc_feature (225)..(225): Xaa can be any naturally occurring amino acid
  Transcript Sequence Number=SeqID_38463
  Gene Ontology: Mol. function=DNA binding; Cellular component=nucleus; Biological process=transcription from RNA polymerase II promoter
  Homolog annotation: Hit_ID=Q5W7C5; Match level="QueryCoverage=90%, HitCoverage=57%, E-value=0.0, Identity=61%"; Hit description=Unknow protein
SETGYLRDVDVXMTEQISDVMKPPSASGERKRKGMANLETHVHDNSEVHEINENANDPFRLTESERLASRSDHAVQDSNGDFGGTERVSGSSGSKKNKRXRVEVPSQDEQSEHVPSGSKMTENIGGSKKKSKKKPESTTDAVTVAEPAADVPENNVVAVEPEKLEKPEKIEKPKKKYVPISPTIHTGFSFSVVHLLTAVKKAMVSPAEDTPAVAKQPDGEEGKKXFNNEENSKTPQEQNTTEQTQQVLEGADASAAEQAAQSNSPALTVQEIVNRIRSNPGDPRILETQEPLQDLVRGVLKVLSSRTAPLGAKGWKALVAYEKANKSWFWVGPIPSVSSYDDPDEETSAEAWCIPHKMLVKLVDAFSNWLKSGQETLKQIGSLPPPPPPNPANLDLKERFKELRAQKSLNTISPSSDEARAYFQREEFLRYSIPDRAFCYTAADGEKSIVAPLRRGGGKPTAKARGHPMLLPDRPPHVTILCLVRDAASRLPARTGTRADVCTLLRDSQYLNHEEANKEAAINQVVSGALDRLHYERDPCVLYDNDKKLWTYLHRGREEEDFEDDGTSSTKKWKRPRKDPSDSAEPGAANDDFDDDGTGTPSANNAKKQKTDHGDPSVSGEANDEGDHATQNPSFGGMEGDPDLNAVPSTKNYEESGGVVYVDARPNDGGSDSVDAKPGSRADDNPEQNKINTALPENTSSMDALHE

SEQ ID NO: 104438 - protein, 229 aa, Setaria italica
  Transcript Sequence Number=SeqID_38464
  Pfam annotation: Domain name=FBA_3; Domain location=46-176; Score= -31.4; E_value=0.083; Accession=PF08268.4; Description=F-box associated
IRVIFVLDGGHFEQLYEVFTLDGNIHAQWRAKQAPPYQVEMDHWDNVVINGIVYFFLSYNVDEDKRRIGSFNLETEEWSPSIPGPLSSLMDAAADHIDCSFQLTIGALSGSLVIACHPATSTHSSMDLWFLVDFEKGLWVKQYSIELSFRHPAYAIHPFLVLNDGRIVFVIDTINSGGLLSIYNPETKTSEDVMEMGYGVAVGLYTGSALSLAKKCQLVRTQLDLLMDQ

SEQ ID NO: 104439 - protein, 252 aa, Setaria italica
  Transcript Sequence Number=SeqID_38465
  Pfam annotation: Domain name=PH; Domain location=116-230; Score=33.4; E_value=9e-07; Accession=PF00169.21; Description=PH domain
MDDVYGRIEVFPQYFAPSKEAMESPDGLSTSKSNLDTPPSSQRRSWTPKRAKGAASLLRLLSIPRLRWSTSNEDDDKIELSRAEVESLRTEIADAEERESHLKARLENIDEVLRYARLSGYLYIRSRWTQLPGEPPILDDADVDDWLPRFVVLQGQCVYYYLKSTDLSPQESTLLHDIVEVGRLPNFVPEDEKIRYAFYLLTRQGLKFQCSSTSEIQVDSWVRALTSDCKLRDGAGEDVMKKTSSQLEDGSW

SEQ ID NO: 104440 - protein, 259 aa, Setaria italica
  Transcript Sequence Number=SeqID_38466
  Homolog annotation: Hit_ID=Q9SGY3; Match level="QueryCoverage=77%, HitCoverage=54%, E-value=2e-14, Identity=29%"; Hit description =F20B24.10
LGYRAFALAAAVALLARLLIGHGISVFYFYTQWTFLLVTIYFAFATAISAHGCWVYSKKSSRKADESHGFLNDDVENRGLSSSVSVEREKDETNKLPSYYEQIVNEKRAGFWGRCMQIIYQTSAGATMLTDVTFWGLLVPFFYRDKFGLSLVTDGMHSLNAVFLLIDTVLNNMPFPWYRMAFFVFWSCAYVTFQWVLHACGGLSWWPYPFLDLSSSGAPLWYFGMAIAHIPCFFLYWLIVKAKHAYFPRMFPHAYARTV

SEQ ID NO: 104441 - protein, 117 aa, Setaria italica
  misc_feature (29)..(29): Xaa can be any naturally occurring amino acid
  misc_feature (79)..(79): Xaa can be any naturally occurring amino acid
  misc_feature (99)..(99): Xaa can be any naturally occurring amino acid
  Transcript Sequence Number=SeqID_38467
  Gene Ontology: Cellular component=monolayer-surrounded lipid storage body outer lipid monolayer
  Homolog annotation: Hit_ID=C3VER4; Match level="QueryCoverage=84%, HitCoverage=53%, E-value=5e-13, Identity=50%"; Hit description=H -oleosin
  Pfam annotation: Domain name=Oleosin; Domain location=7-117; Score =149.7; E_value=8.7e-42; Accession=PF01277.9; Description=Oleosin
  Subcellular localization annotation: CTP_CleavageSite=4; ConfidenceScore=5.50e-01
STTRAPTATQALTVATLFPLGGLLLVLSXGLALAGSVVGLAVATPVFLLFSPVLVPAALLIGMAVTGFLTSGALGLGGXLSSLTCLANTARQAFQRTPXYVEEARRRMAEAAAHAGH

SEQ ID NO: 104442 - protein, 328 aa, Setaria italica
  Transcript Sequence Number=SeqID_38468
  Gene Ontology: Mol. function=transition metal ion binding; Cellular component=vacuole
  Homolog annotation: Hit_ID=B6SWR6; Match level="QueryCoverage=95%, HitCoverage=76%, E-value=1e-135, Identity=80%"; Hit description=CBS domain containing protein
  Pfam annotation: Domain name=CBS; Domain location=127-317; Score =14.6; E_value=0.0049; Accession=PF00571.20; Description=CBS domain
GTNRRRRYVGEVVQPNPGLLREIDPGTRLIDALELMRHGVKRFLVRKSGSWKGITKRFSVLYNGKWLKNMESTSPSAASSSRQLSSSTGSASADKFCCLSREDVLRFLIGCLGALAPIPLTQISSLGAINPHYSYVEASAPAMEAIQKIPQDPCAVAVVETTPDGTRKILGDISTYKLWKCDYVSAAWALANLSAGQFVIGADENGSTPISVLPEPPISPSSPVEEISPGRSPRAKKFSSRSIGFQANQMSAWRTRSSFHRGRSTPLTCKSTSTLAAVMAQMLSHRATHVWVTDAESEEDGVLVGVVGYTEIFYAATRSASPSPTPSS

SEQ ID NO: 104443 - protein, 80 aa, Setaria italica
  misc_feature (71)..(71): Xaa can be any naturally occurring amino acid
  Transcript Sequence Number=SeqID_38469
  Gene Ontology: Mol. function=nucleic acid binding; Cellular component= ribonucleoprotein complex
  Homolog annotation: Hit_ID=B6T7I1; Match level="QueryCoverage=96%, HitCoverage=29%, E-value=3e-25, Identity=75%"; Hit description=RNA binding protein
RAMMGGWGVSDGYEGSKRPRMMMESNPYFAVNAGSPLDVSKRARMMEPGPPYFGAMGSNAGGASGGFYQPXSSNLAGAGV

SEQ ID NO: 104444 - protein, 79 aa, Setaria italica
  Transcript Sequence Number=SeqID_38470
  Subcellular localization annotation: CTP_CleavageSite=34; ConfidenceScore=5.06e-01
PPEAESPLLTATGRPLLRHPAGRRPIQMNTPPSRSRYAWAASAPLPLIPSCLFLFYWLRCPSLIGVIARLFCLRIRPLM

SEQ ID NO: 104445 - protein, 303 aa, Setaria italica
  Transcript Sequence Number=SeqID_38471
  Gene Ontology: Mol. function=nucleic acid binding; Cellular component= ribonucleoprotein complex
  Homolog annotation: Hit_ID=Q2RAY1; Match level="QueryCoverage=97%, HitCoverage=97%, E-value=1e-129, Identity=78%"; Hit description =Heterogeneous nuclear ribonucleoprotein, putative, expressed
  Pfam annotation: Domain name=RRM_1; Domain location=216-285; Score =36.7; E_value=9.1e-08; Accession=PF00076.14; Description=RNA recognition motif. (a.k.a. RRM, RBD, o
  Pfam annotation: Domain name=RRM_1; Domain location=98-164; Score =24.5; E_value=0.00044; Accession=PF00076.14; Description=RNA recognition motif. (a.k.a. RRM, RBD, o
  Pfam module annotation: Pfam domain module=RRM_1::RRM_1; Domain location=216-285::98-164
MNTPPSRSRAMMGGWGVSDGYEGSKRPRMMMESNPYFAVNAGSPLDVSKRARMMEPGPPYFGAMGSNAGGASGGFYQPFSSNLAGAGVSTGIQNFPGVRLRGLPFDCNEIDICKFFAGLEIVDCLLVNKNGRFTGEAFVVFQGAMQAEFALHRNRQNMGRRYVEVFRCKKQEYYCAIANEVNQGGYFEPEYRRSPPPPRPKKPAEDKGSMEYTEVLKLRGLPYSATTEDIIKFFLEYELTEENVHIAYRSDGKATGEAFVEFPTAEVAKTAMCKDKMTIGTRYVELFPSTPEEASRAKSRGRQ

SEQ ID NO: 104446 - protein, 348 aa, Setaria italica
  Transcript Sequence Number=SeqID_38472
  Gene Ontology: Cellular component=plasma membrane
  Homolog annotation: Hit_ID=A5Y731; Match level="QueryCoverage=100%, HitCoverage=99%, E-value=1e-121, Identity=61%"; Hit description=Src homology-3 domain protein 3
  Pfam annotation: Domain name=SH3_1; Domain location=282-336; Score =36.6; E_value=1e-07; Accession=PF00018.20; Description=SH3 domain
  Pfam annotation: Domain name=SH3_2; Domain location=283-336; Score =37.0; E_value=7.5e-08; Accession=PF07653.9; Description=Variant SH3 domain
  Pfam module annotation: Pfam domain module=SH3_1::SH3_2; Domain location=282-336::283-336
MEALRKQANKFKEQVAKQQQAVIKQFSTTGYERSDSVVIDEVELQRHQQLDKLYSSTRSGRDFQKDIVRAGEGLVSIGNKHIEVGTKFSEDCYRYGGENSASDEALAKAASLYGGALRNIEKEYEDFNRTLSSQTIDPLRAMSMGAPLEDARGLAQRYSRMRHEAEILSAEIARRKARVREAPIPEHTTKLQQSEAKMIEHKASMAVLGKEAAAALAAVESQQQRVTLQRLVGMVEAEKLFHLRLAAILDDVEAEMSSEKQKRESAPPIISSHKRAEKAQYFLAEAVHNFNGTTEKELSLIVGDYVVVRQIAPNGWAEGECRGKAGWFPAAYVERRENIPPNKVFPQA

SEQ ID NO: 104447 - protein, 167 aa, Setaria italica
  Transcript Sequence Number=SeqID_38473
  Homolog annotation: Hit_ID=Q7X7V8; Match level="QueryCoverage=99%, HitCoverage=26%, E-value=3e-17, Identity=41%"; Hit description =OSJNBa0088K19.14 protein
  Pfam annotation: Domain name=LEA_4; Domain location=103-146; Score =5.6; E_value=0.43; Accession=PF02987.8; Description=Late embryogenesis abundant protein
  Pfam annotation: Domain name=LEA_4; Domain location=52-95; Score =12.5; E_value=0.09; Accession=PF02987.8; Description=Late embryogenesis abundant protein
  Pfam module annotation: Pfam domain module=LEA_4::LEA_4; Domain location=103-146::52-95
NGGVLGAVKRCKDRLCGAGRRAEEGAKDAASRAEHAAEDAARGAVETVSDAKDSAENKALDAARHGKERLKSAKDRASDAARQGKETLKDKASDEAHQGKETVKSAKDKVAEAASKAKEKASDVQHGAAEAAKGAKDRVSEAAKHAKETVRGAKDRVSDMAERAEEY

SEQ ID NO: 104448 - protein, 57 aa, Setaria italica
  Transcript Sequence Number=SeqID_38474
STRSDEEGFGGVYGRTDPVEHHGTEIHPSHPEYDTSQGSEVKEKEKARHLKDDKRAT

SEQ ID NO: 104449 - protein, 107 aa, Setaria italica
  Transcript Sequence Number=SeqID_38475
  Pfam annotation: Domain name=Dehydrin; Domain location=1-107; Score =109.6; E_value=1e-29; Accession=PF00257.11; Description=Dehydrin
EHTFGSSQLEPASREEHTTLGEKLTRSGSSSSSSSSFSEDDGQGGRRKKKSIKEKISEKLPGTHKHEERKAGHAAPATTTTGTTHAAGAHEKKGFMDKIKEKLPGHH

SEQ ID NO: 104450 - protein, 71 aa, Setaria italica
  Transcript Sequence Number=SeqID_38476
VQGLITMESWFYLMVMDSLVYLVYSRFLEHLVGAQSSDSCVILYKIDLIWNCVVFFFLEGSSAVSSEHCID

SEQ ID NO: 104451 - protein, 40 aa, Setaria italica
  Transcript Sequence Number=SeqID_38477
SNPNQNQIHLHVKPIQLCVGYPSDSKLCLLLPLSILHFEL

SEQ ID NO: 104452 - protein, 286 aa, Setaria italica
  misc_feature (37)..(37): Xaa can be any naturally occurring amino acid
  misc_feature (233)..(233): Xaa can be any naturally occurring amino acid
  Transcript Sequence Number=SeqID_38478
  Homolog annotation: Hit_ID=B6SWV7; Match level="QueryCoverage=39%, HitCoverage=19%, E-value=2e-18, Identity=48%"; Hit description =Transposon protein CACTA, En/Spm sub-class
  Subcellular localization annotation: CTP_CleavageSite=59; ConfidenceScore=5.78e-01
LCLPPHAVQSTLMSSNSSSSILNANISSISSRPTTPXKRTATLTASKSSVTSSRPVPTRSSTPVKARTSTPTKTRPSTPVKNHPSVSSSMANSTAPKTMSVQSSRSSTPTSRSRILSSSSSSTTSAVSRPSSSSGKIPAITRTSSSSSTVPSVNRSSSRSSTPTRQPTMRSSAPSVGRSPSVGRISGSNNLTSNGRSLASSGRSSAPSSAPSSRPSSPNTRPRAPVRPLDIPXFPSETPPNLRTRLPERPLSAGRVRPGMGSGARSKPNAEPVSSAPVKRCLCPCL

SEQ ID NO: 104453 - protein, 142 aa, Setaria italica
  misc_feature (27)..(27): Xaa can be any naturally occurring amino acid
  misc_feature (121)..(121): Xaa can be any naturally occurring amino acid
  Transcript Sequence Number=SeqID_38479
  Gene Ontology: Mol. function=lyase activity
  Homolog annotation: Hit_ID=B6SL02; Match level="QueryCoverage=95%, HitCoverage=27%, E-value=3e-30, Identity=49%"; Hit description =Ribosomal RNA apurinic site specific lyase
  Pfam annotation: Domain name=FBD; Domain location=61-109; Score=47.5; E_value=5.1e-11; Accession=PF08387.2; Description=FBD
TVVNPSVMVPSVTTLDVNVRFGVRNDXKMLPSILRCFPNIEVLHIHSKKTTESTGRLGIKFWQESCAIKCVLSSINMLSFYDFRGERNELAFLKFFVESAQMLKMLVVAYANGYCSSRDEXNSKVKALFAGKRANDSCKVVV

SEQ ID NO: 104454 - protein, 329 aa, Setaria italica
  misc_feature (69)..(69): Xaa can be any naturally occurring amino acid
  Transcript Sequence Number=SeqID_38480
  Gene Ontology: Mol. function=transferase activity, transferring glycosyl groups; Cellular component=integral to membrane
  Homolog annotation: Hit_ID=Q67WK4; Match level="QueryCoverage=98%, HitCoverage=64%, E-value=1e-140, Identity=74%"; Hit description =Glycosyl transferase protein A-like
  Pfam annotation: Domain name=Glyco_transf_8; Domain location=10-303; Score=185.6; E_value=1.4e-52; Accession=PF01501.12; Description =Glycosyl transferase family 8
RAPPPTSLHCLAMRLLEARLANPSAFADEPEASPEFDDPALYHYAVFSDNVLAVSVVVASAARAAADPXAPRLPRGHGAHVPACIPRWFLRRPPPLGVHVQLLDYSDFLFLNTTNSPVIRQIEGGNRDVVLLDYLRFYLPDMFPGLRRVVLLEDDVVVQKDLAALWHVDLDGKVNGAVEMCFGGFRRYRKYLNFTQPIVRDRFNPGACAWAYGVNVFDLEAWRRDGCTELFHQYMEMNEDGELWDPTSVLTAGLMSFYGNTKALDKSWHVMGLGYNPSISPEAIRSAAVIHFDGNMKPWLDVALNQYKALWTKHVDTEMEFLTLCNFGL

SEQ ID NO: 104455 - protein, 180 aa, Setaria italica
  misc_feature (16)..(16): Xaa can be any naturally occurring amino acid
  misc_feature (31)..(31): Xaa can be any naturally occurring amino acid
  misc_feature (168)..(168): Xaa can be any naturally occurring amino acid
  Transcript Sequence Number=SeqID_38481
  Gene Ontology: Mol. function=electron carrier activity; Biological process=oxidation reduction
  Homolog annotation: Hit_ID=B6SZ78; Match level="QueryCoverage=98%, HitCoverage=33%, E-value=3e-38, Identity=46%"; Hit description =Cytochrome P450 CYP71W7
HTALHQTSGLAVADLXPSSRLMRFLDTAPRXGLACRKRMERIVEQVIERKKEAMDRGDDGQAVPGHDGFLNVLLRLQKERSTPIPVTNDIIVKLVFDMVGAGTDTSSTMLNWCMTELVRSPAVMAKAQAEVRKVLKGKSAITEDDLKGLSYLKLVMKEALRLRTPGPXLVPRVCRETCKV

SEQ ID NO: 104456 - protein, 143 aa, Setaria italica
  Transcript Sequence Number=SeqID_38482
  Gene Ontology: Mol. function=DNA-directed RNA polymerase activity; Cellular component=DNA-directed RNA polymerase II, core complex; Biological process=cellular metabolic process
  Homolog annotation: Hit_ID=B3TLS8; Match level="QueryCoverage=100%, HitCoverage=100%, E-value=2e-56, Identity=77%"; Hit description=RNA polymerase II 15.9 kDa subunit
  Pfam annotation: Domain name=RNA_pol_Rpb4; Domain location=19-140; Score=119.5; E_value=1.1e-32; Accession=PF03874.8; Description=RNA polymerase Rpb4
MSGEEEENAAELKIGEEFLKAKCLMNCEVAIILEHKYEQIQQHASESDPSSQVSQVFEKSLQYVKRFSRYKNPDAVRQVRETLSRYGLAEFELCTLGNLCPDTSGEATALVPSLKSGGRFVGDAGNEKIEKMLNDLSLIKKFE

SEQ ID NO: 104457 - protein, 110 aa, Setaria italica
  Transcript Sequence Number=SeqID_38483
MDGGRRGERGLLGGAGRGGEKRCIGRHGFWVSLRGRNQGAMVEEGVDFAQDSVVGGGDDFLFVSDSEEEVSNDFNDRSFAPHSKVPAAGCRLRSLHGAAVLRWSGSCCMA

SEQ ID NO: 104458 - protein, 46 aa, Setaria italica
  misc_feature (11)..(11): Xaa can be any naturally occurring amino acid
  misc_feature (18)..(18): Xaa can be any naturally occurring amino acid
  Transcript Sequence Number=SeqID_38484
PSRTRRRAPPXPGAYLVXPEEAVAEDDDDDDADVVPEEGAEGEESD

SEQ ID NO: 104459 - protein, 307 aa, Setaria italica
  Transcript Sequence Number=SeqID_38485
  Gene Ontology: Mol. function=catalytic activity; Biological process =metabolic process
  Homolog annotation: Hit_ID=B6UCK4; Match level="QueryCoverage=93%, HitCoverage=39%, E-value=1e-146, Identity=87%"; Hit description =Catalytic/ ligase
VINGLPKISYKDFRQKFSKQDAKVTMLGLVPSIARTWKNTDCTAGFDWSAIRCFSSSGEASSVDDYLWLMGRACYKPVIEYCGGTEIGGGFVAGSLLQPQALSAFSTPAMGCNLFILDGSGNPLPQDSVGIGELALDPVLFGSSTTLLNADHQEVYFNGMPEWNGKVLRRHGDEFERTCDGYYRAHGRADDTMNLGGIKVSSIEIERICNRVNDAILETAAIGVPPIGGGPEQLTIAVVLKDQSSQVEDLNQLKLAFNVALKKLNPLFKVSSVVVVPSLPRTASNKVMRRVLRKEFTQAAQAKKSKI

SEQ ID NO: 104460 - protein, 41 aa, Setaria italica
  Transcript Sequence Number=SeqID_38486
HICRLYHHNNRLCLVKDLRSVTMQHEAREAGPGPPLHVVAA

SEQ ID NO: 104461 - protein, 121 aa, Setaria italica
  Transcript Sequence Number=SeqID_38487
  Gene Ontology: Mol. function=lipid binding; Biological process=lipid transport
  Homolog annotation: Hit_ID=Q5UNP2; Match level="QueryCoverage=80%, HitCoverage=79%, E-value=7e-23, Identity=54%"; Hit description=Non -specific lipid-transfer protein
  Pfam annotation: Domain name=Tryp_alpha_amyl; Domain location=32-117; Score=98.1; E_value=3e-26; Accession=PF00234.14; Description=Protease inhibitorseed storageLTP f
MARPACQQQLAVVLLMLALFLAAPSVISAVTCGQVAGYLNPCISYAMGHGSAPPEACCSGVRNLNAAARSTADRQAACKCLKQITGSMPALKPDIVAGIPSKCGVDIPYPIRPSTDCAKVQ

SEQ ID NO: 104462 - protein, 51 aa, Setaria italica
  Transcript Sequence Number=SeqID_38488
  Homolog annotation: Hit_ID=C0RWW9; Match level="QueryCoverage=96%, HitCoverage=6%, E-value=2e-12, Identity=72%"; Hit description =Ameiotic 1
MQMDAETVQAAPALAAHLLNSPKPQVSKYYFKKKTSNHSSRNDRDDANHDT

SEQ ID NO: 104463 - protein, 87 aa, Setaria italica
  Transcript Sequence Number=SeqID_38489
ASLKQLFASVGGCIFLIIELLFMNSMATIYKFTIASFPDELVRNLYFTADVFIWYSSCRHGNISAADCSSRAHSRGAVGTVVGIFKF

SEQ ID NO: 104464 - protein, 102 aa, Setaria italica
  Transcript Sequence Number=SeqID_38490
  Homolog annotation: Hit_ID=B6TKF4; Match level="QueryCoverage=96%, HitCoverage=28%, E-value=9e-38, Identity=77%"; Hit description=F-box domain containing protein
VWRLEDGKEVMLWREVGVMPVEAFDELVAGRHGSFWHFQAADRLGIVCLYNVVDGRLVMFDAADGLWTVLPRVSGMDAEESGRWFGHVLEPGVELLLGQHHR

SEQ ID NO: 104465 - protein, 360 aa, Setaria italica
  Transcript Sequence Number=SeqID_38491
  Gene Ontology: Mol. function=magnesium ion binding; Cellular component=chloroplast; Biological process=metabolic process
  Homolog annotation: Hit_ID=Q6Z5I0; Match level="QueryCoverage=97%, HitCoverage=44%, E-value=1e-114, Identity=60%"; Hit description=Ent -copalyl diphosphate synthase 2
  Pfam annotation: Domain name=Terpene_synth_C; Domain location=84-322; Score=21.0; E_value=1.7e-08; Accession=PF03936.8; Description=Terpene synthase family, metal binding domain
PTGRDQGANCRAFLQGRRASGQLSDKWLIAEGLPGEVAYGLDFPWKASLPRVETRMYLEQYGGGADVWIGKVLYRMHLFNNDLYLKMAKADFISFQRSSRAEWHGLQRWCDKNNLEMYGVTSERALRAYFLAAANIFEPERAAERLGWAQTAVLAEAVTSHILSHSSSDNTRERILCRLASGSLKRGEKDSTAEDGLLNALNDLIDHLTSGNASDSLQGAWKQWLMEWTAENGSYKGNTALLLVRSVEICSGRLGSTEQNQKLPEYSQLEQLTYSICSKLGHGVHSQVCSLHTKNVENLDGQVDEEMQELAQSVSQISDPMNRVTKQTFLHVARSYCYVAHCSPETIDSHISKVLFEEVI

SEQ ID NO: 104466 - protein, 66 aa, Setaria italica
  misc_feature (53)..(66): Xaa can be any naturally occurring amino acid
  Transcript Sequence Number=SeqID_38492
LNAQVFSNLSKLKTERSKPQIAGMNVCYDDYVFTPSIYVYRENSYVPLEDRNXXXXXXXXXXXXXX

SEQ ID NO: 104467 - protein, 105 aa, Setaria italica
  Transcript Sequence Number=SeqID_38493
  Homolog annotation: Hit_ID=Q10LJ6; Match level="QueryCoverage=63%, HitCoverage=98%, E-value=2e-25, Identity=77%"; Hit description =Flowering promoting factor-like 1, putative, expressed
MSGSGAGVWVFRNGVMQLEQPAAASRKALVYVPTNEVMRSVEALERRLGTLGWERYYENRTIVQLHKRDGGADLITIPRDFASLRSTHMYDVVVKNRDHFKVVDA

SEQ ID NO: 104468 - protein, 242 aa, Setaria italica
  misc_feature (219)..(219): Xaa can be any naturally occurring amino acid
  Transcript Sequence Number=SeqID_38494
  Gene Ontology: Mol. function=oxidoreductase activity; Cellular component=extracellular region; Biological process=lignin catabolic process
  Homolog annotation: Hit_ID=Q0IP28; Match level="QueryCoverage=97%, HitCoverage=40%, E-value=1e-100, Identity=75%"; Hit description =Laccase-25
  Pfam annotation: Domain name=Cu-oxidase; Domain location=163-242; Score=-28.0; E_value=0.061; Accession=PF00394.14; Description =Multicopper oxidase
  Pfam annotation: Domain name=Cu-oxidase_3; Domain location=33-151; Score=213.3; E_value=6.4e-61; Accession=PF07732.7; Description =Multicopper oxidase
  Pfam module annotation: Pfam domain module=Cu-oxidase::Cu-oxidase_3; Domain location=163-242::33-151
MARSWSLVLPFGLVIALLFACVAQAAVVEYTFNVGNLSISQLCQPPLIITAVNGQLPGPTIEAREGDTVVVRLVNQSPYNMTIHWHGVFQRGTPWSDGPAMVTQCPVKPGGAYTYRFNVTGQEGTLWWHAHTESYLRATVYGAIVIRPRAGAAAYPFPTPDGEETVILGEWWNANVYDLRRNAFLRGNPPINSNAYTINGKPGDFYNCSNANQTYRFQXRSNGRYLLRIINAALNTNHVLQG

SEQ ID NO: 104469 - protein, 71 aa, Setaria italica
  Transcript Sequence Number=SeqID_38495
  Gene Ontology: Mol. function=carbon-sulfur lyase activity; Cellular component=nucleus; Biological process=metabolic process
  Homolog annotation: Hit_ID=B6T550; Match level="QueryCoverage=100%, HitCoverage=50%, E-value=1e-30, Identity=85%"; Hit description =Proline-rich polypeptide 6 isoform 1
GTHTAKHTFCKVCGITSFYSPRSNPDGVAVTVTCVDPGTLKHVEYRKFDGRNWEDFFKHSDISQFSKERAE

SEQ ID NO: 104470 - protein, 213 aa, Setaria italica
  Transcript Sequence Number=SeqID_38496
  Gene Ontology: Mol. function=acyltransferase activity; Cellular component=integral to membrane; Biological process=metabolic process
  Homolog annotation: Hit_ID=B9S2F2; Match level="QueryCoverage=90%, HitCoverage=38%, E-value=1e-95, Identity=86%"; Hit description=ER glycerol-phosphate acyltransferase
  Pfam annotation: Domain name=Acyltransferase; Domain location=3-120; Score=23.3; E_value=7.2e-06; Accession=PF01553.13; Description =Acyltransferase
CLVRGAPPPPRAERAAGRLGVLFACSHRTLLDPIFLSAALGRPVAAVTYSLSRLSEFLSPIRTVRLTRDRASDAAMIRELLEEGDLAICPEGTTCREPFLLRFSALFAELTDEVVPVAMENRMGMFHGTTARGWKGMDPFYFFMNPSPAYVVTFLSKLPTELTCAGGKTSHEVANYIQRLIAATLSYECTSLTRKDKYRALAGNDGVVAAPKS

SEQ ID NO: 104471 - protein, 213 aa, Setaria italica
  Transcript Sequence Number=SeqID_38497
  Gene Ontology: Mol. function=acyltransferase activity; Cellular component=integral to membrane; Biological process=metabolic process
  Homolog annotation: Hit_ID=B9S2F2; Match level="QueryCoverage=96%, HitCoverage=40%, E-value=2e-91, Identity=77%"; Hit description=ER glycerol-phosphate acyltransferase
  Pfam annotation: Domain name=Acyltransferase; Domain location=4-111; Score=7.8; E_value=0.0002; Accession=PF01553.13; Description =Acyltransferase
  Subcellular localization annotation: CTP_CleavageSite=36; ConfidenceScore=5.21e-01
SGYGFRSYRSASFFICSHRTLLDPIFLSTALGRPITAVTYSVSRLSEILSPIRTVRLTRDRAADAAMIRRLLTEGDLVICPEGTTCREPFLLRFSALFAELTDEMVPVAMENRMGMFHGTTASGWKGLDPFYFFMNPSPGYVVTFLNKLPAELTCSGGRSSHEVANYIQRLIASTLSYECTSFTRKDKYKALAGNDGTVVSKPNIDKKQVMGC

SEQ ID NO: 104472 - protein, 259 aa, Setaria italica
  Transcript Sequence Number=SeqID_38498
  Gene Ontology: Mol. function=protein serine/threonine kinase activity; Biological process=protein amino acid phosphorylation
  Homolog annotation: Hit_ID=Q2R2M7; Match level="QueryCoverage=94%, HitCoverage=89%, E-value=7e-90, Identity=53%"; Hit description =Protein kinase domain containing protein
  Pfam annotation: Domain name=Pkinase; Domain location=1-235; Score =42.4; E_value=5.2e-11; Accession=PF00069.17; Description=Protein kinase domain
  Pfam annotation: Domain name=Pkinase_Tyr; Domain location=1-235; Score=12.4; E_value=1.5e-14; Accession=PF07714.9; Description =Protein tyrosine kinase
  Pfam module annotation: Pfam domain module=Pkinase::Pkinase_Tyr; Domain location=1-235::1-235
YISKDLRKEFMEEVSIHSQMSHKNVVELIGYCIGESTLMIVTKYISKGNLDDILHDSEIPIPLDVRLGIAIGCAEALSYMHSMHLSSDSLVCHGDIKPANILLDGNLTAKLSDFGVSRLLSGGVTQYTVHIKGSVSYMDPIYFQEGCLTPRSDVYSFGIVLLELIARKRIRKGDINLIGSFNKACAYGKGREIFDAAIANENNMKILKEMKKLATECLTLDIHKRPQMNVVAKRLRILKKELKNIHEKYSEPILASHHS

SEQ ID NO: 104473 - protein, 216 aa, Setaria italica
  misc_feature (28)..(28): Xaa can be any naturally occurring amino acid
  misc_feature (39)..(39): Xaa can be any naturally occurring amino acid
  misc_feature (50)..(50): Xaa can be any naturally occurring amino acid
  Transcript Sequence Number=SeqID_38499
  Gene Ontology: Mol. function=protein serine/threonine phosphatase activity; Cellular component=protein serine/threonine phosphatase complex; Biological process=protein amino acid dephosphorylation
  Homolog annotation: Hit_ID=B6U271; Match level="QueryCoverage=100%, HitCoverage=54%, E-value=9e-56, Identity=56%"; Hit description =Protein phosphatase 2C ABI1
  Pfam annotation: Domain name=PP2C; Domain location=2-193; Score =112.9; E_value=1.1e-30; Accession=PF00481.13; Description=Protein phosphatase 2C
EAMLAAFSRVDGEVAAIQIARKDTSPRXTEGSTAVVVVXGARRIVVANCXDSRAVLCRGGVAVPLSTDHKPERPDELARIESVGGQVIYWQGPRVLGVLAMSRSIGDYFMKPSISAEPEVTVTDRTGTDEFIILGSDGLWDAMSNEYACRVVRYCLSGRLAAKYPATVHGSSATDAAKLLADMAMARGSEDNVSVVVVQLRRMVWRRKAARQNGRT

SEQ ID NO: 104474 - protein, 127 aa, Setaria italica
  Transcript Sequence Number=SeqID_38500
  Gene Ontology: Mol. function=oxidoreductase activity, acting on the aldehyde or oxo group of donors, disulfide as acceptor; Cellular component=mitochondrial matrix; Biological process=metabolic process
  Homolog annotation: Hit_ID=B6UI91; Match level="QueryCoverage=100%, HitCoverage=32%, E-value=2e-65, Identity=92%"; Hit description =Pyruvate dehydrogenase E1 component alpha subunit
  Pfam annotation: Domain name=E1_dh; Domain location=1-99; Score= -142.4; E_value=0.046; Accession=PF00676.12; Description =Dehydrogenase E1 component
KQACKFAKDHGLENGPIILEMDTYRYHGHSMSDPGSTYRTRDEIAGIRQERDPIERVRKLMLAHDFATAQELKDMEKEIRKQVDAAIAKAKESPMPDPSELFTNVYVNDCGWESFGVDRKVLRTVLP

SEQ ID NO: 104475 - protein, 421 aa, Setaria italica
  Transcript Sequence Number=SeqID_38501
  Gene Ontology: Mol. function=phosphatidylcholine-sterol O -acyltransferase activity; Cellular component=integral to membrane; Biological process=lipid metabolic process
  Homolog annotation: Hit_ID=B9R6Y0; Match level="QueryCoverage=94%, HitCoverage=94%, E-value=8e-77, Identity=39%"; Hit description=1-O -acylceramide synthase, putative
  Pfam annotation: Domain name=Abhydrolase_1; Domain location=113-412; Score=-14.2; E_value=0.083; Accession=PF00561.12; Description =alphabeta hydrolase fold
  Pfam annotation: Domain name=LACT; Domain location=65-403; Score =58.3; E_value=5.6e-16; Accession=PF02450.7; Description =Lecithin:cholesterol acyltransferase
  Pfam module annotation: Pfam domain module=Abhydrolase_1::LACT; Domain location=113-412::65-403
LDYVASPSPSEYFSASHLPKDAGVGSELHPVVLVPGQSCSDLEARLTEAYKPSAPRCGAMKGNGWFGLWKNVSDLAANDYVDCFLEQMRLVYDPAINDYRNLPGVETRVPNFGSARGFHCKDPLHPKECLDYVREGLERVGYRDGDTLFGAPYDWRYAPPVPGQQSQVYSRYFRQLKSLVETASKKHHKKVIIFGHSYGGMVVLDFVRNTPLAWRNEYIKHLILVAPVLSLGILIQAQLIAFGPNMKFVGATQSSLRTMWRSFETGIVDLPSPKVFGHMPLVITEQRNYSAYDMEDFLVAIGFGDSVEPFRRRMVPKMRYFKVPMVPVTCINGVGIRTAKQLVYWKSDYDRSPEIAYGDGDGTVNLISMLTFDKEMRRQPAQKKQFKSVKIHGAEHSGLLTEEWAVKRVIQEFLEANRISS

SEQ ID NO: 104476 - protein, 50 aa, Setaria italica
  Transcript Sequence Number=SeqID_38502
RLSYRKVKEEVEKLRERLALAKEKVAEALAEGGQSWVAFEEFLNDLKLAK

SEQ ID NO: 104477 - protein, 185 aa, Setaria italica
  misc_feature (31)..(31): Xaa can be any naturally occurring amino acid
  Transcript Sequence Number=SeqID_38503
  Homolog annotation: Hit_ID=Q8SAT5; Match level="QueryCoverage=64%, HitCoverage=12%, E-value=1e-26, Identity=59%"; Hit description =Putative membrane-associated salt-inducible protein
  Pfam annotation: Domain name=PPR; Domain location=84-118; Score=38.7; E_value=2.3e-08; Accession=PF01535.12; Description=PPR repeat
MRYSLRVGCELGRSAYCSTYLGTTKSNEPLXCVDHVEIVEGLIKSGYNLGTYLSAILILRLGYAGQSAYAAHIFRLLTADKNVVSYTALINAYFQAGQVDGALDLFAQMRTTGIPACSGTYEVLTHGLQKARRKQESEYYRRERMNIQWHLQYLDQCSSEDSLCNYLFCGLHWGVFFQDGFIYGV

SEQ ID NO: 104478 - protein, 58 aa, Setaria italica
  misc_feature (21)..(21): Xaa can be any naturally occurring amino acid
  Transcript Sequence Number=SeqID_38504
GTVSNFSRGRGDKKTKRGKRXKGSYGNARPKREKKIERIKDRIEVPRSTPWPLPFKLI

SEQ ID NO: 104479 - protein, 79 aa, Setaria italica
  Transcript Sequence Number=SeqID_38505
SRGCKLGRQRNMMRPGCPSGYADAARHGDTLLCTPHEQTTPKARGSRPVSCSPAQRTRGIPKRFVPLLQRLFVCISIGK

SEQ ID NO: 104480 - protein, 145 aa, Setaria italica
  Transcript Sequence Number=SeqID_38506
  Pfam annotation: Domain name=CCT_2; Domain location=93-117; Score =22.8; E_value=0.0015; Accession=PF09425.2; Description=Divergent CCT motif
RTSAGLCSCPCARRRYRGASGPADAGGDGGTHDHLLRGAGDQGGQRPRRQGDGAGADGEVGERPPPPEKVVVVDVPDEEPEVVAEPSAAITAIQARRLSLQRFLRKRKERNDPDYNDDELPPKKIGGGGGEPWEDDVPDASWLSL

SEQ ID NO: 104481 - protein, 71 aa, Setaria italica
  Transcript Sequence Number=SeqID_38507
LFESFMSNNHALLMNIFGPICPLLLINIDLLIEIEVLETSTNFLQFLYILCIIHLLSFICMHEFMIQESFV

SEQ ID NO: 104482 - protein, 96 aa, Setaria italica
  Transcript Sequence Number=SeqID_38508
  Gene Ontology: Mol. function=calcium ion binding
MVEEPAPAPADLSAAAQVSALPLQVDLLQLPPEVPAPGAPALRGVLDHLFAHWLSLPDTAALVASLVQKAKASGGGAVGGAMLPSMMLQGGATVPP

SEQ ID NO: 104483 - protein, 213 aa, Setaria italica
  misc_feature (10)..(10): Xaa can be any naturally occurring amino acid
  Transcript Sequence Number=SeqID_38509
  Homolog annotation: Hit_ID=Q259K5; Match level="QueryCoverage=92%, HitCoverage=28%, E-value=2e-35, Identity=41%"; Hit description =H0402C08.8 protein
  Pfam annotation: Domain name=DUF639; Domain location=1-213; Score= -340.2; E_value=0.0022; Accession=PF04842.4; Description=Plant protein of unknown function (DUF639)
VYYVWFGSVXPLACDVVNARFTFEALTATTANRLHYPAYDKFLKEMDKSFKFLQNLPTPTGIEFAEDEFILHMEGTAGTQRVVRHIGTSSWPGRVTLTNKALYFEASGKFSYESAIKADLSDTGIQHQINTASTGPFGVPLFDKAIVFESLSEPLVLEFPEMTSSTRRDMWLTLIREVIFIHRFISMYNLESPIHKWEVHSSISLAAWSHYSH

SEQ ID NO: 104484 - protein, 87 aa, Setaria italica
  Transcript Sequence Number=SeqID_38510
IRYVVAVDSLADLPSCMRSRRGEGLFVATPSDVVRTWSVQEFMPSTLTQLPSSNITKVVFIKCSGRHLTKDLDVITLLTSCIFICMP

SEQ ID NO: 104485 - protein, 297 aa, Setaria italica
  Transcript Sequence Number=SeqID_38511
  Gene Ontology: Mol. function=calcium ion binding
  Homolog annotation: Hit_ID=Q8SAU4; Match level="QueryCoverage=92%, HitCoverage=72%, E-value=1e-122, Identity=70%"; Hit description =Putative calcium-binding protein
FVFPLFIGHVGSIWNDPQVLNEFTHGKQDSVSKSDFQRVLSDILLGMAAGLQRDPIMILRINGEDLNEFLDSSRYEPEAAAMFSQVNPGNNASLRQCLLAALRHLTVDHGMPPASDSWVVENIIEPAMQKLTYDQLDQPVSREAFFQEFKKFLSIVTQRLQQHPVIVAHTENTFDGNGIRRLLSNKFEFDKLLDSVWRDVPKEHKDKTSKEYLRVALDRIADSASLPPYGAVDQVDAVVNEAFKMAKADDGKVVDEAEFKKLLTEILGAIMLQLDGNPISVSTNTVVHEPMSASLPP

SEQ ID NO: 104486 - protein, 108 aa, Setaria italica
  misc_feature (108)..(108): Xaa can be any naturally occurring amino acid
  Transcript Sequence Number=SeqID_38512
  Gene Ontology: Mol. function=sodium:hydrogen antiporter activity; Cellular component=integral to membrane; Biological process=sodium ion transport
  Homolog annotation: Hit_ID=A7X9Z1; Match level="QueryCoverage=67%, HitCoverage=13%, E-value=4e-23, Identity=69%"; Hit description =Sodium/hydrogen exchanger
GRTTNRLDGRTVWEALVAAATVGGTAGSSTTVVSICVFTGVLCLCLVAGHLLEENKWVNESITALIIGCLIGAIIFLLTKGKHSHIMRFDEQLFFIYVLPPIIFNAGX

SEQ ID NO: 104487 - protein, 98 aa, Setaria italica
  misc_feature (69)..(69): Xaa can be any naturally occurring amino acid
  Transcript Sequence Number=SeqID_38513
VAGDDEMLRTGFHNGTPLEAGKIADSQPVDLFAPAPSQQQQQQQEDDDGRGSSRVIAESEPVDLATSAXGVAEAANNGNNPAPPPSQGRQGDGPPVDV

SEQ ID NO: 104488 - protein, 185 aa, Setaria italica
  misc_feature (144)..(144): Xaa can be any naturally occurring amino acid
  Transcript Sequence Number=SeqID_38514
MARPALAFLCCYLLLASVAAARGLGDGEPLGRRKNAARRLRGGEPLGARKNPADPHTSPGTPNCSPAPPQSGGGGYIPPSPSSGVSPTTPGGGGGYYPPSPSVGTSPTTPTTPGGGGGGYYNNPPSPDIGTSPTTPTTPGGGGXGYNAPPSPSSDTSPSTPGSGGGYGAPPSPCSGTSPSTPGGG

SEQ ID NO: 104489 - protein, 91 aa, Setaria italica
  Transcript Sequence Number=SeqID_38515
  Gene Ontology: Mol. function=nucleotide binding; Biological process =defense response
  Homolog annotation: Hit_ID=Q2R8K0; Match level="QueryCoverage=68%, HitCoverage=5%, E-value=6e-15, Identity=62%"; Hit description =Nitrate-induced NOI protein, expressed
MRTEGELVKWLKPLFSNVDEDRGRLKVASILGPAGVGKSTLAQEVYREIGAQFERRAFVRASRVPDARRLLRSMISQVRRHERPPLLVLTP

SEQ ID NO: 104490 - protein, 161 aa, Setaria italica
  Transcript Sequence Number=SeqID_38516
  Gene Ontology: Mol. function=serine-type endopeptidase inhibitor activity; Cellular component=extracellular region
  Homolog annotation: Hit_ID=P81368; Match level="QueryCoverage=72%, HitCoverage=99%, E-value=3e-37, Identity=64%"; Hit description=Alpha- amylase inhibitor 5
  Pfam annotation: Domain name=Tryp_alpha_amyl; Domain location=46-150; Score=38.5; E_value=2.6e-08; Accession=PF00234.14; Description =Protease inhibitorseed storageLTP f
  Subcellular localization annotation: CTP_CleavageSite=86; ConfidenceScore=5.28e-01
MLLHPCAKKLKLATMASISSSSYVILLSAAVLLSALAASSDSTNWCEPGLVIPLNPLQSCRTYLVRRTCGPGRGPFVPLPAIRARCCRELKDIVPYCRCGALRIMMDGMPAGGGVVASPSCSWAAQLDLAATLVSEAECNLVTIHGRPFCYALGAEGTTSG

SEQ ID NO: 104491 - protein, 291 aa, Setaria italica
  misc_feature (29)..(29): Xaa can be any naturally occurring amino acid
  Transcript Sequence Number=SeqID_38517
  Gene Ontology: Mol. function=nucleotidyltransferase activity
KFSTPGVLFDELLQAVEEACLAGVLDEDXFKIPTMIFKSKSNTGTSLSLASSIDGERRKLSPVYCSHSTGDDSQQPHAEEAQVDVGWQQNLPLCSNGSALSSSPLANLDNYPASWFCVSTKSRGTGTYIPKVNYYSYQDRMALEREIMRERKQRQRVPGRQYYSAEQGYSSSQTEHTTAQRETSQSPKKQTSSQQNGYSSKSSVPSEDFVEFKEHVATVDGGTKQAVGSGSVENGRQTRPPSSSGMVLPHNGQGNPSVSNTCQPSSPASAEGSLELGSLGNYVYGYFSVQF

SEQ ID NO: 104492 - protein, 238 aa, Setaria italica
  misc_feature (23)..(23): Xaa can be any naturally occurring amino acid
  misc_feature (175)..(175): Xaa can be any naturally occurring amino acid
  misc_feature (214)..(214): Xaa can be any naturally occurring amino acid
  misc_feature (216)..(216): Xaa can be any naturally occurring amino acid
  Transcript Sequence Number=SeqID_38518
  Gene Ontology: Mol. function=ATPase activity, coupled to transmembrane movement of substances; Cellular component=integral to membrane; Biological process=transport
  Homolog annotation: Hit_ID=Q6YUU5; Match level="QueryCoverage=92%, HitCoverage=17%, E-value=2e-88, Identity=73%"; Hit description =Putative multidrug resistance protein
  Subcellular localization annotation: CTP_CleavageSite=7; ConfidenceScore=5.43e-01
SMSRGFTAASRSSSTRSVGDVKXYGNTENPKLPVPSRRRLLMLNAPEMKQALMGIFSAIVSGSIQPVFAYAMGSVISIYFSTDHQEIKKETRTYALVSVGLAVLTFLISIGQHYNFAAMGEYLTKRIREQMLSKFLTFEIGWFDRDENSSGSICSQLTNDANIVRSLVGDRMSLXQTFSAVLTAYIMGLVIAWRLALVMIAVQPLDITCFYSLXVXMASMSKKSMQAQSECSKLAAEL

SEQ ID NO: 104493 - protein, 135 aa, Setaria italica
  Transcript Sequence Number=SeqID_38519
LTVDYYYSISVNHIYACYKEMELSYIANIGTNYKVVLASLATANKDPSSSFTTPSISSCMACTRTTRRPASPTSLNNSSRNSSSLNMRTRHLSVFLLSRREHSKWSLGASLLAASGFSYSSAMARHTGMELATAA

SEQ ID NO: 104494 - protein, 136 aa, Setaria italica
  Transcript Sequence Number=SeqID_38520
  Subcellular localization annotation: CTP_CleavageSite=96; ConfidenceScore=5.77e-01
SLRLAPTRQATAGHCGPSNSKSSASRGCAWTSEARRPSTLVTSPSSPWTSPSAPWPTRTPRSTACSAPAPATTTTARCVPSGTAGWTTPPWPAPSPCAARWPRTTRSPARPTSWPPATTSSALAGCGGTPVNAWSA

SEQ ID NO: 104495 - protein, 45 aa, Setaria italica
  Transcript Sequence Number=SeqID_38521
  Homolog annotation: Hit_ID=B6SHI8; Match level="QueryCoverage=100%, HitCoverage=7%, E-value=7e-09, Identity=71%"; Hit description=CENP-E like kinetochore protein
VISESAEGKREAIRQLCFSIEHYRSGYQQLRQLLQGHRRPMVMAT

SEQ ID NO: 104496 - protein, 36 aa, Setaria italica
  Transcript Sequence Number=SeqID_38522
TNLTSCVPVDPVECLACQNIIIEVFGCRLTNSRSLG

SEQ ID NO: 104497 - protein, 78 aa, Setaria italica
  Transcript Sequence Number=SeqID_38523
  Subcellular localization annotation: CTP_CleavageSite=61; ConfidenceScore=5.68e-01
AAAAAAGARPPRRGSTTRAAPRTAGRPRAPPWPGARRRGGEGGAPARGTTPRSGASSASPSARAGGSERTGQPRNFDI

SEQ ID NO: 104498 - protein, 303 aa, Setaria italica
  Transcript Sequence Number=SeqID_38524
  Gene Ontology: Mol. function=transferase activity, transferring glycosyl groups; Cellular component=integral to membrane; Biological process=protein amino acid glycosylation
  Homolog annotation: Hit_ID=B6TIX7; Match level="QueryCoverage=99%, HitCoverage=72%, E-value=1e-154, Identity=86%"; Hit description=Beta- 1,3-galactosyltransferase sqv-2
  Pfam annotation: Domain name=Galactosyl_T; Domain location=45-245; Score=181.5; E_value=2.4e-51; Accession=PF01762.13; Description =Galactosyltransferase
STLEMELAVERARSGAAGAGTAVPSKPPQKAFVVIGINTAFSSRKRRDSLRETWVPRGEKLRKLETEKGVVIRFVIGHSGAPGGGALDRALDAEEARDPGDFLRLDHAEGYHELSSKTRIYFTTAVATWDADFYVKVDDDVHLNLGMLSSRLAKHRTRPRVYVGCMKSGPVLSQKGVKYHEPEYWKFGDEGNKYFRHATGQIYAISKDLAAYISINQPILHRFANEDVSLGAWLLGLEVEHVDDRSLCCATPPDCEWKKQAGNVCAASFDWSCSGICKSVDRMRAIHSACGEGDGAVWSAAAI

SEQ ID NO: 104499 - protein, 187 aa, Setaria italica
  Transcript Sequence Number=SeqID_38525
  Gene Ontology: Mol. function=transferase activity, transferring glycosyl groups; Cellular component=integral to membrane; Biological process=protein amino acid glycosylation
  Homolog annotation: Hit_ID=B6TIX7; Match level="QueryCoverage=90%, HitCoverage=40%, E-value=1e-100, Identity=98%"; Hit description=Beta- 1,3-galactosyltransferase sqv-2
  Pfam annotation: Domain name=Galactosyl_T; Domain location=1-130; Score=21.2; E_value=2.7e-08; Accession=PF01762.13; Description =Galactosyltransferase
FTPTAKWLPCTAAGTEDFYVKVDDDVHLNLGMLSSRLAKHRTRPRVYVGCMKSGPVLSQKGVKYHEPEYWKFGDEGNKYFRHATGQIYAISKDLAAYISINQPILHRFANEDVSLGAWLIGLEVEHVDDRSMCCATPPDCEWKKRAGNVCVASFDWSCSGVCKSVDRMRHIHKACGEGEGAVWNVAI

SEQ ID NO: 104500 - protein, 86 aa, Setaria italica
  Transcript Sequence Number=SeqID_38526
  Homolog annotation: Hit_ID=Q2R4R9; Match level="QueryCoverage=98%, HitCoverage=25%, E-value=2e-37, Identity=83%"; Hit description=FHA domain containing protein, expressed
FFCGPQEWVSMNNLHEVMFDKYGNLWHHSRVRKYLTSEDYPGSETDGRPWHGLALLLRKYPEHFVINIRNAGGLSTEFVSLVSLQP

SEQ ID NO: 104501 - protein, 79 aa, Setaria italica
  Transcript Sequence Number=SeqID_38527
  Gene Ontology: Mol. function=peptidase activity; Cellular component =extracellular region; Biological process=defense response
  Homolog annotation: Hit_ID=Q8W4V6; Match level="QueryCoverage=100%, HitCoverage=100%, E-value=8e-16, Identity=54%"; Hit description =Defensin
  Pfam annotation: Domain name=Defensin_2; Domain location=42-76; Score= 12.5; E_value=0.036; Accession=PF01097.10; Description=Arthropod defensin
  Pfam annotation: Domain name=Gamma-thionin; Domain location=33-79; Score=74.5; E_value=3.9e-19; Accession=PF00304.12; Description=Gamma- thionins family
  Pfam annotation: Domain name=SLR1-BP; Domain location=3-79; Score= -6.2; E_value=0.005; Accession=PF07333.4; Description=S locus-related glycoprotein 1 bindin
  Pfam annotation: Domain name=Toxin_2; Domain location=46-73; Score =15.7; E_value=0.069; Accession=PF00451.11; Description=Scorpion short toxin
  Pfam module annotation: Pfam domain module=Defensin_2::Gamma -thionin::SLR1-BP::Toxin_2; Domain location=42-76::33-79::3-79::46-73
MDLSPKFFALLVVIVLLLGSNEMQGPVRVAVARQCQSQSHRYKGPCVHDTNCASVCQTEGFTRGKCVGFRGRCFCLKAC

SEQ ID NO: 104502 - protein, 44 aa, Setaria italica
  Transcript Sequence Number=SeqID_38528
TRRRNLRGRIIITKVDEDGEPIASHNAKIKLVNQIRFWLEITSQ

SEQ ID NO: 104503 - protein, 86 aa, Setaria italica
  Transcript Sequence Number=SeqID_38529
  Gene Ontology: Mol. function=oxidoreductase activity, acting on the CH-OH group of donors, NAD or NADP as acceptor; Cellular component =glycerol-3-phosphate dehydrogenase complex
  Homolog annotation: Hit_ID=Q7XJN4; Match level="QueryCoverage=73%, HitCoverage=14%, E-value=4e-11, Identity=59%"; Hit description =Glycerol-3-phosphate dehydrogenase
DDGDAAAPRRSARKDRRRAVRIAWEKLVRWSRAVRIAWEKRDHRTRRKLVVLGGGSFGTAMAAHVAAKKADLEVSMLVRDDFVCRS

SEQ ID NO: 104504 - protein, 37 aa, Setaria italica
  Transcript Sequence Number=SeqID_38530
PVGHCRPMEISRENVHHLLYKLTNHQGFKFMHVIHGY

SEQ ID NO: 104505 - protein, 112 aa, Setaria italica
  Transcript Sequence Number=SeqID_38531
  Homolog annotation: Hit_ID=B6TS32; Match level="QueryCoverage=93%, HitCoverage=26%, E-value=6e-10, Identity=38%"; Hit description=F-box domain containing protein
VEHSRLCLWSRVAGRPNEHWVWAQTRVIELEKIIPDDDILMSYHLAGYAHGLDVLFIMRFDGLFSVDLKSGRMKRVCRREGIYGVVPYMSFCTPALRVISTGEGPSAGVSSA

SEQ ID NO: 104506 - protein, 63 aa, Setaria italica
  Transcript Sequence Number=SeqID_38532
  Subcellular localization annotation: CTP_CleavageSite=50; ConfidenceScore=5.81e-01
GLQCHCHPLDQAAFLSSSPSPASPSSSSSSLSTRIFLQASSSCRLQESPSCAMRPARRSSLST

SEQ ID NO: 104507 - protein, 117 aa, Setaria italica
  Transcript Sequence Number=SeqID_38533
  Gene Ontology: Mol. function=sugar:hydrogen symporter activity; Cellular component=mitochondrial inner membrane; Biological process =mitochondrial transport
  Homolog annotation: Hit_ID=Q6E5A5; Match level="QueryCoverage=60%, HitCoverage=16%, E-value=2e-34, Identity=97%"; Hit description =Plastidial ADP-glucose transporter
  Pfam annotation: Domain name=Mito_carr; Domain location=7-99; Score =118.9; E_value=1.7e-32; Accession=PF00153.19; Description =Mitochondrial carrier protein
DDRTYGDGRRTLLIGSAAGAIASTATFPLEVARKQMQVGAVGGRQVYRNVLHAMYCILKKEGAAGLYRGLGPSCIKLMPAAGISFMCYEACKKILVDKEDEEEDGEAGDGDEDKKAA

SEQ ID NO: 104508 - protein, 78 aa, Setaria italica
  Transcript Sequence Number=SeqID_38534
  Homolog annotation: Hit_ID=Q0E2Z7; Match level="QueryCoverage=100%, HitCoverage=14%, E-value=5e-30, Identity=78%"; Hit description=DEAD -box ATP-dependent RNA helicase 41
KAAKRVNLPLGDESFCIKDTNFPDIPTLADRRISALRSKLDICVKGDAVPDPIMCFSSCGLPEKLVHNLETAGYCMPT

SEQ ID NO: 104509 - protein, 125 aa, Setaria italica
  misc_feature (43)..(43): Xaa can be any naturally occurring amino acid
  Transcript Sequence Number=SeqID_38535
  Gene Ontology: Mol. function=ubiquitin-protein ligase activity; Cellular component=intracellular; Biological process=ubiquitin -dependent protein catabolic process
  Homolog annotation: Hit_ID=Q9FKD7; Match level="QueryCoverage=87%, HitCoverage=37%, E-value=1e-10, Identity=31%"; Hit description=E3 ubiquitin-protein ligase SINA-like 7
NRVREEGSGRVCTWGQAETAAATSQHRAEKITVTLDADLLQCXCCSGPLTTPLFQCTKGHISCSDCCTDVALDDESECLMCREPETATRCRAMERVLAGLSVPCAFRQHGCAEMIPLRGQSKDPT

SEQ ID NO: 104510 - protein, 188 aa, Setaria italica
  Transcript Sequence Number=SeqID_38536
  Gene Ontology: Mol. function=unfolded protein binding; Cellular component=prefoldin complex; Biological process=regulation of transcription, DNA-dependent
  Homolog annotation: Hit_ID=B6T6M5; Match level="QueryCoverage=87%, HitCoverage=86%, E-value=3e-88, Identity=96%"; Hit description =Mediator complex subunit 10 CG5057-PA
  Pfam annotation: Domain name=Med10; Domain location=41-159; Score =197.6; E_value=3.5e-56; Accession=PF09748.1; Description =Transcription factor subunit Med10
  Subcellular localization annotation: CTP_CleavageSite=9; ConfidenceScore=5.09e-01
MDNAAPNPSAAAAAAGNGVQASGTAGGERPEDASKQNLAQVTSSIQKTLGLLHQLNLTVSSFNSASQLPLLQRLNALVAELDTMQKLAEGCNIQVPMEVVNLIDDGKNPDEFTRDVLNSCIAKNQITKGKTDAFKSLRKHLLEELEQAFPEDVEQYREIRATSAAEAKRLAQSQSSLPNGDVKVKAEH

SEQ ID NO: 104511 - protein, 281 aa, Setaria italica
  Transcript Sequence Number=SeqID_38537
TNTTREHVQQLIGAPVERLVFLFCAVPRHKLIHEELHFRYTDAELTDHLAASDLSIKTARETGTFDTSEAWRKKLCSLLPPKGIEASHFKTGETISLSRRIIALFILMTIADICDQYIDYQDKLYANENGRLEFRGDNWGALWPGTCKPGLWMNAASRLAVLYNLILREEELYMQERNKMGETIRLDRDEEIKLVIPPVFNYCTKVLDPNEQIAARDLYWEAICSDDRKDRDWEKVEKVLLESIKKNPFVGEPHLALTQVYLNMERYEEAKKEAEEGLKLL

SEQ ID NO: 104512 - protein, 146 aa, Setaria italica
  Transcript Sequence Number=SeqID_38538
REDSADSCPCGARYRPPIAEKNVCNFRHAQPEETILVETGVESDPRLHYLLLWRILIVEEVPEVDAGRLGATMSMFQDVIRSVEVPAAASGSGSAALATSTGRSLTVVGVEKTKEATAPGATLGTTPHLAESTQRPVLSPPSDLEF

SEQ ID NO: 104513 - protein, 19 aa, Setaria italica
  Transcript Sequence Number=SeqID_38539
LLVRIQILLKYSGSAISRV

SEQ ID NO: 104514 - protein, 95 aa, Setaria italica
  misc_feature (21)..(21): Xaa can be any naturally occurring amino acid
  misc_feature (54)..(54): Xaa can be any naturally occurring amino acid
  misc_feature (63)..(63): Xaa can be any naturally occurring amino acid
  Transcript Sequence Number=SeqID_38540
  Gene Ontology: Mol. function=helicase activity; Cellular component =nucleus
  Homolog annotation: Hit_ID=Q9AYF0; Match level="QueryCoverage=96%, HitCoverage=6%, E-value=1e-19, Identity=45%"; Hit description =Helicase-like protein
DFDKNISAELPDEKKHLVLHXLVCTHMMHGPCRTLNLHCACMVDGQCRFKYPRXVCDATQQGXDAYPIYRRRHDLAWILETTLAIHHACTMQVES

SEQ ID NO: 104515 - protein, 281 aa, Setaria italica
  Transcript Sequence Number=SeqID_38541
  Gene Ontology: Mol. function=methyltransferase activity; Cellular component=nucleus
  Homolog annotation: Hit_ID=B6U0H4; Match level="QueryCoverage=99%, HitCoverage=57%, E-value=1e-130, Identity=80%"; Hit description=SET domain containing protein
  Pfam annotation: Domain name=SET; Domain location=5-183; Score=58.3; E_value=2.9e-14; Accession=PF00856.20; Description=SET domain
DDVLVQLAQQVPEELWAMKLGLRLLQERARPDSFWWPYIANLPETFTVPIFFPGDDIKNLQYAPLLHQVNKRCCFLLEFEKKVQWMLDTLPLEHHPFYGQDVNSSSLGWAMSASSSRAFRLHGEIPMLLPLIDMCNHSFDPNARIVQEGNVNSSDMSVKVVAETKIEKNAAITLNYGCHPNDFFLLDYGFVIAPNPYDLVELSYDGALFDAASMAAGVSSPNFSAPAKWQQDILSQLNLHGEGAILKVSLGGPDIVDGRLLAALRVLLAADPEAVHKHDLK

SEQ ID NO: 104516 - protein, 145 aa, Setaria italica
  Transcript Sequence Number=SeqID_38542
  Gene Ontology: Cellular component=nucleus
  Homolog annotation: Hit_ID=B6U0H4; Match level="QueryCoverage=96%, HitCoverage=28%, E-value=2e-59, Identity=80%"; Hit description=SET domain containing protein
  Pfam annotation: Domain name=Rubis-subs-bind; Domain location=3-124; Score=107.3; E_value=5.2e-29; Accession=PF09273.3; Description =Rubisco LSMT substrate-binding
HLDFPQQDILSQLNLHGEGAILKVSLGGPDIVDGRLLAALRVLLAADPEAVHKHDLKTMMSLDAQAPLGPTVEASALRTVLALCAIALQHFHTKIMEDEAILKGEPPLTTELAVQFRLQKKFLIVDVMQNISRKIKMLSPQKSTA

SEQ ID NO: 104517 - protein, 36 aa, Setaria italica
  Transcript Sequence Number=SeqID_38543
PSLSLGEATCPPSHVLLYNQPKRLKQYIPRIIHNLT

SEQ ID NO: 104518 - protein, 397 aa, Setaria italica
  misc_feature (378)..(378): Xaa can be any naturally occurring amino acid
  Transcript Sequence Number=SeqID_38544
  Homolog annotation: Hit_ID=Q6XPW9; Match level="QueryCoverage=63%, HitCoverage=68%, E-value=8e-79, Identity=66%"; Hit description =Submergence induced protein SI397
  Pfam annotation: Domain name=DUF904; Domain location=15-78; Score= -12.9; E_value=0.088; Accession=PF06005.4; Description=Protein of unknown function (DUF904)
LRLQELEGLRAQVATLRELEGRVAAAAVEERRLQLKVSTLQDENGRLRAQVEELDTARAELARAKEKLRAIKARVQAEQEEARREAAVLRAKVADLERGGEETAGALAAEIAELRKANAALEEENLELALRLQDAQQAASSVDPVLEEDMAEEARYLRESNERLTRQIEQLHNDHCAHVEELVYLKWVNACLRHELRDHDGHPTTEQQDHHHDDNAGAGDLSALELSKSMSFRSSERAKQLMLRYGHPGLEGFDPALFSPLHESVDGDGHERSPARNYYEPERSPYARSEKTMAASAAAGSAAAAPGKKAGPRKLKFLGNIKKLLPGGKRGHSSHGHGHAGRDSSRKAPAPSDEYLEKAMQWLSAHDAFDGGDHSYEXSPLSSCARTPLSSVTTATT

SEQ ID NO: 104519 - protein, 102 aa, Setaria italica
  Transcript Sequence Number=SeqID_38545
TIVFGGFRSVVRMSRWSHRRVPSVIPENIAILDFKEEEERENNPAGEKKSSKEDTQSVSNEIKFQSPKELSNDKKVNNKSGLGDGKDGLKDLLGQVKTDKDN

SEQ ID NO: 104520 - protein, 135 aa, Setaria italica
  misc_feature (15)..(15): Xaa can be any naturally occurring amino acid
  misc_feature (106)..(106): Xaa can be any naturally occurring amino acid
  misc_feature (127)..(127): Xaa can be any naturally occurring amino acid
  Transcript Sequence Number=SeqID_38546
VSFDERMCTVPEMLXTSDSGSVDCSDAQFSVQHLFRKLGNEEFIGQRIILAVSQKISNASERLLLVDPFDDAFPDIHGNIFIMIQLIEFLITDYMKDWLCCEHFDXRLLEECARSILKARNDLQILXENMNGLYV

SEQ ID NO: 104521 - protein, 73 aa, Setaria italica
  Transcript Sequence Number=SeqID_38547
  Homolog annotation: Hit_ID=B6UDA5; Match level="QueryCoverage=73%, HitCoverage=11%, E-value=2e-10, Identity=66%"; Hit description=Heat shock factor protein 7
GVDPVSRGAAEVKAEPVDAPPDHHHQQLEFKDHATEPPQAWPIYRPRPVYHPLRACNGSAGSAGSDHDGSNSR

SEQ ID NO: 104522 - protein, 238 aa, Setaria italica
  Transcript Sequence Number=SeqID_38548
  Gene Ontology: Mol. function=protein serine/threonine kinase activity; Cellular component=integral to membrane; Biological process=protein amino acid phosphorylation
  Homolog annotation: Hit_ID=B9RVT1; Match level="QueryCoverage=97%, HitCoverage=23%, E-value=4e-87, Identity=65%"; Hit description =Receptor protein kinase CLAVATA1, putative
  Pfam annotation: Domain name=Pkinase; Domain location=2-233; Score =40.5; E_value=6.6e-11; Accession=PF00069.17; Description=Protein kinase domain
  Pfam annotation: Domain name=Pkinase_Tyr; Domain location=3-233; Score=-1.4; E_value=1.2e-13; Accession=PF07714.9; Description =Protein tyrosine kinase
  Pfam module annotation: Pfam domain module=Pkinase::Pkinase_Tyr; Domain location=2-233::3-233
SKRIDSFEAEVATLSKVRHRNIVKLACSITNTVCRLLVYEYMPNGSLGDMLHSAKRSILDWPMRYKIAVNAAEGLSYLHHDCEPPIVHRDVKSNNILLDAEYGAKVADFGVAKTIGDGPATMSVIAGSCGYIAPEYAYSLHVTEKSDIYSFGVVILELVTGMKPMAPEIGEMDLVTWVSANIAQNGLESVLDHTLSEAEQFKDEMCKVLKIALLCVLNIPKSRPPMRAVVKMLLEVKE

SEQ ID NO: 104523 - protein, 295 aa, Setaria italica
  misc_feature (66)..(66): Xaa can be any naturally occurring amino acid
  misc_feature (80)..(80): Xaa can be any naturally occurring amino acid
  Transcript Sequence Number=SeqID_38549
  Gene Ontology: Mol. function=protein serine/threonine kinase activity; Cellular component=plasma membrane; Biological process =protein amino acid phosphorylation
  Homolog annotation: Hit_ID=A2Q515; Match level="QueryCoverage=98%, HitCoverage=30%, E-value=6e-50, Identity=39%"; Hit description =Protein kinase
  Pfam annotation: Domain name=LRR_1; Domain location=113-135; Score =15.7; E_value=0.2; Accession=PF00560.25; Description=Leucine Rich Repeat
  Pfam annotation: Domain name=LRR_1; Domain location=18-40; Score =13.2; E_value=0.89; Accession=PF00560.25; Description=Leucine Rich Repeat
  Pfam annotation: Domain name=LRR_1; Domain location=42-64; Score =16.1; E_value=0.15; Accession=PF00560.25; Description=Leucine Rich Repeat
  Pfam annotation: Domain name=LRR_1; Domain location=66-88; Score =12.9; E_value=1; Accession=PF00560.25; Description=Leucine Rich Repeat
  Pfam annotation: Domain name=LRR_1; Domain location=90-112; Score =14.2; E_value=0.54; Accession=PF00560.25; Description=Leucine Rich Repeat
  Pfam module annotation: Pfam domain module=LRR_1::LRR_1::LRR_1::LRR _1::LRR_1; Domain location=113-135::18-40::42-64::66-88::90-112
  Subcellular localization annotation: CTP_CleavageSite=18; ConfidenceScore=5.07e-01
QDNRFTGALPAKLGTLTNLQEFKASNNCFSGPLPPSLANLSLLDNLDLSHNSFSGEIPRDFGKLKXLSQLYLSDNHLSGXLPSELGDIIGMNTLDLSNNELSGQLPVQLQNLKLTHFNISYNKLSGTIPVLFNGLEYQESFLGNPGLCHGFCQSNGDPDAKGHNTIKLIVYIFIAAAIILLIGLAWFGYKCRLHKINASELDDGKSSWVLTSYHRVDFSERDIVNSLDESNVIGQGGAGKVYKAVVRPEGEAMAVKKLWPLGVASKRIDSFEAEVATLSKVRHRNIVKLACRLCL

SEQ ID NO: 104524 - protein, 46 aa, Setaria italica
  Transcript Sequence Number=SeqID_38550
KKNAITRHYCFIHQAFPKNNSEVRCLSKLQTPTCHKVYPQLAMQKC

SEQ ID NO: 104525 - protein, 106 aa, Setaria italica
  Transcript Sequence Number=SeqID_38551
  Subcellular localization annotation: CTP_CleavageSite=63; ConfidenceScore=5.22e-01
PTLSSEAPLLSSVVLSPAKVPGGWRATVAHQGPLRPLRRPRALGGEAAQRCVCWPLENPNRLRCSFLQKLAPKSKSLRTKIQAQFLSTLPASSMHAISKAIHEAAG

SEQ ID NO: 104526 - protein, 186 aa, Setaria italica
  misc_feature (164)..(164): Xaa can be any naturally occurring amino acid
  Transcript Sequence Number=SeqID_38552
  Gene Ontology: Mol. function=glutamate-tRNA ligase activity; Cellular component=cytoplasm; Biological process=tRNA aminoacylation for protein translation
  Homolog annotation: Hit_ID=B6SRU1; Match level="QueryCoverage=100%, HitCoverage=26%, E-value=2e-87, Identity=84%"; Hit description =Glutamyl-tRNA synthetase, cytoplasmic
  Pfam annotation: Domain name=tRNA-synt_1c; Domain location=1-161; Score=-11.2; E_value=1.3e-14; Accession=PF00749.13; Description=tRNA synthetases class I (E and Q), catalytic domain
MGMTTPNKSLRDPVYYRCNTVPHHRVGSKYKVYPTYDFACPFVDALEGVTHALRSSEYHDRNAQYYRILQDMGLRRVEIFEFSRLNMVYTLLSKRKLLGFVQNKKVDGWTDPRFPTIQGIVRRGLKIEALTQFILEQGASKNLNLMEWDKLWTINKKIICIPLXCLFVRLVSQRVLLTLTNGPEEP

SEQ ID NO: 104527 - protein, 101 aa, Setaria italica
  Transcript Sequence Number=SeqID_38553
  Gene Ontology: Mol. function=binding; Cellular component=integral to membrane; Biological process=protein insertion into membrane
  Homolog annotation: Hit_ID=B9RFU8; Match level="QueryCoverage=88%, HitCoverage=16%, E-value=1e-14, Identity=43%"; Hit description =Cytochrome oxidase biogenesis protein, putative
  Pfam annotation: Domain name=TPR_1; Domain location=48-81; Score =12.6; E_value=0.18; Accession=PF00515.20; Description=Tetratricopepti de repeat
  Pfam annotation: Domain name=TPR_1; Domain location=6-39; Score=12.2; E_value=0.2; Accession=PF00515.20; Description=Tetratricopeptide repeat
  Pfam annotation: Domain name=TPR_2; Domain location=48-81; Score =15.5; E_value=0.22; Accession=PF07719.9; Description=Tetratricopeptid e repeat
  Pfam annotation: Domain name=TPR_2; Domain location=6-39; Score=20.6; E_value=0.0064; Accession=PF07719.9; Description=Tetratricopeptide repeat
  Pfam module annotation: Pfam domain module=TPR_1::TPR_1::TPR_2::TPR _2; Domain location=48-81::6-39::48-81::6-39
DDPLLVLALFRAGLSHERQGDNEMAIKLLQRIAELKEPEKPINKTCYFQGMVILGSILSREGRNSEAAKYLQMAIAYDPSVERLLKECEEGMDDQPKSEEK

SEQ ID NO: 104528 - protein, 95 aa, Setaria italica
  Transcript Sequence Number=SeqID_38554
  Gene Ontology: Mol. function=peptidase activity; Biological process =lipid transport
  Homolog annotation: Hit_ID=B6SQH2; Match level="QueryCoverage=88%, HitCoverage=59%, E-value=6e-27, Identity=72%"; Hit description =Cortical cell-delineating protein
  Pfam annotation: Domain name=Tryp_alpha_amyl; Domain location=11-92; Score=66.0; E_value=1.4e-16; Accession=PF00234.14; Description =Protease inhibitorseed storageLTP f
GGGGGNSSSSCPIDTLKLEVCADVLQLLRLNIGVPDDEQCCPLLQGLADLDAAVCLCLAVRANVLGIVLDIPVDLTLLLNYCHKDRVAGFICPAN

SEQ ID NO: 104529 - protein, 34 aa, Setaria italica
  Transcript Sequence Number=SeqID_38555
FKVQTDDGKAVMAYNVAPANWQFGCTYQASVNFY

SEQ ID NO: 104530 - protein, 114 aa, Setaria italica
  Transcript Sequence Number=SeqID_38556
VICVLFSPLIARRLNGCYNLCQGAENAKIWCPVCQKGELRDTHNLIYCTLCDLRLDLGEDKITLEFLRERLANAHTEHFDRGCKSVPKFCLQTMFGLTALYMQCEECSTFDIVV

SEQ ID NO: 104531 - protein, 89 aa, Setaria italica
  Transcript Sequence Number=SeqID_38557
  Subcellular localization annotation: CTP_CleavageSite=76; ConfidenceScore=5.63e-01
YDEPGPASSFSNNTMNLGQQAVLSNTTMPYGSTSGAAWRPLQLRNSALVNMSQQRQYVHMMMQYSMMRGAVPYHLRQEAAAAAAAASST

SEQ ID NO: 104532 - protein, 34 aa, Setaria italica
  Transcript Sequence Number=SeqID_38558
TSFQCLHIHQILQNAASLSYNCSQVQFSDGYFIH

SEQ ID NO: 104533 - protein, 188 aa, Setaria italica
  misc_feature (69)..(69): Xaa can be any naturally occurring amino acid
  Transcript Sequence Number=SeqID_38559
  Homolog annotation: Hit_ID=B9FJ44; Match level="QueryCoverage=94%, HitCoverage=17%, E-value=3e-23, Identity=34%"; Hit description =Cytosine-specific methyltransferase
MHKAGSDTPPRKHKLASEPSLERVDAVLHNSGLVSANKVVNEMPLELQAAASQPPKAKRARVSPREMLXNLRRAEDDSSSISELPMAKVTSDPENKPKLILDKYSTDSEMVDGEDGSCFFMGEAVPHEEARHRWPNRYGSDHCLLKKDKWRNTQTFSNAGKAVFDVKCHYLRASVCGFPSGPLINAQS

SEQ ID NO: 104534 - protein, 205 aa, Setaria italica
  Transcript Sequence Number=SeqID_38560
  Gene Ontology: Mol. function=DNA (cytosine-5-)-methyltransferase activity; Cellular component=chromatin; Biological process =regulation of transcription, DNA-dependent
  Homolog annotation: Hit_ID=C0SQ91; Match level="QueryCoverage=93%, HitCoverage=25%, E-value=1e-76, Identity=72%"; Hit description =Chromomethylase OsMET2c (Fragment)
  Pfam annotation: Domain name=BAH; Domain location=26-135; Score=58.4; E_value=2.6e-14; Accession=PF01426.10; Description=BAH domain
KFYIYSAGKAVFDVKCHYLRASVCGSTLCIGDCAFIKGPEGKPHYIGRLLEFFETSAGQYYFSVQWFFRAEDTVMEDQAQAHDPRRLFYSDLKDDNLLDCIVSKVTIVQVSPSVNEKSQSIPSFHYYYDMKYSLDYSTFSNMEMGDANETLQSHHTSGNDNVKRIDSTEKQKSPAPEMRELSLLDLYCGCGGVSTGLLGTFVLWG

SEQ ID NO: 104535 - protein, 109 aa, Setaria italica
  misc_feature (71)..(71): Xaa can be any naturally occurring amino acid
  Transcript Sequence Number=SeqID_38561
  Gene Ontology: Cellular component=integral to membrane; Biological process=transport
  Homolog annotation: Hit_ID=B6TXS8; Match level="QueryCoverage=89%, HitCoverage=27%, E-value=1e-31, Identity=71%"; Hit description =Solute carrier family 35, member F1
MQIQEKIPLLGDALVIAGTVCYAFSNVGEEYCIKKKDQQVEVVAMLGFFGLLVSTVQVYIFEKKSLEVITXSLTMIGLFAVYALAFSVFYTVTPYVLKVFSICWKCRMF

SEQ ID NO: 104536 - protein, 48 aa, Setaria italica
  Transcript Sequence Number=SeqID_38562
  Subcellular localization annotation: CTP_CleavageSite=18; ConfidenceScore=5.26e-01
HANGVQSFSSDMMASRSQASLSSGIILPSSTKSMPSTVYLSSVIVVGT

SEQ ID NO: 104537 - protein, 338 aa, Setaria italica
  Transcript Sequence Number=SeqID_38563
  Gene Ontology: Mol. function=nucleic acid binding; Cellular component= cytoplasm; Biological process=multicellular organismal development
  Homolog annotation: Hit_ID=Q851R2; Match level="QueryCoverage=99%, HitCoverage=32%, E-value=1e-141, Identity=71%"; Hit description =Protein argonaute MEL1
  Pfam annotation: Domain name=Piwi; Domain location=1-303; Score =416.7; E_value=3.7e-122; Accession=PF02171.9; Description=Piwi domain
VKKKLCETELDIVSQCINPKSPKNKQYFENVALKINVKVGGCNTLLEMPKGIPFVPDAPTIIFGADVTHPVAGEDSSASIAAVVASMDWPEITTYKALVSAQEHRQEIIQNLFWTTTDPEKGTAVNGGMIRELLLSFYKKTGQKPKRIIFYRDGVSEGQFSHVLLYEMDAIRKACASMEQGYLPPVTFVVVQKRHHTRLFPDHRRRDLTDRSGNILPGTVVDTDVCHPSEFDFYLCSHAGIQGTSRPTHYHVLCDENHFSADALQMLTNNLCYTYACCTRSISVVPPAYYAHLAASRARYYDEQAEGADGASVASGGPAAFRQLPQVKDKVKEVMFFC

SEQ ID NO: 104538 - protein, 92 aa, Setaria italica
  Transcript Sequence Number=SeqID_38564
MEAKLSSNVCKILMVAVTMVALLSPTGESVKYGMCQTRCLEIQPNCDAWCKRIGYPNGGECVEPHNIDCCCWEIPPSAKSNGTATLLQPLHM

SEQ ID NO: 104539 - protein, 174 aa, Setaria italica
  Transcript Sequence Number=SeqID_38565
  Gene Ontology: Mol. function=protein transporter activity; Cellular component=mitochondrial inner membrane; Biological process=protein transport
  Homolog annotation: Hit_ID=B6TTP4; Match level="QueryCoverage=100%, HitCoverage=100%, E-value=9e-60, Identity=68%"; Hit description =Stress-inducible membrane pore protein
  Pfam annotation: Domain name=Tim17; Domain location=21-174; Score =149.2; E_value=1.3e-41; Accession=PF02466.11; Description =Tim17Tim22Tim23 family
MSRLDTRTLKDELTNMDRRPLLDLGHPLLNRVADSFIRAAGVGAARAVSREAYFVTVEGLSGDSAGLDPNGGKRSHFSSIRGDDSQKSLDAVVKTAGKEAFQWGLAAGVYSGLTYGLREARGCHDWKNSAIAGAIAGAAVALTGDAGGHSDKLVHFAITGAALSSAASLLSGVF

SEQ ID NO: 104540 - protein, 67 aa, Setaria italica
  misc_feature (1)..(6): Xaa can be any naturally occurring amino acid
  misc_feature (11)..(11): Xaa can be any naturally occurring amino acid
  misc_feature (13)..(13): Xaa can be any naturally occurring amino acid
  Transcript Sequence Number=SeqID_38566
XXXXXXSSFSXFXLFSLMVFIHVKNERICMNCLWLTTSITSFDEQCVYVCILLPALRHLHKQYACSS

SEQ ID NO: 104541 - protein, 325 aa, Setaria italica
  Transcript Sequence Number=SeqID_38567
  Gene Ontology: Mol. function=protein binding; Biological process =ubiquitin-dependent protein catabolic process
  Homolog annotation: Hit_ID=B6U845; Match level="QueryCoverage=100%, HitCoverage=100%, E-value=1e-151, Identity=82%"; Hit description =Ubiquitin-protein ligase
  Pfam annotation: Domain name=F-box; Domain location=11-59; Score =22.3; E_value=0.002; Accession=PF00646.25; Description=F-box domain
MGECEDAEEYRCWEELLPDALGLIFRNLPLQEVLTVVPRVCKSWGRVVAGPYCWQEIDIEEWSQQQSKPEQIGRMVEMLVGRSGGSCRRISVSGLPCDPLLSFIGDRARALRALEIPRSEISDSIVETVAPRLSNVTFLDISSCTKIGARALEAFGKHCKSLVGLRRVMHPIDLVDKECQHDEAHAIARSMPKLRHLEMGYMLIRTEAVAEILGQCRDLKFLDLRGCWAVDDKLLRERHPGLRVLGPRVEDCYENTYWEECSDYSDDDSSIYSWEFMDDVDGYYAVGSDDEAIWDDGQGLENLEVRFYGGGFSESLAGFDWPPSP

SEQ ID NO: 104542 - protein, 214 aa, Setaria italica
  misc_feature (166)..(166): Xaa can be any naturally occurring amino acid
  misc_feature (190)..(190): Xaa can be any naturally occurring amino acid
  misc_feature (208)..(208): Xaa can be any naturally occurring amino acid
  Transcript Sequence Number=SeqID_38568
  Gene Ontology: Mol. function=Rab GTPase activator activity; Cellular component=intracellular; Biological process=regulation of Rab GTPase activity
  Homolog annotation: Hit_ID=A0B9X8; Match level="QueryCoverage=92%, HitCoverage=43%, E-value=2e-97, Identity=88%"; Hit description =OSIGBa0135C09.4 protein
GSDDDGDGEGAGAAGPSRAHLVAEFKVALERKVVDLAELRRLACQGVPDAAGLRPVVWKLLLGYLPTDHALWPYELEKKRSQYSAFKDELLVNPSEVTRRMEEMTVSKREDHNAEGTGVLPRAEIVRDEHPLSLGKTSVWNQYFQESEIIEQIDRDVKRTHPEMEXFFNGDSSDSLSNQESLRRILTIFXSINPGIRYVQGMNEVLAXPLYYVF

SEQ ID NO: 104543 - protein, 180 aa, Setaria italica
  Transcript Sequence Number=SeqID_38569
  Gene Ontology: Mol. function=Rab GTPase activator activity; Cellular component=intracellular; Biological process=regulation of Rab GTPase activity
  Homolog annotation: Hit_ID=A0B9X8; Match level="QueryCoverage=99%, HitCoverage=39%, E-value=3e-96, Identity=92%"; Hit description =OSIGBa0135C09.4 protein
TNIRYVQGMNEVLAPLYYVFKNDPDEGHAASAEADAFFCFVELLSGFRDNFCKQLDNSVVGIRSTITRLSQLLKRHDEELWRHLEVVTKVNPQFYAFRWITLLLTQEFKFRDCLHLWDTILGDPEGPQATLLRICCAMLILVRRRLLAGDFTANLKLLQSYPPTNIDHLLHIANKLRGPL

SEQ ID NO: 104544 - protein, 138 aa, Setaria italica
  Transcript Sequence Number=SeqID_38570
VVLHKVPSSLLGQQLQHREKEGVPYQLNQFRPSSTQKDHLVFQKQNFCHLHQTTSQIMNISQPVSMSKYKDHSLKFPGSKGNEGLLIPTTKNIHGSQMFISASSKYEMFQSETNHTSSIQALDSYTSSKVRRREKALP

SEQ ID NO: 104545 - protein, 197 aa, Setaria italica
  Transcript Sequence Number=SeqID_38571
  Homolog annotation: Hit_ID=B6TX94; Match level="QueryCoverage=100%, HitCoverage=61%, E-value=9e-46, Identity=47%"; Hit description=Cupin, RmlC-type
  Pfam annotation: Domain name=DUF1637; Domain location=1-196; Score =232.0; E_value=1.5e-66; Accession=PF07847.4; Description=Protein of unknown function (DUF1637)
MDTIRPDDVGLWDEISFFNEMNTHRHQNPPIITCKTIHQCNNFTIAVFFLPLRSVMPLHDHPGMTVFSKLLIGSARLEAYDWVRPRILTTLGPHMLVEKVRDRNVTAASDTWVLFPDGGGNLHRFTATGEEHCALLDVLTPPYAPAEQRACTYYQESSHERSVMRGGRMSRLVWLKEVPVPRNLRIVNLRFQGSQIL

SEQ ID NO: 104546 - protein, 141 aa, Setaria italica
  Transcript Sequence Number=SeqID_38572
  Homolog annotation: Hit_ID=C0L973; Match level="QueryCoverage=51%, HitCoverage=43%, E-value=1e-14, Identity=63%"; Hit description=Delta- coixin
  Subcellular localization annotation: CTP_CleavageSite=70; ConfidenceScore=5.52e-01
MASRIALVVLLALSAVATTTATCPQNFPLMMGIGMMDPCMQSCMMQQPFTMVSSFSPIMGMGSMVPCMQSCMMQRAFTIGGSPLLAMLMQQSPLAMLQQQCCMQSMMQGMMSPQCHCGAMCQMMHLQQIRMAMQLPFMWNT

SEQ ID NO: 104547 - protein, 70 aa, Setaria italica
  misc_feature (9)..(9): Xaa can be any naturally occurring amino acid
  Transcript Sequence Number=SeqID_38573
  Homolog annotation: Hit_ID=B6TVN4; Match level="QueryCoverage=78%, HitCoverage=13%, E-value=1e-17, Identity=76%"; Hit description =Phospholipase C
  Subcellular localization annotation: CTP_CleavageSite=41; ConfidenceScore=5.12e-01
RSDKANGGXVCGCGSISACNANGTCTPRHGKTPKGIFNASSAAAAWRPPPVLQWQRLVLLPALLAVLLGQ

SEQ ID NO: 104548 - protein, 98 aa, Setaria italica
  Transcript Sequence Number=SeqID_38574
MVVSTFTGPGIGIGFGVGCGFGVGWGFGGMPLNMFGLGIGGGCGVGLGLGWGFGNAYGCQYRSSRVQFQGIEFQKKAEGDEASKVVPPEIAEKSRPCG

SEQ ID NO: 104549 - protein, 69 aa, Setaria italica
  Transcript Sequence Number=SeqID_38575
  Gene Ontology: Mol. function=metal ion binding; Biological process =metal ion transport
  Homolog annotation: Hit_ID=Q7FNW1; Match level="QueryCoverage=100%, HitCoverage=100%, E-value=1e-21, Identity=75%"; Hit description=ATX protein
  Pfam annotation: Domain name=HMA; Domain location=5-65; Score=31.2; E_ value=4.2e-06; Accession=PF00403.18; Description=Heavy-metal -associated domain
MAVVELKVGMHCERCIKAIKKAIKTIDDMESYQLETEINKVTVTGNVTSEEVVKALHKIGKTATCWAED

SEQ ID NO: 104550 - protein, 51 aa, Setaria italica
  Transcript Sequence Number=SeqID_38576
KGWMKGYTTNMLLPSFPIVGRFSFSKYIDFIMYLDIIYIYMPNKNYVSGKV

SEQ ID NO: 104551 - protein, 82 aa, Setaria italica
  misc_feature (80)..(80): Xaa can be any naturally occurring amino acid
  Transcript Sequence Number=SeqID_38577
  Gene Ontology: Mol. function=protein kinase activity; Cellular component=intracellular; Biological process=protein amino acid phosphorylation
  Homolog annotation: Hit_ID=A3FK65; Match level="QueryCoverage=98%, HitCoverage=15%, E-value=2e-40, Identity=91%"; Hit description =Mitogen-activated protein kinase kinase 3
CTVTYMSPERIRIENYSYAADIWSLGLTILECATGKFPYDVNEGPANLMLQILDDPSPTPPQDAYSSEFCSFVNDCLQKXAD

SEQ ID NO: 104552 - protein, 155 aa, Setaria italica
  misc_feature (91)..(91): Xaa can be any naturally occurring amino acid
  misc_feature (127)..(127): Xaa can be any naturally occurring amino acid
  Transcript Sequence Number=SeqID_38578
  Gene Ontology: Mol. function=protein serine/threonine kinase activity; Cellular component=intracellular; Biological process =protein amino acid phosphorylation
  Homolog annotation: Hit_ID=A3FK65; Match level="QueryCoverage=92%, HitCoverage=28%, E-value=1e-72, Identity=89%"; Hit description =Mitogen-activated protein kinase kinase 3
  Pfam annotation: Domain name=Pkinase; Domain location=1-155; Score =11.5; E_value=3.5e-09; Accession=PF00069.17; Description=Protein kinase domain
  Pfam annotation: Domain name=Pkinase_Tyr; Domain location=1-155; Score=-124.4; E_value=1.9e-05; Accession=PF07714.9; Description =Protein tyrosine kinase
  Pfam module annotation: Pfam domain module=Pkinase::Pkinase_Tyr; Domain location=1-155::1-155
FYMPDSGEISIALEYMDGGSLADVIRVKKSIPELVLSHMLQKVLLGLRYLHEVRHLVHRDIKPANLLVNLKGEAKITDFGVSAGLDNTMAXGTVTYMSPERIRNENYSYAADIWSLGLTILECATGXFPYDVNEGPANLMLQDLTSSMQELEVAF

SEQ ID NO: 104553 - protein, 66 aa, Setaria italica
  Transcript Sequence Number=SeqID_38579
  Gene Ontology: Mol. function=protein serine/threonine kinase activity; Cellular component=intracellular; Biological process =protein amino acid phosphorylation
  Homolog annotation: Hit_ID=A3FK65; Match level="QueryCoverage=90%, HitCoverage=11%, E-value=9e-27, Identity=90%"; Hit description =Mitogen-activated protein kinase kinase 3
MFQCATFVGTVTYMSPERIRIENYSYAADIWSLGLTILECATGKFPYDVNEGPANLMLQVSRLLVA

SEQ ID NO: 104554 - protein, 431 aa, Setaria italica
  Transcript Sequence Number=SeqID_38580
  Gene Ontology: Mol. function=protein serine/threonine kinase activity; Cellular component=intracellular; Biological process =protein amino acid phosphorylation
  Homolog annotation: Hit_ID=A3FK65; Match level="QueryCoverage=100%, HitCoverage=82%, E-value=0.0, Identity=89%"; Hit description=Mitogen- activated protein kinase kinase 3
  Pfam annotation: Domain name=Pkinase; Domain location=1-251; Score =200.0; E_value=6.3e-57; Accession=PF00069.17; Description=Protein kinase domain
  Pfam annotation: Domain name=Pkinase_Tyr; Domain location=1-251; Score=-1.3; E_value=1.2e-13; Accession=PF07714.9; Description =Protein tyrosine kinase
  Pfam module annotation: Pfam domain module=Pkinase::Pkinase_Tyr; Domain location=1-251::1-251
IGNGASSVVERAIFIPVHRILALKKINIFEKEKRQQILNEMRTLCEPCCYPGLVEFQGAFYMPDSGEISIALEYMDGGSLADVIRVKKSIPEPVLSHMLQKVLLGLRYLHEVRHLVHRDIKPANLLVNLKGEAKITDFGVSAGLDNTMAMCATFVGTVTYMSPERIRIENYSYAADIWSLGLTILECATGKFPYDVNEGPANLMLQILDDPSPTPPQDAYSSEFCSFVNDCLQKDADARPTCEQLLSHPFIKRYLKTDVDLAAYVKSVVDPTERLKQIAEMLAIHYYLLFNGSDGIWHHMKTFYMEQSTFSFSGKVYVGQNDIFDSLSNIRKKLKGDRPREKIVHVVEKLHCRANGDSGVAIRVSGSFIVGNQVLVCGDGVKAEGMPSLDELSIDIPSKRVGQFREQFIMQPGNLMSCYYISKQDLYIIQS

SEQ ID NO: 104555 - protein, 81 aa, Setaria italica
  Transcript Sequence Number=SeqID_38581
SKNNTNSDVAKPAAATRPQPQQQSGMLHFDEDGSAGMGAQANLGDARLERLVFKHRNASPRFSTESVQSSFLERTLEIRDR

SEQ ID NO: 104556 - protein, 67 aa, Setaria italica
  misc_feature (25)..(25): Xaa can be any naturally occurring amino acid
  misc_feature (30)..(30): Xaa can be any naturally occurring amino acid
  Transcript Sequence Number=SeqID_38582
  Homolog annotation: Hit_ID=B6T4H2; Match level="QueryCoverage=92%, HitCoverage=14%, E-value=2e-11, Identity=58%"; Hit description=F-box domain containing protein
WDNARFVFLEMFGTVVSCLVVRQAXSLYEXRTPEDKELVSVRPLLLMWHPVFPLMKNGCNQKELCTA

SEQ ID NO: 104557 - protein, 68 aa, Setaria italica
  Transcript Sequence Number=SeqID_38583
RRRAARRRRTGAGRRPRSMATRPAEVWNEGTKQQAPALNPDHSRVCSRKRKATGARNDEWVRGRSRAL

SEQ ID NO: 104558 - protein, 93 aa, Setaria italica
  misc_feature (91)..(91): Xaa can be any naturally occurring amino acid
  Transcript Sequence Number=SeqID_38584
ELRQNSAKLFKPVGSLCRTAIWNRMYNMHAQSSFKSYPRKGEEMKQRLLTVPLVLWSIIVWSFCIYRDKSRLYKTTVNIEVHRYLPKEKKXKN

SEQ ID NO: 104559 - protein, 32 aa, Setaria italica
  Transcript Sequence Number=SeqID_38585
RAGVPPPPQVARWGDESAKIAVVCTAITDLIK

SEQ ID NO: 104560 - protein, 96 aa, Setaria italica
  Transcript Sequence Number=SeqID_38586
  Gene Ontology: Mol. function=catalytic activity; Biological process =cellular metabolic process
  Homolog annotation: Hit_ID=B6TUD3; Match level="QueryCoverage=93%, HitCoverage=24%, E-value=9e-20, Identity=64%"; Hit description =Dihydroflavonol-4-reductase
RRQRTYLMESPRAEGRYLCAAGGHRMAEVARLLASRYPPFKPSERLSRDFDASSSSVVSSKRLTDLGFRFEHGVADIVKDCVAQCLDHGFLEHPGT

SEQ ID NO: 104561 - protein, 168 aa, Setaria italica
  misc_feature (134)..(134): Xaa can be any naturally occurring amino acid
  Transcript Sequence Number=SeqID_38587
  Gene Ontology: Mol. function=catalytic activity; Biological process =DNA integration
  Homolog annotation: Hit_ID=B8B5M4; Match level="QueryCoverage=37%, HitCoverage=13%, E-value=2e-09, Identity=55%"; Hit description =Superoxide dismutase [Cu-Zn]
IKVVAVGRDTIHELLMGTIREVKFSNKDCKLDCKDLHWSTCKIKKVGIGGPLIDFDGSFVGMNFYDESSATPFLPRSKVVHALRSAYNSILPSERGCNPRAINVAGRQTSSICSFFYVCGLNYFIQQLTYIAGXILDDRWPVSKPYWSHGALDVDMYDVPKHTGRTFL

SEQ ID NO: 104562 - protein, 234 aa, Setaria italica
  misc_feature (93)..(93): Xaa can be any naturally occurring amino acid
  Transcript Sequence Number=SeqID_38588
  Gene Ontology: Mol. function=catalytic activity
WPKALIPKGISRGLKNVEIHASRAALADFEKKLCDIEEQRFGTLPDREISSIPFEEKPFGDKIARDHEICRFSIVSIALFDGDCFGENMLFCXSGIALPRGTARLDLTRFVTSAYLVRVFNERRNRDDKLRVQVRLPDGTTTDGLLGLYDHDIAIVTSISHLDVCPVDLNIDDCPDGLHHARAVGRAFESGRLMAMPVSLLDRIVVSDRLFVSDKFFIQIVKVKVIRRYVVDLL

SEQ ID NO: 104563 - protein, 224 aa, Setaria italica
  misc_feature (110)..(110): Xaa can be any naturally occurring amino acid
  Transcript Sequence Number=SeqID_38589
  Gene Ontology: Mol. function=catalytic activity; Cellular component =nucleus; Biological process=ribosome biogenesis
  Homolog annotation: Hit_ID=Q8H7V4; Match level="QueryCoverage=87%, HitCoverage=9%, E-value=1e-26, Identity=43%"; Hit description =Putative polyprotein from transposon TNT
GRLLNQFEERFGELRAWKWYPFGAPHQILERVWDQLEGGVVANISRRVVALASFNGYVRSFACTGLLIKWCRSRATHTVVLTSASLVRSHLNEDDIDENLRIEVFLPPNXRCDGTLELYNLHCNIAIVSIKKGFNSIHPEDIFNKGKQKLSIKVVAVGRDTIHELLMGTIREVKFSNKDCKLDCKDLHWSTCKIKKVSVEFLSLWFQASLFIKLLHYILSSLFN

SEQ ID NO: 104564 - protein, 323 aa, Setaria italica
  misc_feature (19)..(19): Xaa can be any naturally occurring amino acid
  misc_feature (160)..(160): Xaa can be any naturally occurring amino acid
  Transcript Sequence Number=SeqID_38590
  Gene Ontology: Mol. function=catalytic activity; Cellular component =nucleus; Biological process=ribosome biogenesis
  Homolog annotation: Hit_ID=Q8H7V4; Match level="QueryCoverage=72%, HitCoverage=25%, E-value=5e-38, Identity=39%"; Hit description =Putative polyprotein from transposon TNT
GILCTRLELLLACNPKKLXSRDYSLPSGVSSIIPSGFMKTIYRLRSFGYPVRLLNQFEERFGELRAWKWYPFGAPHQILERVWDQLEGGVVANISRRVVALASFNGYVRSFACTGLLIKWCRSRATHTVVLTSASLVRSHLNEDDIDENLRIEVFLPPNXRCDGTLELYNLHCNIAIVSIKKGFNSIHPEDIFNKGKQKLSIKVVAVGRDTIHELLMGTIREVKFSNKDCKLDCKDLHWSTCKIKKVGIGGPLIDFDGSFVGMNFYDESSATPFLPRSKVVHALRSAYNSILPSERGCNPRAINVVSRGRKTQVSKKRGRYFG

SEQ ID NO: 104565 - protein, 102 aa, Setaria italica
  Transcript Sequence Number=SeqID_38591
  Gene Ontology: Mol. function=catalytic activity; Biological process =metabolic process
  Homolog annotation: Hit_ID=B9RN19; Match level="QueryCoverage=98%, HitCoverage=35%, E-value=3e-29, Identity=64%"; Hit description =Catalytic, putative
QPKSPILCKPSIEAMKAAIQIANVDPKKDQHFDDSTRNIASGKAAGFHTVVVGRWTLVPGADHALESIHNIKEALPDIWDGQDRSESDVVLTSSSVETAVVA

SEQ ID NO: 104566 - protein, 77 aa, Setaria italica
  Transcript Sequence Number=SeqID_38592
  Gene Ontology: Mol. function=electron carrier activity; Biological process=oxidation reduction
  Homolog annotation: Hit_ID=B6ST66; Match level="QueryCoverage=71%, HitCoverage=10%, E-value=1e-14, Identity=70%"; Hit description =Cytochrome P450 CYP92C5
PAYNLAMKEMAATLANLVHGFTWRLPDGVAPKDVSMEECFGLTASRKVPLVAVAEAAGAPVRRRRLIVQLKFEDISL

SEQ ID NO: 104567 - protein, 150 aa, Setaria italica
  misc_feature (72)..(72): Xaa can be any naturally occurring amino acid
  Transcript Sequence Number=SeqID_38593
  Homolog annotation: Hit_ID=B6T476; Match level="QueryCoverage=60%, HitCoverage=49%, E-value=5e-13, Identity=46%"; Hit description =Membrane protein
MAAGYKAAGKAVAVVLAMAALLAAAARAADDDDDHPWKCFRSCTKACHHHDAVAANKECNVSAVVSGECKGXCHDDDCFEDVPTMGYPQCVYTACLSYPRHRREKRACLKKCCEKCFRHSPPAPGPSPTPEPPSPTPPSPTPEPPSPTPP

SEQ ID NO: 104568 - protein, 171 aa, Setaria italica
  Transcript Sequence Number=SeqID_38594
MEHCYLRQPLSRAEAMPERRSRFWPMDSPPTPRAEVICPQPRRATRIPYAVETVNRASPKANGAFPLYRSDSTSDVLDLILSKNDPDGYSSSQVGFLCGSPPVRTNNPVIHDPLFGERVPSFSPLGSSFGKTLAGRVEVGSPSCGVSSSPKVRIEGFACGNSETHYAVTFV

SEQ ID NO: 104569 - protein, 181 aa, Setaria italica
  Transcript Sequence Number=SeqID_38595
  Gene Ontology: Mol. function=catalytic activity; Biological process =cellular metabolic process
  Homolog annotation: Hit_ID=B6T7H1; Match level="QueryCoverage=88%, HitCoverage=50%, E-value=2e-44, Identity=53%"; Hit description =Dihydroflavonol-4-reductase
PGGVLVFTHPDCVFLQSLLCQNWYCLSKTLAELEAFNYAKRTGLDVVTLCPSLVIGPLLQSTLNASSAVLVDFLTGDRLVKMKLRNFVDVRDVADALLLVYETQEASGRYICNSHPKHVSEVIKLLKSWYPAYRYATNFVPVSDEPSFNSKKLQALGWKCKPLEETLKDSVESYRKAGALD

SEQ ID NO: 104570 - protein, 382 aa, Setaria italica
  misc_feature (372)..(372): Xaa can be any naturally occurring amino acid
  Transcript Sequence Number=SeqID_38596
  Gene Ontology: Mol. function=transferase activity, transferring glycosyl groups; Cellular component=integral to membrane; Biological process=1,3-beta-glucan biosynthetic process
  Homolog annotation: Hit_ID=Q9LUD7; Match level="QueryCoverage=99%, HitCoverage=17%, E-value=1e-113, Identity=56%"; Hit description =Putative callose synthase 8
PIMLLPEIKVAVSAVFNVRSLPSANIKDDKTHTDIFRWLQSWFGFQTGNVANQREHLILLLANMHARLNPKSSSAQLLDDRAVDELLAKTFENYLTWCKFLGRKSNIWLPSVKQEIQQHKLLYIALYLLIWGEASNLRLMPECLCFIFHHMSYELYGVLSGAVSLITGEKVRPAYGGDDESFLNDVVRPIYNVVFKEAQKNKDGAADHSTWRNYDDLNEFFWSTDCFKLGWPMRPNNDFFFISSESDNSQILCGSTLSRVPHGFENCASCVPLVSVDKPQQTEQQNPQVPHESSSTENCLNSEAAEQRQQQTTSPSSEQWLGKTNFVEVRSFWHLFRSFDRMWTLLVLGLQVLIIMAWHGLGSPTQLLDPIXFEDILSIFIT

SEQ ID NO: 104571 - protein, 30 aa, Setaria italica
  Transcript Sequence Number=SeqID_38597
IFLDQKELLSSANWIAQYNAGIMADLDFYL

SEQ ID NO: 104572 - protein, 433 aa, Setaria italica
  misc_feature (22)..(22): Xaa can be any naturally occurring amino acid
  misc_feature (74)..(74): Xaa can be any naturally occurring amino acid
  Transcript Sequence Number=SeqID_38598
  Gene Ontology: Mol. function=protein serine/threonine kinase activity; Biological process=protein amino acid phosphorylation
  Homolog annotation: Hit_ID=Q8H4I0; Match level="QueryCoverage=99%, HitCoverage=63%, E-value=1e-176, Identity=68%"; Hit description =Putative receptor-type protein kinase LRK1
  Pfam annotation: Domain name=Pkinase; Domain location=132-406; Score =171.9; E_value=1.9e-48; Accession=PF00069.17; Description=Protein kinase domain
  Pfam annotation: Domain name=Pkinase_Tyr; Domain location=132-406; Score=105.5; E_value=1.8e-28; Accession=PF07714.9; Description =Protein tyrosine kinase
  Pfam module annotation: Pfam domain module=Pkinase::Pkinase_Tyr; Domain location=132-406::132-406
PDHSKPLLSTIYDLLNRVLTDXMYLGFSAATGRVNSRHCVLGWSFGLNRQAPAIDIAKLPNLPRAGPKPRSKVXLEIVLPIVTATFVLCLGSIVVLVVRRRFRYAELREDWEVEFGPHRFSYKDLYRATDGFKDKHLLGEGGFGRVYKGILRTSRMEVAVKRVSHESRQGMKEFVAEITSIGRIRHRNLVQLLGYCRRKGELLLVYDYMPNGSLDKYLYTDDGDKSKLTWAQRLHIIKGVAAGLVYLHERWEKVVVHRDVKASNVLLDRDMNGQLGDFGLARLYDHGKDSQTTHVVGTMGYLSPELMRTGKASPLTDVFAFGVFLLELTCGQKPIKENGQSGGGHVVLVDWVLQHWRNGSLMETVDGRLHGEYDVEEAALVLKLGLLCSHPFADARPAMGQVVRYLDGVTPLPELASTDLSFHVLAMMQNKEF

SEQ ID NO: 104573 - protein, 130 aa, Setaria italica
  misc_feature (97)..(97): Xaa can be any naturally occurring amino acid
  Transcript Sequence Number=SeqID_38599
  Homolog annotation: Hit_ID=Q5W963; Match level="QueryCoverage=81%, HitCoverage=9%, E-value=2e-33, Identity=61%"; Hit description =PPR1106-17
ALLTKLKSQMQAAGYMPDTQYALYDLEEEEKESEVFQHSEKLALAFGLICIPPGVPIRIMKNLRICVDCHRAFKFISGIVGREIIVRDNNRFHHFKXYKCSCKDYWVKSFYPQDLLRHASLGISRTTSTN

SEQ ID NO: 104574 - protein, 178 aa, Setaria italica
  misc_feature (55)..(55): Xaa can be any naturally occurring amino acid
  Transcript Sequence Number=SeqID_38600
  Gene Ontology: Cellular component=integral to membrane
  Homolog annotation: Hit_ID=B9H8I0; Match level="QueryCoverage=100%, HitCoverage=48%, E-value=1e-54, Identity=56%"; Hit description =Proline transporter (Fragment)
  Subcellular localization annotation: CTP_CleavageSite=40; ConfidenceScore=5.05e-01
YTIIVVSYWTLAFSGYWAFGSQVQSYILSSLTAPRWAIVMANLFAVIQIAGCFQXPTFAHFEERVRAKNRSCRSCLWRLMYTSAYMAAITLVSAAMPFFGDFVSICGAVGFTPLDFVLPTLALMKTSKLPDNLGLRYAVKALSSAAAILFSIIGALACIGAVRSIAIDVKTYKFFHDM

SEQ ID NO: 104575 - protein, 116 aa, Setaria italica
  Transcript Sequence Number=SeqID_38601
  Gene Ontology: Cellular component=integral to membrane; Biological process=nodulation
  Homolog annotation: Hit_ID=B6SGD1; Match level="QueryCoverage=100%, HitCoverage=100%, E-value=5e-34, Identity=61%"; Hit description =Early nodulin 93
  Pfam annotation: Domain name=ENOD93; Domain location=12-90; Score =170.1; E_value=6.3e-48; Accession=PF03386.6; Description=Early nodulin 93 ENOD93 protein
MPTPATRKSLDEQRALAKQCSREAALAGAKAAAIATVATAIPTLASVRMSRWAKANINPAGQALIISTVAGMAYFIAADKKVLSLARQHSYENAPEHLRDTSYRGTGRHHPSFFRP

SEQ ID NO: 104576 - protein, 73 aa, Setaria italica
  Transcript Sequence Number=SeqID_38602
DAIGRQITVPQQGDKELCVSPVKKKRKTRNENTCLAVYRKKPNHSPISVKKAVSQKKLVSIEPRHSFTKRITG

SEQ ID NO: 104577 - protein, 111 aa, Setaria italica
  Transcript Sequence Number=SeqID_38603
FEPFTSLPSSFTSHPSSMAIDLNTLPEEEGHKVPDLNKSPDEHEENHDPLQDVVAANEVGGADHFGLYSWMMPYMTSTCTQMMSTSYLMKRSCPTRMTKMISKPHKNNHQI

SEQ ID NO: 104578 - protein, 267 aa, Setaria italica
  Transcript Sequence Number=SeqID_38604
  Gene Ontology: Mol. function=sequence-specific DNA binding; Cellular component=nucleus; Biological process=regulation of transcription, DNA-dependent
  Homolog annotation: Hit_ID=Q43353; Match level="QueryCoverage=92%, HitCoverage=93%, E-value=1e-114, Identity=84%"; Hit description=MADS- box transcription factor 13
  Pfam annotation: Domain name=K-box; Domain location=73-173; Score =137.7; E_value=3.5e-38; Accession=PF01486.9; Description=K-box region
  Pfam annotation: Domain name=PLC-beta_C; Domain location=68-217; Score=-87.2; E_value=0.061; Accession=PF08703.2; Description=PLC -beta C terminal
  Pfam annotation: Domain name=SRF-TF; Domain location=7-57; Score =101.5; E_value=2.8e-27; Accession=PF00319.10; Description=SRF-type transcription factor (DNA-binding and dimerisation domain)
  Pfam module annotation: Pfam domain module=K-box::PLC-beta_C::SRF-TF; Domain location=73-173::68-217::7-57
LRLPLLNGIRSNTSRQVTFCQRRNGLLKKAYELSVLCDAEVALIVFSSRGRLYEYSNNSVKATIERYKKAHAVGSSSGPPLLELNAQQYYQQESAKLRNQIQMLQNTNRHLVGDSVENLSLKELKQLESRLEKGISKIRARKSELLSAEINYMVKRETELQNDHMNLRNKIEEGEQQLQQVTVARSAAAAAASVELNPFLQMDTKCFFPAGPFAALDMKCFFPGGLQMLEAHRQMLTTELNLGYQLAPAPSDDAVIIRISCSNLHDR

SEQ ID NO: 104579 - protein, 95 aa, Setaria italica
  misc_feature (18)..(18): Xaa can be any naturally occurring amino acid
  Transcript Sequence Number=SeqID_38605
  Gene Ontology: Mol. function=electron carrier activity; Cellular component=mitochondrial respiratory chain; Biological process =electron transport chain
  Homolog annotation: Hit_ID=Q0WNJ4; Match level="QueryCoverage=96%, HitCoverage=30%, E-value=3e-30, Identity=69%"; Hit description =Cytochrome c1
LVSSFLVPSSSWINHEVXGFIGSRALSILGVGASGLLSFATIASASDEAEHGLEAPNYPWPHAGILSSYDHASIRRGHQVYQQVCASCHSMSLIS

SEQ ID NO: 104580 - protein, 304 aa, Setaria italica
  Transcript Sequence Number=SeqID_38606
  Gene Ontology: Mol. function=electron carrier activity; Cellular component=mitochondrial respiratory chain; Biological process =electron transport chain
  Homolog annotation: Hit_ID=P25076; Match level="QueryCoverage=82%, HitCoverage=78%, E-value=1e-133, Identity=90%"; Hit description =Cytochrome c1-1, heme protein, mitochondrial
  Pfam annotation: Domain name=Cytochrom_C1; Domain location=69-294; Score=547.8; E_value=1.3e-161; Accession=PF02167.7; Description =Cytochrome C1 family
MAATRGINQLLRRTLHNQSSGSSLLSSLRGKHEESSAGLRALALLGVGASGLLSFATIASADEAEHGLAAPDYPWPHAGIMSSYDHASIRRGHQVYTQVCASCHSMSLISYRDLVGVAYTEEETKAMAAEIEVVDGPNDEGEMFTRPGKLSDRFPQPYANEQAARFANGGAYPPDLSLITKARHNGQNYVFALLTGYRDPPAGVQIREGLHYNPYFPGGAIAMPKMLNDGAVEYEDGTPATEAQMGKDVVSFLSWAAEPEMEERKLMGVKWIFLLSLALLQAAYYRRMKWSVLKSRKLVLDVVN

SEQ ID NO: 104581 - protein, 314 aa, Setaria italica
  Transcript Sequence Number=SeqID_38607
  Gene Ontology: Mol. function=molecular_function; Cellular component =integral to membrane; Biological process=protein insertion into membrane
  Homolog annotation: Hit_ID=B9HAX2; Match level="QueryCoverage=92%, HitCoverage=72%, E-value=2e-87, Identity=50%"; Hit description=Inner membrane protein
  Pfam annotation: Domain name=60KD_IMP; Domain location=46-241; Score =67.7; E_value=4.3e-17; Accession=PF02096.12; Description=60Kd inner membrane protein
ADAAEAAASVPAPFPGEVAAAAADSFLPVAALQHFIDAIHTFTGLNWWACIVLTTLIIRTATVPMLVSQLKAMTKLNAIKPEMEAIKDQTDTMDLKSAEEGKAKMQALFKKHGVSPFAPMKGLLIQGPIFMSFFFAISNMVEKVPSLKGGGTLWFTDLTTPDSLYLLPVLTGLTALATVEFNLQQGMEGSPMTGKMKNVARGMAFMAVPFTMNFAKGIFCYWITSNIFSLAYGVVIRRPAVKKLFNLPDLPAQPSPATQMPTFNFFGGSRAAESPVAIAGAQRSPLEQPDAAALGYKVKNLEKKVKSRGKRKHR

SEQ ID NO: 104582 - protein, 103 aa, Setaria italica
  misc_feature (95)..(95): Xaa can be any naturally occurring amino acid
  Transcript Sequence Number=SeqID_38608
  Gene Ontology: Mol. function=serine-type carboxypeptidase activity; Cellular component=extracellular region; Biological process =proteolysis
  Homolog annotation: Hit_ID=Q69MD7; Match level="QueryCoverage=97%, HitCoverage=19%, E-value=4e-30, Identity=63%"; Hit description =Putative serine carboxypeptidase
PFRYLVDIGLRVWIFSGDFDSICSLTVTRYSVKDLNLAVTKKWRPWYAPNGEVGGFVQQYQGGFTLASVRAAGHTVPTFQPERSLALLYAFLENXAPPADIPN

SEQ ID NO: 104583 - protein, 93 aa, Setaria italica
  Transcript Sequence Number=SeqID_38609
  Gene Ontology: Mol. function=drug transporter activity; Cellular component=membrane; Biological process=multidrug transport
  Homolog annotation: Hit_ID=B7ZGM0; Match level="QueryCoverage=86%, HitCoverage=17%, E-value=2e-20, Identity=55%"; Hit description =Putative MATE transporter
GVLAGVARGCGWQHLGAYVNLGSFYLLGIPVAILLGFVLRMGARGLWLGIVCGSLMQIALMGAITFFIDWPKMAEDARERVFNEKQAEHGSML

SEQ ID NO: 104584 - protein, 178 aa, Setaria italica
  misc_feature (91)..(91): Xaa can be any naturally occurring amino acid
  misc_feature (125)..(125): Xaa can be any naturally occurring amino acid
  Transcript Sequence Number=SeqID_38610
  Homolog annotation: Hit_ID=Q9LDG2; Match level="QueryCoverage=98%, HitCoverage=37%, E-value=3e-38, Identity=45%"; Hit description =F28L1.1 protein
VFDGIWVPDERYPLYNSSRCPFAERGFNCLANGRKDTEFLKWRWKPRGCNLPRFSARAVLEWLRGKRVVFVGDSMSRTQWESFICMLMTGXVDDPKTVYEVNGNQISKTIRFLGVRFESFNLSVXFFPVCVLVQQIPALRHGRRRVRAILKLDKLDDLSQKWADSDVLIFNSGHWLDL

SEQ ID NO: 104585 - protein, 107 aa, Setaria italica
  Transcript Sequence Number=SeqID_38611
FMCKDMQCHLFQICEEKQLEKNNRRFSLSSVPQMGHQKAAVVQKQGAKTSTQLRVNLRVRLVGGTERDDPTSSHVWFGDTSDESSVPLRLLSAPFFPVRWSIPAAAP

SEQ ID NO: 104586 - protein, 88 aa, Setaria italica
  Transcript Sequence Number=SeqID_38612
GFLDKHAILVAIVEKFPFHLDLEVVLLSCLEENSLWLFARTLEVKLKGRWAFLNTASDFRQNCKLKLRFHVTEFGVFFLVCDCSMCNN

SEQ ID NO: 104587 - protein, 101 aa, Setaria italica
  Transcript Sequence Number=SeqID_38613
FPAPNLCIPLKKSSWHDGIKAERPAVLEKGSDDSFTINMQCCLFVKFGRLVPRLKSVAFSSARSAKRWQLCYLCFSMVYMQFKSERVVSMQTFIILPVVIC

SEQ ID NO: 104588 - protein, 609 aa, Setaria italica
  Transcript Sequence Number=SeqID_38614
  Gene Ontology: Cellular component=plasma membrane
  Homolog annotation: Hit_ID=Q6H5M0; Match level="QueryCoverage=99%, HitCoverage=81%, E-value=3e-66, Identity=42%"; Hit description =Leucine zipper protein-like
  Pfam annotation: Domain name=DUF630; Domain location=1-60; Score =115.3; E_value=2e-31; Accession=PF04783.4; Description=Protein of unknown function (DUF630)
  Pfam annotation: Domain name=DUF632; Domain location=282-609; Score =416.3; E_value=5e-122; Accession=PF04782.4; Description=Protein of unknown function (DUF632)
  Pfam module annotation: Pfam domain module=DUF630::DUF632; Domain location=1-60::282-609
MGSSPSKATGEDALVLCKDRMRHIRRAIDSRDALSAAHLSYTQSLRTVGTALRRYAESEISPESSLSISEVDKSPSHSSMASPSPSHAVENVASPMHRASPLTTPPSTRIHCMKASGTTPLTFMIDPSAAEFVGQESPVSAFVPPPPPLPPELCTSWDFFDPIDAAGSSSSNNENGLTLNFSRLKGLRESREAEVVPLKEEEEEAVVSERRHTELPDGNAVPKQEREPKQSGISKQRQPVDASSQATSSQQIAAKVEESEMEKELCAETEDPSEFITHRAKDFVASMKDIETRFNCAAEAGNEVSRMLETKKIRLDICPKIPGSPGKLPTAPFLSALRVCCNRDIILNQETAQHVSKVVTWKRSVSSLSSSSKSALMTSIIKDDVDDSNSDFVEEFAMVSGSHSSTLDRLHAWERKLYDEIKASENVRKTYDEKCNLLRRQFARDLNAQLIDKTRAVVKDLHSRVSVAIQAVDAISKRIEKIRDEELEPQLVELIQGLIRMWKSMLECHHKQFITITLAYHVKSSTSAQQGEHHRQAAMNLWNEMDSFSSSFRNWVTAHQSYVEALNAWLQKCVLQPPQDRRRRKRKVSFPPRQAVSPPIFVLCRDWLT

SEQ ID NO: 104589 - protein, 207 aa, Setaria italica
  Transcript Sequence Number=SeqID_38615
  Gene Ontology: Cellular component=plasma membrane
  Homolog annotation: Hit_ID=Q0GPE3; Match level="QueryCoverage=82%, HitCoverage=66%, E-value=1e-35, Identity=43%"; Hit description=BZIP transcription factor bZIP133 (Fragment)
  Pfam annotation: Domain name=DUF632; Domain location=1-164; Score =12.7; E_value=3.2e-09; Accession=PF04782.4; Description=Protein of unknown function (DUF632)
SKSILDSVDFTTPCSYILSINTEFTSYRLIRMWKSMLECHHKQFITITLAYHVKSSTSAQQGEHHRQAAMNLWNEMDSFSSSFRNWVTAHQSYVEALNAWLQKCVLQPPQDRRRRKRKVSFPPRQAVSPPIFVLCRDWLTLTESLPAEELCKSIKDVMQLLRDSFDHQDDQSKPKSESQECGMLENNEQEEAKSGSVPAAEGLQSRL

SEQ ID NO: 104590 - protein, 130 aa, Setaria italica
  Transcript Sequence Number=SeqID_38616
  Subcellular localization annotation: CTP_CleavageSite=59; ConfidenceScore=5.09e-01
RKQERVKIQINTMKVSNGGGSSLYVIVIWLAVLFGCLASSAQCRSQLLNKAVRTRGVFLAGTAGNTSAYHSEIECPSVVVDDDESKLKLIFCTVKCYCHGVHGDAICYCCQKPPGAVCHETLADCQADCP

SEQ ID NO: 104591 - protein, 114 aa, Setaria italica
  misc_feature (25)..(25): Xaa can be any naturally occurring amino acid
  Transcript Sequence Number=SeqID_38617
  Homolog annotation: Hit_ID=B6TSQ5; Match level="QueryCoverage=100%, HitCoverage=21%, E-value=6e-30, Identity=56%"; Hit description =Microtubule-associated protein MAP65-1a
PFMFNKVRLLDSLEEYTSTRQQKKXKRRLREQKKLQEQFGTKPSPIRPLPARKPLGQSSNVNIAVGTPTSRHVTTPMSRKGGLSSGKVKEATKTTLGPANFVALRKDCTENSSF

SEQ ID NO: 104592 - protein, 92 aa, Setaria italica
  misc_feature (82)..(82): Xaa can be any naturally occurring amino acid
  Transcript Sequence Number=SeqID_38618
  Gene Ontology: Mol. function=voltage-gated chloride channel activity; Cellular component=integral to membrane; Biological process=chloride transport
  Homolog annotation: Hit_ID=Q8LPA2; Match level="QueryCoverage=83%, HitCoverage=10%, E-value=2e-29, Identity=77%"; Hit description =Chloride channel
MDGGSPRPPRRPERHGSFNYDIENTDAAWRGAHTASEALLRYDDDGPREPLLRKRTRNTTSQIAIVGANVCPIESLDYEIVXENDLIKQDWR

SEQ ID NO: 104593 - protein, 90 aa, Setaria italica
  Transcript Sequence Number=SeqID_38619
  Gene Ontology: Mol. function=voltage-gated chloride channel activity; Cellular component=integral to membrane; Biological process=chloride transport
  Homolog annotation: Hit_ID=Q8LPA2; Match level="QueryCoverage=100%, HitCoverage=11%, E-value=1e-42, Identity=94%"; Hit description =Chloride channel
KGLKIEDLDFTDEEMDMYVDLHPITNTSPYTVVETMSLAKAAVLFRALGLRHLLVVPKTPGRPPIVGILTRHDSMPEHIHGLFPNLHKSH

SEQ ID NO: 104594 - protein, 81 aa, Setaria italica
  Transcript Sequence Number=SeqID_38620
SEISHQQLAFLALLLLLSLLTSCSIIKLHAAGPIHDFYQSLLLLLLPADGFSLFLTPSMLITFVLLFAMLFSLGSISNTIL

SEQ ID NO: 104595 - protein, 175 aa, Setaria italica
  Transcript Sequence Number=SeqID_38621
  Subcellular localization annotation: CTP_CleavageSite=50; ConfidenceScore=5.66e-01
IIPFFRSDPFPAISVILLSSLASGSGTTPLLASTPSSFGGRSLPGVTTARATGFSGSCSNLSGSPPILSSGWSCSPTPCLVSVSSRASCRSYPPGIIASASSSSSHAGHGSSASPSSVVSASDSGTAFEQLLPPHAHSLSFFKSLPGDEATASFLLPEATCKGASSSSACVSSSS

SEQ ID NO: 104596 - protein, 155 aa, Setaria italica
  Transcript Sequence Number=SeqID_38622
  Subcellular localization annotation: CTP_CleavageSite=71; ConfidenceScore=5.83e-01
LLSSLASGSGTTPLLASTPSSFGGRSLPTPCLVSVSSRASCRSYPPGIIASASSSSSHAGHGSSASPSSVVSASDSGTAFEQLLPPHAHSLSFFKSLPGDEATASFLLPEATCKGASSSSACVSSSSSSVSAESAVHFSDHRDGGAMSRWSRPPA

SEQ ID NO: 104597 - protein, 79 aa, Setaria italica
  Transcript Sequence Number=SeqID_38623
LAQVLLNEGGGRYEEAAAAAARGVRLLLEWGSSWDKRMSWEGWVSWGRLMRDKAKRREWPRTAWGIINLGLVDGVANCN

SEQ ID NO: 104598 - protein, 138 aa, Setaria italica
  Transcript Sequence Number=SeqID_38624
  Gene Ontology: Mol. function=DNA binding; Biological process =transposition, DNA-mediated
  Homolog annotation: Hit_ID=B9S7B3; Match level="QueryCoverage=98%, HitCoverage=34%, E-value=4e-51, Identity=64%"; Hit description =Pentatricopeptide repeat-containing protein, putative
NATDLRNIANGGFNYVKSNDQSIEFYKFWYSSRYRYPGYHDQDVFNFIKHDPYTTDIGLTIKFLSTSYFGGICEPSKDLNKVCTMHANCCIGLQSKIHDLRIMMEDWRNYMSMPPSLKSFGALSWRVPQNCSLSLLSP

SEQ ID NO: 104599 - protein, 51 aa, Setaria italica
  Transcript Sequence Number=SeqID_38625
NYHWLKSTEDGGTRPSTTKFRRFLTTNSNIYAPKAICSSSQTKQPQRIFNK

SEQ ID NO: 104600 - protein, 70 aa, Setaria italica
  Transcript Sequence Number=SeqID_38626
MGAHGASPLAPPPPLSIDTRHRAGAFGDADDDGGEPLSPTARMFHDFYIVAVVGLGAPIDFEPARAGLEV

SEQ ID NO: 104601 - protein, 208 aa, Setaria italica
  misc_feature (8)..(8): Xaa can be any naturally occurring amino acid
  Transcript Sequence Number=SeqID_38627
  Gene Ontology: Mol. function=N-acetyltransferase activity; Biological process=metabolic process
  Homolog annotation: Hit_ID=B9S0A5; Match level="QueryCoverage=99%, HitCoverage=26%, E-value=3e-22, Identity=31%"; Hit description=DNA binding protein, putative
  Pfam annotation: Domain name=Acetyltransf_1; Domain location=102-177; Score=12.7; E_value=0.056; Accession=PF00583.16; Description =Acetyltransferase (GNAT) family
LKEYTRFXFLCCEKCRLLRDHLDEGLEKCEEIAFLRRIRSNICWRLLSGMNASSELYMPQVIDILKDAFAETAEHSGVFSDMVYAKNVEGETDFRGMYCAVLTASTHVVSAAILKVRMEQVAELVLIATRSECRKKGYFILLLKSIEEHLRAWKVNLLTAPVDPEMAPIWSEKLGFTILSDEEKKLMMDQSCPSVMFENLVLMQKSLA

SEQ ID NO: 104602 - protein, 330 aa, Setaria italica
  misc_feature (17)..(17): Xaa can be any naturally occurring amino acid
  misc_feature (57)..(57): Xaa can be any naturally occurring amino acid
  Transcript Sequence Number=SeqID_38628
  Gene Ontology: Mol. function=transporter activity; Cellular component= membrane; Biological process=oligopeptide transport
  Homolog annotation: Hit_ID=Q7XHA8; Match level="QueryCoverage=100%, HitCoverage=53%, E-value=1e-117, Identity=66%"; Hit description=POT family protein, expressed
  Pfam annotation: Domain name=PTR2; Domain location=1-263; Score=22.4; E_value=1.8e-07; Accession=PF00854.13; Description=POT family
RYQRPGGSALTRICQVXVAATRKINVDVPNGSSLLYEMPGKESAILGSRKLMHTDGXRFFDRAATITSSDERFLDAPNPWKLCTVTQVEEMKILARMMPVLLAGIIFNTAEAFFPLFIEQGEVMDNQIDNFSIPPASVTTFNCLCILILAPAYNKVLMPMVSKITGTKRGLSDLQRIGVGMFFAMLSMVSAAIVEMVRLDIAMKTGLVHQSAAVPMNILWQAPQYFLVGVAKVFSVVGFIEFAYEQSPDAMRSLCQACSLIMVTLGSYLVSVMLMFINSITEGRGSHGWIPVNLNEGRLDQLFWLMAGLQLLNLLAFAYCAMRYKRKLAT

SEQ ID NO: 104603 - protein, 42 aa, Setaria italica
  Transcript Sequence Number=SeqID_38629
QFLRKMYLSQINSIFMLNLVYEQLLNFYVVNLNNSSCSAAQS

SEQ ID NO: 104604 - protein, 75 aa, Setaria italica
  Transcript Sequence Number=SeqID_38630
  Gene Ontology: Mol. function=nucleic acid binding
  Pfam annotation: Domain name=PABP; Domain location=2-48; Score=7.1; E_ value=0.00069; Accession=PF00658.10; Description=Poly-adenylate binding protein, unique domain
YVRRRTTKPRLARKITGMLLELDSSEVVTLLCSSEMLSTKVDECMQLLHATNPKAEDQEPLHPGFMLDSAGVNAN

SEQ ID NO: 104605 - protein, 606 aa, Setaria italica
  misc_feature (343)..(343): Xaa can be any naturally occurring amino acid
  misc_feature (350)..(350): Xaa can be any naturally occurring amino acid
  Transcript Sequence Number=SeqID_38631
  Gene Ontology: Mol. function=nucleic acid binding; Cellular component= nucleus; Biological process=RNA catabolic process
  Homolog annotation: Hit_ID=B9S097; Match level="QueryCoverage=98%, HitCoverage=97%, E-value=1e-152, Identity=45%"; Hit description =Polyadenylate-binding protein, putative
  Pfam annotation: Domain name=PABP; Domain location=508-579; Score =77.9; E_value=3.7e-20; Accession=PF00658.10; Description=Poly -adenylate binding protein, unique domain
  Pfam annotation: Domain name=RRM_1; Domain location=174-243; Score =84.7; E_value=3.3e-22; Accession=PF00076.14; Description=RNA recognition motif. (a.k.a. RRM, RBD, o
  Pfam annotation: Domain name=RRM_1; Domain location=2-66; Score=42.4; E_value=1.8e-09; Accession=PF00076.14; Description=RNA recognition motif. (a.k.a. RRM, RBD, o
  Pfam annotation: Domain name=RRM_1; Domain location=277-346; Score =68.2; E_value=3e-17; Accession=PF00076.14; Description=RNA recognition motif. (a.k.a. RRM, RBD, o
  Pfam annotation: Domain name=RRM_1; Domain location=84-153; Score =90.2; E_value=7.4e-24; Accession=PF00076.14; Description=RNA recognition motif. (a.k.a. RRM, RBD, o
  Pfam module annotation: Pfam domain module=PABP::RRM_1::RRM_1::RRM _1::RRM_1; Domain location=508-579::174-243::2-66::277-346::84-153
KGRKGGEDHLFDAFSKIGTVTSVRVCRDNATSRSLRYGYVNYFSRADAVTALEKLNHSLVLDKPIRVMWSNRDPDARRSGVGNIFVKNLNDFVDNARLQELFSKFGDVLSCKVAKNEDGTTRGYGFVQFASQESADAAIENLHGSLFNDRKLHVATFVKKSERSANNDDKFTNLYMKHLDDDITEELVKLKFSQFGPIVSVKIMRRPDGSSLGFGFVSFQNPESAIKAQETMHGMPIGSKALYVARAQKKEERKQYLQRLHEEKRNEIINKSNESNVYIKNIHDEVDDEALRARFDEFGNITSAKVMRDDKGISRGFGFVCFSTPEEAKGAVSSMRGVMFYGXPLYVAIXQRKEERRAKLQQHFAQLATMVGPANSMIPTGYPHVYFAHPNTHLPQGPPRHGFVYPPMGLSHEWRPNMFPSPPNIPQIHSPMMPNSPRHYRSNRGRMGGNMMPLPHTVHAVNYVAHAPPAKDFMSMPRQRFSHPKYFSNDVMANGLAIHHGDPVLSENDSSSTYLASAPPGEQKKLLGNRLFPLVERHQPRLARKITGMLLELDSSEVVTLLCSSEMLSTKVDECMQLLHATNPKAEDQEPLHPGFMLDSAGVNAN

SEQ ID NO: 104606 - protein, 224 aa, Setaria italica
  misc_feature (171)..(171): Xaa can be any naturally occurring amino acid
  Transcript Sequence Number=SeqID_38632
  Homolog annotation: Hit_ID=B6TX94; Match level="QueryCoverage=83%, HitCoverage=56%, E-value=1e-49, Identity=55%"; Hit description=Cupin, RmlC-type
  Pfam annotation: Domain name=DUF1637; Domain location=1-223; Score =225.9; E_value=1e-64; Accession=PF07847.4; Description=Protein of unknown function (DUF1637)
MDDLDYFHRMNAAARQTPPIITCKTIYSCSNFTIAVFFLPQRAVMPLHDHPGMTVFSKVLIGSTHVEAYDWLRPRVSGQGSPAAMLAEKVLDHNVTAASDAWVLFPDTGGNMHRFVVDGHCAFLDVLTPPYAPAEQRSCTYYEDLPYDELDPCKYSLAPCMNQEEATRLRXAHVIWCLLWLSTGAVSSGLTEAQRRRQLAWLREVPQPKDLRIANLPYQGPKIF

SEQ ID NO: 104607 - protein, 361 aa, Setaria italica
  Transcript Sequence Number=SeqID_38633
  Homolog annotation: Hit_ID=B6TX94; Match level="QueryCoverage=66%, HitCoverage=73%, E-value=1e-59, Identity=49%"; Hit description=Cupin, RmlC-type
  Pfam annotation: Domain name=DUF1637; Domain location=157-360; Score =271.4; E_value=2.1e-78; Accession=PF07847.4; Description=Protein of unknown function (DUF1637)
MEGSNVAGGVKKEAVDAAAQGTPLLRAGGVVKKEPVDEPTDAGKDELRHEEAEASAAKRRREEESGDEAVGVGRKKRQRVVAEGLSLGRERKRDADPATRRTTTGADATAAAIVPQCRCSMLLSMPPLQRLLDACRDVFKGTPTPPSSIIVPFICRLMGRIGPHDVGLMDDLDYFHRMNAAARQTPPIITCKTIYSCSNFTIAVFFLPQRAVMPLHDHPGMTVFSKVLIGSTHVEAYDWLRPRVSGQGSPAAMLAEKVLDHNVTAASDAWVLFPDTGGNMHRFVVDGHCAFLDVLTPPYAPAEQRSCTYYEDLPYDELDPCAVSSGLTEAQRRRQLAWLREVPQPKDLRIANLPYQGPKIF

SEQ ID NO: 104608 - protein, 131 aa, Setaria italica
  misc_feature (46)..(46): Xaa can be any naturally occurring amino acid
  Transcript Sequence Number=SeqID_38634
KSGNDFNATEGFYYYAGFGFRNKRHYRSSVDDYVPIKQQEEEDSIXKEHALYLSQTEVKGHEDETNQTTAFGDDIMGIADIDEDSSDYGYNGISTASSSIAGASNGGSKRKIRRKKQGRKPIKARSLMSLM

SEQ ID NO: 104609 - protein, 68 aa, Setaria italica
  Transcript Sequence Number=SeqID_38635
  Subcellular localization annotation: CTP_CleavageSite=16; ConfidenceScore=5.14e-01
LFPLQPTFLLPADKGRAAGGGASMAPAPSTASASFSGESESLEESPDSYSEALAVPFYDFFGLQSGGR

SEQ ID NO: 104610 - protein, 69 aa, Setaria italica
  Transcript Sequence Number=SeqID_38636
  Gene Ontology: Mol. function=glutamate-cysteine ligase activity; Cellular component=chloroplast; Biological process=glutathione biosynthetic process
  Homolog annotation: Hit_ID=B7U9Z4; Match level="QueryCoverage=100%, HitCoverage=18%, E-value=7e-21, Identity=66%"; Hit description=Gamma- glutamylcysteine synthetase
RGGYVRDLAENIVKLAKDGLQRRGHMEVGFLNEVDEIVGTGVTQAEKLANLYMAKWQHNVDPVFREFIY

SEQ ID NO: 104611 - protein, 58 aa, Setaria italica
  Transcript Sequence Number=SeqID_38637
LRVQARTRANIITRLVDPDDTCARTYMVLFSLCQLLLMTIQNLRFSLALLLVDFNIHD

SEQ ID NO: 104612 - protein, 64 aa, Setaria italica
  Transcript Sequence Number=SeqID_38638
VRLELMTSTTAVLRTNLPRLDLRSVHKRVYSSITFQFNFPCRTAQILLVHIFHICISSKGQICA

SEQ ID NO: 104613 - protein, 66 aa, Setaria italica
  Transcript Sequence Number=SeqID_38639
RQQRRRDTHAEKARHSEKRSKVCDLSVHITHLLLRVVSQGDGPAMLMESKTEGTYHSNHALIDFIF

SEQ ID NO: 104614 - protein, 100 aa, Setaria italica
  Transcript Sequence Number=SeqID_38640
  Homolog annotation: Hit_ID=Q9XGD8; Match level="QueryCoverage=82%, HitCoverage=78%, E-value=4e-19, Identity=61%"; Hit description=BETL4 protein
KVRLVYYPIHHVIGSCTTAQKDAILEHCEEYIKLPYYPVIIPSYIGVCCDKVRDVPGRDMECIVSLLTHAEKARHSEKKIKGLRPFCPYHSPPPPRRQSR

SEQ ID NO: 104615 - protein, 108 aa, Setaria italica
  Transcript Sequence Number=SeqID_38641
  Homolog annotation: Hit_ID=Q9XGD8; Match level="QueryCoverage=75%, HitCoverage=78%, E-value=4e-19, Identity=61%"; Hit description=BETL4 protein
MRGKIAPLLVVLLFLPIHHVIGSCTTAQKDAILEHCEEYIKLPYYPVIIPSYIGVCCDKVRDVPGRDMECIVSLLTHAEKARHSEKKIKGLRPFCPYHSPPPPRRQSR

SEQ ID NO: 104616 - protein, 113 aa, Setaria italica
  misc_feature (34)..(34): Xaa can be any naturally occurring amino acid
  Transcript Sequence Number=SeqID_38642
MLPEDGTEDYASPLSSSSRKRSSSTKDTACSPPXKGKNQFLNIFKDLVHTMKADSSEDSEAIKLKQREMELKLKQREMEMKQREMDMKQREMEMEYRRKEKEEKWKNEEREDY

SEQ ID NO: 104617 - protein, 87 aa, Setaria italica
  Transcript Sequence Number=SeqID_38643
GTAAPVPGDGMTDAASGWTESCFGADDMEIGDSERRGWTDTLLSVKLRLLLGRRADVTPWARKSALQYLKGDGADCRVRIWEIRFKL

SEQ ID NO: 104618 - protein, 92 aa, Setaria italica
  Transcript Sequence Number=SeqID_38644
ALEKKIRKNDEGSDRTKFWVVTMMRHSSPRSPVILSRATHARNTLHGPAPLWARDTHVRNGGPRGTVRPSFLCRLPCCLLDRRCTDTPPPSS

SEQ ID NO: 104619 - protein, 291 aa, Setaria italica
  misc_feature (50)..(50): Xaa can be any naturally occurring amino acid
  misc_feature (150)..(150): Xaa can be any naturally occurring amino acid
  Transcript Sequence Number=SeqID_38645
  Gene Ontology: Mol. function=transposase activity; Biological process= transposition, DNA-mediated
  Homolog annotation: Hit_ID=Q2QPA1; Match level="QueryCoverage=99%, HitCoverage=93%, E-value=3e-43, Identity=39%"; Hit description =Transposon protein, putative, CACTA, En/Spm sub-class
MDWNDGYTTIVCKLFAEQVRKGNRPNTHLNNVGYSEVKERFFQSTGIMLXKSQLKNKWDKGRGDLSAWKKLMRKQTGTGWNWEKGTINMDAEWWKKQKDIPGVGKFKNRPLQNEDELKVMFGNIINEEQDHWNPMSSNPSYPQAKKHPIXMSSNFIDAEDGLEMGGNNDLDNGDEVQEVSPSVANAKKKVHVILDKPNKKSKASTALVIQEHISKISDNASSFVASRQAGITIEQVMDHVAACGAACGSDEHFVATELFVKKEQREMFMTIPTNEARFSWLKRKYDMMFAK

SEQ ID NO: 104620 - protein, 125 aa, Setaria italica
  misc_feature (70)..(70): Xaa can be any naturally occurring amino acid
  Transcript Sequence Number=SeqID_38646
  Gene Ontology: Mol. function=inositol or phosphatidylinositol phosphatase activity; Biological process=abscisic acid mediated signaling
  Homolog annotation: Hit_ID=A8IDW2; Match level="QueryCoverage=63%, HitCoverage=11%, E-value=2e-18, Identity=55%"; Hit description =Inositol-1,4,5-triphosphate-5-phosphatase
MEHELLSGSDNDSDGELHPLIEQDHNRRLQDKTDEKFEAFPEEDLACDAIIDKSVKRKRPEFVRIISKQXMVGIFLSIWVRRSLRKHIQNLRVSTVGVGAMGYIGNKASAKFDLPLYYAYILIFQ

SEQ ID NO: 104621 - protein, 222 aa, Setaria italica
  misc_feature (190)..(190): Xaa can be any naturally occurring amino acid
  misc_feature (209)..(209): Xaa can be any naturally occurring amino acid
  misc_feature (220)..(220): Xaa can be any naturally occurring amino acid
  Transcript Sequence Number=SeqID_38647
  Gene Ontology: Mol. function=inositol or phosphatidylinositol phosphatase activity; Biological process=abscisic acid mediated signaling
  Homolog annotation: Hit_ID=Q6L5I9; Match level="QueryCoverage=100%, HitCoverage=47%, E-value=6e-48, Identity=44%"; Hit description ='putative inositol-1,4,5-trisphosphate phosphatase'
FGAEDNRPVAVWEHIIRETLNKNGSDKSRFKCHSDPSSPSRFNPSDVALSMEHELLSGSDNDSDGELHPLIEQDHNRRLQDKTDEKFEAFPEEDLACDAIIDKSVKRKRPEFVRIISKQMVGIFLSIWVRRSLRKHIQNLRVSTVGVGAMGYIGNKGSISVSMSIHQTPFCFVCCHLAAGEKDGDDLKRXSNVEEIIRRTVFNPVHTVXMPMRIHDHERXIW

SEQ ID NO: 104622 - protein, 188 aa, Setaria italica
  misc_feature (176)..(176): Xaa can be any naturally occurring amino acid
  Transcript Sequence Number=SeqID_38648
  Gene Ontology: Mol. function=protein serine/threonine kinase activity; Cellular component=plasma membrane; Biological process =protein amino acid phosphorylation
  Homolog annotation: Hit_ID=B6TE08; Match level="QueryCoverage=97%, HitCoverage=47%, E-value=8e-96, Identity=93%"; Hit description=ATP binding protein
  Pfam annotation: Domain name=Pkinase; Domain location=3-187; Score= -15.4; E_value=1.4e-07; Accession=PF00069.17; Description=Protein kinase domain
  Pfam annotation: Domain name=Pkinase_Tyr; Domain location=3-186; Score=-22.6; E_value=3.2e-12; Accession=PF07714.9; Description =Protein tyrosine kinase
  Pfam module annotation: Pfam domain module=Pkinase::Pkinase_Tyr; Domain location=3-187::3-186
AKLVIKGVIARGTFGTVHRVTNDGQDVAVKLLDWGEDGHRSEQEIAALRSAFAQEVAVWHKLDHPNVTKFIGAIMGARDLNVQTEHGHLGMPSNICCVVVEYLAGGALKNFLIKNRRRKLAFKVVVQIALDLARGLCYLHSKKIVHRDVKTENMLLDKTRTVKIADFGVARVEASXNPGDMTGENRDA

SEQ ID NO: 104623 - protein, 205 aa, Setaria italica
  Transcript Sequence Number=SeqID_38649
  Homolog annotation: Hit_ID=O22720; Match level="QueryCoverage=29%, HitCoverage=18%, E-value=2e-12, Identity=61%"; Hit description =F11P17.2 protein
  Pfam annotation: Domain name=DUF761; Domain location=1-205; Score =22.6; E_value=1.5e-12; Accession=PF05553.3; Description=Cotton fibre expressed protein
AAAAAGGGGVVAEDEVEQDEIQPPVALQVPVPVLAMPVPAAPAAEVAAVEEPVVEMNAATVAPAPVPVEEDEEFSISRSTWTPRRRGAEPEVEADAESEVPFADLTNSREKPLVSARFSRKAAKPSPEGSRALRVARPRKEETLESTWKAITEGRGPPLARHLKKSDTWDTRPGRRPSGGVGSGEIDPAAAVPAGAMRKAETFND

SEQ ID NO: 104624 - protein, 79 aa, Setaria italica
  Transcript Sequence Number=SeqID_38650
  Gene Ontology: Mol. function=serine-type carboxypeptidase activity; Cellular component=extracellular region; Biological process =proteolysis
  Homolog annotation: Hit_ID=Q2R0J2; Match level="QueryCoverage=83%, HitCoverage=14%, E-value=7e-16, Identity=50%"; Hit description =Serine carboxypeptidase family protein
MLCPFPQPEVSGRWKRCPKHIQYTRDILTLTEYHLNVTSKGYRVFLYSGDHSLLVPFSATMEWLKKLNYKETEKWHPWF

SEQ ID NO: 104625 - protein, 263 aa, Setaria italica
  Transcript Sequence Number=SeqID_38651
  Gene Ontology: Mol. function=serine-type carboxypeptidase activity; Cellular component=extracellular region; Biological process =proteolysis
  Homolog annotation: Hit_ID=B6TDA5; Match level="QueryCoverage=99%, HitCoverage=59%, E-value=1e-44, Identity=34%"; Hit description =Serine carboxypeptidase 1
  Pfam annotation: Domain name=Peptidase_S10; Domain location=1-263; Score=-39.2; E_value=1.5e-12; Accession=PF00450.14; Description =Serine carboxypeptidase
SPAGVGYSYAENDDDYITNDTSRVADLYDFLSKWFAEYTEFMSNPFYVAGCSYSGVIVPVLAQEILKRNEEPYRMKINFKGYSLCNPAVDVDIENNAHVPYAFRVGLISEELFQSLVTTCTGRYWNNSNPSCQENMEQFYMQIKGINMEHILCPPCRYKMGITKEFMEYDYGQMFKRISKSSSHGLECHDQEQALEKLFDTNLGRAKLHAKEPEVSGRWKRCPKHIQYTRDILTLTEYHLNVTSKGYRVFLYSGDHSLLVPFQ

SEQ ID NO: 104626 - protein, 154 aa, Setaria italica
  misc_feature (17)..(17): Xaa can be any naturally occurring amino acid
  misc_feature (136)..(136): Xaa can be any naturally occurring amino acid
  Transcript Sequence Number=SeqID_38652
  Gene Ontology: Mol. function=serine-type carboxypeptidase activity; Biological process=proteolysis
  Pfam annotation: Domain name=Peptidase_S10; Domain location=1-154; Score=-216.8; E_value=0.017; Accession=PF00450.14; Description =Serine carboxypeptidase
PYSWTKMASLLLVDSPXAGVGYSYAENDDDYITNDTSRVADLYDFLSKGYSLCNPAVDVDIENNAHVPYAFRVGLISEELFQDQEQALEKLFDTNLGRAKLHAKEPEVSGRWKRCPKHIQYTRDILTLTEYHLNVXHTKGYRVFLYSGDHSLLV

SEQ ID NO: 104627 - protein, 323 aa, Setaria italica
  misc_feature (53)..(53): Xaa can be any naturally occurring amino acid
  Transcript Sequence Number=SeqID_38653
  Gene Ontology: Mol. function=serine-type carboxypeptidase activity; Cellular component=extracellular region; Biological process =proteolysis
  Homolog annotation: Hit_ID=Q9C7Z9; Match level="QueryCoverage=88%, HitCoverage=67%, E-value=3e-52, Identity=36%"; Hit description =Serine carboxypeptidase-like 18
  Pfam annotation: Domain name=Peptidase_S10; Domain location=1-289; Score=40.7; E_value=4.3e-17; Accession=PF00450.14; Description =Serine carboxypeptidase
LHTNDTSRVADLYDFLSKWFAEYTEFMSNPFYVAGCSYSGVIVPVLAQEILKXRNEEPYRMKINFKGYSLCNPAVDVDIENNAHVPYAFRVGLISEELFQQIKGINMEHILCPPCRYKMGITKEFMEYDYGQMFKRISKSSSHGLECHDQEQALEKLFDTNLGRAKLHAKEPEVSGRWKRCPKHIQYTRDILTLTEYHLNVTSKGYRVFLYSGDHSLLVPFSATMEWLKKLNYKETEKWHPWFVENQIAGYSIRYGSNILFATIKGAGHVPSDYLPFEAFVAYQRWIDGAAFCIKDLLPDELTFIVSCTALFIPRLLTLARIQ

SEQ ID NO: 104628 - protein, 400 aa, Setaria italica
  Transcript Sequence Number=SeqID_38654
  Gene Ontology: Mol. function=serine-type carboxypeptidase activity; Cellular component=extracellular region; Biological process =proteolysis
  Homolog annotation: Hit_ID=Q9CAU0; Match level="QueryCoverage=90%, HitCoverage=93%, E-value=3e-73, Identity=35%"; Hit description =Serine carboxypeptidase-like 6
  Pfam annotation: Domain name=Peptidase_S10; Domain location=44-396; Score=343.4; E_value=4.4e-100; Accession=PF00450.14; Description =Serine carboxypeptidase
MSRRRVLDPVEAGALLLMAAFLLLCLRVSPGRAAPAGAEVTEFPGFHGVLPSKHYAGYITVGHEQQNRHLYYYLATSERNPTLDPVVIWINGGPACSGFSAFHHSIGPFKIEYSQVHVKDDPRATKNPYSWTKMASLLLVDSPAGVGYSYAENDDDYITNDTSRVADLYDFLSKWFAEYTEFMSNPFYVAGCSYSGVIVPVLAQEILKRNEEPYRMKINFKGYSLCNPAVDVDIENNAHVPYAFRVGLISEELFQDQEQALEKLFDTNLGRAKLHAKEPEVSGRWKRCPKHIQYTRDILTLTEYHLNVTSKGYRVFLYSGDHSLLVPFSATMEWLKKLNYKETEKWHPWFVENQIAGYSIRYGSNILFATIKGAGHVPSDYLPFEAFVAYQRWIDGAASL

SEQ ID NO: 104629 - protein, 272 aa, Setaria italica
  Transcript Sequence Number=SeqID_38655
  Gene Ontology: Mol. function=oxidoreductase activity; Biological process=oxidation reduction
  Homolog annotation: Hit_ID=B4FE26; Match level="QueryCoverage=99%, HitCoverage=77%, E-value=1e-144, Identity=87%"; Hit description =Corticosteroid 11-beta-dehydrogenase isozyme 1
  Pfam annotation: Domain name=adh_short; Domain location=9-140; Score =0.8; E_value=1.2e-05; Accession=PF00106.17; Description=short chain dehydrogenase
VARTESSLRHVADRAIELGARDVIVLPGDVANPDDCKRFVQTAISHYDRLDHLVCNAGIASVGAFQEIPDVTNYSSQLDVNFWGSVQTTFAALPYLKRSRGRIVVTASATAWNPVPRMSFYNAANAALVNFFETLRTELGSEIGITIVTPGWIESEMSKGKYLKEHGEMEVDQEMRDAQIGLFPVEYAKNCARAMVQAACQGERYLTVPAWFRAMYLWRVFAPEVVEVCYRLLYMHGHGASQTDAPSKTMAQAGGKQLLYPTSLRSDDVKSD

SEQ ID NO: 104630 - protein, 196 aa, Setaria italica
  Transcript Sequence Number=SeqID_38656
  Gene Ontology: Mol. function=aspartic-type endopeptidase activity; Cellular component=chromatin; Biological process=RNA-dependent DNA replication
  Homolog annotation: Hit_ID=Q8SA91; Match level="QueryCoverage=55%, HitCoverage=4%, E-value=8e-24, Identity=49%"; Hit description =Putative gag-pol polyprotein
  Subcellular localization annotation: CTP_CleavageSite=39; ConfidenceScore=5.18e-01
MISAGSSQSPFAKFIWRNKAPPRIQFFGWLLMQRRIQCRANLARKNTLDDPSCELCGQYEDCDHIIFQCRFASHVWDSLGFNTDGANVTQLMAIAGPTTLPARQFSGFILLICWMLWKQRNDLVFQRSARPTLDFRNYAEMKLASGARDLEPKIKQSLKPGASSLIQCRSQIVNNMFFSLAELLSCKTLAYRRPNE

SEQ ID NO: 104631 - protein, 260 aa, Setaria italica
  Transcript Sequence Number=SeqID_38657
  Gene Ontology: Mol. function=metal ion binding; Cellular component =plasma membrane
  Homolog annotation: Hit_ID=B6SVM4; Match level="QueryCoverage=84%, HitCoverage=28%, E-value=2e-71, Identity=69%"; Hit description =Protein binding protein
  Pfam annotation: Domain name=VWA; Domain location=8-206; Score=5.4; E_ value=0.0028; Accession=PF00092.20; Description=von Willebrand factor type A domain
SPRRAPIDLVTVLDVSQGMMGEKLQILKRGMRLVVASLGPADRLSIVAFSGAAKRLLPLRRMTRQGQRSARQILDRLVVCAAAATTQGQEQGPGQQQSACVGDALRKATKVLEDRRDRNPVATVMLLSDTQQQQQQRDQSTTRKQFGRPAMAAPATRFTHVEIPIGDAPPLVRPEEEKEEPPVEHAFARCLGGLVSVVMQDVQLELVFLAGEITAVYSCGPGQQAVALAGGGSGGAGVSVRLGEMYAEEERELLVELRAP

SEQ ID NO: 104632 - protein, 148 aa, Setaria italica
  Transcript Sequence Number=SeqID_38658
LISILTIFVVERQLASRKVTWHPAISSVLSKDIRVRAKSKHMDHLIQSTSTNTKVLPPFLFTRRTRISRFRLYQLSDLVTSSPPGGRFVGWRDRKTKNSNGNTRAQRLDRLGPSESNTLHPVFWWIVLLVRDAKGRCALPQGVSLPPI

SEQ ID NO: 104633 - protein, 263 aa, Setaria italica
  Transcript Sequence Number=SeqID_38659
  Gene Ontology: Mol. function=metal ion binding
  Homolog annotation: Hit_ID=B4FK95; Match level="QueryCoverage=77%, HitCoverage=89%, E-value=9e-36, Identity=37%"; Hit description=PHD finger protein
  Pfam annotation: Domain name=PHD; Domain location=208-258; Score =38.3; E_value=3.2e-08; Accession=PF00628.21; Description=PHD-finger
MDSRPPLLTAAGTYSSLACGQLAINVPMEEAGMRRPRIPLSPSNRSVPCYAPEIKAFREFTHRRVGLIRALTEDVEEFFRKCASGMRSLYLYGNYNDAIWWEVRQPGPEELLLGINLARGNMSRIKWMQHIAMLCDAWLINIAFSSAQNMTAEQRERLFHRINSLQTVHTAFLASDTYRRLCREEEKVSRPAAEQNDQTEGEGTDEIICIRCNGRYRANAFWICCDVCKQWYHGKCVKIRAKQADQMKKYECPECLSEKSGHS

SEQ ID NO: 104634 - protein, 89 aa, Setaria italica
  Transcript Sequence Number=SeqID_38660
RRTAASSSPGTPAAPANLAHRDPSVDAAPARAKIPAETCGESPGLPLHRLGPRPRPSRCPSRILICSIQSGLAILKFANSDWGPEGAAA

SEQ ID NO: 104635 - protein, 83 aa, Setaria italica
  Transcript Sequence Number=SeqID_38661
TICALRFISSLFYVALFRVAKRPRDVSHQQVSFTIFLTNRYNSTYSLYFFFLHVGEVGPSDVCYLQLCPHIVFKMDSSKSMSV

SEQ ID NO: 104636 - protein, 71 aa, Setaria italica
  Transcript Sequence Number=SeqID_38662
VFLFTEFIGFFVLSKSHSASCACLFILCLTGLDLIACNIVLNHYCFLLPLLNFVVQMYICRFVLTCSVIFS

SEQ ID NO: 104637 - protein, 281 aa, Setaria italica
  Transcript Sequence Number=SeqID_38663
  Gene Ontology: Mol. function=metal ion transmembrane transporter activity; Cellular component=membrane; Biological process=metal ion transport
  Homolog annotation: Hit_ID=Q01JR9; Match level="QueryCoverage=93%, HitCoverage=60%, E-value=2e-83, Identity=63%"; Hit description =OSIGBa0160I14.4 protein
  Pfam annotation: Domain name=CorA; Domain location=7-280; Score =128.8; E_value=1.7e-35; Accession=PF01544.10; Description=CorA-like Mg2+ transporter protein
RGGGGGGDGNGKDGQALGSDKVLPFEFRALEVCLEFACKSLEQETCTLEKEAYPALDELSSNVSTLNLERVRQIKSRLVVISGRVQKVRDELEHLLDDDIDMAAMHLSEKLAYQAADSQSSRFAADNEPSEFDEERDGEVEEEGGSSEGGGYGNGTSAAAGFTPKIDELEILLESYFVQTDGTLNKLNTLREYVDDTEDYINIMLDEKQNQLLQMGIMLSTGTLVVSAAIAVTGVFGMNITIPLYDKGVGAFWQVTGGIVGATAAIYLVALLCYRRSGILQ

SEQ ID NO: 104638 - protein, 345 aa, Setaria italica
  misc_feature (39)..(39): Xaa can be any naturally occurring amino acid
  misc_feature (65)..(65): Xaa can be any naturally occurring amino acid
  misc_feature (324)..(324): Xaa can be any naturally occurring amino acid
  Transcript Sequence Number=SeqID_38664
  Gene Ontology: Mol. function=binding
  Homolog annotation: Hit_ID=Q84UC4; Match level="QueryCoverage=86%, HitCoverage=27%, E-value=2e-30, Identity=30%"; Hit description=HASTY
VLLLDIHIFDTDADCGSNTCERDNNGADYSKESNELVNXRKSVIGEGKLHQLLAEHTTLSESLFXAATCPGFDEDKLAPLLSSLKDVWTHPQWKACLELLCCDNMFRKAVLKIVKFFEQELKKCREGYLHEKGQISYSTLITLVPLVIPPLLKLLRFVHALWTDEAEFFLRKELREAKRMNSCEQDFSNLGAELKCREENELGKWLQQIRESGYNFLGLCACIDGAFSELLDSSSISAAIMENVRSMEFWHLTRLIDLIIIPFVKHCPRKLREEWMFKFFVPLLDYCEDKLRYSWLNLLYSGQADVPCCLGYLCESEETIEHMXNYLLLDLTRKFSKLLGSLCSS

SEQ ID NO: 104639 - protein, 43 aa, Setaria italica
  Transcript Sequence Number=SeqID_38665
TDIFSLLPQVFILKSLPLRFLATRLAFNNTPNEFFDWVQVSLQ

SEQ ID NO: 104640 - protein, 299 aa, Setaria italica
  Transcript Sequence Number=SeqID_38666
  Gene Ontology: Mol. function=hydrolase activity
  Homolog annotation: Hit_ID=B9REE8; Match level="QueryCoverage=100%, HitCoverage=88%, E-value=1e-101, Identity=56%"; Hit description =Alpha/beta hydrolase, putative
  Pfam annotation: Domain name=Abhydrolase_1; Domain location=71-284; Score=37.3; E_value=5.9e-08; Accession=PF00561.12; Description =alphabeta hydrolase fold
ERIRDGAATGFLWRLNRAYLQTGFSVSPIQSSCVRPLKQQQDADPIVLLHGFDSSCLEWRYTYPLLEEAGHEAWAVDILGWGFSDLATRPPCDVASKREHLYQFWKSYIKRPMVLVGPSLGAAVAIDFSINYPEAVSKMIFIGASVYSEGPKDMTRMPKFVSYAGVFILKSLPLRFLATRLAFNNTPNEFFDWVQIGRLHCLLPWWEDSTVDFMIRGGYNVIKQIKQVKHKCLIMWGEDDGIISSKLAYRLHQELPDAILRQVRQCGHIPHVEKPREAAKLVLEFLERDKAENTDRASS

SEQ ID NO: 104641 - protein, 100 aa, Setaria italica
  Transcript Sequence Number=SeqID_38667
  Gene Ontology: Mol. function=hydrolase activity
  Homolog annotation: Hit_ID=B9REE8; Match level="QueryCoverage=92%, HitCoverage=27%, E-value=4e-21, Identity=48%"; Hit description =Alpha/beta hydrolase, putative
NSTVDFMIRLGFNVIKLIKQVKHKCLIMWGEDDGIISSKLAYRLHQELPDAILRQVRQCGHIPHVEKPREAAKLVLEFLERDKAENTDRASSVTPVLTNS

SEQ ID NO: 104642 - protein, 186 aa, Setaria italica
  misc_feature (35)..(35): Xaa can be any naturally occurring amino acid
  Transcript Sequence Number=SeqID_38668
  Gene Ontology: Cellular component=plasma membrane
  Homolog annotation: Hit_ID=B6T362; Match level="QueryCoverage=100%, HitCoverage=100%, E-value=4e-81, Identity=85%"; Hit description =Fiber protein Fb34
  Pfam annotation: Domain name=DUF1218; Domain location=58-155; Score =181.4; E_value=2.6e-51; Accession=PF06749.4; Description=Protein of unknown function (DUF1218)
MASIIVQAVVILLDVIAFGLGVAAEQRRSRATVTXPDAAKEYDFCVYDSDIATGYGVGALLLLAAAQVVLMTASRCFCCGRGLKPGGSRACALILFLFTWVTFLIAEACLLAGSVRNAYHTRYRGIFYGESLSCETVRKGVFAAGAAFTFFTAILGEVYYLSYSKSRDAAGGAPYGGSSIGMGPYN

SEQ ID NO: 104643 - protein, 221 aa, Setaria italica
  Transcript Sequence Number=SeqID_38669
  Gene Ontology: Mol. function=nucleic acid binding
  Homolog annotation: Hit_ID=Q6YYC0; Match level="QueryCoverage=96%, HitCoverage=31%, E-value=6e-17, Identity=33%"; Hit description=Zinc finger CCCH domain-containing protein 55
MEPTTPVVVHTSAHVLSGYDRGNLNSAQRSQHYVFPLQDFGLQPPPLLIPSRISENGINIDKGHSSQVLGIQNGMHATNFATRNSQMHQYKFLAHPKRLGEYFVPQAGVHVPALSLQGQSSSQEAYAILDVSSHNGQIFNVNDQISNNLEAAVGSKETTGIPKHVQDSGTQSMQNTHNFQPVGANEPTQRQTLQEVSVAPYSRSANRVAASIYHDAAASEQ

SEQ ID NO: 104644 - protein, 116 aa, Setaria italica
  Transcript Sequence Number=SeqID_38670
  Gene Ontology: Mol. function=aspartic-type endopeptidase activity; Cellular component=extracellular region; Biological process =proteolysis
  Homolog annotation: Hit_ID=B6SMJ5; Match level="QueryCoverage=85%, HitCoverage=21%, E-value=5e-13, Identity=39%"; Hit description =Aspartic proteinase nepenthesin-2
SVAMEALKEALAEAVKLPVLNGTDLGYELCFQLPKGMTVEAVQAPPLVYHFDGGAAMVLPRENFFVEASPGEMCLVISSGGARGAIIGNYQQQNMHVLFDVQNHKFSFSPTQCDQI

SEQ ID NO: 104645 - protein, 232 aa, Setaria italica
  misc_feature (205)..(205): Xaa can be any naturally occurring amino acid
  Transcript Sequence Number=SeqID_38671
  Gene Ontology: Mol. function=catalytic activity
CSGITLPPGSAILELTRFVTSACLVREFNDKRNRNDDLRIQVRLPDNTTTDGFLGLYDKDIAIVTSIDYLEDDPVDLDLQESPDCPDGHVLAAGRAFNSGSLMAMRGSLSNESPNIFLSDSQGLTEAALGGPIVGNDKRFHGMIVDLCHHGSENKKCAKFLSPKSLRERLELFQILNPRELHFRNYSLPEGVSSVVPSGFMKLFXPVKSFGYPMPPPLVLEFNGEVRLTIQI

SEQ ID NO: 104646 - protein, 114 aa, Setaria italica
  misc_feature (93)..(93): Xaa can be any naturally occurring amino acid
  Transcript Sequence Number=SeqID_38672
  Homolog annotation: Hit_ID=B6SQ79; Match level="QueryCoverage=100%, HitCoverage=100%, E-value=1e-40, Identity=75%"; Hit description=Cell growth defect factor 2
  Subcellular localization annotation: CTP_CleavageSite=71; ConfidenceScore=5.04e-01
MANGGGYGWALAAGFNAALAAISAKFFATLLIKYGMVILFNVTMWGCYVNSLKALSSLQATVTNFAANFISSGLAGYFLFHEPLPSKWFAGAXVIILGVFILSKSSIEEKQNSD

SEQ ID NO: 104647 - protein, 154 aa, Setaria italica
  Transcript Sequence Number=SeqID_38673
AASTSEEVSIQVVEITNDEQIHETEPISCEKVKICEANATSEAEVPVGLPFVTPQKKKLTEVNSAEPFKTGSKASEKGENSGSITGNTVSSSIKSAPNDSRKNSKCAASDSAQVSGSSRKRAKKGWTTLKQIAEKDELERREKMSNFVIPFFMQ

SEQ ID NO: 104648 - protein, 33 aa, Setaria italica
  Transcript Sequence Number=SeqID_38674
RILSIMCCTNVRSMFFQHIINVSCQLCVDRTFV

SEQ ID NO: 104649 - protein, 44 aa, Setaria italica
  Transcript Sequence Number=SeqID_38675
RCLALCLHAWLGSRRHQTKCCYMLDATTPWVLGGGAYIWITKKY

SEQ ID NO: 104650 - protein, 81 aa, Setaria italica
  Transcript Sequence Number=SeqID_38676
VDMTPEAEGLAQRMMKKGVQLTPLAGSSMVRELCVRKRSLDACHWLRMMEESGVLCDSDVYGTLLLGLCEEGHVHEAIQDN

SEQ ID NO: 104651 - protein, 55 aa, Setaria italica
  Transcript Sequence Number=SeqID_38677
FLTQYFKAKLDGKITLKIQAVVVTIYRWREVHPLSCCVLQKIFLVISVGEKKPVL

SEQ ID NO: 104652 - protein, 141 aa, Setaria italica
  Transcript Sequence Number=SeqID_38678
  Homolog annotation: Hit_ID=B6TVL7; Match level="QueryCoverage=78%, HitCoverage=40%, E-value=6e-46, Identity=87%"; Hit description=mTERF- like protein
PTSGGALPELVLYLLDLGMDHEEIKNIVRKFPAFAYYNVERKIKPLVELLLDLGVPRSSIPGIIKKRPQLCGISMSDNLKPMMVYLENIGVNRAQWSKVITRFPAVLTYSRNKVETTVSFLTELGVSKKYSAVGLTLSSTL

SEQ ID NO: 104653 - protein, 382 aa, Setaria italica
  Transcript Sequence Number=SeqID_38679
  Homolog annotation: Hit_ID=B6TVL7; Match level="QueryCoverage=74%, HitCoverage=100%, E-value=1e-129, Identity=61%"; Hit description =mTERF-like protein
  Pfam annotation: Domain name=mTERF; Domain location=102-373; Score =122.2; E_value=1.7e-33; Accession=PF02536.6; Description=mTERF
NKSDGFIEHLVSKLQIAYRSRYAEGRELSTPEIRDALLPYLEALDREHGDSLVEVVENFADPFSMEREALSSSMVLTPTSSNKQKAVARISTPTSGGALPELVLYLLDLGMDHEEIKNIVRKFPAFAYYNVERKIKPLVELLLDLGVPRSSIPGIIKKRPQLCGISMSDNLKPMMVYLKEKTKLKVTQWSKVITRFPAVLTYSRNKVETTVSFLTELGVSKKNIGKILTRCPHIMSYSVDDNLRPTAEYFRSIGADAASLIQKSPQAFGLNVEAKLKPITEFFLEREFSIEEIGIMANRFGIIHTLSLEQNLLPKYEFFLTMEYPRSELVKFPQYFGYSLEQRIKPRYAQMTGSGVRLILNQMLSVSDTRFEEILEKKKTRV

SEQ ID NO: 104654 - protein, 237 aa, Setaria italica
  Transcript Sequence Number=SeqID_38680
  Gene Ontology: Mol. function=transferase activity; Biological process= D-ribose metabolic process
  Homolog annotation: Hit_ID=B9SU49; Match level="QueryCoverage=97%, HitCoverage=59%, E-value=1e-92, Identity=70%"; Hit description =Ribokinase, putative
  Pfam annotation: Domain name=Phos_pyr_kin; Domain location=41-221; Score=-136.5; E_value=0.0068; Accession=PF08543.4; Description =Phosphomethylpyrimidine kinase
AGGVRTDRVARAPDAPSGHAVVMLMPDGQNSIIIVGGANMEGWAAGIGAEDLELIQKAGVLLLQREIPDWVNVQAAQAAKSAGVPVIMDAGGMDAPVPGELLRLVDIFSPNETELARLTGLPTESFEQINQAAGQCHKMGVKEVLVKLGSQGSALFVEGEEPIRQPIIPATEVIDTTGAGDTFTSAFAVALVEGKPKKECMRFAAAAASLCVRVKGAIPSMPDRKSVMKLLESVQVE

SEQ ID NO: 104655 - protein, 74 aa, Setaria italica
  Transcript Sequence Number=SeqID_38681
KLEVEEFLKTNGPITGMFRGRKLHKKRIAGLDGHGRAGSTAKSTRGRKAANYPTGNFPVDPNHSIKPTLPHGFL

SEQ ID NO: 104656 - protein, 210 aa, Setaria italica
  Transcript Sequence Number=SeqID_38682
MDSSSVEWSDFEMTPSPPPAVIRAEDEDIISAPPKPLNIDDPKLKGQEPPDAVPLSVVLSPYGGKEPIPFDKNKLGHLRDQSVPVKEQPICCFPQSLKSLESYKEEDWTAFLHTRVVDGHKDWTYEHRVYQRKFRSKLEVEEFLKTNGPITGMFRGRKLHKKRIAGLDGHGRAGSTTKSTRGRKAANYPTGNFPVDPNHSIKPTLPHGFL

SEQ ID NO: 104657 - protein, 354 aa, Setaria italica
  misc_feature (62)..(62): Xaa can be any naturally occurring amino acid
  Transcript Sequence Number=SeqID_38683
  Gene Ontology: Mol. function=protein dimerization activity
  Homolog annotation: Hit_ID=B9REN7; Match level="QueryCoverage=99%, HitCoverage=47%, E-value=1e-61, Identity=37%"; Hit description=DNA binding protein, putative
  Pfam annotation: Domain name=DUF659; Domain location=159-311; Score =277.1; E_value=4e-80; Accession=PF04937.7; Description=Protein of unknown function (DUF 659)
FKHHLAGIPGQVESCKKVPADVKRQIIQQIDEKWKSEERRYEIREIRVSSIEDSSHDILSTXGSSESQFRPSRKRRTGYFPPQAAAGSEPSSGAFMASEDMVQHGMDGAEAPNDLLHEAKIAMARWWYDANVPFSAAKSPFYQPMLEAIVSAGLSFKGPSYHDLRKPLLQHIAEDIHEYLNDLKREWSVRGCSIIADRQKDNGEGSIINFLVYCPCGTMFLKSIDTSTEREDLLEIFDQVIREVGPKNIVQFITDIDPRYKASVKVLEERYGTFVWSPCAAHCIDLMLENFADPRYFPKIDETLGKARKITKFIYNHAWALSLMRTEFTNGRDLCRPSISRFATHFLSLQCIVK

SEQ ID NO: 104658 - protein, 89 aa, Setaria italica
  Transcript Sequence Number=SeqID_38684
  Subcellular localization annotation: CTP_CleavageSite=57; ConfidenceScore=5.29e-01
SPAHATPPAPVPASSPAQAPTPPAIAPATPPTPRRHPAPPQEADTPADSPDADSQPPADQKNNGARDTVSWSLGMVVAAAVPVIVLLLQ

SEQ ID NO: 104659 - protein, 424 aa, Setaria italica
  misc_feature (8)..(8): Xaa can be any naturally occurring amino acid
  misc_feature (29)..(29): Xaa can be any naturally occurring amino acid
  Transcript Sequence Number=SeqID_38685
  Gene Ontology: Mol. function=nutrient reservoir activity; Cellular component=anchored to membrane
  Homolog annotation: Hit_ID=O04288; Match level="QueryCoverage=68%, HitCoverage=72%, E-value=4e-93, Identity=64%"; Hit description =Endosperm specific protein
  Pfam annotation: Domain name=Fasciclin; Domain location=155-290; Score=55.1; E_value=2.7e-13; Accession=PF02469.14; Description =Fasciclin domain
RAAAEINXRTTITVLAVDNDVMSQLKAQXVQPRDLERVIYLHCLLDYFDATKLGSIRGGFVQATSLYQATGKAQGGEGMVNVTMFRGGRVAFALSGTSNVPPAAFYQKSIKEEPYQIAVLQVSAPIWSPAPVAGAQAPAPEPPAPGLADLLSKNGCGGFASLLAATADAAAKFERSAGGGGGLTVFCPDDKAVTAFDATFKNLSADGQLAVLLYHGVAAHYSAQSLKTINGDVNTLATDGSKGYKYNLTVRADGDTVELSSASQSAAKVTKTVVDKGPLAVYLIDAVLLPSELFNASHGRTAPAPAPASSPAHAPPPAPAPASSPAHATPPAPVPASSPAQAPTPPAIAPATPPTPRRHPAPPQEADTPADSPDADSQPPADQKNNGARDTVSWSLGMVVAAAVPVYSLSYLKKLKRKNKKVKK

SEQ ID NO: 104660 - protein, 124 aa, Setaria italica
  Transcript Sequence Number=SeqID_38686
  Pfam annotation: Domain name=Tryp_alpha_amyl; Domain location=39-103; Score=8.5; E_value=0.044; Accession=PF00234.14; Description=Protease inhibitorseed storageLTP f
MTSAKALGVLCLLVVLAISPSPAQAYQVLDLKAKVLHKCMMYIEKTGELMPQRSSPCCDKVRKADVQGICNKLTTAEKARIKIEKWVQVTRKCENPLPVGFNCAGYVVPEPPSPPLPPPPRSAY

SEQ ID NO: 104661 - protein, 129 aa, Setaria italica
  misc_feature (42)..(42): Xaa can be any naturally occurring amino acid
  Transcript Sequence Number=SeqID_38687
  Homolog annotation: Hit_ID=Q7XPL9; Match level="QueryCoverage=81%, HitCoverage=11%, E-value=3e-09, Identity=45%"; Hit description =OSJNBa0085I10.7 protein
MHHVGTKEPSVHSAHREESRIEPINKTIAKSSARKLIANLSXIYRCAKSRQEPPIHVSSASRAQVCPSSYSVHSQGQQPVEDIVSHGQQINGYWAVSSTIQHETIEAQIKSIVLNRPKVSITARQLDGI

SEQ ID NO: 104662 - protein, 96 aa, Setaria italica
  misc_feature (50)..(50): Xaa can be any naturally occurring amino acid
  misc_feature (60)..(60): Xaa can be any naturally occurring amino acid
  misc_feature (89)..(89): Xaa can be any naturally occurring amino acid
  Transcript Sequence Number=SeqID_38688
  Gene Ontology: Mol. function=cysteine-type peptidase activity; Cellular component=nucleus; Biological process=regulation of transcription
  Homolog annotation: Hit_ID=Q8LJZ1; Match level="QueryCoverage=94%, HitCoverage=8%, E-value=2e-31, Identity=71%"; Hit description=TNP2 -like protein
IVACRDDKHYLHPTSYTLSKEAKEIKFECLNSIKVPSSYSSNIQGIINFXEKKFINLKGXDCHILMTQLLPVALRGILPENVRMAIEKXCAFRNMI

SEQ ID NO: 104663 - protein, 219 aa, Setaria italica
  misc_feature (52)..(52): Xaa can be any naturally occurring amino acid
  misc_feature (118)..(118): Xaa can be any naturally occurring amino acid
  misc_feature (132)..(132): Xaa can be any naturally occurring amino acid
  Transcript Sequence Number=SeqID_38689
  Gene Ontology: Mol. function=RNA-directed DNA polymerase activity; Cellular component=nucleus; Biological process=regulation of transcription
  Homolog annotation: Hit_ID=Q8LJZ1; Match level="QueryCoverage=87%, HitCoverage=17%, E-value=1e-71, Identity=68%"; Hit description=TNP2 -like protein
MESASRCMMDGVECTLLLDVFKGYTLSKEAKEIKFECLNSIKVPSSYSSNIXGIINFTEKKFINLKARDCHILMTQLLPVALRGILPENVRMAIEKLCAFRNMISQKAIHPNNLLKLXNDVVQCLVNFEMVXFPPSLFTIMTHLLVHIVEEIFVLGPIFLHNMFPFERFMAVLKKYVHNRARLEGSIAKGYRIKEVIEFCVNFIDNLSLIGVPVSCYGR

SEQ ID NO: 104664 - protein, 92 aa, Setaria italica
  Transcript Sequence Number=SeqID_38690
LDEEYLMKLIAEGGTNDQPNEEVDHSQTDIYLNMSGDGNEKQPIAEEGNDGQQGEPSGSSSRAKQKRGKKKKNLEGRIIITKVDEDGEPIAS

SEQ ID NO: 104665 - protein, 132 aa, Setaria italica
  Transcript Sequence Number=SeqID_38691
  Gene Ontology: Mol. function=mRNA guanylyltransferase activity; Cellular component=nucleus; Biological process=mRNA processing
  Homolog annotation: Hit_ID=Q5KMM9; Match level="QueryCoverage=100%, HitCoverage=28%, E-value=4e-28, Identity=49%"; Hit description=MRNA guanylyltransferase, putative
  Pfam annotation: Domain name=mRNA_cap_C; Domain location=34-132; Score=-0.8; E_value=0.00067; Accession=PF03919.7; Description=mRNA capping enzyme, C-terminal domain
PQLLHGNDGLIFTGLDSKYVYGSNTKILKWKPPQENTIDFQLQLRFPPDLKADASGATPDFRAKPTFQLWQHESGDTHVPFDYLDMDDEEWEKWKQSGEQLDDRIVECAWYPPSPDNSSLATWHIKRIRDDK

SEQ ID NO: 104666 - protein, 30 aa, Setaria italica
  Transcript Sequence Number=SeqID_38692
NKIQLISQYTLILCSGCFSVYCASEYPLLS

SEQ ID NO: 104667 - protein, 98 aa, Setaria italica
  Transcript Sequence Number=SeqID_38693
MALVKMSRKRLVYLTVSLFLVLATMTSTSQSIETECIGWWCRPRRSPPPQSPQGRINCFTPYSLEHCNDRDCGHTCSTHGFHFGGYCKQDYHPICCCR

SEQ ID NO: 104668 - protein, 46 aa, Setaria italica
  Transcript Sequence Number=SeqID_38694
LQACNKPQPYPRNNVQLCCKPAANALICALSYKIGINESCYNTQSP

SEQ ID NO: 104669 - protein, 135 aa, Setaria italica
  misc_feature (22)..(22): Xaa can be any naturally occurring amino acid
  misc_feature (31)..(31): Xaa can be any naturally occurring amino acid
  misc_feature (33)..(33): Xaa can be any naturally occurring amino acid
  Transcript Sequence Number=SeqID_38695
  Gene Ontology: Mol. function=transporter activity; Cellular component= membrane; Biological process=transport
  Homolog annotation: Hit_ID=Q8GTY9; Match level="QueryCoverage=97%, HitCoverage=25%, E-value=5e-26, Identity=52%"; Hit description =Nramp1 protein(Natural-resistance-associated macrophage protein 1)
LIIIASMILSVELPFALIPLLXSSSSNKIGXNXNSIYIIGFSWILGFIIIGINIYFLSSKLVGWILHNKLPIYTNVLIGIIMFPLMLLYISAVIYLTFRKDTVKFASRGELQAIETDKSKVANDSSNEENKEDLV

SEQ ID NO: 104670 - protein, 69 aa, Setaria italica
  Transcript Sequence Number=SeqID_38696
NLSQITSFMKLKISAPISNGWMGLEDRITGLQTERDGAADGQAAILKRVRSFSHKYSLPDEYFNLSLLN

SEQ ID NO: 104671 - protein, 111 aa, Setaria italica
  misc_feature (71)..(71): Xaa can be any naturally occurring amino acid
  Transcript Sequence Number=SeqID_38697
  Gene Ontology: Mol. function=binding; Biological process=cell redox homeostasis
  Homolog annotation: Hit_ID=Q67UW7; Match level="QueryCoverage=100%, HitCoverage=47%, E-value=4e-36, Identity=45%"; Hit description =Putative pentatricopeptide (PPR) repeat-containing protein
  Pfam annotation: Domain name=PPR; Domain location=45-79; Score=30.3; E_value=7.6e-06; Accession=PF01535.12; Description=PPR repeat
ARRLFDAMPCRDVSSWNAMLTGYCHSRQMVDARNLFEQMPERNTVSWTVMISGYVLIEQHGKAWDMFRMMXYDGMSPEQPNLSLCAFSYKSTLVILNILESIHVLVHKAGF

SEQ ID NO: 104672 - protein, 65 aa, Setaria italica
  Transcript Sequence Number=SeqID_38698
PLAPPWITHPLAQCLARSPRKFSLIRNAHNFVALHTSDLFCTKIHHTLTRHYADFTHHNHTCTML

SEQ ID NO: 104673 - protein, 73 aa, Setaria italica
  misc_feature (44)..(44): Xaa can be any naturally occurring amino acid
  Transcript Sequence Number=SeqID_38699
TRPIVLPRLIQVFRSHCCRKQYSGTPSVHYCGHISLTFNFSCTXFCQLLLNQHLIRALLKYGSIDTRQAYNLT

SEQ ID NO: 104674 - protein, 187 aa, Setaria italica
  Transcript Sequence Number=SeqID_38700
  Subcellular localization annotation: CTP_CleavageSite=65; ConfidenceScore=5.76e-01
MQNTRGQSSQKLSAMVNPVSPSPKQMRAPHPSGDPVCTKAGPSSKSLCTPESGKLCSRNINLTPRSAGAPGLQAPIVEPALLSPTSVLSERPIEVYPDTRTAAPVVQEPSVKPVLPSTIPVHNESSTECDNIPPIHSPQYIAPAQHGALLQERNSGASINCSRSSGTPVILHTKLHKKHDQPEALWK

SEQ ID NO: 104675 - protein, 142 aa, Setaria italica
  misc_feature (30)..(30): Xaa can be any naturally occurring amino acid
  Transcript Sequence Number=SeqID_38701
  Subcellular localization annotation: CTP_CleavageSite=20; ConfidenceScore=5.14e-01
AAPPPSPTPRRLPSRLGSIPDAAPPPLSNXPPSPGAAPPPPGHGPFLHLLVPPPPSPLLLFLLPALSQIAWRLGFPSVSPRIASTSRSAAPPPPGLALPRGRQIYTAASRWTSPPPQAAPCCGSGERRAGPRGPGRRSDPMT

SEQ ID NO: 104676 - protein, 81 aa, Setaria italica
  misc_feature (39)..(39): Xaa can be any naturally occurring amino acid
  Transcript Sequence Number=SeqID_38702
  Gene Ontology: Mol. function=DNA binding; Cellular component =intracellular
  Homolog annotation: Hit_ID=B9RCE7; Match level="QueryCoverage=95%, HitCoverage=11%, E-value=3e-18, Identity=59%"; Hit description=DNA binding protein, putative
SGEEIALSWTDEEEASFKAVAQRSAPSLGRDFWNRLHLXFQFKGRKELVSYYFNCFLLRRRCYQNRITPKNIDSDDEEETE

SEQ ID NO: 104677 - protein, 80 aa, Setaria italica
  Transcript Sequence Number=SeqID_38703
  Pfam annotation: Domain name=GYF; Domain location=10-64; Score=11.8; E_value=0.012; Accession=PF02213.8; Description=GYF domain
MPRLSMDTLNMWHYEDPQGDLHGPYPMVMLWRWSIDPGFVAGEDFRVWRTDETKEQAVLLTDGTRTTAQLLGPSLEQSSE

SEQ ID NO: 104678 - protein, 73 aa, Setaria italica
  Transcript Sequence Number=SeqID_38704
SYNFFFQAPVYSIIWASNVTERWCIFLAVIWEIHYLACVVTLLLFICKKGTKIDMQCIVDLLRYPVAMRCNKG

SEQ ID NO: 104679 - protein, 187 aa, Setaria italica
  Transcript Sequence Number=SeqID_38705
  Homolog annotation: Hit_ID=Q9XGD8; Match level="QueryCoverage=45%, HitCoverage=79%, E-value=2e-11, Identity=44%"; Hit description=BETL4 protein
MLPSGKVAVLLLVVCMVSPEQVTSKKPICTKVQREKILEKCGSFIQPGHPTHLVSRDSQCCAAVRGVRDMECFTLLLTEKEKTKYSVEKIRALRGLCESDPPPSHKVTGTCTNEQKESVLNDCEKFIKHGNERRKPIPVMGQPCCNAVNKVAKKGTKIDMQCIVDLLTDEEKQRHDASKIMNLPNHC

SEQ ID NO: 104680 - protein, 66 aa, Setaria italica
  Transcript Sequence Number=SeqID_38706
FSFFSFFFFFFFLFSKDPDNLPAYIDKKKAKLQAPGAPIWSRWSPAQTDAEIRREGSHSARVKYPK

SEQ ID NO: 104681 - protein, 69 aa, Setaria italica
  Transcript Sequence Number=SeqID_38707
LHIADCWINCMLPKLVSIVLLCFVVRGYLNYYVSAWQCYLLPAVMHLNLFSCACSQWMAYAHCNSMLIS

SEQ ID NO: 104682 - protein, 103 aa, Setaria italica
  Transcript Sequence Number=SeqID_38708
  Gene Ontology: Mol. function=protein dimerization activity; Cellular component=nucleus; Biological process=regulation of transcription, DNA-dependent
  Homolog annotation: Hit_ID=Q8LKI5; Match level="QueryCoverage=88%, HitCoverage=21%, E-value=8e-42, Identity=93%"; Hit description =Opaque-2-like protein
  Pfam annotation: Domain name=bZIP_1; Domain location=18-81; Score =51.0; E_value=4.5e-12; Accession=PF00170.13; Description=bZIP transcription factor
  Pfam annotation: Domain name=bZIP_2; Domain location=18-72; Score =37.6; E_value=5e-08; Accession=PF07716.7; Description=Basic region leucine zipper
  Pfam module annotation: Pfam domain module=bZIP_1::bZIP_2; Domain location=18-81::18-72
SDDDDMDGEVEILGFKLPTEEKVRKRKESNRESARRSRYRKAAHLKEMEDQVAQLKVENSSLLRRLATLNQKYTDATVDNRVLKANMETLRAKVKRAVMNSSS

SEQ ID NO: 104683 - protein, 416 aa, Setaria italica
  Transcript Sequence Number=SeqID_38709
  Gene Ontology: Mol. function=protein dimerization activity; Cellular component=nucleus; Biological process=regulation of transcription, DNA-dependent
  Homolog annotation: Hit_ID=Q8LKI5; Match level="QueryCoverage=100%, HitCoverage=100%, E-value=1e-129, Identity=65%"; Hit description =Opaque-2-like protein
  Pfam annotation: Domain name=bZIP_1; Domain location=207-270; Score =51.0; E_value=4.5e-12; Accession=PF00170.13; Description=bZIP transcription factor
  Pfam annotation: Domain name=bZIP_2; Domain location=207-261; Score =37.6; E_value=5e-08; Accession=PF07716.7; Description=Basic region leucine zipper
  Pfam module annotation: Pfam domain module=bZIP_1::bZIP_2; Domain location=207-270::207-261
MDDHAVSMEEIIPDPFWEDLPPPPEPPLVSSDGLIDGVVTDGGGEGTNAMDQNQSPSEWSFERLLEEELLTDATPLENFSGSAPHADTVVEEVDHATMAPAAVSTVGDPMEYNTILKRKLDEDLATVAMWRASSVVHPEHSQGSNNYIGGNINFVQNMRSISEGPINRARNAYIRARLATSSSSRDPSPSDDDDMDGEVEILGFKLPTEEKVRKRKESNRESARRSRYRKAAHLKEMEDQVAQLKVENSSLLRRLATLNQKYTDATVDNRVLKANMETLRAKVKMAEDALKRVTGTMSSSQPSRPSPPVPANADASGPILDNIIDYLMNSTDATTDNNFEPRTATTPSFSQQAEKPAAASTNSAMINRIAAHHAVAVELLHKRLGAMPTASSGVAPPPEPAPPSDVLVESTDMGVH

SEQ ID NO: 104684 - protein, 131 aa, Setaria italica
  Transcript Sequence Number=SeqID_38710
  Gene Ontology: Mol. function=actin binding; Cellular component=actin cytoskeleton; Biological process=actin cytoskeleton organization and biogenesis
  Homolog annotation: Hit_ID=Q5VMJ3; Match level="QueryCoverage=99%, HitCoverage=99%, E-value=1e-56, Identity=80%"; Hit description =Profilin LP04
  Pfam annotation: Domain name=Profilin; Domain location=2-126; Score =231.0; E_value=2.9e-66; Accession=PF00235.11; Description=Profilin
MSWQAYVDDHLLCEIDGQHLTAAAIIGHDGSVWAQSPTFPQYKPEEIVAIMKDFDEPGTLAPTGLFLGGTKYMVIQGEPGAVIRGKKGTGGITVKKTTLALIIGIYDEPMTPGQCNMVVERLGDYLLEQGF

SEQ ID NO: 104685 - protein, 82 aa, Setaria italica
  Transcript Sequence Number=SeqID_38711
  Gene Ontology: Mol. function=actin binding; Cellular component=actin cytoskeleton; Biological process=actin cytoskeleton organization and biogenesis
  Homolog annotation: Hit_ID=Q94JN2; Match level="QueryCoverage=87%, HitCoverage=54%, E-value=6e-23, Identity=75%"; Hit description =Profilin
  Pfam annotation: Domain name=Profilin; Domain location=1-77; Score =43.3; E_value=9.3e-10; Accession=PF00235.11; Description=Profilin
GTFVRNLGYFFAPTGLFLGGTKYMVIQGEPGAVIRGKKGTGGITVKKTTLALIIGIYDEPMTPGQCNMVVERLGDYLLEQGF

SEQ ID NO: 104686 - protein, 124 aa, Setaria italica
  misc_feature (36)..(36): Xaa can be any naturally occurring amino acid
  Transcript Sequence Number=SeqID_38712
  Gene Ontology: Mol. function=branched-chain-amino-acid transaminase activity; Cellular component=chloroplast; Biological process =branched chain family amino acid metabolic process
  Homolog annotation: Hit_ID=B4F9X9; Match level="QueryCoverage=100%, HitCoverage=30%, E-value=3e-59, Identity=92%"; Hit description =Branched-chain-amino-acid aminotransferase
KYLEEVSSCNIFVVKDNVISTPAIKGTILPGITRKXSIIEVAQSKGFKVEERLVSVDELLNADEVFCTGTAVVVSPVGSITYLGKRVEYGNQGVGVVSQQLYKSLTSLQMGLVEDFMDWTVQLN

SEQ ID NO: 104687 - protein, 407 aa, Setaria italica
  Transcript Sequence Number=SeqID_38713
  Gene Ontology: Mol. function=branched-chain-amino-acid transaminase activity; Cellular component=chloroplast; Biological process =branched chain family amino acid metabolic process
  Homolog annotation: Hit_ID=Q6AT43; Match level="QueryCoverage=91%, HitCoverage=91%, E-value=0.0, Identity=91%"; Hit description =Branched-chain-amino-acid aminotransferase
  Pfam annotation: Domain name=Aminotran_4; Domain location=143-388; Score=151.9; E_value=1.9e-42; Accession=PF01063.11; Description =Aminotransferase class IV
  Subcellular localization annotation: CTP_CleavageSite=58; ConfidenceScore=5.27e-01
MEYGVASHGALLAAAPLAGRRLRLPLSPSPPPPSIQIQNRLYSISSLPLKARPVRRCGASLASNYSQTSEIVDLDWENLGFGIVQTDYMYVAKCGTDGNFAEGEMVPFGPISLNPSSGVLNYGQGLFEGLKAYRKPDGSILLFRPEENALRMQTGAERMCMPAPSVEQFVDAVKQTVLANKRWVPPTGKGSLYIRPLLMGSGAVLGLAPAPEYTFIIFVSPVGNYFKEGLAPINLIVEDKFHRATPGGTGGVKTIGNYASVLMAQKIAKEKGYSDVLYLDAVHKKYLEEVSSCNIFVVKGNVISTPAIKGTILPGITRKSIIDVAVSKGFQVEERLVSVDELLDADEIFCTGTAVVVSPVGSITYQGKRVEYGHQGVGVVSQQLYTSLTSLQMGQTEDWMGWTMQLN

SEQ ID NO: 104688 - protein, 41 aa, Setaria italica
  Transcript Sequence Number=SeqID_38714
SELDYLYLMHARSDIFRSSSTHGCHQQRQRNQNSRMRIVYQ

SEQ ID NO: 104689 - protein, 230 aa, Setaria italica
  misc_feature (22)..(22): Xaa can be any naturally occurring amino acid
  Transcript Sequence Number=SeqID_38715
  Gene Ontology: Mol. function=manganese ion binding; Cellular component=chloroplast
  Homolog annotation: Hit_ID=B6TUU0; Match level="QueryCoverage=100%, HitCoverage=65%, E-value=1e-116, Identity=88%"; Hit description =Nudix hydrolase 24
  Pfam annotation: Domain name=NUDIX; Domain location=62-199; Score =20.0; E_value=0.0023; Accession=PF00293.20; Description=NUDIX domain
SLRSSLRTPEERTNAIGDVIKXLGELIPGIRNELYPVTSSYGMPVYFSLERAAAPYFGIKAYGVHMNGYVEKDGQKFLWIGKRSDVKQTYPGMLDHLVAGGLPYGISCKENIIKECEEEAGIPRSVSTNATSVGAISYMDIEGFRYKRDVLFCYDLKLLADFVPNNEDGEVDSFRLIPVPHAANIIRRTEFFKPNCNLVIIDFLFRHGYINPDSRGYLNLLQSLRSGDCS

SEQ ID NO: 104690 - protein, 80 aa, Setaria italica
  Transcript Sequence Number=SeqID_38716
PRRKRAEDENVQREQRTQKQYMMTELILKTVCGHIWPFWMLKDKVKTFKTLYIVKLHSCLAGSSSPRQRIISMVTKMMVT

SEQ ID NO: 104691 - protein, 474 aa, Setaria italica
  misc_feature (336)..(336): Xaa can be any naturally occurring amino acid
  Transcript Sequence Number=SeqID_38717
  Gene Ontology: Cellular component=mitochondrion
  Homolog annotation: Hit_ID=B9S070; Match level="QueryCoverage=99%, HitCoverage=99%, E-value=1e-170, Identity=38%"; Hit description =Pentatricopeptide repeat-containing protein, putative
  Pfam annotation: Domain name=PPR; Domain location=116-150; Score =38.6; E_value=2.5e-08; Accession=PF01535.12; Description=PPR repeat
  Pfam annotation: Domain name=PPR; Domain location=151-185; Score =37.6; E_value=5.1e-08; Accession=PF01535.12; Description=PPR repeat
  Pfam annotation: Domain name=PPR; Domain location=186-220; Score =35.9; E_value=1.7e-07; Accession=PF01535.12; Description=PPR repeat
  Pfam annotation: Domain name=PPR; Domain location=221-255; Score =56.2; E_value=1.3e-13; Accession=PF01535.12; Description=PPR repeat
  Pfam annotation: Domain name=PPR; Domain location=256-290; Score =41.4; E_value=3.6e-09; Accession=PF01535.12; Description=PPR repeat
  Pfam annotation: Domain name=PPR; Domain location=291-325; Score =15.8; E_value=0.12; Accession=PF01535.12; Description=PPR repeat
  Pfam annotation: Domain name=PPR; Domain location=30-64; Score=40.7; E_value=5.8e-09; Accession=PF01535.12; Description=PPR repeat
  Pfam annotation: Domain name=PPR; Domain location=360-394; Score =28.1; E_value=3.5e-05; Accession=PF01535.12; Description=PPR repeat
  Pfam annotation: Domain name=PPR; Domain location=398-432; Score =38.9; E_value=1.9e-08; Accession=PF01535.12; Description=PPR repeat
  Pfam annotation: Domain name=PPR; Domain location=433-467; Score =11.3; E_value=0.41; Accession=PF01535.12; Description=PPR repeat
  Pfam annotation: Domain name=PPR; Domain location=65-99; Score=25.9; E_value=0.00016; Accession=PF01535.12; Description=PPR repeat
  Pfam module annotation: Pfam domain module=PPR::PPR::PPR::PPR::PPR::PP R::PPR::PPR::PPR::PPR::PPR; Domain location=116-150::151-185::186 -220::221-255::256-290::291-325::30-64::360-394::398-432::433-467::65- 99
IDSFCKAGLIEQAQSWYDEMMSVGCSPNVVTYTALLHAYLKAKQLSQASDFFHRMVDAGCPPNAITYSALIDGLCKAGEIKKACEVYAKLIGTSGSVESEFYFEGKHTDAVAPNVVTYGALIDGLCKAHKVVDAHELLDAMSLTGCEPNHIIYDALIDGFCKVGKIDNAQEVFLRMTKCGYLPTVHTYTSLIDAMFKGKRLDLAMKVLSQMLEGSCTPNVVTYTAMIDGLCRIGESEKALKLLSMMEKKGCSPNVVTYTALIDGLGKSGKVEIGLQLFTQMSTKGCAPNYVTYRVLINHCCGAGLLDKAHSLLTEMKQTYWPKYLQGYSYAVQGFXSKKFIASLGLLEEMESHGTVPIAPVYGLLIDNFSKAGRLEKALELHKEMIEVSPSLNITSKVAYASLIRALCLASHLEEAFELYSEMARKGVVPELSVFVCLIKGLVKVNKWNEALQLCYSICHEGVNWQDNNSFDGG

SEQ ID NO: 104692 - protein, 348 aa, Setaria italica
  misc_feature (195)..(195): Xaa can be any naturally occurring amino acid
  Transcript Sequence Number=SeqID_38718
  Gene Ontology: Cellular component=vacuole
  Homolog annotation: Hit_ID=UPI0001A7B2D3; Match level="QueryCoverage =83%, HitCoverage=19%, E-value=1e-42, Identity=38%"; Hit description =glycine-rich protein
RLLLLLGAVLGNAGPGRGGGAEASDRAEPDPYSILMWHDYSPPSPPPPPPAPVAPVATCAKDLHGKGDFRTRCEVSEEVKLGGDVYITGNGSLVLLSGASLTCEKAGCVISANLSGEVRLSRGVRVRAGRVSLVATNITVADTVVVNTTALAGDPPDRTSGVPTGTHGDGGGHGGRGASCFVKDGQTQEDSWGGXDAYAWSDLEHPCSFGSKGGSTSVEKDYGGAGGGIVWLFAENLIMNGTVLADGGDSSEKGGGGSGGSIYIKAATMHGGGKISASGGNGLAGGGGGRVSINVFSRHDDTQIFVHGGRSSGCPDNAGAAGTLYEAVPKSLIVSNNNLSTQTDTSLL

SEQ ID NO: 104693 - protein, 164 aa, Setaria italica
  misc_feature (146)..(146): Xaa can be any naturally occurring amino acid
  Transcript Sequence Number=SeqID_38719
TEGHLSIEESSSCSKNETNSSCSLTDKLCSSNLVVNSKEAPCCSSENFMFSASRKENENAEGTLLEMQLGALGGCPKQQDLEEVANHGLVLGRECEMRPVNASTISKGSDVGTSDRGMVFANLLQSEHENLHTHRVNSAMKSTKSXNLPGNIESTLAMKSKVET

SEQ ID NO: 104694 - protein, 66 aa, Setaria italica
  Transcript Sequence Number=SeqID_38720
SGSKLQMLLLFDLVIRTRTLQSLEILLIRLLLFYFESNVHNNCAVKLNLLYVFSCRGLQHPDEAYD

SEQ ID NO: 104695 - protein, 74 aa, Setaria italica
  Transcript Sequence Number=SeqID_38721
  Subcellular localization annotation: CTP_CleavageSite=36; ConfidenceScore=5.12e-01
GTNPVRIQFLYGPSQCLLLVGYGVICKQLSSSQVISAFSSVTIRTRTLQSLEILLIRLLLFILNPMCTIIVLPN

SEQ ID NO: 104696 - protein, 298 aa, Setaria italica
  misc_feature (16)..(16): Xaa can be any naturally occurring amino acid
  Transcript Sequence Number=SeqID_38722
  Gene Ontology: Cellular component=mitochondrion
  Homolog annotation: Hit_ID=B4G0H5; Match level="QueryCoverage=73%, HitCoverage=46%, E-value=4e-89, Identity=73%"; Hit description =Membrane-associated salt-inducible protein like
  Pfam annotation: Domain name=PPR; Domain location=122-156; Score =36.5; E_value=1.1e-07; Accession=PF01535.12; Description=PPR repeat
  Pfam annotation: Domain name=PPR; Domain location=157-191; Score =22.9; E_value=0.0013; Accession=PF01535.12; Description=PPR repeat
  Pfam annotation: Domain name=PPR; Domain location=17-51; Score=30.9; E_value=5.2e-06; Accession=PF01535.12; Description=PPR repeat
  Pfam annotation: Domain name=PPR; Domain location=192-226; Score=1.6; E_value=5.7; Accession=PF01535.12; Description=PPR repeat
  Pfam annotation: Domain name=PPR; Domain location=52-86; Score=38.8; E_value=2.1e-08; Accession=PF01535.12; Description=PPR repeat
  Pfam annotation: Domain name=PPR; Domain location=87-121; Score=25.6; E_value=0.0002; Accession=PF01535.12; Description=PPR repeat
  Pfam module annotation: Pfam domain module=PPR::PPR::PPR::PPR::PPR::PP R; Domain location=122-156::157-191::17-51::192-226::52-86::87-121
PSFAELSKEFSITPNXTSYGILVKAYCMNRDDAKAKQTLDQMREQGISPTTKIYTPLIDSMYKQKKTEEAELLWKEMVESGCKPDVAVYNVKVMYYGLYGKLEEVMEVMEEMEADGVKPDIITYNFLMSSYCRNGKFVDAKAVYHSLAEKRFSPNAATYKYMLAGLCANGDFDAGLGIFKESLKRNKVPDFFTMKGFVEGLVKGGMVAEAKKVIADMHKKFRVSGWKKLEKELGLDLDSGDTSCSKGTSGKIVAEAKSVAADAEALELEGSAAEETAVSEESSDDEVPVPGEIPRGPT

SEQ ID NO: 104697 - protein, 78 aa, Setaria italica
  Transcript Sequence Number=SeqID_38723
TRATRPRRPDMPSRAGRRRPAPEEAAPAPAARAAAGRRRKRAMVLVLRAWMQQRVVECCVVQYVVCPGFARLPDRVCW

SEQ ID NO: 104698 - protein, 77 aa, Setaria italica
  Transcript Sequence Number=SeqID_38724
  Subcellular localization annotation: CTP_CleavageSite=65; ConfidenceScore=5.47e-01
CTTYISSPAPSHTSASGLAQTFSPDTSLIPLATYSQLRTGAMRNTDAHRHTARTNTPHAGYQHTRSGRRANPGHTTY

SEQ ID NO: 104699 - protein, 59 aa, Setaria italica
  Transcript Sequence Number=SeqID_38725
AARGTACYRLNHQLAQSILPYCTLFPFVQSCWNSITCAPVYKCKDLFMIVLLPSIYYSH

SEQ ID NO: 104700 - protein, 113 aa, Setaria italica
  Transcript Sequence Number=SeqID_38726
  Subcellular localization annotation: CTP_CleavageSite=9; ConfidenceScore=5.41e-01
RRPWRGPARASLRARGCSRAPWGRRRPSGVLRGGARGRGRPAPRPGTLLLLLARPNRRLAGGAKAASRGGRWGSPGSSRSDRPISISIEKLRTVVSRLLLPVCARTILHERTT

SEQ ID NO: 104701 - protein, 192 aa, Setaria italica
  misc_feature (169)..(169): Xaa can be any naturally occurring amino acid
  Transcript Sequence Number=SeqID_38727
  Gene Ontology: Mol. function=protein binding; Cellular component =endoplasmic reticulum membrane; Biological process=cyclic nucleotide biosynthetic process
  Homolog annotation: Hit_ID=B6TSB6; Match level="QueryCoverage=100%, HitCoverage=88%, E-value=5e-93, Identity=85%"; Hit description =Protein tyrosine phosphatase-like protein PTPLB
  Pfam annotation: Domain name=PTPLA; Domain location=37-192; Score =146.6; E_value=7.5e-41; Accession=PF04387.6; Description=Protein tyrosine phosphatase-like protein, PTPLA
KALGWFIALLRLLPCLAHPVSAHSAYAVAGDLICFLQTCAILETVHAAIGLVPTAPLLTVLQWGGRTHFVLAVVRQIPQVQSSPSVFITFMAWSIAEVIRYSHYALTTLKVCPSWVTYLRYTAFIPLYPIGVGPGEMWTMYQALPFVKKRNLYSGFFEKFSMSYHSFLXGVLVCYPLLWLKLYLHVFKQRKS

SEQ ID NO: 104702 - protein, 225 aa, Setaria italica
  misc_feature (93)..(93): Xaa can be any naturally occurring amino acid
  Transcript Sequence Number=SeqID_38728
  Gene Ontology: Mol. function=protein binding; Cellular component =endoplasmic reticulum membrane
  Homolog annotation: Hit_ID=B6TSB6; Match level="QueryCoverage=92%, HitCoverage=92%, E-value=2e-95, Identity=82%"; Hit description =Protein tyrosine phosphatase-like protein PTPLB
  Pfam annotation: Domain name=PTPLA; Domain location=52-220; Score =151.3; E_value=3e-42; Accession=PF04387.6; Description=Protein tyrosine phosphatase-like protein, PTPLA
MARPSKLYLVCYNSLQALGWFIALLRLLPCLAHPVSAHSAYAVAGDLICFLQTCAILETVHAAIGLVPTAPLLTVLQWGGRTHFVLAVVRQIXPVHIWQLQVQSSPSVFITFMAWSIAEVIRYSHYALTTLKVCPSWVTYLRYTAFIPLYPIGVGPGEMWTMYQALPFVKKRNLYSGFFEKFSMSYHSFLVGVLVCYPLLWLKLYLHVFKQRKSKLGKGSRKKRA

SEQ ID NO: 104703 - protein, 161 aa, Setaria italica
  misc_feature (133)..(133): Xaa can be any naturally occurring amino acid
  Transcript Sequence Number=SeqID_38729
GWDEEDGNPYLPVKWPWEYPLHTCPEGQNFTLEEAKKIVESTWERNGDLLSEWCDLFNNNTTPLPALPLRVLPRVTKDCVSGDDCYHVQYWTGDTDETALDHPYFIPCEMMQVFSLGLSSPLARPINIYGLFXVRDAWEPLRNYLFNRSRNDPAMISQGCF

SEQ ID NO: 104704 - protein, 248 aa, Setaria italica
  misc_feature (241)..(241): Xaa can be any naturally occurring amino acid
  Transcript Sequence Number=SeqID_38730
  Gene Ontology: Mol. function=phosphotransferase activity, alcohol group as acceptor; Cellular component=chromosome; Biological process= mitotic cell cycle spindle assembly checkpoint
  Homolog annotation: Hit_ID=B9RB21; Match level="QueryCoverage=100%, HitCoverage=9%, E-value=3e-93, Identity=61%"; Hit description=Ataxia telangiectasia mutated, putative
AQKIQDDRDNFLNLALQGYQRSLVVGGKYDLQVVFRLVSLWFSLFSRDQVVKAMMKTTKEIALASLLKKMALDHPYHTIFQLLALANGDRVKDKQRSRSSFVVDMEKKLAAENLLKELSSCHGALICQMKQMVEIYIKLAELETKKEDTNKRIPLPREVRSISQLELVPVVTATVPVDPSCQYEVGSFPHFSGLADSIMIMNGINAPKVIECFGSDGNKYRQLAKSGNDDLRQDAVMEQFXSLVNTFL

SEQ ID NO: 104705 - protein, 163 aa, Setaria italica
  misc_feature (38)..(38): Xaa can be any naturally occurring amino acid
  misc_feature (94)..(94): Xaa can be any naturally occurring amino acid
  Transcript Sequence Number=SeqID_38731
  Gene Ontology: Mol. function=protein binding; Biological process =protein amino acid phosphorylation
  Homolog annotation: Hit_ID=A7VM31; Match level="QueryCoverage=92%, HitCoverage=16%, E-value=1e-17, Identity=36%"; Hit description =Receptor-like kinase
  Pfam annotation: Domain name=LRR_1; Domain location=121-142; Score =7.1; E_value=13; Accession=PF00560.25; Description=Leucine Rich Repeat
  Pfam annotation: Domain name=LRR_1; Domain location=145-159; Score =0.2; E_value=2.7e+02; Accession=PF00560.25; Description=Leucine Rich Repeat
  Pfam annotation: Domain name=LRR_1; Domain location=2-24; Score=5.8; E_value=24; Accession=PF00560.25; Description=Leucine Rich Repeat
  Pfam annotation: Domain name=LRR_1; Domain location=73-95; Score =14.3; E_value=0.53; Accession=PF00560.25; Description=Leucine Rich Repeat
  Pfam module annotation: Pfam domain module=LRR_1::LRR_1::LRR_1::LRR _1; Domain location=121-142::145-159::2-24::73-95
TDLRNMYIVSCGFSGPMPPAIGKLTNLRTCISSILGFXGSMPAPIGNLTNLEAMEISGEISGLIPNAIGQLNKLRWLVLQDCNFSGSIPSSIVXFDPAINAGSFFNSLNVEIPPSIFSLPILTHLDLSFNKLSGPLQGFDKAGPQLKTVRFRNNELSGFYSQS

SEQ ID NO: 104706 - protein, 233 aa, Setaria italica
  misc_feature (138)..(138): Xaa can be any naturally occurring amino acid
  Transcript Sequence Number=SeqID_38732
  Gene Ontology: Mol. function=transition metal ion binding; Biological process=oxidation reduction
  Homolog annotation: Hit_ID=Q9LNC3; Match level="QueryCoverage=99%, HitCoverage=61%, E-value=2e-69, Identity=55%"; Hit description =F9P14.10 protein
  Pfam annotation: Domain name=DUF455; Domain location=1-201; Score =192.5; E_value=1.1e-54; Accession=PF04305.6; Description=Protein of unknown function (DUF455)
EMTTHKEMRVPLNAYMLHNLAHVELNAIDLAWDTVVRFAPLRDTLGDGFFADFARVADDESRHFRWYSQRLAELGFSYGDMPVHNLLWSECAKSSSDVSARLAVIPLVQEARGLDAGPRLVQRLFGFGDHRSADDSVXVAEEELAHVSVGLYWFLKVCQMMGRDPGDTFKDLIKEYGVVLKGPFNHPARDEAGIPREWYDEKFKQESAQKLEEVHDRLACIVEMEKENASLNG

SEQ ID NO: 104707 - protein, 51 aa, Setaria italica
  misc_feature (17)..(17): Xaa can be any naturally occurring amino acid
  Transcript Sequence Number=SeqID_38733
  Gene Ontology: Mol. function=phosphotransferase activity, alcohol group as acceptor
KFVKLSDLSAIEWSAFXEKFQELLPSMFHDRKQTSACGPWLTQRLGTSCQF

SEQ ID NO: 104708 - protein, 136 aa, Setaria italica
  Transcript Sequence Number=SeqID_38734
  Gene Ontology: Mol. function=aminoacyl-tRNA ligase activity; Cellular component=cytoplasm; Biological process=tRNA aminoacylation for protein translation
  Homolog annotation: Hit_ID=Q7G2B1; Match level="QueryCoverage=94%, HitCoverage=12%, E-value=2e-35, Identity=58%"; Hit description=Valyl- tRNA synthetase
  Pfam annotation: Domain name=Val_tRNA-synt_C; Domain location=76-136; Score=-6.3; E_value=0.012; Accession=PF10458.1; Description=Valyl tRNA synthetase tRNA binding ar
LKTSKQKVNKRRPAFALCRGQDIIATIQCHQSLIVSLSSVLLLKILTENDETPADCATAIVNKDLSVYLQLQGTLNPEAEHEKLRKMTVEIQKRQLALTQKMDAFGYREKAPQSVQEEGMRKLTAFLEQLIVISEA

SEQ ID NO: 104709 - protein, 183 aa, Setaria italica
  misc_feature (175)..(175): Xaa can be any naturally occurring amino acid
  Transcript Sequence Number=SeqID_38735
  Gene Ontology: Mol. function=DNA binding; Cellular component=nucleus; Biological process=regulation of transcription, DNA-dependent
  Homolog annotation: Hit_ID=B6TZ02; Match level="QueryCoverage=99%, HitCoverage=65%, E-value=2e-63, Identity=74%"; Hit description=TCP family transcription factor containing protein
  Pfam annotation: Domain name=TCP; Domain location=43-166; Score =127.3; E_value=4.8e-35; Accession=PF03634.5; Description=TCP family transcription factor
MISGAGNQQAAADEELARKNAAVATSRQWSAQTESRIVRVSRVFGGKDRHSKVKTVKGLRDRRVRLSVPTAIQLYDLQDRLGLNQPSKVVDWLLNAARHEIDKLPPLQFPPQDHHLMVGHLAPPMPLVHEEKFVGHHIATAAALASDGGAKVGQGGDVDMDWGGAASHHMGRFPXGGYHRFMG

SEQ ID NO: 104710 - protein, 380 aa, Setaria italica
  Transcript Sequence Number=SeqID_38736
  Gene Ontology: Mol. function=arsenite transmembrane transporter activity; Cellular component=integral to membrane; Biological process=citrate transport
  Homolog annotation: Hit_ID=B6SY85; Match level="QueryCoverage=100%, HitCoverage=72%, E-value=1e-128, Identity=66%"; Hit description =Arsenite transport subunit B
  Pfam annotation: Domain name=CitMHS; Domain location=1-343; Score =78.2; E_value=3.1e-20; Accession=PF03600.8; Description=Citrate transporter
  Subcellular localization annotation: CTP_CleavageSite=58; ConfidenceScore=5.16e-01
FILKIARQNNLPPRPFLLALASSANIGSAATPIGNPQNLVIAVQSRIPFGRFVLGILPATLLGSAINAAILLCLYWGQLDGGSKPAPEEVAVANCFVPTEVVEEEDVTSHRFTPATMSHLLLLNKPVKQPAEEEPVIKQPAEDDATVIKQPAGAVANGNGIHQRRGKQDDHKEQWQSQSPEDKDNGDEEDDEEWQSRLWKACVYVITAGMLVALLLGLNMSWSAITAALALIVLDFKDARPCLEKVSYPLLLFFCGMFITVDGFNKTGIPSAFWEMMEPYARIDTPTGTVILALVILLLSNVASNVPTVLLLGARVAASAAAISPAAETNAWLLLAWTSTVAGNLSLLGSAANLIVCEQARRSQQYGYTLSFLSHLQFRF

SEQ ID NO: 104711 - protein, 290 aa, Setaria italica
  Transcript Sequence Number=SeqID_38737
  Gene Ontology: Mol. function=aspartic-type endopeptidase activity
  Homolog annotation: Hit_ID=Q2R3J9; Match level="QueryCoverage=62%, HitCoverage=10%, E-value=2e-24, Identity=36%"; Hit description =Retrotransposon protein, putative, unclassified, expressed
QFNILFWEPQFHPLIREDQKETLMRIARQLVLAENNKCYRPLDLDPQDIMDHLQPYVCSYIYRKKEEAGYFTAKEQVRMHEEFDKYLASGKLDDDITEFGPLQDGIAKKIFDKHIAKSQFAGLNMELIKDSLKERALIVKRHRQIDTYSECLRRTLTNEKMKVCLEELMKELKHEGFFNVSNSNMIWEDNFLELVGRFENLVFRGHGFPKSLVVQGIMDYWEISQRSGLAWQDSFEEVVGVAAGRWKSDLELLWMDMRYYEGLYYDLLRHPLEKIFPRKAEAQKDLRAVG

SEQ ID NO: 104712 - protein, 419 aa, Setaria italica
  Transcript Sequence Number=SeqID_38738
  Gene Ontology: Mol. function=aspartic-type endopeptidase activity
  Homolog annotation: Hit_ID=Q2R3J9; Match level="QueryCoverage=50%, HitCoverage=15%, E-value=2e-16, Identity=33%"; Hit description =Retrotransposon protein, putative, unclassified, expressed
TRKFSKLLGSLCSSELNGSLFNVNLNPMHDMIATSGELKCTLSSSIVGYILLNDCFKTLSMNLFGWWVDDEATINAVPFCNALVQVAVATNNKKLRRFVEDDMLPALIRRLCDGLPCMVQRTISKLSNQMIPPIQKANKDLLILCQNIYTLCVRSQDLEGEDQDYGNGAYQFDDWFAKQKNDLMVKAYSPIPENFPDELWNWEFEEEFQRYLPTYIDLLHEVDAMDYCLEDDCFERVRIFEKLSPEFKIRHAINNCMDRNIFLISNILQRKMPAAYLEQRVDQMIKWLCKLIDLKPYIQISDSWRSVMDHLRKNFVINLNHFGLDMEDAVAMFFNSILLFWEPQFHPLIREDQKETLMRIARQLVLAENNKCYRPLDLDPQDIMDHLQPYVCSYIYRKKEEAGYFTAKEQVRMHEEKEI

SEQ ID NO: 104713 - protein, 74 aa, Setaria italica
  Transcript Sequence Number=SeqID_38739
  Subcellular localization annotation: CTP_CleavageSite=50; ConfidenceScore=5.56e-01
SKSNLLSDKQLWLSAFSSHACGSQVVVMSKKTTLFEALGAKASTTAKLVLASTLPSSMWRLEKVVLMLWSTPSN

SEQ ID NO: 104714 - protein, 70 aa, Setaria italica
  Transcript Sequence Number=SeqID_38740
  Gene Ontology: Mol. function=protein dimerization activity; Cellular component=nucleus; Biological process=regulation of transcription, DNA-dependent
  Homolog annotation: Hit_ID=P0C131; Match level="QueryCoverage=94%, HitCoverage=37%, E-value=4e-17, Identity=66%"; Hit description =Putative auxin-responsive protein IAA29
MDGMRSTDTSVEPEVDVRPGLSPSRFVKVFIQGRVIGRKINLATHQNYASLSFTLKRLGNDYSMPPCELN

SEQ ID NO: 104715 - protein, 166 aa, Setaria italica
  misc_feature (13)..(13): Xaa can be any naturally occurring amino acid
  Transcript Sequence Number=SeqID_38741
  Gene Ontology: Mol. function=nucleic acid binding
  Homolog annotation: Hit_ID=B6SHQ9; Match level="QueryCoverage=88%, HitCoverage=46%, E-value=1e-58, Identity=83%"; Hit description=RNA -binding region-containing protein 1
  Pfam annotation: Domain name=RRM_1; Domain location=31-100; Score =78.4; E_value=2.6e-20; Accession=PF00076.14; Description=RNA recognition motif. (a.k.a. RRM, RBD, o
  Subcellular localization annotation: CTP_CleavageSite=33; ConfidenceScore=5.12e-01
PSSSAAASPGPAXGGPRPYRSRFGDTTLTKVFVGGLAWETPSEGLRQHFERYGDILEAVVITDRLTGRSKGYGFVTFREPEAARRAVQDPNPTIAGRRANCNIASLGPPRPAQPRGSRGPYPGPHLQVPAQGPHFIPRAPASPQMMPQHGGGPAAIYPSQFGYWYP

SEQ ID NO: 104716 - protein, 89 aa, Setaria italica
  Transcript Sequence Number=SeqID_38742
  Gene Ontology: Mol. function=transcription regulator activity; Cellular component=nucleus; Biological process=regulation of transcription
VVCIAGSDAFINLCTPRRPGMLTRLLHVLERHRINVMAATISSDQTRSFFSIQARINEATPPPPMLPGNLRAEERYKLAVGEMLHAIAN

SEQ ID NO: 104717 - protein, 74 aa, Setaria italica
  Transcript Sequence Number=SeqID_38743
  Gene Ontology: Mol. function=nucleoside-triphosphatase activity
  Homolog annotation: Hit_ID=Q9FKM3; Match level="QueryCoverage=100%, HitCoverage=14%, E-value=6e-18, Identity=54%"; Hit description =Similarity to AAA-type ATPase
MKEYWTALASLMGAVAFLQGLLHAVFPAELRAAVARLLGRLTRTFSPYCYFDVTEMDGMSTNEIYDAVQLYLSS

SEQ ID NO: 104718 - protein, 272 aa, Setaria italica
  misc_feature (126)..(126): Xaa can be any naturally occurring amino acid
  Transcript Sequence Number=SeqID_38744
  Gene Ontology: Mol. function=transporter activity; Cellular component= membrane; Biological process=transport
  Homolog annotation: Hit_ID=Q8GTY9; Match level="QueryCoverage=100%, HitCoverage=52%, E-value=1e-111, Identity=73%"; Hit description =Nramp1 protein(Natural-resistance-associated macrophage protein 1)
  Pfam annotation: Domain name=Nramp; Domain location=1-272; Score =324.0; E_value=3.1e-94; Accession=PF01566.10; Description=Natural resistance-associated macrophage protein
GTAFAFNLLFHIPVWVGVLITGSSTLLLLGLQKYGVRKLELLVALLVFIMAACFFIEMSIVKPPSEEVIHGLFVPSLSGSGATGDTVALLGALVMPHNLFLHSALVLSRNTSSSVRGIKDACRFFXFESGIALFVALLINICIISVSGTVCNSRNLSPDDSAKCSDITLDSSSFLLRNVLGKNGAVVYGVALLACGISSTITGTYAGQYIMQGFLDIKMKQWLRNLMTRSIAIVPSLIVAIIGGSSGAGHLIIIASMILSVELPFALIPLLK

SEQ ID NO: 104719 - protein, 27 aa, Setaria italica
  Transcript Sequence Number=SeqID_38745
DQLHICLVTAEITKNALVQCTKLTLAS

SEQ ID NO: 104720 - protein, 135 aa, Setaria italica
  Transcript Sequence Number=SeqID_38746
  Subcellular localization annotation: CTP_CleavageSite=32; ConfidenceScore=5.31e-01
CKHPCSSHRNRTGCDTTSFLMALVKHTNPMTLCMVATSLALLAIMSSNTRSCEAWNGFSGRVGLLSLNGDLPQESPPPPASRAPPRAEPCFLPTNPDYCTDPICVHVCEVHGISNSPAYCRQEAGYDMCCCPNPN

SEQ ID NO: 104721 - protein, 95 aa, Setaria italica
  Transcript Sequence Number=SeqID_38747
GHLFLRVFFLLIYLFFSSFSYCTLIANMLLLFLASQRRLIRCSFFFSLCSLCCIIYINLQDKLFSTSSCLQLRSFSDFLTIVIAFFNTSLSILFF

SEQ ID NO: 104722 - protein, 66 aa, Setaria italica
  Transcript Sequence Number=SeqID_38748
PRFTLSDKITTLTNRNVRQTFCPMIGKFLRRHELPATCTMVLPNQQNQILNLSHPKSLGRCRTAEP

SEQ ID NO: 104723 - protein, 161 aa, Setaria italica
  misc_feature (20)..(20): Xaa can be any naturally occurring amino acid
  misc_feature (35)..(35): Xaa can be any naturally occurring amino acid
  Transcript Sequence Number=SeqID_38749
  Gene Ontology: Mol. function=hydrolase activity, acting on glycosyl bonds; Biological process=polysaccharide catabolic process
  Homolog annotation: Hit_ID=B4FW64; Match level="QueryCoverage=98%, HitCoverage=28%, E-value=4e-84, Identity=94%"; Hit description=Beta -amylase
  Pfam annotation: Domain name=Glyco_hydro_14; Domain location=1-161; Score=-101.4; E_value=5.3e-11; Accession=PF01373.9; Description =Glycosyl hydrolase family 14
RRLAALKSAGVEGVMVDVWXWGIAESDGPGRYNFXAGYAELMEMARKTGLKVQAVMSFHQCGGNVGDSVNIPLPRWALEEMEKDQDLCYTDQWGRRNFEYVSLGCDAMPVLKGRTPVECYTDFMRAFRDHFADYLGNTIVEIQVGMGPAGELRYPSYPESN

SEQ ID NO: 104724 - protein, 131 aa, Setaria italica
  Transcript Sequence Number=SeqID_38750
  Gene Ontology: Mol. function=molecular_function; Cellular component =cellular_component; Biological process=biological_process
  Homolog annotation: Hit_ID=B9SWY6; Match level="QueryCoverage=100%, HitCoverage=100%, E-value=3e-31, Identity=47%"; Hit description =Protein trm112, putative
  Pfam annotation: Domain name=Trm112p; Domain location=2-120; Score =134.7; E_value=2.9e-37; Accession=PF03966.8; Description=Trm112p -like protein
MRLLTHNMLASNVRGATTGYPLKLEAAKWVTKEVDLNADFIRGLLPKIDWRALVAATRALGLPELLPEEQPPEEEIFAEGAADVEGSAIRRIHHALLEIHVQEGSLVCPDTSRCFPIDKGIPNMMLHEDEV

SEQ ID NO: 104725 - protein, 101 aa, Setaria italica
  Transcript Sequence Number=SeqID_38751
  Gene Ontology: Mol. function=nucleic acid binding; Cellular component= chloroplast; Biological process=positive regulation of monocyte differentiation
  Homolog annotation: Hit_ID=Q10KI0; Match level="QueryCoverage=71%, HitCoverage=10%, E-value=2e-33, Identity=86%"; Hit description=SAP domain containing protein, expressed
TLKAVQELIGKTGSVCSFWMDHIKTHCYVTYSSVEEAVATRNAIYNLQWPPNNRNYLVAEFVDPEEVELKLEAPPPSQVPISLSTAIAPQAAPFQQPNANQ

SEQ ID NO: 104726 - protein, 128 aa, Setaria italica
  Transcript Sequence Number=SeqID_38752
SRAVVLAEQASYAAFVAMGLLLPLAYQRLAHRFNVAHAAPPAQQARERRSVPARVGLGQDGRLTPGPLLVILFCCMLMAVHWLVPAKGSCFEKVSTGLGDLGTIFASVTLCWVILPNLAIILLRAPAN

SEQ ID NO: 104727 - protein, 491 aa, Setaria italica
  Transcript Sequence Number=SeqID_38753
  Gene Ontology: Mol. function=histone-lysine N-methyltransferase activity; Cellular component=nucleus; Biological process=chromatin modification
  Homolog annotation: Hit_ID=B9HE57; Match level="QueryCoverage=86%, HitCoverage=17%, E-value=5e-80, Identity=39%"; Hit description=SET domain protein
PNKEFEAYFSHNSASRNFLPEDGGSAKRAKLLPDQSDEDIHLSNDILASRKEDLCFEELCAGSAAVDDDSVNPSTENGSWGLLNGRVLARIFHFMRADVKSLISSAATCRSWNAAAKYYRDMCRFIDLSSVGALCTDSVFYDIMAGYEKQNIRTLILAGCSNLSSYALGKVLEQLPHISYVHIQGCSHLGDLKNKFQHIKWIRTSLNPEESHQKMKTMKQMGDGNNYPSKVAKNFTNQLDRSDELDGYFADISNRENANLSFGQGFYKRSKLLDARKSSAVLSRDAQMRRLMQRQAESGYRKMEEFIISRLREIMKSNRFEFFIPKVAKIEVRLKNGYYARHGFHTIKHDIRSMCQDALRYKDGNDSGDIKQIVVSLIQLAKRLGNPRYISERNGAAAQDSLDISQYSSDTKLKKKQNKTRGANSVAVGADSSRAVDREIKRSLSKLKKKNVDSGSETSDDDDGYSEGDETESRLFLFLNSVAVGADSSRA

SEQ ID NO: 104728 - protein, 56 aa, Setaria italica
  Transcript Sequence Number=SeqID_38754
TYAANAFRQQLLPFNQLAITNPAAFWQQQQLLRVNPLAAMNAATFLQQPIIGSGLC

SEQ ID NO: 104729 - protein, 71 aa, Setaria italica
  Transcript Sequence Number=SeqID_38755
MIHTFKQKSLIFLEKLTQLISPNFEGYYTNNHSSLRSCFSIRMLNIKVRHQLTTRIVGSTATDPSAFGMHY

SEQ ID NO: 104730 - protein, 83 aa, Setaria italica
  Transcript Sequence Number=SeqID_38756
  Gene Ontology: Mol. function=exodeoxyribonuclease VII activity; Cellular component=exodeoxyribonuclease VII complex; Biological process=DNA catabolic process
  Homolog annotation: Hit_ID=Q6AA92; Match level="QueryCoverage=100%, HitCoverage=20%, E-value=5e-42, Identity=100%"; Hit description =Exodeoxyribonuclease 7 large subunit
SLAWVVNAVKGWVERCGAIWVQAQVIEITRRSSPTQFLTLRDPIEEISASATCHRRVLDAAGPIETGMTVTALIRPTVWSRTG

SEQ ID NO: 104731 - protein, 212 aa, Setaria italica
  misc_feature (136)..(136): Xaa can be any naturally occurring amino acid
  Transcript Sequence Number=SeqID_38757
  Gene Ontology: Mol. function=hydrolase activity, acting on acid anhydrides, catalyzing transmembrane movement of substances; Cellular component=integral to membrane; Biological process=DNA integration
  Homolog annotation: Hit_ID=Q2R471; Match level="QueryCoverage=100%, HitCoverage=22%, E-value=5e-54, Identity=56%"; Hit description=E1-E2 ATPase family protein, expressed
NVVLSSESPLSTTKQVCGKLGKLGINVVPAHSVFELERNNREVHLNINGISDLFPGLSFDIVRRLRNFGYRCAMVGYEFLDHDAIGESHIGISVVDAADYTKSESDLVLTKPALVPVSSAVQISRKICQMIKSYTXIYTVSSTVHLFGVRIIFHFWNFDMSSILALVIASCNYFTSLAMLLERVELNKSPDRWRVQKSIASGAAFGSYIVLS

SEQ ID NO: 104732 - protein, 167 aa, Setaria italica
  Transcript Sequence Number=SeqID_38758
  Gene Ontology: Mol. function=aspartic-type endopeptidase activity; Biological process=proteolysis
  Homolog annotation: Hit_ID=Q53NE7; Match level="QueryCoverage=97%, HitCoverage=38%, E-value=8e-37, Identity=48%"; Hit description =Eukaryotic aspartyl protease family protein, expressed
GKPYPYSPGRATLQLDTKSIGAEPMEVVFDSGSAYTYLPELVHSQLVTALKASLSKSSVKEVHDPAHPALPLCWKGYGPFKSLDDINKEFMSPISFNFGHGVTMTIPPENYLITTEQGSACLGILGTADIDLYLIGAIAMQDQLVIYDNETRKLGWTHSLCDRMPET

SEQ ID NO: 104733 - protein, 38 aa, Setaria italica
  Transcript Sequence Number=SeqID_38759
REEAAFCGLLPQFISCDGFSLASPLKPFPFPHFGTACA

SEQ ID NO: 104734 - protein, 157 aa, Setaria italica
  Transcript Sequence Number=SeqID_38760
  Gene Ontology: Mol. function=sequence-specific DNA binding; Cellular component=nucleus; Biological process=regulation of transcription, DNA-dependent
  Homolog annotation: Hit_ID=Q5PSQ1; Match level="QueryCoverage=99%, HitCoverage=70%, E-value=7e-68, Identity=82%"; Hit description=MADS box transcription factor (Fragment)
  Pfam annotation: Domain name=K-box; Domain location=6-103; Score =140.0; E_value=7.6e-39; Accession=PF01486.9; Description=K-box region
ASCNFASEASSAPIEAELSNYQEYLKLKTRIEFLQTTQRNLLGEDLGPLSTKELEQLENQIEISLKHIRSSKNQQMLDQLFELKRKEQQLQDSNKDLRRKIQETSEENVLRLTCQDLGPCGSRGHPDDANQEYLRPAVCDPSLHIGYQAYIDHLSNE

SEQ ID NO: 104735 - protein, 438 aa, Setaria italica
  Transcript Sequence Number=SeqID_38761
PFDDDDFSGISILAAAACESEMDGDILNGACSKLAHPLQERKLENTRSDTESSLLHDMEDKLNIPGASHCIYDRPLGSSYSAPDMKPLFATTPTSSENLVESASPPKVNCSYYSVLNSANKIVMASDAKSSSIAMANSSGNPEKIIGCSHDADVQTNHANATHDSRLHWDLNVPMEAWDTDCGGDDPTISTISDHNDAGNDMNKQQSSHDHFDLTDAGDVANSSVDKIQMADVPKDVCINTKDEGDSPADSSAHPSLHQSSQNLQLLESESVGIDALAETMDLPDQQKNGFASVMESRIGSNPEPALIMERFPSTYVEKVDASHPPPVDCEGLSHMSFVNGHVGCNSLQTSELGSTVKPLASRLVSEESTNFPTVTPLHKKVTDFGWSKNKLEEASEQSISESKNQELLDVDSGTSKMDQSVSKNSGHDIDVFYVNKS

SEQ ID NO: 104736 - protein, 72 aa, Setaria italica
  Transcript Sequence Number=SeqID_38762
PCVSLKSIGLTKRGSQESATEINLKVHLHTSDIPFSGAIISVYEVSGNSYLFTVSTCLYLFLFICIYFLCIS

SEQ ID NO: 104737 - protein, 92 aa, Setaria italica
  misc_feature (51)..(51): Xaa can be any naturally occurring amino acid
  Transcript Sequence Number=SeqID_38763
  Gene Ontology: Mol. function=two-component response regulator activity; Cellular component=nucleus; Biological process=two -component signal transduction system (phosphorelay)
  Homolog annotation: Hit_ID=Q2HWG0; Match level="QueryCoverage=77%, HitCoverage=58%, E-value=7e-17, Identity=60%"; Hit description=TypeA response regulator 13
  Pfam annotation: Domain name=Response_reg; Domain location=6-92; Score=-18.5; E_value=0.052; Accession=PF00072.16; Description =Response regulator receiver domain
MATPHILLVDDSCVDRLVASRLLRSCNIRVTAMEGPKQALKFLYMEHDVQXILTDYCMPEITGYDLLVELKIGSFMKKVLSSSSVVLNVFTP

SEQ ID NO: 104738 - protein, 121 aa, Setaria italica
  Transcript Sequence Number=SeqID_38764
  Gene Ontology: Mol. function=two-component response regulator activity; Cellular component=nucleus; Biological process=two -component signal transduction system (phosphorelay)
  Homolog annotation: Hit_ID=Q2HWG0; Match level="QueryCoverage=100%, HitCoverage=100%, E-value=9e-35, Identity=57%"; Hit description =TypeA response regulator 13
  Pfam annotation: Domain name=Response_reg; Domain location=6-119; Score=51.1; E_value=4.2e-12; Accession=PF00072.16; Description =Response regulator receiver domain
MVTPHILLVDDSCVDRLVASRLLQSCNIRVTAVEGPKQALKFLDMEHDVQLILTNYYMPEMSGYDLLVEVKKYPSLNNLPVVITCTEDISKRIKMCLDGGAKDYIIKPIKVVNVPHLVSYI

SEQ ID NO: 104739 - protein, 66 aa, Setaria italica
  Transcript Sequence Number=SeqID_38765
RKERQRIVGACWIRWFSLSVRDQIVLGAFPAFVLLASSCFVCSCFELELCNLSLFLMKTCYARLNI

SEQ ID NO: 104740 - protein, 47 aa, Setaria italica
  Transcript Sequence Number=SeqID_38766
QEFRTPNHQHVIPMFGYAWSFGSLLLLHGFVKNSCVLFYISKSLLTS

SEQ ID NO: 104741 - protein, 32 aa, Setaria italica
  Transcript Sequence Number=SeqID_38767
ISSFSLIINLRSIYKSLSLMQLFTFRMILSIS

SEQ ID NO: 104742 - protein, 184 aa, Setaria italica
  misc_feature (127)..(127): Xaa can be any naturally occurring amino acid
  Transcript Sequence Number=SeqID_38768
  Gene Ontology: Mol. function=cytokinin dehydrogenase activity; Cellular component=extracellular region; Biological process =cytokinin metabolic process
  Homolog annotation: Hit_ID=Q8H6F6; Match level="QueryCoverage=86%, HitCoverage=30%, E-value=1e-66, Identity=79%"; Hit description =Cytokinin dehydrogenase 2
  Pfam annotation: Domain name=FAD_binding_4; Domain location=70-184; Score=-6.1; E_value=0.0041; Accession=PF01565.15; Description=FAD binding domain
RLVWVGAMKPSVLQYLKLFLLFAFGGVIIAHVPDQDVLESLRKLPLDGHFSFRDMSTAARDFGNLSSFMPAAVLHPGSVDDIAITVRHVFLKGEHSMLTVAARGHGHSLRGQCQAAGGIVIKMESLXTARMQVHSGASPYVDASGGELWINVLHETFKYGLAPKSWTDYLHLTIGGTLSNAGVS

SEQ ID NO: 104743 - protein, 55 aa, Setaria italica
  Transcript Sequence Number=SeqID_38769
ASCNITGCIHSFVSIINNYGENIILLVKCASVSQTIFGEYSSLSTMIFICHAIPN

SEQ ID NO: 104744 - protein, 127 aa, Setaria italica
  misc_feature (69)..(69): Xaa can be any naturally occurring amino acid
  Transcript Sequence Number=SeqID_38770
  Subcellular localization annotation: CTP_CleavageSite=61; ConfidenceScore=5.70e-01
VSKSTVVFLVGAPPPAASLRPPVPRPASSSNLTAPSPAQTDLSPPAPWPRSSAPAHCTSSRCQRRPPPXPPPRPARARPRPPSAAPPPEQQQWPSSSLPARRQFVSCATSLHRRRPRHSTTPRAPHL

SEQ ID NO: 104745 - protein, 98 aa, Setaria italica
  Transcript Sequence Number=SeqID_38771
  Subcellular localization annotation: CTP_CleavageSite=65; ConfidenceScore=5.25e-01
NLLLSIFIIPENISFVHFRSIYQLQAIHSHITATRRTSIALAARRNSRSVVVQPRPTGPAHPSCCVAMQQYAARIYLFTFFFLLALSSGYCSVPASAL

SEQ ID NO: 104746 - protein, 166 aa, Setaria italica
  Transcript Sequence Number=SeqID_38772
  Gene Ontology: Mol. function=protein serine/threonine kinase activity; Biological process=protein amino acid phosphorylation
  Homolog annotation: Hit_ID=Q53QC2; Match level="QueryCoverage=95%, HitCoverage=14%, E-value=6e-64, Identity=72%"; Hit description =Leucine Rich Repeat family protein, expressed
PSNVLFDDDMTAHVVDFGIAKMLLGDDNSMITTSMLGTLGYMAPEYGSYGKASRKSDVFSYGIMLLEVFSGKRPTDPMFVADLSIRQWVRQAFPIQLASVLDDRLLQGVSSSASNLNDFLTATFELGLICSSDSPDQRMSMRDVTVALKKIKKHYTESIISATTTS

SEQ ID NO: 104747 - protein, 148 aa, Setaria italica
  Transcript Sequence Number=SeqID_38773
  Gene Ontology: Cellular component=extracellular region; Biological process=response to biotic stimulus
  Homolog annotation: Hit_ID=Q647J6; Match level="QueryCoverage=100%, HitCoverage=97%, E-value=5e-64, Identity=75%"; Hit description=Cyn d 24 (Fragment)
  Pfam annotation: Domain name=SCP; Domain location=18-136; Score =103.7; E_value=6.2e-28; Accession=PF00188.18; Description=SCP-like extracellular protein
PAGEPEYGLNQKAIDDILKEHNAFRAKEHVPPLSWNATLAKFSQQYAEKTLKGPCKMVHSTSPYGENLMLGTGGITWKTTVDQWSDEKRSYHYGSNSCDAGKMCGHYTAVVWKGTTTVGCGRVKCNNGDTMIMCSYWPPGNYDGARPF

SEQ ID NO: 104748 - protein, 150 aa, Setaria italica
  Transcript Sequence Number=SeqID_38774
  Subcellular localization annotation: CTP_CleavageSite=52; ConfidenceScore=5.25e-01
IRDMKPIQEKMGASVPMANFHMTSTNTVTPFSISMQQHPNQQSQVPKEAPVVDSATQRLLEENNQLLNQIAANIDTFKTVENADLFLRTSSNIKTILSRMSETPGIMGRMEPLPLSINEDHLNSLIQLNRMVASYGTASMSHHTKQEPQS

SEQ ID NO: 104749 - protein, 213 aa, Setaria italica
  Transcript Sequence Number=SeqID_38775
  Gene Ontology: Mol. function=transferase activity, transferring groups other than amino-acyl groups
  Homolog annotation: Hit_ID=B6UDK0; Match level="QueryCoverage=100%, HitCoverage=48%, E-value=1e-108, Identity=88%"; Hit description=3-N -debenzoyl-2-deoxytaxol N-benzoyltransferase
LPELPVLALEYIAFDFPAAYIGKLKSQYAASTGGKICSAFDIVIAKLWQCRTRAIDAGADVRLCFFASVRHVLKLEPGYYGNAIFPVKVSAPAEKVAGSSVIELVGMVRDAKRRMAEECLSWAEDRTGGRDPFQMTFNYESVYVSDWSKLGFNDVDYGYGAPMSAGPLVNCDLIASVIVMRAPAPLAGTRLLASCVTREHANDFARRMREDLV

SEQ ID NO: 104750 - protein, 142 aa, Setaria italica
  misc_feature (88)..(88): Xaa can be any naturally occurring amino acid
  Transcript Sequence Number=SeqID_38776
  Gene Ontology: Mol. function=nucleic acid binding; Cellular component= cytoplasm; Biological process=multicellular organismal development
  Homolog annotation: Hit_ID=Q6Z4F1; Match level="QueryCoverage=89%, HitCoverage=12%, E-value=9e-43, Identity=68%"; Hit description =Protein argonaute 14
  Pfam annotation: Domain name=DUF1785; Domain location=68-120; Score =80.8; E_value=4.9e-21; Accession=PF08699.2; Description=Domain of unknown function (DUF1785)
GELPFKSMDFVVKLGRREIEYTVTIRYAARANLCHLQQFINGQQRDSPHDAIQALDVVMRESPSLNYVTVSRSFFSKQFGTGNIGEGXLEFWRGYYQSLRPTQMGLSLNIDTCSTSFYKSIPVVQFVDEFLRLLTLSRSFFG

SEQ ID NO: 104751 - protein, 125 aa, Setaria italica
  Transcript Sequence Number=SeqID_38777
HRVRDLCAALWDAEPARPVENDVVEAGEAEEDDADGGFTGADREGSARLPMVKEVLGEYWKVNGQGLSGVSLEKGLALLGSQEASAAEVKWRRQLEADMRIQMRRHELGKEVYGLLIDAIKGLGP

SEQ ID NO: 104752 - protein, 127 aa, Setaria italica
  misc_feature (88)..(88): Xaa can be any naturally occurring amino acid
  Transcript Sequence Number=SeqID_38778
  Gene Ontology: Mol. function=oxidoreductase activity; Cellular component=mitochondrion; Biological process=cellular protein metabolic process
  Homolog annotation: Hit_ID=B9S687; Match level="QueryCoverage=77%, HitCoverage=19%, E-value=6e-38, Identity=71%"; Hit description=D -lactate dehydrognease 2, putative
AIFLEQQFFDFHARCLVCLDLLVRFIMPLDLGAKGSCHIGGNISTNAGGLRFIRYGSLHGNVLGLEVVLADGTVLDMLTTLRKDNTGXEGSLGVVTKISVLTPAKLPSTNVAFLSCNDYTSCQVHCP

SEQ ID NO: 104753 - protein, 59 aa, Setaria italica
  Transcript Sequence Number=SeqID_38779
  Gene Ontology: Mol. function=oxidoreductase activity; Cellular component=mitochondrion; Biological process=cellular protein metabolic process
  Homolog annotation: Hit_ID=UPI000034F189; Match level="QueryCoverage =93%, HitCoverage=9%, E-value=2e-15, Identity=70%"; Hit description =FAD linked oxidase family protein
ISEASVKVGAVYKYDLSIPVEKLYDIVEEMRCRLGNNAEVLGYGHLGDGNLHLNILSSK

SEQ ID NO: 104754 - protein, 192 aa, Setaria italica
  misc_feature (147)..(147): Xaa can be any naturally occurring amino acid
  misc_feature (182)..(182): Xaa can be any naturally occurring amino acid
  Transcript Sequence Number=SeqID_38780
  Gene Ontology: Mol. function=oxidoreductase activity; Cellular component=mitochondrial matrix; Biological process=lactate metabolic process
  Homolog annotation: Hit_ID=B9S687; Match level="QueryCoverage=59%, HitCoverage=22%, E-value=2e-36, Identity=59%"; Hit description=D -lactate dehydrognease 2, putative
MARRAAAAARLLRRLGPLAAEPPTRGMPHTQYEFANHTMNSCRRFHWIPSLQCPPCGPRTNAETYEGQRSANKASEVQKRTFGSAATHIQRNPAYSELNSDDVSYFKTILGNNGVVQDEDRIAVANVDWMGKYRGASQLLLLPKSTXRRLAVVPQGGNTGLVGGSVPVYDEVIISLAGMDKXISFDNVNGIL

SEQ ID NO: 104755 - protein, 540 aa, Setaria italica
  Transcript Sequence Number=SeqID_38781
  Gene Ontology: Mol. function=oxidoreductase activity; Cellular component=mitochondrion; Biological process=cellular protein metabolic process
  Homolog annotation: Hit_ID=B9S687; Match level="QueryCoverage=89%, HitCoverage=85%, E-value=0.0, Identity=72%"; Hit description=D -lactate dehydrognease 2, putative
  Pfam annotation: Domain name=FAD-oxidase_C; Domain location=291-534; Score=242.3; E_value=1.2e-69; Accession=PF02913.11; Description=FAD linked oxidases, C-terminal domain
  Pfam annotation: Domain name=FAD_binding_4; Domain location=116-255; Score=151.8; E_value=2.1e-42; Accession=PF01565.15; Description=FAD binding domain
  Pfam module annotation: Pfam domain module=FAD-oxidase_C::FAD_binding_ 4; Domain location=291-534::116-255
LCFSGMPHTQYEFANHTMNSCRRFHWIPSLQCPPCGPRTNAETYEGQRSANKASEVQKRTFGSAATHIQRNPAYSELNSDDVSYFKTILGNNGVVQDEDRIAVANVDWMGKYRGASQLLLLPKSTVEVSKILSYCNTRRLAVVPQGGNTGLVGGSVPVYDEVIISLAGMDKIISFDNVNGILTCEAGCVLENLSTFVEKEGFIMPLDLGAKGSCHIGGNISTNAGGLRFIRYGSLHGNVLGLEVVLADGTVLDMLTTLRKDNTGYDLKHLFIGSEGSLGVVTKISVLTPAKLPSTNVAFLSCNDYTSCQKLLLAARRNLGEILSAFEFMDHNCIDLAMRHLEGVQNPLPASQSKFYVLIETTGSDESYDKTKLEAFLLSSMENGLVADGVIAQDISQASNFWRIREGISEASVKVGAVYKYDLSIPVEKLYDIVEEMRCRLGNNAEVLGYGHLGDGNLHLNILSSKYDDNTLAQIEPFVYEWTSAQRGSISAEHGLGLMKAEKIHYSKAPEAVQLMASIKKLLDSNSILNPYKVLPQSVL

SEQ ID NO: 104756 - protein, 146 aa, Setaria italica
  misc_feature (138)..(138): Xaa can be any naturally occurring amino acid
  Transcript Sequence Number=SeqID_38782
  Gene Ontology: Mol. function=catalytic activity; Biological process =trehalose biosynthetic process
  Homolog annotation: Hit_ID=B6T0F0; Match level="QueryCoverage=99%, HitCoverage=16%, E-value=1e-44, Identity=58%"; Hit description =Trehalose-6-phosphate synthase
  Pfam annotation: Domain name=Trehalose_PPase; Domain location=1-146; Score=31.7; E_value=2.4e-09; Accession=PF02358.8; Description =Trehalose-phosphatase
ELCADPKNVVFLVSGRGKDQLAAWFASCEKLGICAEHGYFTRWSKGDPWEVMNKQVVPGGTGSGWKAVAERVMRQYMEATAGSYMETKEIALAWHYQNADPVVGPCQAKELHDHLVGLLADEPASVAIGSQIVEVNPXGVNKGVAV

SEQ ID NO: 104757 - protein, 68 aa, Setaria italica
  Transcript Sequence Number=SeqID_38783
  Gene Ontology: Mol. function=catalytic activity; Biological process =trehalose biosynthetic process
  Homolog annotation: Hit_ID=B6T0F0; Match level="QueryCoverage=100%, HitCoverage=7%, E-value=2e-18, Identity=61%"; Hit description =Trehalose-6-phosphate synthase
YDGTMVPEQQDERKGAPDAGIVRLLNELCADPKNVVFLVSGRGKDQLAAWFASCEKLGICAEHGYFTR

SEQ ID NO: 104758 - protein, 57 aa, Setaria italica
  Transcript Sequence Number=SeqID_38784
LLYGCHFKLSISLNFFRQVPWTRSTSQKLPPAPDLFYCPIVKFSCVLLLPNASHTCM

SEQ ID NO: 104759 - protein, 44 aa, Setaria italica
  Transcript Sequence Number=SeqID_38785
RNAKYKQVSCMVLQSTICSHCLFVSTVTLHFSCIYCSLSLYLLF

SEQ ID NO: 104760 - protein, 43 aa, Setaria italica
  Transcript Sequence Number=SeqID_38786
IDSPSYEPSQCIIMQRGCIPQPSPNNLLCNSLICSLDSRMERR

SEQ ID NO: 104761 - protein, 64 aa, Setaria italica
  Transcript Sequence Number=SeqID_38787
WYKGIISVMVVWCILTLLVKGAYDIRQEVLIGVCIQIACMGLVSFKLIVVLKVKRWGSFKTCCF

SEQ ID NO: 104762 - protein, 79 aa, Setaria italica
  Transcript Sequence Number=SeqID_38788
LVLISRLKEYNEFTASSVLCNYLASINRNSVVTREIWNYGPICPCIDSLDLKMPLPVCFNFYFEKELNYFMIIHYNIPY

SEQ ID NO: 104763 - protein, 85 aa, Setaria italica
  Transcript Sequence Number=SeqID_38789
QHIQFYRHSSGKMYYVRVGGRSSWFLGNGAFQGHVIAIVDLVKTMLYNPLTSKAQAIRPAPYQPWLDGVFQVLGDGDAGSMVVNT

SEQ ID NO: 104764 - protein, 68 aa, Setaria italica
  Transcript Sequence Number=SeqID_38790
HGGGSGARGQGGVGADLPRAPELHFLPYLHRAFVVGAPDMKLVCCLGLAIGTARLSARSDPRRQLLQF

SEQ ID NO: 104765 - protein, 59 aa, Setaria italica
  Transcript Sequence Number=SeqID_38791
  Subcellular localization annotation: CTP_CleavageSite=52; ConfidenceScore=5.20e-01
LQYRFLKKGPMSKCKSGKSVSAPSFYSFFYINIIMQCTGTIRFVRSAYGITVANTASTY

SEQ ID NO: 104766 - protein, 98 aa, Setaria italica
  Transcript Sequence Number=SeqID_38792
  Gene Ontology: Mol. function=phosphoprotein phosphatase activity; Biological process=actin cytoskeleton organization and biogenesis
  Homolog annotation: Hit_ID=Q7G6K7; Match level="QueryCoverage=100%, HitCoverage=7%, E-value=2e-46, Identity=85%"; Hit description=Formin- like protein 3
LIQHFLRVCEHWLSSGNNKNIILLHCERGTWPLLAFLLSCLLIYKKLHGAEHKTLDIIYREAPKGSYNFFSALNPMPSQLRYMQYVARRNISPEWPPM

SEQ ID NO: 104767 - protein, 139 aa, Setaria italica
  Transcript Sequence Number=SeqID_38793
  Gene Ontology: Mol. function=protein serine/threonine kinase activity; Cellular component=integral to plasma membrane; Biological process=protein amino acid phosphorylation
  Homolog annotation: Hit_ID=Q2R001; Match level="QueryCoverage=97%, HitCoverage=24%, E-value=3e-32, Identity=51%"; Hit description =Protein kinase domain containing protein
  Pfam annotation: Domain name=Pkinase_Tyr; Domain location=26-139; Score=-163.8; E_value=0.0078; Accession=PF07714.9; Description =Protein tyrosine kinase
PKIDWKEAHQVEVFTFKELVKATNNFAPDKKIGEGGFGSVYMGWLPDGREVAIKRREHGSDQGIEEFQAEVTILHSVSHKHIVRLFGSCVPQKFPVNIWKKQDEKQGDLSVVYEFLENRSLDIHLHGQPSPSPVTASWK

SEQ ID NO: 104768 - protein, 39 aa, Setaria italica
  Transcript Sequence Number=SeqID_38794
KLSSWFAGHYGKTLEFLELNLRPILWLQRGDCAWCMRVR

SEQ ID NO: 104769 - protein, 244 aa, Setaria italica
  Transcript Sequence Number=SeqID_38795
  Subcellular localization annotation: CTP_CleavageSite=41; ConfidenceScore=5.80e-01
LGSGLSIILAPRSRPRNLLPAAVAWFSSSVASRSARRPSSRASLQQGLVAGATRSSVNAGTVDISSSGSISGKGQRPGRTNQQRRLAGWLLAVVVGDDSATQMPQCARRGHGHGGETQVTGMERVGARGPDRLRKAGAVARAAALQRNDSCFPPFLLRRAALLDAAASPSAFEEPHPKGAHRGQHYDGRRRATASTAPRASAPALVILWTWTARARSALDAHVCHCSVPPERGAPAPLLPLPTP

SEQ ID NO: 104770 - protein, 86 aa, Setaria italica
  Transcript Sequence Number=SeqID_38796
FMLRKGSEHIHARSCSSPRACYVADEDPEKGAAIAQTPCFDEGWDRELSNDDLQAIRDRHKKNALFSVLKNGYLKNIFDFKIAIFK

SEQ ID NO: 104771 - protein, 43 aa, Setaria italica
  Transcript Sequence Number=SeqID_38797
FIRNFFPFLNKDMYDESRCNPILILRVTYRRIGYLGVSICFMI

SEQ ID NO: 104772 - protein, 63 aa, Setaria italica
  Transcript Sequence Number=SeqID_38798
PVATQPCSMARDDVKVHIMFRGYPTKLQFRSIEYATSDLQAEELSHSSWCIYRRSSLLRTIQK

SEQ ID NO: 104773 - protein, 217 aa, Setaria italica
  misc_feature (161)..(161): Xaa can be any naturally occurring amino acid
  Transcript Sequence Number=SeqID_38799
  Gene Ontology: Mol. function=nucleotide binding; Cellular component =intracellular; Biological process=regulation of transcription, DNA -dependent
  Homolog annotation: Hit_ID=B6TGJ7; Match level="QueryCoverage=94%, HitCoverage=94%, E-value=1e-107, Identity=95%"; Hit description=Ras -related protein Rab-18
  Pfam annotation: Domain name=Arf; Domain location=2-181; Score=-35.7; E_value=9.6e-07; Accession=PF00025.13; Description=ADP-ribosylation factor family
  Pfam annotation: Domain name=GTP_EFTU; Domain location=19-183; Score=- 92.5; E_value=0.044; Accession=PF00009.19; Description=Elongation factor Tu GTP binding domain
  Pfam annotation: Domain name=MMR_HSR1; Domain location=17-135; Score=- 2.0; E_value=0.0015; Accession=PF01926.15; Description=GTPase of unknown function
  Pfam annotation: Domain name=Miro; Domain location=18-135; Score =57.1; E_value=6.9e-14; Accession=PF08477.5; Description=Miro-like protein
  Pfam annotation: Domain name=Ras; Domain location=18-183; Score =258.7; E_value=1.4e-74; Accession=PF00071.14; Description=Ras family
  Pfam module annotation: Pfam domain module=Arf::GTP_EFTU::MMR _HSR1::Miro::Ras; Domain location=2-181::19-183::17-135::18-135::18 -183
WGSPGAGSSGGGHECSFKILLIGDSSVGKSSLLVSFVAASQLDDDIAPTIGVDFKIKFLTVGGKKLKLTIWDTAGQERFRTITSSYYRGAQGIILVYDVTKRESFSNLADVWTKEIEANSTNKDCIKMLVGNKVDKDDERMVTREEGLAFAEESGCLFLEXSSAKTRENVEKCFEELALKILEVPSLLEEGSSSVVKRNILKQKQESHAKHGNGCCH

SEQ ID NO: 104774 - protein, 53 aa, Setaria italica
  Transcript Sequence Number=SeqID_38800
VSGKRFDLLNCMCGACKIGLDDQSIQDNCRQLSTHKASCRHSFIVKKDGCIQI

SEQ ID NO: 104775 - protein, 200 aa, Setaria italica
  Transcript Sequence Number=SeqID_38801
  Gene Ontology: Mol. function=calcium ion binding; Biological process =protein amino acid phosphorylation
  Homolog annotation: Hit_ID=B4FE15; Match level="QueryCoverage=94%, HitCoverage=83%, E-value=1e-100, Identity=93%"; Hit description =Calcium ion binding protein
  Pfam annotation: Domain name=efhand; Domain location=120-148; Score =24.1; E_value=0.00056; Accession=PF00036.24; Description=EF hand
  Pfam annotation: Domain name=efhand; Domain location=158-186; Score =16.8; E_value=0.088; Accession=PF00036.24; Description=EF hand
  Pfam annotation: Domain name=efhand; Domain location=30-58; Score =30.4; E_value=7.5e-06; Accession=PF00036.24; Description=EF hand
  Pfam module annotation: Pfam domain module=efhand::efhand::efhand; Domain location=120-148::158-186::30-58
LQERALKGTSVKSFNSVIMKFPKIDESLRNCRTIFQQFDEDSNGEIDQQELKHCFQKLGIESTDDEIKDLFEACDIYEHMGMKFNEFIVFLCLVYLLNDPAVSEARKRMGLGSLEPTFETLVESFVFLDKNKDGYVSKNEMIQAINETTAGERSSGRIGVKRFEEMDWDKNGTVTFKEFLFAFTRWVGIDNEDDDEEDNE

SEQ ID NO: 104776 - protein, 35 aa, Setaria italica
  Transcript Sequence Number=SeqID_38802
PLPSLAKHNLNSQVRPAIDFRTGNVLTSGSRHACK

SEQ ID NO: 104777 - protein, 75 aa, Setaria italica
  misc_feature (48)..(48): Xaa can be any naturally occurring amino acid
  Transcript Sequence Number=SeqID_38803
  Subcellular localization annotation: CTP_CleavageSite=13; ConfidenceScore=5.06e-01
VFQSAQALKKAVIVSAKGSFTSIGEAISKVRSLTPDNWASNCSVFVYXGSGPEGGGLWNFRKGCDFSVSDPFAYH

SEQ ID NO: 104778 - protein, 246 aa, Setaria italica
  Transcript Sequence Number=SeqID_38804
  Gene Ontology: Mol. function=unfolded protein binding; Cellular component=cell wall; Biological process=protein folding
  Homolog annotation: Hit_ID=Q0WMV4; Match level="QueryCoverage=97%, HitCoverage=76%, E-value=1e-109, Identity=81%"; Hit description=Heat shock like protein (Fragment)
  Pfam annotation: Domain name=HATPase_c; Domain location=46-207; Score= 56.9; E_value=7.9e-14; Accession=PF02518.18; Description=Histidine kinase-, DNA gyrase B-, and HSP90-like ATPase
EGIVRVGCDAAVAEKPTEEETAGEKFEYQAEVSRLMDLIVHSLYSHKEVFLRELVSNASDALDKLRFLSVTDPSVLADGGELEIRIKPDQDAGTITITDTGIGMTKDELKDCLGTIAQSGTSKFLKALKENKDLGADNGLIGQFGVGFYSAFLVAEKVVVSTKSPKADKQYVWEAEADSSSYVIKEETNPEKMLTRGTQITLYLRDDDKYEFADPARIQGLVKNYSQFVSFPIYTWQEKSRTVEVE

SEQ ID NO: 104779 - protein, 700 aa, Setaria italica
  Transcript Sequence Number=SeqID_38805
  Gene Ontology: Cellular component=integral to membrane
  Homolog annotation: Hit_ID=Q8L7E5; Match level="QueryCoverage=79%, HitCoverage=86%, E-value=3e-84, Identity=37%"; Hit description=WPP domain-interacting tail-anchored protein 1
  Pfam annotation: Domain name=Tropomyosin; Domain location=312-494; Score=-102.2; E_value=0.0093; Accession=PF00261.12; Description =Tropomyosin
WLSLSSSPATAALGERRRLHLRFAGEDHPLGGTTRIMDTVIYRDDSDFQESAPPYGDAMNSEASNVEILTRVELDLAFASEKLLNLEMLVMEIARRATDFEPPTFEDESISSETAESAFELDILYGILDAEVKELVNLISSLQADIRGIEHRVYEEESGGKVKAKLDAATMTLKQMQELIADIRNESAKFEKAIQFIHETEGVEGVGSENGHLPYQTGMQTEDQHRNVLHMLEQSIASELDLEKKLSDSKSVIEDLKLKLHHQEKEIYFLEESTETVSGRMFEAENASELLFGTSKELANRLNTMQFHISAQKCREDDLKSKLEQSLTKLSFLENSPEKVEEDSNKAGAEVISLQYRLQELEKQLNESNSQLQSAMESEETSQEEKNALHSELSTLENTIKNLKGDVSRAECRAQNAEIRCMQLTQANIELNEELSALKSEKSDKANLLEKKLKESNTQLEHAKAAVDAIVEQQGMLKSTMSDMENMIEDLKGKVSKAESRAGSAESKCTLLTDTNLELSEELAFVRGRVENLENLLREANHAKVSTAKDIGIRTKIITDLVRKLALERERLHLQIATLTKKNKILAQKYKERVNVSSQMSKKATAKAKHTELQSTEKAEEIFPDSSSSQTEAEKPADLLYKDEVKAHTPAEDDSSSDDAHETVRTIEPSHLNRKYIFVSFLVLLVAAVVFLLHEDGSTA

SEQ ID NO: 104780 - protein, 172 aa, Setaria italica
  misc_feature (60)..(60): Xaa can be any naturally occurring amino acid
  Transcript Sequence Number=SeqID_38806
  Pfam annotation: Domain name=DUF295; Domain location=75-140; Score =44.5; E_value=4.1e-10; Accession=PF03478.10; Description=Protein of unknown function (DUF295)
KPEQRKYTTPSSSRIFFPEAYPEYLVMRYLAESNGRLLMMRRWIRIPPRARLGEHDRTVXFEVFEADLATIPGKWTKVESLGGQVIFLDSECSKSVLASQCAGGVQEDSIYFMHQAFDNPSSEMFGPCVDPLADSGVYNMTNGEITPLLPEAVMAQLQHKHQFLTWFFPADE

SEQ ID NO: 104781 - protein, 96 aa, Setaria italica
  misc_feature (23)..(23): Xaa can be any naturally occurring amino acid
  Transcript Sequence Number=SeqID_38807
  Gene Ontology: Mol. function=nucleotide binding; Cellular component =integral to membrane; Biological process=protein insertion into membrane
  Homolog annotation: Hit_ID=Q75LC5; Match level="QueryCoverage=68%, HitCoverage=13%, E-value=6e-29, Identity=96%"; Hit description =ARTEMIS protein, chloroplast, putative, expressed
VADAAVSAAPEAAEAGAGASTSXAGRTLWHTNSMETVLKVLKDGLSALHVPYSYGFAIILLTVLVKAATFPLTKKQVESALAMRSLQPQVKAIQER

SEQ ID NO: 104782 - protein, 69 aa, Setaria italica
  Transcript Sequence Number=SeqID_38808
LVSLSVVHLKLDKALCLQMSSGLQILNHLETSMNRTCGSVLIFQETYYSYIVFLYNQHCNVHYHHPSYK

SEQ ID NO: 104783 - protein, 191 aa, Setaria italica
  Transcript Sequence Number=SeqID_38809
  Homolog annotation: Hit_ID=Q688Y7; Match level="QueryCoverage=99%, HitCoverage=55%, E-value=6e-94, Identity=84%"; Hit description=Tubby- like F-box protein 10
  Pfam annotation: Domain name=Tub; Domain location=1-185; Score=148.7; E_value=1.8e-41; Accession=PF01167.10; Description=Tub family
  Subcellular localization annotation: CTP_CleavageSite=79; ConfidenceScore=5.20e-01
SVGKLRSDFWGTNFKIYDSQPPYDGAKASSTRSIRCFGSRRISPQVLSGNFDVGQVSYKYNLLKSRGPRRMCCTMECPSVQETWENSLEVKSLRRTGTTVLRNKAPRWHEHLQCWCLNFHGRVTVASVKNFQLVATADPTHPDSAGDDETVLLQFGKVDTDIFTMDYWRPLSAFQAFAICLSSFGTKLACE

SEQ ID NO: 104784 - protein, 59 aa, Setaria italica
  Transcript Sequence Number=SeqID_38810
LLCGCRLSAECRLLRSDNACAVETWSMYYLLCRTRNVDPSLYCWVVFFMTYLVAFAFRI

SEQ ID NO: 104785 - protein, 144 aa, Setaria italica
  Transcript Sequence Number=SeqID_38811
  Gene Ontology: Mol. function=DNA binding
KTILLDETLEHLSTGHQDTVMLPLIDHCRSCCGDTSSVLEYSTVDTSTGDGDGEHKNSFDQKDDETLCLATDSKDHTSTANTSTSDGIPSCTPTDDQECRKAVLLKEEQYQNFQGNSNSLDSFAVSCEGCGSKSGVSVDRTSGC

SEQ ID NO: 104786 - protein, 66 aa, Setaria italica
  Transcript Sequence Number=SeqID_38812
  Subcellular localization annotation: CTP_CleavageSite=39; ConfidenceScore=5.23e-01
KKGAFKEELLAQLANNRNKPSLKIGVGNGTNLPVGTLLSGRARSCVRVFEMSLLLSSLSFRYYCFL

SEQ ID NO: 104787 - protein, 636 aa, Setaria italica
  misc_feature (160)..(160): Xaa can be any naturally occurring amino acid
  misc_feature (206)..(206): Xaa can be any naturally occurring amino acid
  Transcript Sequence Number=SeqID_38813
  Gene Ontology: Mol. function=protein binding; Cellular component =cytoskeleton
  Homolog annotation: Hit_ID=Q84S70; Match level="QueryCoverage=65%, HitCoverage=59%, E-value=8e-91, Identity=43%"; Hit description=Kelch- like protein
  Pfam annotation: Domain name=Dev_Cell_Death; Domain location=1-40; Score=-37.3; E_value=0.00083; Accession=PF10539.1; Description =Development and cell death domain
  Pfam annotation: Domain name=Kelch_1; Domain location=344-389; Score =11.8; E_value=0.13; Accession=PF01344.17; Description=Kelch motif
  Pfam annotation: Domain name=Kelch_1; Domain location=391-436; Score =62.4; E_value=1.7e-15; Accession=PF01344.17; Description=Kelch motif
  Pfam annotation: Domain name=Kelch_1; Domain location=438-483; Score =37.2; E_value=6.4e-08; Accession=PF01344.17; Description=Kelch motif
  Pfam annotation: Domain name=Kelch_1; Domain location=485-530; Score =49.8; E_value=1e-11; Accession=PF01344.17; Description=Kelch motif
  Pfam annotation: Domain name=Kelch_1; Domain location=532-577; Score =57.9; E_value=3.9e-14; Accession=PF01344.17; Description=Kelch motif
  Pfam annotation: Domain name=Kelch_1; Domain location=579-624; Score =24.5; E_value=0.00043; Accession=PF01344.17; Description=Kelch motif
  Pfam annotation: Domain name=Kelch_2; Domain location=341-389; Score =2.4; E_value=21; Accession=PF07646.7; Description=Kelch motif
  Pfam annotation: Domain name=Kelch_2; Domain location=391-436; Score =23.7; E_value=0.00074; Accession=PF07646.7; Description=Kelch motif
  Pfam annotation: Domain name=Kelch_2; Domain location=438-483; Score =0.7; E_value=34; Accession=PF07646.7; Description=Kelch motif
  Pfam annotation: Domain name=Kelch_2; Domain location=485-530; Score =21.9; E_value=0.0026; Accession=PF07646.7; Description=Kelch motif
  Pfam annotation: Domain name=Kelch_2; Domain location=532-577; Score =32.0; E_value=2.4e-06; Accession=PF07646.7; Description=Kelch motif
  Pfam annotation: Domain name=Kelch_2; Domain location=579-624; Score =9.3; E_value=2.5; Accession=PF07646.7; Description=Kelch motif
  Pfam module annotation: Pfam domain module=Dev_Cell_Death::Kelch _1::Kelch_1::Kelch_1::Kelch_1::Kelch_1::Kelch_1::Kelch_2::Kelch _2::Kelch_2::Kelch_2::Kelch_2::Kelch_2; Domain location=1-40::344 -389::391-436::438-483::...
  Pfam module annotation: Domain location=485-530::532-577::579 -624::341-389::391-436::438-483::485-530::532-577::579-624
QYPPLLESQFKTLLGDNYYNHHHFYFELDHAQTRALISLFKSLAPANFNQVPAVSSKRNLAVSSSPTKMRLTAVPDPKKVTADSKETNPFSVLSDRASPFIWADDVDSASNTDEKKSEELVSDCDDLDDNLLQDQFVPHSNPDEVSQNSSDKTVDQVAEXSHPVVNPVNGERVTIDESMLLSSLNDHIGAADVDEIESEVHNSPGXSVFQAVAQHHERLTILEKLKELSSLRQQAAISSQGCADSSSDQCVPDETQINANLSGDPFDVTMEDKTSSDECHGNAELLQIIADLTKRTEALEKKLVGSDQEVLSLREVVKDSGRKVQQLEYLVDELQFKFDSSLSHLGSMCNTLAKPSIFLIGGYNGVTWLSSLDSFSPEKDMLVGLTPMSSPRSYASAAALDGHIFAFGGGDGMSWYNTVECYSSRNNEWTECPSLNRKKGSLAGICLNEKIYAIGGGDGNETYSEVEMFDPYLGKWICSPSMLLSRFALAATELNGVIYTAGGYDGSMYLESAERYDPREGFWVRLPSMSTRRGCHALTVLGDVLYAMGGYDGDKMVSSIEIYDPRLNAWRMGDPMNTPRGYAAAVNLNDSLFLIGGMQSNVQILDTVEVYNASSGWSVLGFGSIGKRSFASAVVI

SEQ ID NO: 104788 - protein, 72 aa, Setaria italica
  misc_feature (10)..(10): Xaa can be any naturally occurring amino acid
  Transcript Sequence Number=SeqID_38814
  Gene Ontology: Mol. function=heat shock protein binding; Biological process=response to stress
  Homolog annotation: Hit_ID=Q6K8D7; Match level="QueryCoverage=100%, HitCoverage=54%, E-value=3e-33, Identity=91%"; Hit description=DNAJ heat shock N-terminal domain-containing protein-like
  Pfam annotation: Domain name=DnaJ; Domain location=1-36; Score=22.2; E_value=3e-05; Accession=PF00226.23; Description=DnaJ domain
WHPDKKQGEXNATSRFQEINEAYQVLSNPAKRQEYDKAGIIYVQDQNVVDYLNRHKGLILTCNGLGIRYSVW

SEQ ID NO: 104789 - protein, 148 aa, Setaria italica
  Transcript Sequence Number=SeqID_38815
  Gene Ontology: Mol. function=heat shock protein binding; Cellular component=cytoplasm; Biological process=response to stress
  Homolog annotation: Hit_ID=Q6K8D7; Match level="QueryCoverage=76%, HitCoverage=85%, E-value=4e-54, Identity=90%"; Hit description=DNAJ heat shock N-terminal domain-containing protein-like
  Pfam annotation: Domain name=DnaJ; Domain location=34-96; Score =113.9; E_value=5.2e-31; Accession=PF00226.23; Description=DnaJ domain
MWWEWEGDGEETAREEEETPVDFDFISLLAKPKDYYKILEVDYNASEETIRSSYIRLALKWHPDKKQGEENATSRFQEINEAYQVLSNPAKRQEYDKAGIIYVQDQNVVDYLNRHKGLILTCNGLGIRIKVTTVIGRNNSYKVDDQRY

SEQ ID NO: 104790 - protein, 163 aa, Setaria italica
  misc_feature (17)..(17): Xaa can be any naturally occurring amino acid
  Transcript Sequence Number=SeqID_38816
  Gene Ontology: Mol. function=protein serine/threonine kinase activity; Biological process=protein amino acid phosphorylation
  Homolog annotation: Hit_ID=C4P7T2; Match level="QueryCoverage=99%, HitCoverage=34%, E-value=6e-57, Identity=70%"; Hit description=CBL -interacting protein kinase 06
  Pfam annotation: Domain name=NAF; Domain location=91-149; Score=81.0; E_value=4.2e-21; Accession=PF03822.6; Description=NAF domain
WFSVDARKLLARLLDPXPRTRITMTKLKAHPWLQKGPCPLTDKPLVTSETSVLLGKEACKCHHHRDEEDEEDARERKRSKVTVSSPTIAVRPSSMNAFDIISRSSGLDLSKMFDEEHGAEARFASRESTAAIVSKLEEIAEARKLSVKLKEKGRVEMVGSQDG

SEQ ID NO: 104791 - protein, 215 aa, Setaria italica
  misc_feature (9)..(9): Xaa can be any naturally occurring amino acid
  Transcript Sequence Number=SeqID_38817
FTRRSLSNXEIQTGPYCTSSSSEQPVDSHPLAEPHTGATNLPPLPSKTKVGLQTLVSCKISSVKGHQLSHTSIWHLRSPSLAPQRPCAAPKTQERRQQSKLQDQRRKRTSENSDAPETPLRHAADSDSQQKEQEPRKICHRLSRLTKIGRKKQHQIPNTKGRCTDLTKASPWKTPEPPSTTGKTFIRRRSSFSIAAAPGTLAPPSTTTASKPNYT

SEQ ID NO: 104792 - protein, 175 aa, Setaria italica
  Transcript Sequence Number=SeqID_38818
  Homolog annotation: Hit_ID=B6TK80; Match level="QueryCoverage=88%, HitCoverage=39%, E-value=7e-26, Identity=45%"; Hit description=F-box domain containing protein
PAPPAPSTTIPRGRGRRWHPRDVRDGRVLLYCSPDVQESIVFPDLAVCDPVSRRYLLVPRITDELLASVQVQKQHVQFFEAFLVPSGVEQKEEASFRVLGRACCMTKMVALVFSSGSSHWDVGTSESWDDLSLNARPFAEGLMLRWPSYAYGCFYWKVHLRNKLLKLDMSRIEVS

SEQ ID NO: 104793 - protein, 101 aa, Setaria italica
  Transcript Sequence Number=SeqID_38819
KRSLGQETAISMGRIVHYMMATSFMVLVIISTKSPSCQACLWPWCKPRPDPEPCFRVMEPRDCTDNYCHGVCEVNHVVSNHAYCKIPGKRGVPVWHCCCPR

SEQ ID NO: 104794 - protein, 117 aa, Setaria italica
  Transcript Sequence Number=SeqID_38820
YTILTSAASQKPKERIEALLVKTALSMGRTVHYLMVTSFVVLAMISTNSPSCQACFGPWCKRPPVPCFAATNEDYCTSDICPHVCEVNHAVSNRAYCKKPGRRDPVPIWLCCCPPPR

SEQ ID NO: 104795 - protein, 158 aa, Setaria italica
  Transcript Sequence Number=SeqID_38821
  Gene Ontology: Mol. function=hydrolase activity, acting on ester bonds; Biological process=lipid metabolic process
  Homolog annotation: Hit_ID=B6STS8; Match level="QueryCoverage=84%, HitCoverage=36%, E-value=1e-35, Identity=50%"; Hit description=Alpha- L-fucosidase 2
MPAQSLGLPLLPPSKSKGKDFHRGANMAITGGTAMNFSFYQSLGIEDPVWNHGSLYMQIQWFMELIPSLCGTKQNCKEFLAKSMFQFGGFGGNDYNIQLLELGFTPEQAMKNTPMIINATINGIERLIALGAVHIVVPGILPTGCLPLFLYVLCLVPP

SEQ ID NO: 104796 - protein, 123 aa, Setaria italica
  Transcript Sequence Number=SeqID_38822
  Gene Ontology: Mol. function=hydrolase activity, acting on ester bonds; Biological process=lipid metabolic process
  Homolog annotation: Hit_ID=B6STS8; Match level="QueryCoverage=52%, HitCoverage=16%, E-value=1e-13, Identity=52%"; Hit description=Alpha- L-fucosidase 2
  Subcellular localization annotation: CTP_CleavageSite=68; ConfidenceScore=5.41e-01
RKVNLNEQDYLLDYNPLVASSSSFLLLVAVIGSCSTVSASTSSNLQATKYNAMFSFGDSVAETGNICVVSSRNATELDVLTCTHPPYGTTYFGRPSCRWSDGRVVVDFIGRHMHACMHFLLSY

SEQ ID NO: 104797 - protein, 218 aa, Setaria italica
  misc_feature (20)..(20): Xaa can be any naturally occurring amino acid
  misc_feature (35)..(35): Xaa can be any naturally occurring amino acid
  Transcript Sequence Number=SeqID_38823
  Gene Ontology: Mol. function=hydrolase activity, acting on ester bonds; Biological process=lipid metabolic process
  Homolog annotation: Hit_ID=B6TLP8; Match level="QueryCoverage=98%, HitCoverage=56%, E-value=1e-64, Identity=55%"; Hit description=Alpha- L-fucosidase 2
  Pfam annotation: Domain name=Lipase_GDSL; Domain location=4-206; Score=40.7; E_value=6e-09; Accession=PF00657.14; Description=GDSL -like LipaseAcylhydrolase
MLDCKEFLAKSMFQFGGFGXEIDYNIQLLELGFTXEQAMKNTPMIINATINGIERLIALGAVHIVVPGILPTGCLPLFLTFFASSSSESDFDQYGCLKSYNRLTEYHNSMLRKQVQILQGKYRSTRIMYADYYSQVYKMVQQPRKFGFSNPFETCCGAGGGKYNFDVGARCGMPGATTACRDPSARLIWDGVHPTEAANKMIADAWLNGPYCTPPILS

SEQ ID NO: 104798 - protein, 87 aa, Setaria italica
  Transcript Sequence Number=SeqID_38824
EAGTCSMTHFPVPHFWRMKTTLTSAWIWLVCMHGVWRGRFAQERTGFIYDTMKGSEQRGMVPLVAIYKELEDAHVDVVRHATASGRS

SEQ ID NO: 104799 - protein, 87 aa, Setaria italica
  Transcript Sequence Number=SeqID_38825
IRKQSSQLIMQKRAGTGTIRKEQTITKLVNPNSCKTEHMLVKFLRKSYDKIIVSKTGPKQLTPLVDLNSLDHGNAGRLYYSSEYVYE

SEQ ID NO: 104800 - protein, 32 aa, Setaria italica
  Transcript Sequence Number=SeqID_38826
VVASDGDHLTVTNALEITWKGVALALPRARLM

SEQ ID NO: 104801 - protein, 94 aa, Setaria italica
  misc_feature (79)..(79): Xaa can be any naturally occurring amino acid
  Transcript Sequence Number=SeqID_38827
  Subcellular localization annotation: CTP_CleavageSite=78; ConfidenceScore=5.67e-01
RDDSSSTTFTCPSGTNYQVVFCPSNDISASPPATNPHAPTGTGSTSFTRSRVFSAVLGSIGSLIVLVVFITFFAYKLRXQRHQEMQEEDEEFGE

SEQ ID NO: 104802 - protein, 79 aa, Setaria italica
  Transcript Sequence Number=SeqID_38828
NIYISTYGCFFHPSWLFCKIIPQLFRNQPAVFGICLNDFAKRSRRRNPPILPLLLRIHHHRPDGVAVAGVAGQSGPQDV

SEQ ID NO: 104803 - protein, 65 aa, Setaria italica
  Transcript Sequence Number=SeqID_38829
  Gene Ontology: Mol. function=protein serine/threonine kinase activity; Biological process=protein amino acid phosphorylation
  Homolog annotation: Hit_ID=Q17U57; Match level="QueryCoverage=95%, HitCoverage=50%, E-value=5e-22, Identity=67%"; Hit description =Receptor protein kinase, putative
HTNLVRLLGCCVQAEEKMLIYEYMHNRSLDFFIFDDKKGKILTWERRFRIIDGVAQGLLYLHNTR

SEQ ID NO: 104804 - protein, 119 aa, Setaria italica
  Transcript Sequence Number=SeqID_38830
  Gene Ontology: Mol. function=protein serine/threonine kinase activity; Biological process=protein amino acid phosphorylation
  Homolog annotation: Hit_ID=Q5JKA2; Match level="QueryCoverage=78%, HitCoverage=11%, E-value=1e-37, Identity=75%"; Hit description=KI domain interacting kinase 1-like protein
  Pfam annotation: Domain name=Pkinase_Tyr; Domain location=16-118; Score=-149.4; E_value=0.00086; Accession=PF07714.9; Description =Protein tyrosine kinase
FTLYDFSELAAATGGFSDENRLGKGGFGPVYKGKLADGSEIAVKRLAAHSGQGLEEFKNEIQLIAKLQHTNLVRLVGCCVQDEEKMLVYEFMPQPQPSTASSSVPFSHFVFSDTLPLIL

SEQ ID NO: 104805 - protein, 154 aa, Setaria italica
  Transcript Sequence Number=SeqID_38831
  Gene Ontology: Mol. function=protein serine/threonine kinase activity; Biological process=protein amino acid phosphorylation
  Homolog annotation: Hit_ID=B6SVD4; Match level="QueryCoverage=92%, HitCoverage=21%, E-value=3e-57, Identity=71%"; Hit description =Protein kinase
  Pfam annotation: Domain name=Pkinase_Tyr; Domain location=37-154; Score=-122.4; E_value=1.4e-05; Accession=PF07714.9; Description =Protein tyrosine kinase
TMSMEMEQVLKLWRIEESDSEFSLYDFAQLAAATGGFSDEHKLGQGGFGPVYKGELPGGLEIAIKRLSSCSVQGLEEFKNEIQLIAKLQHTNLVRLVGCCVQDEEKMLVYEFMPNRSLDCFIFDQQRGPLLDWKKRLHIIEGIAQGLLYLHKHS

SEQ ID NO: 104806 - protein, 78 aa, Setaria italica
  Transcript Sequence Number=SeqID_38832
FFLGKKNLDNSSTTFPVWLVSLSLDLFFFYLKRILIILAQSYRDWQFVQHRIHPGFTNIQPNCFARNHERRNIQQQLS

SEQ ID NO: 104807 - protein, 82 aa, Setaria italica
  Transcript Sequence Number=SeqID_38833
SCSYYFSTSILHIQCTRLSYYPTCSIQKIDILEYNYLQSNLIVADKYITLSKPTSFQVITASYAINMFPMQLCLEPNTHTIC

SEQ ID NO: 104808 - protein, 102 aa, Setaria italica
  Transcript Sequence Number=SeqID_38834
YILQEFNLKVDVVAVGSFRRTRLIFSLGQSRLRLFLNPREVMAKLMHHAHTTVLQSNLLNHLNTETRPKGTWKIIVIVQDCQRGSYIEMKQRNYIVSRNSSM

SEQ ID NO: 104809 - protein, 910 aa, Setaria italica
  Transcript Sequence Number=SeqID_38835
  Gene Ontology: Mol. function=structural molecule activity; Cellular component=cytoplasmic vesicle; Biological process=intracellular protein transport
  Homolog annotation: Hit_ID=Q5VQ78; Match level="QueryCoverage=98%, HitCoverage=99%, E-value=0.0, Identity=93%"; Hit description =Coatomer subunit beta'-1
  Pfam annotation: Domain name=Coatomer_WDAD; Domain location=319-779; Score=852.5; E_value=2.5e-253; Accession=PF04053.6; Description =Coatomer WD associated region
  Pfam annotation: Domain name=WD40; Domain location=132-171; Score =45.9; E_value=1.6e-10; Accession=PF00400.24; Description=WD domain, G-beta repeat
  Pfam annotation: Domain name=WD40; Domain location=175-215; Score =39.7; E_value=1.2e-08; Accession=PF00400.24; Description=WD domain, G-beta repeat
  Pfam annotation: Domain name=WD40; Domain location=219-257; Score =56.5; E_value=1e-13; Accession=PF00400.24; Description=WD domain, G -beta repeat
  Pfam annotation: Domain name=WD40; Domain location=47-85; Score=13.9; E_value=0.67; Accession=PF00400.24; Description=WD domain, G-beta repeat
  Pfam annotation: Domain name=WD40; Domain location=5-43; Score=21.4; E_value=0.0037; Accession=PF00400.24; Description=WD domain, G-beta repeat
  Pfam annotation: Domain name=WD40; Domain location=89-127; Score =47.1; E_value=7e-11; Accession=PF00400.24; Description=WD domain, G -beta repeat
  Pfam module annotation: Pfam domain module=Coatomer_WDAD::WD40::WD40:: WD40::WD40::WD40::WD40; Domain location=319-779::132-171::175 -215::219-257::47-85::5-43::89-127
MPLRLEIKRKFAQRSERVKSVDLHPTEPWILSSLYSGSVCIWDYQAQAMVKSFEVSELPVRSAKFVSRKQWVVAGADDMFIRVYNYNTMDKVKVFEAHTDYIRCVAVHPTLPYVLSSSDDMLIKLWDWDKGWMCTQIFEGHSHYVMQVTFNPKDTNTFASASLDRTTKIWSLGSPDPNFTLDGHQKGVNCVDYFTGGDRPYLITGSDDSTAKVWDYQTKSCVQTLEGHTHNISAVCFHPELPIIITGSEDGTVRIWHSTTYRLENTLNYGLERVWAVGYMKGSRRMVIGYDEGTIMIKMGREVPVASMDTSGKIIWAKHNEIQTVNIKTVGAGFEITDGERLPLAVKELGSCDLYPQSLKHNPNGRFVVVCGDGEYIIYTALAWRNRSFGSALEFVWSSDGEYAIRESTSRIKIFNKSFQEKKTIRPSFSAERIFGGVLLAMCSSDFICFYDWADCRLIRRIDVTVKNLYWADSGDLVAIASDTSFYILKYNRDVVASYLEGGKPVDEEGVEDAFELLHEVNERVRTGIWVGDCFIYNNSSWRLNYCVGGEVTTMYHLDRPMYLLGYLANQSRVYLIDKEFNVIGYTLLLSLIEYKTLVMRGDLERANEILPSIPKAQYNSVAHFLESRGMLEEALEIATDADYKFDLAVQLGKLDVAKAIATEAQSESKWKQLGELAMSTGKLEMAEECLLQAKDLSGLLLLYSSLGDAEGIEKLASLSKEHGKNNVAFLCLFMLGKLEDCIQLLIDSNRIPEAALMARSYLPSKVSEIVAIWRNDLCKVNPKAAESLADPSEYPNLFDDWQVALTVEKNVASQRGHYPPADEYLNHAEKSDTTLVEAFKRMQIIEDDESVDPAEENGEPDQEALEENEMENTDEAVPVDADEHEETSLVNGNEDEDQPSTNNEGAASA

SEQ ID NO: 104810 - protein, 32 aa, Setaria italica
  Transcript Sequence Number=SeqID_38836
ISRMHLVVSGDFLLATCIDVQTLTRYEFKVHT

SEQ ID NO: 104811 - protein, 161 aa, Setaria italica
  Transcript Sequence Number=SeqID_38837
  Gene Ontology: Mol. function=calcium-dependent phospholipid binding; Cellular component=plasma membrane; Biological process=cell differentiation
  Homolog annotation: Hit_ID=B6SQ54; Match level="QueryCoverage=96%, HitCoverage=48%, E-value=1e-75, Identity=87%"; Hit description =Annexin A4
  Pfam annotation: Domain name=Annexin; Domain location=12-78; Score =83.1; E_value=1e-21; Accession=PF00191.12; Description=Annexin
  Pfam annotation: Domain name=Annexin; Domain location=89-154; Score =120.1; E_value=7.3e-33; Accession=PF00191.12; Description=Annexin
  Pfam module annotation: Pfam domain module=Annexin::Annexin; Domain location=12-78::89-154
GAAAVDPSLAALDARELFKAGERRLGTDERAFIRVFSERSWAHLAAVARAYHHMYDRSLEQAVKGETSGNFGFGLLTVLRCAADSPARYFAKVLHKAMKGLGTSDSALIRVVVTRAEVDMQYIKAEYHRMYKRSLPDAIHSETSGNYRTFLLSLVGRDRTY

SEQ ID NO: 104812 - protein, 94 aa, Setaria italica
  Transcript Sequence Number=SeqID_38838
KGIPFLMATRIMCLIISVFLVLAMMSTTIPSSEAGPSCSKGQCPPPPPASVRCFPMECGKKCTCKKDAQNECGKIDYPKKDATCRSENEFCCVN

SEQ ID NO: 104813 - protein, 537 aa, Setaria italica
  Transcript Sequence Number=SeqID_38839
  Gene Ontology: Mol. function=kinase activity; Cellular component =plasma membrane
  Homolog annotation: Hit_ID=Q9AS76; Match level="QueryCoverage=100%, HitCoverage=100%, E-value=1e-165, Identity=54%"; Hit description =Kinase interacting protein 1-like
  Pfam annotation: Domain name=Filament; Domain location=185-396; Score= -189.1; E_value=0.049; Accession=PF00038.13; Description=Intermediate filament protein
  Pfam annotation: Domain name=KIP1; Domain location=14-87; Score =179.1; E_value=1.2e-50; Accession=PF07765.4; Description=KIP1-like protein
  Pfam annotation: Domain name=Pox_A_type_inc; Domain location=197-219; Score=6.1; E_value=12; Accession=PF04508.4; Description=Viral A-type inclusion protein repeat
  Pfam annotation: Domain name=Pox_A_type_inc; Domain location=282-304; Score=7.5; E_value=7.6; Accession=PF04508.4; Description=Viral A-type inclusion protein repeat
  Pfam annotation: Domain name=Pox_A_type_inc; Domain location=320-342; Score=2.7; E_value=38; Accession=PF04508.4; Description=Viral A-type inclusion protein repeat
  Pfam annotation: Domain name=Pox_A_type_inc; Domain location=34-53; Score=1.3; E_value=60; Accession=PF04508.4; Description=Viral A-type inclusion protein repeat
  Pfam annotation: Domain name=Pox_A_type_inc; Domain location=401-423; Score=4.6; E_value=20; Accession=PF04508.4; Description=Viral A-type inclusion protein repeat
  Pfam module annotation: Pfam domain module=Filament::KIP1::Pox_A_type_ inc::Pox_A_type_inc::Pox_A_type_inc::Pox_A_type_inc::Pox_A_type_inc; Domain location=185-396::14-87::197-219::282-304::320-342::34 -53::401-423
MKRMQRMPTRKSHSWWWDSHISPKNSKWLAENLEEMDKQVKEMLKLIEDEGDSFAKKAEMYYQRRPVLVTHVENFYRMYRALAERYDNVTGELRKNLPSSLQSQGSGISETDSETQSTSPSPEPNMEQKTPKQKHKTRAAGFDVFLGSGGSSDISKKGSDGSSSSSSDSDSEVDEPSEENGNGFSYIMNGRVSELEEELQEARQQIEALEEKNRHCQCEKLEVSLKQVSSEKEDLVATVLENKNEIEGLKGDLAKVTGEKLQLEAQVKELEQASHSLDESSAEIMKLQEIIKDLQARLENDANEKGVLEERAMEFEQVRRQLEDSRTEVMELQATIKNLKDGLGKSLQEKALLQDRVKDLEQATSDLNDSVASLVGKLTATEEQLKQLHAEKEEASLKSEEQISELNETIADLKKKLELLSSEKSAVENKVSILLIDVTTRDEKLKEMDSHLHQLHLEHVKLLEVADAARKTVSDLRARVCELEEEVEKQKLLISDSAEGKREAIRQLCFSLDHYRHGYQQLRQLLQGHKRPMVMAT

SEQ ID NO: 104814 - protein, 234 aa, Setaria italica
  Transcript Sequence Number=SeqID_38840
  Gene Ontology: Mol. function=binding; Cellular component =mitochondrial inner membrane; Biological process=transport
  Homolog annotation: Hit_ID=Q10R11; Match level="QueryCoverage=98%, HitCoverage=53%, E-value=1e-95, Identity=77%"; Hit description =Mitochondrial carrier, putative, expressed
  Pfam annotation: Domain name=Mito_carr; Domain location=141-231; Score=80.5; E_value=6e-21; Accession=PF00153.19; Description =Mitochondrial carrier protein
  Pfam annotation: Domain name=Mito_carr; Domain location=39-130; Score= 92.1; E_value=1.9e-24; Accession=PF00153.19; Description =Mitochondrial carrier protein
  Pfam module annotation: Pfam domain module=Mito_carr::Mito_carr; Domain location=141-231::39-130
  Subcellular localization annotation: CTP_CleavageSite=90; ConfidenceScore=5.34e-01
ASLAGTVPARALYMAALEATKSSVGSAAVRLGVSEPAASAVASAAAGVSAAVAAQVVWTPVDVISQRLMVQTSATCRYRGGADAFRKILLADGVRGLYRGFGLSILTYAPSNAVWWSTYAMAQRCLWRVVGAERSESYPSLMAVQGASAAVAGGAAALVTMPLDTVKTRLQVMEADAARPTLASTVRGLLKEGGWAACYRGLGPRWGSMSLSAATMVTTYEFLKRLSAKEGSLG

SEQ ID NO: 104815 - protein, 99 aa, Setaria italica
  Transcript Sequence Number=SeqID_38841
FTFRPLSFPFTIHSPVLGLRAAPAANSVMLAEIKVPVILLFSPCPLHLQSIHLSPAPSAAAVSPRHVHTQTSHPSPRSHVPLLLPNSTPQPAPADQSGA

SEQ ID NO: 104816 - protein, 516 aa, Setaria italica
  Transcript Sequence Number=SeqID_38842
  Homolog annotation: Hit_ID=Q2QPK0; Match level="QueryCoverage=59%, HitCoverage=17%, E-value=3e-09, Identity=24%"; Hit description =Transposable element protein, putative, MuDR
  Pfam annotation: Domain name=F-box; Domain location=40-88; Score =30.8; E_value=5.7e-06; Accession=PF00646.25; Description=F-box domain
  Pfam annotation: Domain name=FBD; Domain location=413-459; Score=9.5; E_value=0.012; Accession=PF08387.2; Description=FBD
  Pfam module annotation: Pfam domain module=F-box::FBD; Domain location=40-88::413-459
MYADGGACEECRYNQLASPCCRAGLLRRSPRVRRGTSGEDRISALPDDLRLKIISHLDCVRAAANMSLLSRKWNGLWRHLPKLVFHNITPDPLIAALGQVPHPAGSSLNIYLQIHHKLSAERISSILRAAAPVEPANLHAVFFMDEDADTSVPIELPIFDRATSIKLSFPPLETALLPTGDFTKVETLSLTFCNIDLCDLLPRCPKLRKLKISCEPLDSIKVHSDSLEELDVYTLSDVRVIDIATPKLKKLRFASNEGTEDAFSLSFSAPLLDDLLWQWWCKSSFGALWRMWTLKLKTIEPHGRTHLASNGESSCLKLHQRPHNNILLLKMGRSRYARNVFRSFGLDISRIPVRFSILELDITTGRHVYGAVVLEVLGFCTSIQRLKIMLNRRQERKRRGTCRASCPCDRPRNWRSQSITLTNLKEVEVEGFSGEDHEVDLLKVIFRSTTMLEGVTLKFSRNVSPECSVYKELPSISDAHPSVKFNIYSCYHFQESSMNDSDLEILEDTSSDESDG

SEQ ID NO: 104817 - protein, 86 aa, Setaria italica
  Transcript Sequence Number=SeqID_38843
MFTVDYIRSFQLNPQLTIPRFTLIHHIIHIKQNNNRIIAKAIVRLVLEVSSQQGHFLPMRRNHLQCSSHFQIPAFISVHMFQRRRK

SEQ ID NO: 104818 - protein, 82 aa, Setaria italica
  misc_feature (11)..(11): Xaa can be any naturally occurring amino acid
  misc_feature (24)..(24): Xaa can be any naturally occurring amino acid
  Transcript Sequence Number=SeqID_38844
  Gene Ontology: Mol. function=thiosulfate sulfurtransferase activity; Cellular component=chloroplast
  Homolog annotation: Hit_ID=B6TZV9; Match level="QueryCoverage=100%, HitCoverage=53%, E-value=2e-35, Identity=87%"; Hit description =Senescence-associated protein DIN1
VPYLFFTSQGXEKNPKFIEQVAAXFDKQDSIVVGCKSGVRSELACFDLMAAGFENVKNIEGGYDAWVENGLAVKKPQAQDEL

SEQ ID NO: 104819 - protein, 215 aa, Setaria italica
  Transcript Sequence Number=SeqID_38845
  Gene Ontology: Mol. function=cytokinin dehydrogenase activity; Cellular component=extracellular region; Biological process =cytokinin metabolic process
  Homolog annotation: Hit_ID=C3VPM7; Match level="QueryCoverage=98%, HitCoverage=39%, E-value=3e-72, Identity=67%"; Hit description =Cytokinin oxidase/dehydrogenase
  Pfam annotation: Domain name=FAD_binding_4; Domain location=4-124; Score=34.8; E_value=3.4e-07; Accession=PF01565.15; Description=FAD binding domain
RGFPVSARGHGHSISGQAQVPGGVVVDMSHGPGAAARALPAYSAALGGHYVDVWGGELWVDVLNWTLSHGGLAPRSWTDYLYLSVGGTLSNAGISGQAFHHGPQISNVYELDVVTGKGEVVTCSETENPDLFFGALGGLGQFGIITRARIALERAPQRVRWIRALYSNFSEFTADQERLISLGAGVRRFDYVEGFVVAAEGLINNWRSSFFFVRL

SEQ ID NO: 104820 - protein, 134 aa, Setaria italica
  Transcript Sequence Number=SeqID_38846
NVWYGTAFPPSEEFGVDMICTLRHVESRSANGLMAFVRSCSPVISERKAMVYLLKCNLDVCEAIQMAKQEGCDVSICDDNGYKAAAKAAYHPNPEAYCEFVVQSLPALRSTVRSLLRPSHMLRHIEILHLSTLL

SEQ ID NO: 104821 - protein, 192 aa, Setaria italica
  misc_feature (16)..(16): Xaa can be any naturally occurring amino acid
  misc_feature (23)..(23): Xaa can be any naturally occurring amino acid
  misc_feature (172)..(172): Xaa can be any naturally occurring amino acid
  misc_feature (182)..(182): Xaa can be any naturally occurring amino acid
  misc_feature (185)..(185): Xaa can be any naturally occurring amino acid
  Transcript Sequence Number=SeqID_38847
  Gene Ontology: Mol. function=nucleic acid binding; Cellular component= cytoplasm; Biological process=multicellular organismal development
  Homolog annotation: Hit_ID=Q7Y001; Match level="QueryCoverage=100%, HitCoverage=18%, E-value=5e-80, Identity=74%"; Hit description =Protein argonaute 12
  Pfam annotation: Domain name=Piwi; Domain location=1-192; Score=26.3; E_value=1.2e-10; Accession=PF02171.9; Description=Piwi domain
TELGVITQCCALRMLXKEETVSXNLALKINAKVGGRNTVLEDALNRRIPLLTDVPTIVFGADVTYPPTGVGLAPSIAAVVASMDWPQVTKYKCLVSSQGHRVEIINDLFTEVRDPVKGIVRGGMIRDLLVSFKKSTGHKPCRIIFYRDGVSEGQFSQVLLYEMDAIRKACAXLEEGYLPKVXFVXVQKRHHT

SEQ ID NO: 104822 - protein, 107 aa, Setaria italica
  misc_feature (11)..(11): Xaa can be any naturally occurring amino acid
  Transcript Sequence Number=SeqID_38848
  Homolog annotation: Hit_ID=Q9M9Y3; Match level="QueryCoverage=99%, HitCoverage=25%, E-value=5e-25, Identity=48%"; Hit description =F4H5.16 protein
GFDDVNECPHXLCTLAYDYLRKNKGYEDNIFAFFQNSGDPDPLIVKFIEELDKCILGYFSFHWNYATYIITQVLTVEGVTKRRFKNMVLEATREQRFERVTRSLKVT

SEQ ID NO: 104823 - protein, 215 aa, Setaria italica
  Transcript Sequence Number=SeqID_38849
  Gene Ontology: Mol. function=chalcone isomerase activity; Biological process=flavonoid biosynthetic process
  Homolog annotation: Hit_ID=B4G1R6; Match level="QueryCoverage=93%, HitCoverage=94%, E-value=1e-71, Identity=69%"; Hit description =Chalcone--flavonone isomerase
  Pfam annotation: Domain name=Chalcone; Domain location=15-210; Score =8.7; E_value=1.2e-08; Accession=PF02431.7; Description=Chalcone -flavanone isomerase
MGSETETVTVEGIPFPAEITVGNPLSLLANGITDIEIHFLQIKYNAIGIYLHNNHALLHHLQSWKGKTADELLGDDAFFQALVSAPVEKLFRVVVIKEIKGSQYGVQLESSVRDRLVAADKYDDEEEEVLEKVAEFFQSKYFKPSSVITFHFPATPGAAEISFATEGKDEAKMRVDNENVAAMIQKWYLGGESAASPTTVQSLADRFAALLSAAA

SEQ ID NO: 104824 - protein, 150 aa, Setaria italica
  misc_feature (105)..(105): Xaa can be any naturally occurring amino acid
  misc_feature (116)..(116): Xaa can be any naturally occurring amino acid
  misc_feature (134)..(134): Xaa can be any naturally occurring amino acid
  Transcript Sequence Number=SeqID_38850
  Gene Ontology: Mol. function=electron carrier activity; Biological process=oxidation reduction
  Homolog annotation: Hit_ID=B6TDZ7; Match level="QueryCoverage=82%, HitCoverage=23%, E-value=4e-46, Identity=69%"; Hit description =Cytochrome P450 CYP709H1
MGAGVWAALQVAALLPLLLALWWHLVWRPRAVARSFARQGIRGAPYTFLVGSMLKTKRLVVAGRTGAAPMDAGNHDIVPVVLRPLHTWTAEYGRTFLFWFGPIPXICSTDLELIKXVLTDRTGMFQKDYLIPVXKFLIGNGVILTNGDEW

SEQ ID NO: 104825 - protein, 121 aa, Setaria italica
  misc_feature (19)..(19): Xaa can be any naturally occurring amino acid
  Transcript Sequence Number=SeqID_38851
  Gene Ontology: Mol. function=nucleoside-triphosphatase activity; Cellular component=cytoskeleton; Biological process=proteolysis
  Homolog annotation: Hit_ID=B9S9N8; Match level="QueryCoverage=82%, HitCoverage=12%, E-value=2e-31, Identity=64%"; Hit description =Protein cdcH, putative
  Pfam annotation: Domain name=AAA; Domain location=1-82; Score=-36.1; E_value=0.037; Accession=PF00004.21; Description=ATPase family associated with various cellular activities (AAA)
VIGATNRPDAVDQALRRPXRFDREISLGIPDEHARKQILKMLTQNLRLEGQFDLFKIARATPGFVGADLKALIDKAGNLAMKRIIDERRVQYSHVTSGIEENLLFSKMVEPVLLLPQSHPW

SEQ ID NO: 104826 - protein, 89 aa, Setaria italica
  misc_feature (87)..(87): Xaa can be any naturally occurring amino acid
  Transcript Sequence Number=SeqID_38852
FVVSMAPCVAGDCLRLRARLKCAPLLPPLLIGAVCLGVEIVSFNFFLPPVNLCLQLPVLVAGNLVLCVCIYYVVIYQFSLLSLNVKXKK

SEQ ID NO: 104827 - protein, 70 aa, Setaria italica
  Transcript Sequence Number=SeqID_38853
DNARNMIPKKRSLIDIFTCWNALYELLARLKIAKPQHQFPRENKTGNLCLFGSIQNEEPPDKSTTNYRRW

SEQ ID NO: 104828 - protein, 75 aa, Setaria italica
  Transcript Sequence Number=SeqID_38854
LECAVIHGLGIWETWGSRITSIKIVNMQDQLGKIEYKRLRYESGVTAHGPGHLGQKWCACVLAVLAAAQALVPYC

SEQ ID NO: 104829 - protein, 127 aa, Setaria italica
  Transcript Sequence Number=SeqID_38855
  Gene Ontology: Mol. function=cysteine-type endopeptidase activity; Cellular component=extracellular region; Biological process =proteolysis
  Homolog annotation: Hit_ID=B6SZV3; Match level="QueryCoverage=84%, HitCoverage=42%, E-value=3e-44, Identity=60%"; Hit description=Thiol protease SEN102
  Pfam annotation: Domain name=Peptidase_C1; Domain location=7-127; Score=12.8; E_value=1.7e-12; Accession=PF00112.15; Description =Papain family cysteine protease
SPWPAALPRSDSESVTGSIDRAGSCWAFSTVATVEGIYQIRTGKLVSLSEQELVDCDTLDHGCDGGISYRALRWIADNGGITTEAGGVNFQHYRKGVYNGPCGTKLNHGVTVVGYGQEPGGGERYWI

SEQ ID NO: 104830 - protein, 233 aa, Setaria italica
  Transcript Sequence Number=SeqID_38856
  Gene Ontology: Mol. function=cysteine-type endopeptidase activity; Cellular component=endoplasmic reticulum lumen; Biological process =proteolysis
  Homolog annotation: Hit_ID=B6SZV3; Match level="QueryCoverage=98%, HitCoverage=61%, E-value=1e-117, Identity=89%"; Hit description =Thiol protease SEN102
  Pfam annotation: Domain name=Peptidase_C1; Domain location=15-232; Score=401.2; E_value=1.7e-117; Accession=PF00112.15; Description =Papain family cysteine protease
  Subcellular localization annotation: CTP_CleavageSite=55; ConfidenceScore=5.32e-01
AGQQLTAYVNLSAGAPASVDWRASGAVTPVKNQGRCGSCWAFSTVATVEGIYQIRTGKLVSLSEQELVDCDTLDHGCDGGISYRALRWIADNGGITTEADYPYTAATGVCDTAKLSHNAVSIAGLRRVATRSEASLANAVAAQPVAVSIEAGGVNFQHYRKGVYNGPCGTKLNHGVTVVGYGQEPGGGERYWIVKNSWGERWGDGGYIRMRKDVDGKPEGLCGIAIRPSYPLM

SEQ ID NO: 104831 - protein, 178 aa, Setaria italica
  Transcript Sequence Number=SeqID_38857
  Subcellular localization annotation: CTP_CleavageSite=65; ConfidenceScore=5.83e-01
PPIPPPRSKVNPNPTTQHNPVRFSSKADVNQLNSSQGVPPPLKSRSKPRPNQSSPGGKKRNLQTRRETKKKATRAEPILRNPSEFRHPETPISHQMERNPPQLTHRDERPPNRPGIHRNQTPTRGPPEPNRSPICSGPTPHAPEQAPALPDRASARGGGGERAEGDLGLPGTAGTPAT

SEQ ID NO: 104832 - protein, 81 aa, Setaria italica
  Transcript Sequence Number=SeqID_38858
KEVPELFKGCAVNHEARNQSSKKDDVCDAEVFAQNSWVLQMIVVPGHINFGVTPEVWQDDIPLTANILCINMQGTFQVIAV

SEQ ID NO: 104833 - protein, 100 aa, Setaria italica
  Transcript Sequence Number=SeqID_38859
NLPRVTRCRSTSRRGRGNLHSAAGIVARHHVLFPHARQSPPLLTAGAGRHTTRPLLATAYWSSPITANYKSNNKSTDRTSPFQSYENTSAIKNQGLMMIA

SEQ ID NO: 104834 - protein, 60 aa, Setaria italica
  Transcript Sequence Number=SeqID_38860
IQSIFLFDSKYFVKEMPLLFLKENIIINMSLLHSLLYPILTPHLPLNLEDFTFSRLRFQF

SEQ ID NO: 104835 - protein, 153 aa, Setaria italica
  Transcript Sequence Number=SeqID_38861
  Homolog annotation: Hit_ID=A4Q7Q3; Match level="QueryCoverage=100%, HitCoverage=24%, E-value=6e-11, Identity=30%"; Hit description=Sugar transporter superfamily
SYVIKACLDLGYNLWLQNGNMISLGGKLIEPSDQSVDFFSADVGLMFIRSSVESKKAWNEHTISRVKAMCTSSDFSASLDQKNFVPILTEVLANGAGAKLGKLGEEMRVIELGPNTSNKSTSEGQSNVLFWSHSMASDSVQKQLEKMDLWLID

SEQ ID NO: 104836 - protein, 86 aa, Setaria italica
  Transcript Sequence Number=SeqID_38862
LRRHRDDPRLSDRRRPRPQAGRQVEDDIAHLFGITRKSSAGGDPLAVERLLGFRGCASCPVRRSCSDAPPSDISLQIRVLSRACSP

SEQ ID NO: 104837 - protein, 56 aa, Setaria italica
  Transcript Sequence Number=SeqID_38863
  Homolog annotation: Hit_ID=Q7XQF7; Match level="QueryCoverage=92%, HitCoverage=7%, E-value=2e-23, Identity=90%"; Hit description =OSJNBa0081L15.6 protein
DTLREVRYYNDLHVFDLDHFKWEEIKPRPGCLWPSPRSGFQLAVYQDQASIYFLSS

SEQ ID NO: 104838 - protein, 503 aa, Setaria italica
  Transcript Sequence Number=SeqID_38864
  Homolog annotation: Hit_ID=Q7XQF7; Match level="QueryCoverage=100%, HitCoverage=90%, E-value=0.0, Identity=62%"; Hit description =OSJNBa0081L15.6 protein
  Pfam annotation: Domain name=Kelch_1; Domain location=139-193; Score =7.0; E_value=0.49; Accession=PF01344.17; Description=Kelch motif
  Pfam annotation: Domain name=Kelch_1; Domain location=25-74; Score =29.6; E_value=1.3e-05; Accession=PF01344.17; Description=Kelch motif
  Pfam annotation: Domain name=Kelch_1; Domain location=280-330; Score =16.0; E_value=0.04; Accession=PF01344.17; Description=Kelch motif
  Pfam annotation: Domain name=Kelch_1; Domain location=81-134; Score =32.5; E_value=1.7e-06; Accession=PF01344.17; Description=Kelch motif
  Pfam annotation: Domain name=Kelch_2; Domain location=139-193; Score =14.0; E_value=0.6; Accession=PF07646.7; Description=Kelch motif
  Pfam annotation: Domain name=Kelch_2; Domain location=25-74; Score =26.7; E_value=9.2e-05; Accession=PF07646.7; Description=Kelch motif
  Pfam annotation: Domain name=Kelch_2; Domain location=280-330; Score =0.7; E_value=35; Accession=PF07646.7; Description=Kelch motif
  Pfam annotation: Domain name=Kelch_2; Domain location=81-134; Score =40.3; E_value=7.5e-09; Accession=PF07646.7; Description=Kelch motif
  Pfam module annotation: Pfam domain module=Kelch_1::Kelch_1::Kelch _1::Kelch_1::Kelch_2::Kelch_2::Kelch_2::Kelch_2; Domain location=139 -193::25-74::280-330::81-134::139-193::25-74::280-330::81-134
YKDFWTLDLKTNQWEQILAKGCPSARSGHRMVLYKHKIVLFGGFYDTLREVRYYNDLHVFDLDHFKWEEIKPRPGCLWPSPRSGFQLAVYQDQIYLYGGYFKEVSSDKEKGTVHADMWSLDPRTWEWNKVKKAGMPPGPRAGFSMCVHKKRAVLFGGVVDMEVEGDVIMSMFMNELYGFQLDNHRWYPLELRKDKPAKNKTKDIKRKESTNDVEANIDNEGDEVMEDLEEAIEGQPEVHGVSNQLIKSLSITKAGSSKSSDVLSDSTAQEAPPEAVKPNGRINACMAVGKDMLYLYGGMMEVKDREITLDDLYSLNLSKLDEWKCIIPASESEWLEISEDDEEEDDDEADDNENDSEGGDSQTDEDEESDEDAVKNVSSAVSLLKGESKTMRRKEKRARIEQIRVILGLSDSQRTPVPGESLRDFYKRTNMYWQMAAYEHTQHTGKELRKDGFDLAETRYKELKPILDELAVLEAEQKAEEEASGSTSSKRDTKKGKQKSAGR

SEQ ID NO: 104839 - protein, 140 aa, Setaria italica
  Transcript Sequence Number=SeqID_38865
  Gene Ontology: Mol. function=protein serine/threonine kinase activity; Cellular component=ubiquitin ligase complex; Biological process=ubiquitin-dependent protein catabolic process
  Subcellular localization annotation: CTP_CleavageSite=19; ConfidenceScore=5.40e-01
AGNPSSDSCSQVCSSLSTSSNAVKSSESHRRGLLGSLGRKTPRREWNKDNDAIGQFKEIRYVALTSVEESQPVDEVATLRKELKDTLMMYDRACENLANAKEKIQILSGECHEDVNKVQYALQREEQLKQAVAFEKNRRK

SEQ ID NO: 104840 - protein, 80 aa, Setaria italica
  Transcript Sequence Number=SeqID_38866
LRRKLYCTSLCSILYKKESKSYKPDYNDLKQEYFFIIFPNLLEDCSLRHLMLLCELSERLGKQEDLEGLRCLNPLLECSS

SEQ ID NO: 104841 - protein, 385 aa, Setaria italica
  Transcript Sequence Number=SeqID_38867
  Gene Ontology: Mol. function=metal ion binding; Cellular component =cytoplasm; Biological process=ubiquitin-dependent protein catabolic process
  Homolog annotation: Hit_ID=B9SRQ3; Match level="QueryCoverage=99%, HitCoverage=28%, E-value=1e-139, Identity=63%"; Hit description =Protein binding protein, putative
  Pfam annotation: Domain name=zf-C3HC4; Domain location=335-372; Score= 23.7; E_value=0.0002; Accession=PF00097.17; Description=Zinc finger, C3HC4 type (RING finger)
FVSPAVFLKQGLASFVTLVVKHFDDTRIVNPDLKDLLLQSISVLVQYKEFMLVFENNREAINRMPRSLLSAFDNRSWIPVSNILFRLCKGSGFASSKNGESSSSATFQVLLRETCIHEQELFFSFLNRLFNTLSWTMTEFSMSIREMQDKHQVADLQQRKCSVIFDISCNLARILEFCTREIPCAFLAGPDMNLRRLTELVVFILNHIISAANAEFFDMTLRRPGQHQEKTNRTMILAPLVGIILNLMECSSTSEHRELNDVIAVFASMDCPTTIHFGLQYLLSYNWSNVLRGDASLAKLAQLEEFSHYFRRITMAVDGEDRILNTGDEEKDDTCCICYSCDSDATFQPCHHRSCFGCISRHLLNSQRCFFCNAVVTSVTRIADS

SEQ ID NO: 104842 - protein, 107 aa, Setaria italica
  Transcript Sequence Number=SeqID_38868
SFVCSLNLFSFLKFFVKLVKFGIFVLTYFGSNFMFFLQENLTKQVQIPGPILHQDSAVPCAQDTPPQAQMHCKPVANISMPISNILHHFPFPSHQYTHSNSTNIGYT

SEQ ID NO: 104843 - protein, 55 aa, Setaria italica
  Transcript Sequence Number=SeqID_38869
  Pfam annotation: Domain name=DUF581; Domain location=1-26; Score=0.4; E_value=0.014; Accession=PF04570.6; Description=Protein of unknown function (DUF581)
FIYMGEVAFCSQECRQHQMNLDELKEKKCSTPTGGGGSGGGGSDPSGKSSTVAAA

SEQ ID NO: 104844 - protein, 91 aa, Setaria italica
  Transcript Sequence Number=SeqID_38870
VRWAWPRSTQIDRWYWWVVAPWLTLHVYAWLDWLTSVVKSTFLHPFGFYHAQVMVDVEEKARGTSVIGCVLDQTNFGSDPRAGNVCSILSK

SEQ ID NO: 104845 - protein, 218 aa, Setaria italica
  Transcript Sequence Number=SeqID_38871
  Gene Ontology: Mol. function=endonuclease activity; Cellular component=intracellular; Biological process=DNA repair
  Homolog annotation: Hit_ID=B6SHI7; Match level="QueryCoverage=100%, HitCoverage=43%, E-value=1e-85, Identity=65%"; Hit description =Apurinic endonuclease-redox protein
  Pfam annotation: Domain name=Exo_endo_phos; Domain location=1-216; Score=85.0; E_value=2.6e-22; Accession=PF03372.15; Description =EndonucleaseExonucleasephosphatase family
LKEGNVDHFKNLVQDFDNSYWSCSVARLGYSGTAVISRVKPISVQYGIGIPAHDQEGRVITLEFDGFYLINAYIPNSGRGLKRLNYRVNDWDLCFSDFIKKLECSKPVIVAGDLNCARQSIDIHNPQAKTEAAGFTIEERESFEENLTSKGLVDTFRKQHPNAVAYTFWGENQRISNKGWRLDYFLASESIVDKVHDSYILPDVSFSDHSPIGLVLKL

SEQ ID NO: 104846 - protein, 88 aa, Setaria italica
  Transcript Sequence Number=SeqID_38872
NSHIEMGDISSENGILFLKWWKFIQKCTLMFQKDLNLGTSMAHLVMYFVAEVDLQIRSRLIHTKMTNYLSCAKFIFFLKIQSMDIEFF

SEQ ID NO: 104847 - protein, 123 aa, Setaria italica
  Transcript Sequence Number=SeqID_38873
  Gene Ontology: Mol. function=two-component response regulator activity; Cellular component=nucleus; Biological process=two -component signal transduction system (phosphorelay)
  Homolog annotation: Hit_ID=Q2HWG0; Match level="QueryCoverage=95%, HitCoverage=97%, E-value=2e-38, Identity=62%"; Hit description=TypeA response regulator 13
  Pfam annotation: Domain name=Response_reg; Domain location=8-121; Score=68.1; E_value=3.4e-17; Accession=PF00072.16; Description =Response regulator receiver domain
MATDAPHVLVVDDSFIDRLVASQLLKNCNARVTIMEGPNQALEFLNREHDVKLIVTDYCMPGMTGYDLLMEVKESPKLKHIPVVIMSSDHIPERMKKCLDAGAKEYVLKPLNVVDMPRLLSYT

SEQ ID NO: 104848 - protein, 138 aa, Setaria italica
  misc_feature (86)..(86): Xaa can be any naturally occurring amino acid
  misc_feature (114)..(114): Xaa can be any naturally occurring amino acid
  misc_feature (117)..(117): Xaa can be any naturally occurring amino acid
  Transcript Sequence Number=SeqID_38874
  Gene Ontology: Mol. function=nucleic acid binding; Cellular component= ribonucleoprotein complex; Biological process=response to cadmium ion
  Homolog annotation: Hit_ID=Q9AT32; Match level="QueryCoverage=99%, HitCoverage=50%, E-value=2e-37, Identity=39%"; Hit description =Poly(A)-binding protein
  Pfam annotation: Domain name=RRM_1; Domain location=1-53; Score=49.6; E_value=1.3e-11; Accession=PF00076.14; Description=RNA recognition motif. (a.k.a. RRM, RBD, o
  Pfam annotation: Domain name=RRM_1; Domain location=70-138; Score =36.5; E_value=1.1e-07; Accession=PF00076.14; Description=RNA recognition motif. (a.k.a. RRM, RBD, o
  Pfam module annotation: Pfam domain module=RRM_1::RRM_1; Domain location=1-53::70-138
FSSFGTILSCKVATDPSTGQSKGYGFVQYESEESTQDAINKLNGMLVDGRKIFVGLHMRRQNREVKFTNLYIKNLPAEFTDDDLRXQEFAPVGEITSVVIMRHSDGASKCFRFXNFXKSEYVTEALQKLNDKSIDDKV

SEQ ID NO: 104849 - protein, 85 aa, Setaria italica
  Transcript Sequence Number=SeqID_38875
RGTVAVKLDTYADFAHHSNIQPPCYLHHPIIRTLKEGILFIQAPQIQFLPGHVCFYTLVRGWSKYYEHYQDLKVIKHSLGISHCV

SEQ ID NO: 104850 - protein, 101 aa, Setaria italica
  Transcript Sequence Number=SeqID_38876
AFDKVFRPMRNFTPEEDGLIVYREGTLDDLTFEMCSHHGAIGDLGHHVIPGISCSDLGYLRKVDGNCHLEGCCARYPATAAVAAAGCDFFTVHVKDLFPKY

SEQ ID NO: 104851 - protein, 38 aa, Setaria italica
  Transcript Sequence Number=SeqID_38877
KCSILLDDSADNWSFSSDGGTSTLKYIVILKPFIRCKD

SEQ ID NO: 104852 - protein, 151 aa, Setaria italica
  misc_feature (51)..(51): Xaa can be any naturally occurring amino acid
  misc_feature (138)..(138): Xaa can be any naturally occurring amino acid
  Transcript Sequence Number=SeqID_38878
  Homolog annotation: Hit_ID=UPI0001A7B2AB; Match level="QueryCoverage =74%, HitCoverage=17%, E-value=1e-12, Identity=36%"; Hit description =myosin heavy chain-related
GFLKFYDLRCRDCECPSNITFEEKCSILLDDSADNWSFSSDGGTSTLKHLXEEEKESLKAKMAKLQSNLRMGLEIEQHLQRNARILEKRQALYDGFLRNGLSELQKFHKYQRAEIMKTLEEESSWLSEVVAEIQDKLXSEICINTEASEHP

SEQ ID NO: 104853 - protein, 685 aa, Setaria italica
  misc_feature (276)..(276): Xaa can be any naturally occurring amino acid
  misc_feature (321)..(321): Xaa can be any naturally occurring amino acid
  Transcript Sequence Number=SeqID_38879
  Homolog annotation: Hit_ID=UPI0001A7B2AB; Match level="QueryCoverage =93%, HitCoverage=99%, E-value=1e-102, Identity=37%"; Hit description= myosin heavy chain-related
MDEAADSPALLRRVEELQREKDEKQNSLEVLIRRVEGLQYEMDEKVDLVEVLTRRVEELQRERDELRKDIEQLCMQQTGPGYVSVATRMLSQRTAALEQDVENLQKKLNGCLRENQNLQEELAEAYRVKSQLAELHGAELSKNKDLEKQVRFFQSSVAQAFAERDSSLMECEKAKEREEAVLKKFADFEERKREYQSAIDNQKHLNDDLQRKLTELEAQTESSLKVILKFYDLRCRDCECPSNITFEEKCSILLDDSADNWSFSSDGGTSTLKHLXEEEKESLKAKMAKLQSNLRMGLEIEQHLQRNARILEKRQFPLEYXALYDGFLRNGLSELQKFHKYQRAEIMKTLEEESSWLSEVVAEIQDKLSEICINTEASEHPVDEKQCCDNSCKDVHVTTDISPSTGTSPKSDFPADSNSISFDESKALAQALQEKMEALMLFSQEQERYLLEKQKDQIVIEDLQKNLSQVKDEKVKVLMELAKVKEEYLQLKGSAMKEGHGSGDSSKVIPGHDQQGMLKNMLKRTSLRHWMRNSNIGHGSSDGNDQSVCKEHLMDIARLRVENATLLEGVGTVERLTSSVHRLHIVLLKAYDDVKSASSLESTFQDLNSLITEANLMKTALSVVLPVSWSGDSSDAITYEALCDPSDSPKSKSEKADPLSSAGMEMVELLIFAAEVLKESFLMKK

SEQ ID NO: 104854 - protein, 112 aa, Setaria italica
  Transcript Sequence Number=SeqID_38880
  Gene Ontology: Mol. function=transporter activity; Cellular component= integral to membrane; Biological process=transport
  Homolog annotation: Hit_ID=B6SI09; Match level="QueryCoverage=41%, HitCoverage=17%, E-value=8e-16, Identity=82%"; Hit description =Aquaporin TIP3.1
  Pfam annotation: Domain name=MIP; Domain location=1-87; Score=-92.8; E_value=0.0011; Accession=PF00230.12; Description=Major intrinsic protein
VVSVLLLYAYCATAMEPRRGRAAGAVAPLAVGLLAGANVLACGALDGAVMNPARAFGPAIVGSRRWSNHWVYWAGPMVGAGLSGFFYEHLVVTPADEEEPAAAPSRGSSRRA

SEQ ID NO: 104855 - protein, 168 aa, Setaria italica
  misc_feature (137)..(137): Xaa can be any naturally occurring amino acid
  Transcript Sequence Number=SeqID_38881
  Gene Ontology: Mol. function=DNA binding; Cellular component=nucleus; Biological process=regulation of transcription
  Homolog annotation: Hit_ID=Q8S0Z6; Match level="QueryCoverage=71%, HitCoverage=37%, E-value=4e-61, Identity=91%"; Hit description=Myb -related transcription factor LBM2-like
  Pfam annotation: Domain name=Myb_DNA-bind_2; Domain location=13-70; Score=-5.3; E_value=0.021; Accession=PF08914.3; Description=Rap1 Myb domain
  Pfam annotation: Domain name=Myb_DNA-binding; Domain location=14-62; Score=49.8; E_value=1.1e-11; Accession=PF00249.23; Description=Myb -like DNA-binding domain
  Pfam annotation: Domain name=Myb_DNA-binding; Domain location=68-113; Score=33.6; E_value=7.7e-07; Accession=PF00249.23; Description=Myb -like DNA-binding domain
  Pfam module annotation: Pfam domain module=Myb_DNA-bind_2::Myb_DNA -binding::Myb_DNA-binding; Domain location=13-70::14-62::68-113
MGRAPCCDKASVKRGPWSPEEDEQLRSYVQRHGIGGNWIALPQKAGLNRCGKSCRLRWLNYLRPNIKHGGYTEQEDQIIWSLYSSIGSRWSIIASKLPGRTDNDVKNYWNTKLKKKAIAMNQQQFYYYHHQRGSGGXRPPRRPQTQCASMHPSPASASSAVTTASPGD

SEQ ID NO: 104856 - protein, 82 aa, Setaria italica
  Transcript Sequence Number=SeqID_38882
TWTLWPRQHVDPSVGKRRNKLCSSPRLWKRQGVAGAQGIVAVEGGRARLAAASSCTVLDLTQGSWGRLPADQTGEAGLRDLA

SEQ ID NO: 104857 - protein, 531 aa, Setaria italica
  Transcript Sequence Number=SeqID_38883
  Gene Ontology: Mol. function=zinc ion binding; Cellular component =intracellular; Biological process=proteolysis
  Homolog annotation: Hit_ID=O22697; Match level="QueryCoverage=98%, HitCoverage=71%, E-value=1e-163, Identity=53%"; Hit description =F8A5.10 protein
  Pfam annotation: Domain name=SWIM; Domain location=382-417; Score =16.8; E_value=0.0074; Accession=PF04434.9; Description=SWIM zinc finger
MSLIYLGVPEENILQTHIEGIQRYCSSDAKVDSLASQYVQKLGMIIKRSTHELDLDDQASIRMWVDRNKKSVFFHQDSTETDAFILGIQTEWQLQQMMRFGHQSLLASHSSFGVSKLKYPLHTLLVFDSRQQALPVAWIITRSVAKKDTLKWMRALTDRIHSIDSTWRIGGFIIDDPASELDPIRDVFACPVLFSLWHIRRTWLKNVIKKCSNVEVQREIFIQLGKIIYNIWSEKNPMDALGQLFQDFVDQTAFIKYFKSFWVPKLEMWIDSIRNLPLASQESCGAIEAYHLKLKLKAYDDVQLDALQRVDWLVHKLTTELHSSYWINLFSDESGSFPEVKADYIASTSWQRALQIPDDAVIFDDKEPLLAKVVSQKDPSQMRTVWNPGSEFSLCNCSWSMQGNLCKHVLKVNMMCGTRKDFQPSLSFQSFQHVLLGLWQKPLDDSFSLDLSVAWVMQMQERIQHIAELATSDGIAQVAGKLPIQWTRRSGRRRAAKRTSPLVLPHSNGSLQKDLTPKKSTKRKRLSCFPG

SEQ ID NO: 104858 - protein, 71 aa, Setaria italica
  Transcript Sequence Number=SeqID_38884
  Pfam annotation: Domain name=PHD; Domain location=17-64; Score=8.1; E_ value=0.0034; Accession=PF00628.21; Description=PHD-finger
GLVENDAISVIMEGEVVCEICGSGSAPHLIANCARCNAHEHWYCMRVLTFLIPRIWFCYRCQHEANRAPRS

SEQ ID NO: 104859 - protein, 143 aa, Setaria italica
  misc_feature (21)..(21): Xaa can be any naturally occurring amino acid
  misc_feature (113)..(113): Xaa can be any naturally occurring amino acid
  Transcript Sequence Number=SeqID_38885
  Homolog annotation: Hit_ID=Q01K45; Match level="QueryCoverage=94%, HitCoverage=26%, E-value=4e-21, Identity=47%"; Hit description =OSIGBa0158F13.2 protein
LSNFVLLCCFFIPTSELGPLXNLSSVRITGDELECLLSNSFALEQLELYSCKEIIFLKMPCVLQQLSRLTVLDCYRLQTVECKAPKISIIDFSGDNIKLSLGLLLKMKKLDMXQSDVVCYACAELPSIMPNLETLLIGSGIEV

SEQ ID NO: 104860 - protein, 78 aa, Setaria italica
  Transcript Sequence Number=SeqID_38886
IPRQFPKTQIKSAPIHAKIKPLAHVNNRKRIQEEKLQKISNPSPILRISEHPRSRSNLGGTSKSSDLTGGFARESPPQ

SEQ ID NO: 104861 - protein, 76 aa, Setaria italica
  Transcript Sequence Number=SeqID_38887
EEATDVGRGCQCGGACGDDEWEVVGDDSDDAVAWKEEEDVEVETVRWAMEMGVWAVCLGVGLLATARRFRRKRAFW

SEQ ID NO: 104862 - protein, 65 aa, Setaria italica
  Transcript Sequence Number=SeqID_38888
  Subcellular localization annotation: CTP_CleavageSite=30; ConfidenceScore=5.33e-01
LAMASNLGSSSKRHINRGFAFVRFSSHSVLVNIVASCFVFLKSLFGQTILCKYQDMCKITFNLSS

SEQ ID NO: 104863 - protein, 190 aa, Setaria italica
  Transcript Sequence Number=SeqID_38889
  Subcellular localization annotation: CTP_CleavageSite=80; ConfidenceScore=5.48e-01
MDGNSQPPAPPAATMITLANPFMRPAAAVTTVPWLPTAVHQQRQPKLPVFRPPAAATVTPERQLLQGSSSQQVPAAAPPVAATAPRGPTVLGVSRPPAPPTAMMANPSPRFMQVNNRLTLRDLQLLPKLPVYRGPTPRPELARSVSSGNPLLQSSVDTGPCALNMQADLPSPDELSERDSGSEDELEMLD

SEQ ID NO: 104864 - protein, 212 aa, Setaria italica
  Transcript Sequence Number=SeqID_38890
  Subcellular localization annotation: CTP_CleavageSite=36; ConfidenceScore=5.21e-01
MVKGRPKPTPANAPAEVIFDPSAPGSRKPRRAGAPSASNEWHSFMGSSLSDMYREPVLEKSDDTSDDEPDIDIGKLLKDVELFGASTFKERKQIENRKVVELGGKAVKKHRTPLSVAKPALKNQKKRELKKIEEEKLLGIFRKRDKNSKPQTTRPENRVLRATQGHFKNGILDVKHLLSAPKPSGRDALEPKMRKGKHKGKGKQKGGRRKGR

SEQ ID NO: 104865 - protein, 120 aa, Setaria italica
  misc_feature (18)..(18): Xaa can be any naturally occurring amino acid
  misc_feature (78)..(78): Xaa can be any naturally occurring amino acid
  misc_feature (94)..(94): Xaa can be any naturally occurring amino acid
  Transcript Sequence Number=SeqID_38891
  Gene Ontology: Cellular component=nucleus; Biological process =multicellular organismal development
  Homolog annotation: Hit_ID=B6TJ52; Match level="QueryCoverage=69%, HitCoverage=29%, E-value=8e-22, Identity=65%"; Hit description=MAK16- like protein RBM13
  Pfam annotation: Domain name=Mak16; Domain location=1-120; Score= -71.4; E_value=5.1e-08; Accession=PF04874.6; Description=Mak16 protein
EFWPQLLVHKIKQRLTKXTQYRIRMRKLQLKVREKLMTVPRKKTQIGNMKASKAELAAKIDNCIQSELLERRKKGIYXPFDNIVEHDGKNVVLXPEDEEEYEMEYIEPDEIQMEMEDIED

SEQ ID NO: 104866 - protein, 246 aa, Setaria italica
  Transcript Sequence Number=SeqID_38892
  Gene Ontology: Mol. function=heat shock protein binding
  Homolog annotation: Hit_ID=B4FTV3; Match level="QueryCoverage=99%, HitCoverage=99%, E-value=5e-95, Identity=73%"; Hit description=DnaJ subfamily C member 8
  Pfam annotation: Domain name=DnaJ; Domain location=38-98; Score=64.5; E_value=4.1e-16; Accession=PF00226.23; Description=DnaJ domain
MGSSEADEDQLLKSFLAEVSEAERDNEVLRILGCFKLNPFEHLKLSFDSSPDEVKKQYRKLSLLVHPDKCKHPQAQEAFAALAKAQQLLLDPQERGYILDQVTAAKEELRAKRKKELKKDSASKIKSLVDEGKYEEQFERSDEFQQQLIIKVREILTEKEWRRRKMQMRISEEEGRLKKDEEETKEMWKRKREHEEKWEETRDQRVSSWRDFMKTGKKGRKGEIKPPKLKTEDPNKSYVQRPVKPK

SEQ ID NO: 104867 - protein, 172 aa, Setaria italica
  Transcript Sequence Number=SeqID_38893
  Gene Ontology: Mol. function=transferase activity, transferring glycosyl groups; Biological process=metabolic process
  Homolog annotation: Hit_ID=B6TBS7; Match level="QueryCoverage=84%, HitCoverage=30%, E-value=1e-55, Identity=76%"; Hit description =Cytokinin-O-glucosyltransferase 2
MGSLGGAAQSKPHAVCLPYPAQGHITPMLNVAKLLHARGFDVTFVNTEYNQARLVRTRGAAAVAGVPGFRFATIPDGLPPSEDDDVTQDIPSLCKSTTETCLGPFRRLLAALNDPATGHPPVTCVVSDVVMGFSIDAAKELGLPYVQLWTASTISFLGYQHYRLLMTRGLAP

SEQ ID NO: 104868 - protein, 86 aa, Setaria italica
  misc_feature (27)..(27): Xaa can be any naturally occurring amino acid
  misc_feature (47)..(47): Xaa can be any naturally occurring amino acid
  Transcript Sequence Number=SeqID_38894
  Gene Ontology: Mol. function=aspartic-type endopeptidase activity; Cellular component=chromatin; Biological process=DNA integration
  Homolog annotation: Hit_ID=Q2R007; Match level="QueryCoverage=89%, HitCoverage=6%, E-value=2e-21, Identity=57%"; Hit description =Retrotransposon protein, putative, Ty1-copia subclass
SYYLGIEVEQSSHAITLCQSAYARKLXPMEKLKLSKDSIAEKVDATXHRSIVGGLRYLTHTQPDISFAVGYVSRFMECCCWSVSLM

SEQ ID NO: 104869 - protein, 210 aa, Setaria italica
  Transcript Sequence Number=SeqID_38895
  Gene Ontology: Mol. function=transcription regulator activity; Cellular component=nucleus; Biological process=regulation of transcription
  Pfam annotation: Domain name=HLH; Domain location=7-57; Score=35.3; E_ value=2.5e-07; Accession=PF00010.18; Description=Helix-loop-helix DNA- binding domain
MAADDGNLKVNIIIERERRRKMKGMFNSLLDLMPHVPKKVDQVTLVDETINFIKSLEQTKAQLEKKKQEQVLVRQAAASSMSMPRTAHGMAALSDGWDPLPQQKPAASAAAAAGPLEFQTWSAPNVVLSVLTNDEAVINICAPRQPHMLTLVLSVLSKYKIDVTSMQVVADTAESLLTINTRVNGASGENPSAEDIYKLAVSEIVVMLSS

SEQ ID NO: 104870 - protein, 129 aa, Setaria italica
  Transcript Sequence Number=SeqID_38896
  Subcellular localization annotation: CTP_CleavageSite=56; ConfidenceScore=5.10e-01
AQVILPPQPPKVLVLQVSHCTWPTSGLFKCKSDPPPLKNSSLLLIAFRIKTQLNPVISSVVPVTHIDLSFLPWAIHLPDTRLLHMFLLFIPAISRHCFGAGDMTVNKAGKHSCHSRAHFLVVAFWLECS

SEQ ID NO: 104871 - protein, 121 aa, Setaria italica
  misc_feature (72)..(72): Xaa can be any naturally occurring amino acid
  Transcript Sequence Number=SeqID_38897
  Gene Ontology: Mol. function=aspartic-type endopeptidase activity; Biological process=proteolysis
  Homolog annotation: Hit_ID=Q8LNM2; Match level="QueryCoverage=99%, HitCoverage=29%, E-value=6e-11, Identity=35%"; Hit description =Eukaryotic aspartyl protease family protein, expressed
RVVDVAYQALRDELAWQLGASLVPPPVGMRGLDLCVARGDAGKLVPPLVLRFGSGGGGGGDLVVPPENYWGXLDDATACMMVFSSSDETTIIGNYMQQDVHLLYDLGNGVLSFQTVDCSSM

SEQ ID NO: 104872 - protein, 55 aa, Setaria italica
  misc_feature (18)..(18): Xaa can be any naturally occurring amino acid
  Transcript Sequence Number=SeqID_38898
LAERVMITRLTVRKWIKXCDHAMMYERISKENLDIMRQRLLEKVVWPTDDTSTGD

SEQ ID NO: 104873 - protein, 524 aa, Setaria italica
  Transcript Sequence Number=SeqID_38899
  Homolog annotation: Hit_ID=B6SKC6; Match level="QueryCoverage=98%, HitCoverage=72%, E-value=1e-176, Identity=66%"; Hit description =Protein binding protein
MQHNRITMLSSSETCQLGSNSSNPAIDQQNLHPNNSTADEQILLPNALESESYPHYLLNSHEVGMPSGSLIGQQNTSLSLWESAGSSSRGCLVDHGNFFQAKGEHLAPSLSIGGPLSIDRRRHEANSSLPSHNLNIDLNVNQADQFGSDDVDLVHSNGQSRTTTVSAHRGSSLTERILHHGISSDDIGSSSRNADCFEGASGQEVHLLDSHHPTFKRKYIDGCHAESSANGSSRNRHQNNNTLLSPPTTCENSTMSASTNFSVPYPPVEQLNQSTNISSSSSLSDHYSLYSDLHENEFVRSTRMRISPSDYEQSLPNLSPEGSFRCSAYQPTQSSFIPVQPRQMSSSAGSHSRPHVPAVTQFSQNLHRPSNVSFGSRIGSSSSSAGNGSSSRSAIQISASQDPSTSLMGSDYPEHLLLGSSFFNADSTNFLSAPGSRSNQQNSGSSSGSMLRAAVNVGSQQAPGFSASQPSTSLRGSADMSRRSLISAGVSHSRSSSIALQHRGTSSTSREVRGHQPRNTKTTT

SEQ ID NO: 104874 - protein, 172 aa, Setaria italica
  misc_feature (21)..(21): Xaa can be any naturally occurring amino acid
  Transcript Sequence Number=SeqID_38900
  Gene Ontology: Mol. function=kinase activity; Biological process =ubiquitin-dependent protein catabolic process
  Homolog annotation: Hit_ID=B6UA54; Match level="QueryCoverage=100%, HitCoverage=45%, E-value=4e-71, Identity=79%"; Hit description =Ubiquitin-protein ligase
  Pfam annotation: Domain name=Kelch_1; Domain location=35-81; Score =18.6; E_value=0.02; Accession=PF01344.17; Description=Kelch motif
  Subcellular localization annotation: CTP_CleavageSite=31; ConfidenceScore=5.39e-01
FLVGGSVAGVPSASVQILDPXRARSWSIGPRLSSTREFAAAVVHSGVLFVAGGCVPSSPFWDEALDLSSPNAKWKTLASPVHLREKWMHGCAPLAGKVLAVADRGGLAYDPAAPPAEAWAPVSPVLDMGWKGRAAVVEGILYSYDYLGQVKGYDPDSDSWSAVEGLERELPK

SEQ ID NO: 104875 - protein, 66 aa, Setaria italica
  Transcript Sequence Number=SeqID_38901
IWRMDQFAFNIKKGCFYCSSFYYIILWCKDHGKYKELHSLQTLWCKDHGKYKELHSLNFNCLVHKM

SEQ ID NO: 104876 - protein, 30 aa, Setaria italica
  Transcript Sequence Number=SeqID_38902
IRIRKADNDAEEGGKKEGTAQGVLVGPAGQ

SEQ ID NO: 104877 - protein, 173 aa, Setaria italica
  misc_feature (34)..(34): Xaa can be any naturally occurring amino acid
  Transcript Sequence Number=SeqID_38903
  Gene Ontology: Mol. function=diacylglycerol kinase activity; Cellular component=integral to membrane; Biological process=activation of protein kinase C activity
  Homolog annotation: Hit_ID=Q10JC6; Match level="QueryCoverage=100%, HitCoverage=28%, E-value=2e-91, Identity=92%"; Hit description =Diacylglycerol kinase 1, putative
  Pfam annotation: Domain name=DAGK_acc; Domain location=89-173; Score=- 33.2; E_value=0.00018; Accession=PF00609.11; Description =Diacylglycerol kinase accessory domain
GGDGTVGWVLDAIDKQNYESPPPVAILPAGTGNXLSRVLSWGGGLGAVEKQGGLRTVLHDIEHAAVTILDRWKVTFEDKKSNNVLLVKYMNNYLGIGCDAKVALDIHNLREENPEKFYSQFLNKVLYAREGAKSIIDKAFVDLPWQVRLEVDGTEIDIPEDSEGVLVTNIPSY

SEQ ID NO: 104878 - protein, 111 aa, Setaria italica
  Transcript Sequence Number=SeqID_38904
  Gene Ontology: Mol. function=oxidoreductase activity, acting on single donors with incorporation of molecular oxygen, incorporation of two atoms of oxygen; Cellular component=chloroplast
  Homolog annotation: Hit_ID=C4PJN3; Match level="QueryCoverage=98%, HitCoverage=17%, E-value=3e-46, Identity=79%"; Hit description =Carotenoid cleavage dioxygenase
SFEERDAGRGGGTSVRIHMSGCSYRWFHFHRMFGYDWHNKKLDPSFMNVAKGRELLPRLVQVSIDLDKRGACRGCSVRRLSDQWTRPADFPAINPAFANRRNRFIYAGAPP

SEQ ID NO: 104879 - protein, 203 aa, Setaria italica
  misc_feature (29)..(29): Xaa can be any naturally occurring amino acid
  misc_feature (36)..(36): Xaa can be any naturally occurring amino acid
  Transcript Sequence Number=SeqID_38905
  Gene Ontology: Mol. function=hydrolase activity, acting on acid anhydrides, in phosphorus-containing anhydrides; Cellular component =nucleus; Biological process=nucleobase, nucleoside, nucleotide and nucleic acid metabolic process
STLAATPERTTNRDCHESLINRSVNSHCXKKEKVEXSPMSFCAYSERSNSPGKSQLGTDNAVTIEHGDLNRNAELFCKNMSMSRCENFKLERNYSAQEVSEKMPSGKKLLVSCIRCKTALGLEQDGLLVTCSRSSSSKFYLAYLLRHGLSTVGLPEDGFSASTPAEIQVVECDASSLNQNIFGKFSRQGSCHHSGVWSAKLKS

SEQ ID NO: 104880 - protein, 118 aa, Setaria italica
  misc_feature (5)..(5): Xaa can be any naturally occurring amino acid
  Transcript Sequence Number=SeqID_38906
LSACXPFELKDEHCSCSCSLQLCSYSSPALWLAAANWDTSCGPTAAAAAASCAEHGESTMAPSLQPQPSMHPAATTLATSAPHAVCRLAATGCAPPPMHGGASEPAAAAGFQGIQPQE

SEQ ID NO: 104881 - protein, 55 aa, Setaria italica
  Transcript Sequence Number=SeqID_38907
QIYILFPEKNIKFANLRCASICCVNPTYISLDHSIRKMANCSNECGLCLSQLFVI

SEQ ID NO: 104882 - protein, 143 aa, Setaria italica
  Transcript Sequence Number=SeqID_38908
  Gene Ontology: Mol. function=lipid binding; Cellular component =cytoplasmic vesicle
  Homolog annotation: Hit_ID=Q9LYF9; Match level="QueryCoverage=68%, HitCoverage=16%, E-value=1e-34, Identity=64%"; Hit description =Clathrin binding protein-like
  Pfam annotation: Domain name=ENTH; Domain location=1-73; Score=35.4; E_value=2e-08; Accession=PF01417.12; Description=ENTH domain
GANWRHVYKAFAVIEYLLANGTERAVDDIIDNNSQIAKFVSFEYVEPNGKDVGLNVRKKAENVLAIMDDREKLQQVREKAAATRDKYFGLSSTGVTYKSSAASFGNGSYSSGSRYGVTQSSKEADASRDSYRGKEWSYSSKEQ

SEQ ID NO: 104883 - protein, 61 aa, Setaria italica
  Transcript Sequence Number=SeqID_38909
NISQLVHPCMLVLFTFRMYTYYKELREFISIPTESYTHVPLTEDPLFSCFLTEDYDEGRLR

SEQ ID NO: 104884 - protein, 352 aa, Setaria italica
  misc_feature (129)..(129): Xaa can be any naturally occurring amino acid
  Transcript Sequence Number=SeqID_38910
  Gene Ontology: Mol. function=nucleic acid binding; Cellular component= cytoplasm; Biological process=multicellular organismal development
  Homolog annotation: Hit_ID=Q6YSJ5; Match level="QueryCoverage=92%, HitCoverage=36%, E-value=1e-162, Identity=86%"; Hit description =Protein argonaute 16
  Pfam annotation: Domain name=DUF1785; Domain location=228-280; Score =86.6; E_value=8.7e-23; Accession=PF08699.2; Description=Domain of unknown function (DUF1785)
  Pfam annotation: Domain name=PAZ; Domain location=281-352; Score= -19.1; E_value=0.1; Accession=PF02170.14; Description=PAZ domain
  Pfam module annotation: Pfam domain module=DUF1785::PAZ; Domain location=228-280::281-352
MCLCAISPFFSFFYLLHSNNDFIWMPDSMATKMAGSVQVVKDDTVKRTPMARPSIGREGKPIRLLSNHFAVKLNGVDAVFYQYSVSIKSEDDKVVDGKGIGRKVIDKLLQTYSSELDGKDFAYDGEKCXFTVGPLPQNNFEFTVILEETSSRAVGGSPGHGSPSQADKKRVKRSHLAKKFIVAISYAAKIPLKSVALALRGSESEHAQDALRVLDIVLRQQQAKRGCLLVRQSFFSDDSRNLVDLTGGVSGCRGLHSSFRTTIGGLSLNMDVSTTMIVTPGPVIDFLLTNQNVRDIRDIDWPRARKMLKNLRVKAKHNNMEFKIIGLSDQPCSRQTFPMKVRNGSIEVQTMD

SEQ ID NO: 104885 - protein, 97 aa, Setaria italica
  Transcript Sequence Number=SeqID_38911
  Pfam annotation: Domain name=Defensin_2; Domain location=62-94; Score= 11.1; E_value=0.054; Accession=PF01097.10; Description=Arthropod defensin
MALKSAALAILLVVSLIFADHVKCQPLVRSEGQELAGNGSGNGGGGEVSPKSDCNEGALYHGPCLELICAAACLLQMNRGGHCKGGFFGACLCFVCN

SEQ ID NO: 104886 - protein, 199 aa, Setaria italica
  misc_feature (78)..(78): Xaa can be any naturally occurring amino acid
  Transcript Sequence Number=SeqID_38912
  Gene Ontology: Mol. function=sequence-specific DNA binding; Cellular component=nucleus; Biological process=regulation of transcription, DNA-dependent
  Homolog annotation: Hit_ID=B9RB95; Match level="QueryCoverage=53%, HitCoverage=6%, E-value=2e-26, Identity=55%"; Hit description =Homeobox protein, putative
  Pfam annotation: Domain name=DDT; Domain location=165-199; Score=9.1; E_value=0.041; Accession=PF02791.9; Description=DDT domain
LEKQEMLNRKREEQRRKEMERLDRERRKEEERLLRERQREEERFQREQRREHERMEKFLQKQSRRAEKQRQKEEMRKXEKEAARQKAASERATARRIAREYMELMEDERLELMELAAQSKGLPSTHLDSDTLQQLDSFRGMLSQFPPQTVRLKVPFSIKPWIGSEDNVGKLLMVWRFLITFTDVLGLSPVTLDEFVQSL

SEQ ID NO: 104887 - protein, 91 aa, Setaria italica
  Transcript Sequence Number=SeqID_38913
  Gene Ontology: Cellular component=extracellular region
  Homolog annotation: Hit_ID=B6SKV6; Match level="QueryCoverage=74%, HitCoverage=72%, E-value=3e-28, Identity=88%"; Hit description =Gibberellin-regulated protein 2
  Pfam annotation: Domain name=GASA; Domain location=4-91; Score=136.1; E_value=1.1e-37; Accession=PF02704.6; Description=Gibberellin regulated protein
MGKARMLFALSLVVVLLLVETTAPHGQAHAIDCGASCSYRCSKSGRPKMCLRACNTCCQRCGCVPPGTAGNENVCPCYANMTTKNGKHKCP

SEQ ID NO: 104888 - protein, 121 aa, Setaria italica
  Transcript Sequence Number=SeqID_38914
KKLLLRMSSHFAREEKLEPPCTSKSELFGVVLHGTSVDCDTRAVLCSECSHGKCFLQDSTLQILDGTIVMQDDCFLFVRYPLVLWFWSTIICHGMTSNLTEWHIWFHGKTERSSWVVTGRS

SEQ ID NO: 104889 - protein, 148 aa, Setaria italica
  misc_feature (90)..(90): Xaa can be any naturally occurring amino acid
  Transcript Sequence Number=SeqID_38915
  Gene Ontology: Mol. function=binding
  Homolog annotation: Hit_ID=B9T1X0; Match level="QueryCoverage=96%, HitCoverage=18%, E-value=3e-27, Identity=45%"; Hit description=26S proteasome non-ATPase regulatory subunit, putative
QGAHFLLTSSNVARHVVESSFDRQGRGRQLAALHAFGSICGVDRQEDQMKLDGQAEEYLKRLVYTTAANSSKLTPSVSSNTFSSVLIYLXLLMVLPCLVGCFFGFIVCQALLLSILQQDPDIRIAGYRVISGLVVREWCLREICLNSD

SEQ ID NO: 104890 - protein, 98 aa, Setaria italica
  Transcript Sequence Number=SeqID_38916
  Gene Ontology: Mol. function=binding
  Homolog annotation: Hit_ID=B9T1X0; Match level="QueryCoverage=81%, HitCoverage=13%, E-value=2e-15, Identity=46%"; Hit description=26S proteasome non-ATPase regulatory subunit, putative
ASHVLTRRLSLYFIVAGLHSDDTVRQFLERCPLPKLLGALQSEADAPGMVETVTECLDKVFSSRYGASLLPSYGAFIRTGLLTDSKDIRKLACKAVCT

SEQ ID NO: 104891 - protein, 87 aa, Setaria italica
  Transcript Sequence Number=SeqID_38917
  Subcellular localization annotation: CTP_CleavageSite=62; ConfidenceScore=5.30e-01
KRKKYFKKMNKSFKPHTAEWITSFHFTTSTSSPPPPNLVKFKHKIYSDRRLILLRFPTGETSVDVKKVKPLFLPENFCNAAPRRTTM

SEQ ID NO: 104892 - protein, 118 aa, Setaria italica
  Transcript Sequence Number=SeqID_38918
  Gene Ontology: Mol. function=acyl-CoA binding
  Homolog annotation: Hit_ID=Q9LNM5; Match level="QueryCoverage=78%, HitCoverage=20%, E-value=4e-38, Identity=81%"; Hit description =F12K21.3
KITPLVILGTFPTGLALFIEKKSRRIEISLYCLARAIESFFTCMTDAGLCPPILQIKRADVVVFSIATSIIMHCYAQEREVFRSKYLNVLDWVFGVPPPLDNEGESGYQPDDEAKKCQ

SEQ ID NO: 104893 - protein, 44 aa, Setaria italica
  Transcript Sequence Number=SeqID_38919
LSADEARAVAAASRGYPCSTYFIDGHFPDEGESSSLDANQAQDE

SEQ ID NO: 104894 - protein, 580 aa, Setaria italica
  Transcript Sequence Number=SeqID_38920
  Gene Ontology: Cellular component=plasma membrane
  Homolog annotation: Hit_ID=Q8RU34; Match level="QueryCoverage=77%, HitCoverage=53%, E-value=3e-93, Identity=40%"; Hit description=Bzip transcription factor-like
  Pfam annotation: Domain name=DUF632; Domain location=133-456; Score =468.6; E_value=8.9e-138; Accession=PF04782.4; Description=Protein of unknown function (DUF632)
FTSSPNSSEVRAREGIPELEEETEMESMRESVKARKAVESTASNRIDHVDVSAKVKVSMEHKEVDIESVDSASVLESGEESVCSCDCDHVNARTGGPVPPGDDQGKVKKVSSEDHSSIVLEDVRPPENIGTRDVAEVVQEIKEQFNSVAACGEDVARILEVGRMQYRSRNKVLRLIFSRMMGTFALLFSSLSEPPAKNLEQSAMNSSKRSQNLSKRFDFSSDVELNTLSATMDRLYVWEKRLHKEIMEEERLRITYDKEWKRLKELDASGAEPYKIDTTRASIRTLLTRINISIRSAKVISRRIHILRDDELHPHLVTLIQGLVRMWKFILECHRKQFHTILETKSHILIPKNGPERSSSKVTLELEMELLNWCFCFRNWILSQKAYIETLNGWLVKWLPQEKEETPDGIAPFSPGRLGAPAVFITANDWCQAMKRTSEASIVDTMEAFAVNVHILWERQDEEQQQKLKAEYLSRDFAKRLKSLQKEHGLQGQLEADNTVLPIADNGRAVDNRMVALDTLHKRLDEQRARHEETVKQIREASATDLKSGLAPIFEALESFTQETLRGYENVRITVGSGGA

SEQ ID NO: 104895 - protein, 199 aa, Setaria italica
  misc_feature (30)..(30): Xaa can be any naturally occurring amino acid
  Transcript Sequence Number=SeqID_38921
NGGDGDARWRGRQGPGLFIDECSGTVIDGXVYFLTNKVYDGARCGIRPDYIVSFDLGKEEWRRDLRGPISSNVEHAKVVLYLRRDLSLADLKGSLVLADQRDQPFTMDIWFLSNFQNGLWVKEYHIRTESIISRLGGEYHLKPLLVLDDGRLVLYLASKGLLFICDPGTNTFAQVDKRFPVSVAVYTGNLLSLGEGDMV

SEQ ID NO: 104896 - protein, 81 aa, Setaria italica
  misc_feature (20)..(20): Xaa can be any naturally occurring amino acid
  misc_feature (57)..(57): Xaa can be any naturally occurring amino acid
  misc_feature (69)..(69): Xaa can be any naturally occurring amino acid
  Transcript Sequence Number=SeqID_38922
GQLLVFVALNRTDDYAAARXLLIIENRWKMGGWVLANCILLPDYKYSASQGLSTTKXSPPLLPSYTENXSTSSHHPLLIWL

SEQ ID NO: 104897 - protein, 79 aa, Setaria italica
  Transcript Sequence Number=SeqID_38923
HLTNINIGRGKLTTPRRFCRKGSSFRQLPSKHFHDEAQALHLASLLVKLLNLHTISQTTSRRLQTYSNNTQYRMLSSGY

SEQ ID NO: 104898 - protein, 168 aa, Setaria italica
  Transcript Sequence Number=SeqID_38924
  Gene Ontology: Mol. function=protein serine/threonine kinase activity; Cellular component=plasma membrane; Biological process =regulation of transcription, DNA-dependent
  Homolog annotation: Hit_ID=Q2QNK0; Match level="QueryCoverage=74%, HitCoverage=16%, E-value=3e-60, Identity=86%"; Hit description =Protein kinase family protein, putative, expressed
  Pfam annotation: Domain name=Pkinase; Domain location=26-158; Score= -55.2; E_value=3.3e-05; Accession=PF00069.17; Description=Protein kinase domain
  Pfam annotation: Domain name=Pkinase_Tyr; Domain location=26-152; Score=-57.3; E_value=6.4e-10; Accession=PF07714.9; Description =Protein tyrosine kinase
  Pfam module annotation: Pfam domain module=Pkinase::Pkinase_Tyr; Domain location=26-158::26-152
SFLLKLVFYCKSVFVLGIYEILWEDLVIGEQIGQGSCGTVYHALWYGSDVAVKVFSKQEYSEELIQTFRQEVSLMKKLRHPNILLFMGAVTSPQRLCIVTEFLPRGSLFRLLQRSGTKLDVRRRVHMALDIVSAFSLYYEPIVHMIQCIDQLVNASYFEQGTCQSPSK

SEQ ID NO: 104899 - protein, 75 aa, Setaria italica
  Transcript Sequence Number=SeqID_38925
HYFFQIHSILACNNMLLKTLQFCKLIDFSFNGPFLLQRSFTRHHIISHHLNNNSYLMRTLNGGVRSSVDVALVVL

SEQ ID NO: 104900 - protein, 191 aa, Setaria italica
  Transcript Sequence Number=SeqID_38926
  Gene Ontology: Mol. function=zinc ion binding
  Homolog annotation: Hit_ID=Q10AC5; Match level="QueryCoverage=56%, HitCoverage=7%, E-value=3e-10, Identity=36%"; Hit description =Transposon protein, putative, Mutator sub-class
WYCTSTRTKVKPSRSNVPIEDAPSDSDVDIADAYDTVTRYGTQPERAPLHDNMGQQFARLSNEAGVVMEHAVGSGDGLLRQFAERVRKSCRRMAMRMNCMSSSDVHHGGNGQGTSSGSRRTPLATPPGLQHRPLLQVLAGDHEARNPHPRQASEDSEGEQSKDDDPTYGEELEISGMIDVPPVTQTRGESS

SEQ ID NO: 104901 - protein, 113 aa, Setaria italica
  misc_feature (47)..(47): Xaa can be any naturally occurring amino acid
  Transcript Sequence Number=SeqID_38927
MAQGGKGKKLVSLLEKKDVASIARSAIRREAEESNSMMARMEAMDNXDLREYMLQKKGTLESQMKVTIKKLMRKDKPKKKKRTMLCPILGATLKFHKDDDMDPAAAGTVGATA

SEQ ID NO: 104902 - protein, 146 aa, Setaria italica
  Transcript Sequence Number=SeqID_38928
  Gene Ontology: Mol. function=aspartic-type endopeptidase activity; Cellular component=chromatin
  Homolog annotation: Hit_ID=Q8SA91; Match level="QueryCoverage=67%, HitCoverage=4%, E-value=7e-11, Identity=36%"; Hit description =Putative gag-pol polyprotein
DPNTKILLDEIHKCFSDELHKRFAESDLKWEHRFLEAERLHGDRIVKLEAAAKVFEEWRPQVDAAIDDVKLELGKLTRHWDRSVRDSASAEPGIFPTPQSASERPSAPDLTADGPHGHRVDHIHRDDGYGSVFTHTSIPVKGASPS

SEQ ID NO: 104903 - protein, 58 aa, Setaria italica
  Transcript Sequence Number=SeqID_38929
HTTFMESACLEVIETKMSGFNNSNDFVLTTDQCVWEHMVQIDSQQFCYLLLLFKLKNV

SEQ ID NO: 104904 - protein, 62 aa, Setaria italica
  Transcript Sequence Number=SeqID_38930
KKGNLIFASCPSGTNVNKYITGRWGKKKPISTRELHRSSNLHYLLILTLESENSKSLSPAEQ

SEQ ID NO: 104905 - protein, 113 aa, Setaria italica
  Transcript Sequence Number=SeqID_38931
MEIEGGGGESAESLVHGRCKKRPPSPSLPGDGEDSPKSTTSGDDDDEWFISDDSGSEEDEDYEDQGAYPPFTSDNFPTASSDYDEQVAVLYTTPDINRRGPSPIMLFPAFKTG

SEQ ID NO: 104906 - protein, 145 aa, Setaria italica
  Transcript Sequence Number=SeqID_38932
ESFIQSQRLYGQRCALDIKYLVLINAMEARVDIEVIRVPAHGINLKLLAKTSGFSNVIRLFRGTVMEVGFSASFAVAVEKHNYLDLYIEGSQRDDLTPAQKTRRNEWWQCGFGSRYHGVEDLVAELGDFAAVSVKISFKSYEKRS

SEQ ID NO: 104907 - protein, 76 aa, Setaria italica
  Transcript Sequence Number=SeqID_38933
SNLKLLAKTSGFSNVIRLFRGTVMEKTRRNEWWQCGFGSRYHGVEDLVAELGILQQFRSRLVLNLTRRGLEAAAFV

SEQ ID NO: 104908 - protein, 300 aa, Setaria italica
  Transcript Sequence Number=SeqID_38934
EIFDEGAYPPFTSDNFPTASSDYDEQVAVLYTTPDINRRGPSPIMLFPAFKTGYHLFGSDYNLADKSEVSVSNDWDCSNKCHCYSMNLIQFIDAKIAGYQHTHPGHAKIFGFIAAREKIKPLRNYVYRRNIDNCEAVSVKRKTGVARLSLNSPARVISMPSRALIEFELHAISEDKTDGDDDLIIEGCTELCNMTVSESFIQSQRLYGQRCALDIKYLVLINAMEARVDIEVIRVPAHGINLKLLAKTSGFSNVIRLFRGTVMEVGFSASFAVAVEKHNYLDLHMTSGQAPVSEKLSLYK

SEQ ID NO: 104909 - protein, 84 aa, Setaria italica
  Transcript Sequence Number=SeqID_38935
YFFFFGSNSDMISAKTCRISILILFESYKYNFEYPNTDTVRIGTDIECPDSDRNYSFECLNPFDWTNERILSIPLSSLIFTKDV

SEQ ID NO: 104910 - protein, 63 aa, Setaria italica
  Transcript Sequence Number=SeqID_38936
  Subcellular localization annotation: CTP_CleavageSite=27; ConfidenceScore=5.31e-01
QPHPNLYMYPLKNSSSKMQLFHYHCLRTSRRSVSKKKSMVIIPYINKTSDYFSKARGRTSLRS

SEQ ID NO: 104911 - protein, 65 aa, Setaria italica
  Transcript Sequence Number=SeqID_38937
GHTPLPSVFRLQLESIFSNHLVPLVWSSFYLFIWFTRNIYIPTRLKCLSMYMTRSFSPENMIGSL

SEQ ID NO: 104912 - protein, 66 aa, Setaria italica
  Transcript Sequence Number=SeqID_38938
VFCNSSINLSGICTVIRQTITSSKFPLILEDSTVWIAECFPLPCDFILIGLICWASFPSDYLSYMK

SEQ ID NO: 104913 - protein, 150 aa, Setaria italica
  Transcript Sequence Number=SeqID_38939
  Homolog annotation: Hit_ID=Q2QMW0; Match level="QueryCoverage=70%, HitCoverage=24%, E-value=2e-36, Identity=67%"; Hit description =Cytoplasmic tRNA 2-thiolation protein 2
FIHHLTTVSLLLAYTLSALLNTENEHVNWTGKVYSYVFVHLYIVPTNCLFPFRKFVTFSEILCLICGSPFSESELQNLENTKHKAQKKIDLYTAHCCQSCHFQILPSATDTYGQFFSLLPKFWTEKVDTASASSLRDQIEDYLLEDDDEN

SEQ ID NO: 104914 - protein, 79 aa, Setaria italica
  Transcript Sequence Number=SeqID_38940
  Gene Ontology: Mol. function=ribonucleoside-diphosphate reductase activity; Cellular component=ribonucleoside-diphosphate reductase complex; Biological process=response to cadmium ion
  Homolog annotation: Hit_ID=B2M117; Match level="QueryCoverage=72%, HitCoverage=7%, E-value=3e-18, Identity=77%"; Hit description =Ribonucleoside-diphosphate reductase
  Pfam annotation: Domain name=Ribonuc_red_lgN; Domain location=16-79; Score=1.7; E_value=0.0038; Accession=PF00317.13; Description =Ribonucleotide reductase, all-alpha d
ENAACLDNEIKYDQDFDYHYFGFKTQQRYYLLKPGGKVDERPQDMLMRVSVGIHKDDTLYKNCTIYKRLACYYIRLPHL

SEQ ID NO: 104915 - protein, 50 aa, Setaria italica
  Transcript Sequence Number=SeqID_38941
HFQILPSATDTYGQFFSLLPKFWTEKVDTASASSLSDQIEDYLLEDDDEN

SEQ ID NO: 104916 - protein, 316 aa, Setaria italica
  misc_feature (91)..(91): Xaa can be any naturally occurring amino acid
  misc_feature (109)..(109): Xaa can be any naturally occurring amino acid
  Transcript Sequence Number=SeqID_38942
  Homolog annotation: Hit_ID=Q2QMW0; Match level="QueryCoverage=97%, HitCoverage=63%, E-value=1e-128, Identity=73%"; Hit description =Cytoplasmic tRNA 2-thiolation protein 2
  Pfam annotation: Domain name=DUF2392; Domain location=82-189; Score =88.5; E_value=2.4e-23; Accession=PF10288.1; Description=Protein of unknown function (DUF2392)
DKLLTRKFCSPGDKQVHVAPLEDVFSSGSEDKVARLKEVVGMIDDETGRDDFIRCLRMLSLQKIALENGYTKIMLGTCASGIACHVLSATXKGQGYSLPADVQYVNLKXTLVNLFPFDYYGGKLPWVLPLHDCLAQELSLLCELDSLKMQQLLDRPCRGINSLVASFVSRLREENPSREHTILRTAQKLKPFSFNKFSANGYHDFLPSRLRPKFQNVDTNESTFSEILCLICGSPFSESELQNLENTKHKAQKKIDLYTAHCCQSCHFQILPSATDTYGQFFSLLPKFWTEKVDTASASSLSDQIEDYLLEDDDEN

SEQ ID NO: 104917 - protein, 191 aa, Setaria italica
  misc_feature (27)..(27): Xaa can be any naturally occurring amino acid
  Transcript Sequence Number=SeqID_38943
  Gene Ontology: Mol. function=binding
  Homolog annotation: Hit_ID=Q5VS02; Match level="QueryCoverage=98%, HitCoverage=18%, E-value=9e-76, Identity=73%"; Hit description =Pentatricopeptide (PPR) repeat-containing protein-like
  Pfam annotation: Domain name=PPR; Domain location=113-146; Score =14.5; E_value=0.17; Accession=PF01535.12; Description=PPR repeat
  Pfam annotation: Domain name=PPR; Domain location=42-76; Score=23.0; E_value=0.0012; Accession=PF01535.12; Description=PPR repeat
  Pfam annotation: Domain name=PPR; Domain location=6-41; Score=14.5; E_ value=0.17; Accession=PF01535.12; Description=PPR repeat
  Pfam annotation: Domain name=PPR; Domain location=77-111; Score=12.1; E_value=0.33; Accession=PF01535.12; Description=PPR repeat
  Pfam module annotation: Pfam domain module=PPR::PPR::PPR::PPR; Domain location=113-146::42-76::6-41::77-111
IRPGKISFNSMINAYATSGLHMEAKEXIFQEMQGSGHAPNSLSYLALIRAYTEGKLYAEAEETIQMMLNSNITPSCPHFSHLIFAFLKEGKISGAQRIFNRMVEEIGVAPDLACCRTMMRVYLEHGLVDDAISLFEMTRESLKPDSFILSAAFHLYEHAGRESEAGHVLDAISVNGTAFLRNLKVGSKLRC

SEQ ID NO: 104918 - protein, 61 aa, Setaria italica
  Transcript Sequence Number=SeqID_38944
RGIDVHWDKSYRGLDIATRRKKYSYISFFTMHVVIVLNIETSDTCHDLNSITFTNTPINPP

SEQ ID NO: 104919 - protein, 137 aa, Setaria italica
  Transcript Sequence Number=SeqID_38945
KKTGYANFYLLIGYFPSITCTFFWSFQPEKPQLPVPAGREGSTWHSATLLRVDLDAGVILGAAAAARQVPVGRVRQGEVVAGEPAGLAHVPAEAAAPPLVAVAAPQHVRRLSIRLRPSRTCGDDESQEAGDGERVRS

SEQ ID NO: 104920 - protein, 248 aa, Setaria italica
  misc_feature (175)..(175): Xaa can be any naturally occurring amino acid
  Transcript Sequence Number=SeqID_38946
KKEVVSPPVFSAFTTESSTAAFTPPESVHHLTTPSSPEVPYAKLLTSVDNSQNGETVDLQSYPNWPDSPIVHLISPCSGYSGTSSPFPDPETPKIFDGEGTGTQKLIPRNMRNGYFLLDGHITAAVPVADFSARLHHNDHDMDHLVSFDLTVADVARRLEKKTAILGDSATTSFXFAPSSGDHKRDLYHDLPEKVRQSLSLRLPREFNINVIDAPNVEPTLGNDKVAAGITVELEKARSYPVVQQGAS

SEQ ID NO: 104921 - protein, 333 aa, Setaria italica
  Transcript Sequence Number=SeqID_38947
  Gene Ontology: Mol. function=metal ion binding; Cellular component =cell wall; Biological process=cell redox homeostasis
  Homolog annotation: Hit_ID=B6T5J0; Match level="QueryCoverage=100%, HitCoverage=100%, E-value=1e-132, Identity=71%"; Hit description =RHC1A
  Pfam annotation: Domain name=zf-C3HC4; Domain location=209-249; Score= 35.8; E_value=1.7e-07; Accession=PF00097.17; Description=Zinc finger, C3HC4 type (RING finger)
MTEAAITRYWCHECEHAVDIEEAMAEEIKCPFCDGGFIEEMIGAEFEGLASQRSERDSSQWGTSDNPFEQPGGTADSEDDEEEDDDDMGREFEGFIRRHRRASALRRVLDSIQDDLRADRERDNSILINAFNQALALQGSVLDPDEVRDDQGTSSNDDGLLEEYVLGAGLSLLLQHLAESDPNRYGTPPAKKEAVEALPTVKIEEVVSCSVCLDDLELGSQAKQMPCEHKFHSPCILPWLELHSSCPVCRFELPSEETKDLNEPSSVVRTESIHEEVRADGPGSVSESSNRAWALVPWFNGLFSAPEPQTARGAFTDQQPSSATGTNPNAGES

SEQ ID NO: 104922 - protein, 59 aa, Setaria italica
  Transcript Sequence Number=SeqID_38948
MAAPSAGAGGGGGAAGEGSSSSAAAAAAAATIGAHGVDQVAEAMWQMNLGEAVELGPYP

SEQ ID NO: 104923 - protein, 190 aa, Setaria italica
  misc_feature (57)..(57): Xaa can be any naturally occurring amino acid
  Transcript Sequence Number=SeqID_38949
  Gene Ontology: Mol. function=RNA polymerase II transcription factor activity; Cellular component=transcription factor TFIIE complex; Biological process=transcription initiation from RNA polymerase II promoter
  Homolog annotation: Hit_ID=B9T7B5; Match level="QueryCoverage=75%, HitCoverage=47%, E-value=9e-54, Identity=66%"; Hit description =Transcription initiation factor iie, alpha subunit, putative
KERQEKVKIHTHSYCCLDYAQLCDVVRYRIHRMKKKLKDELDSRNTIQHYICPSCNXRYSSFDALQLVSYIDEYFHCESCNGELVAESAKLASEEMGDGIDNVRKCRHEKLKGMLQRVDEQLKPLITQLDRVKNLPAPEFGSLKSLERAILGAFTNCDIGASDSSRNSQGPYGMLIRKTEVEFEIIDGVK

SEQ ID NO: 104924 - protein, 218 aa, Setaria italica
  misc_feature (97)..(97): Xaa can be any naturally occurring amino acid
  Transcript Sequence Number=SeqID_38950
  Gene Ontology: Mol. function=RNA polymerase II transcription factor activity; Cellular component=transcription factor TFIIE complex; Biological process=transcription initiation from RNA polymerase II promoter
  Homolog annotation: Hit_ID=Q2RAU3; Match level="QueryCoverage=94%, HitCoverage=67%, E-value=7e-23, Identity=38%"; Hit description =Transcription initiation factor IIE, putative
EQLKPLITQLDRVKNLPAPEFGSLKSLERAILGAFTNCDIGASDSSRNSQGPYGMLIRKTEVEFEIIDGVKEGAESGKNGTELKVLPPWLNLEKKQXGETCILELVETTEDKNDQNQDPKDKSIQEEYVKAYYEALMKKQEVEDAKGIMQEEDEKVVSDSQSERQLGKKYKWQDAEEGTEWEEEQPAGNAAETYKSADFSVDVQESGDGEDGIVWEEG

SEQ ID NO: 104925 - protein, 150 aa, Setaria italica
  Transcript Sequence Number=SeqID_38951
MATILENIQKTRFLPTRPLKDELPTFQGRLGGGGGGGKESHLMGLRKRLSSFSGKIQPISSASAEWAFRRSKSAPSLGAAFAAGGGSLRQWWQWGVGWLLTKKPGFAGDLEMNEEEVAALGRQSRGSWGHILYRVRAGVRRLVMSTHSLP

SEQ ID NO: 104926 - protein, 105 aa, Setaria italica
  Transcript Sequence Number=SeqID_38952
  Gene Ontology: Mol. function=DNA binding
  Homolog annotation: Hit_ID=Q7XLG9; Match level="QueryCoverage=87%, HitCoverage=27%, E-value=3e-31, Identity=80%"; Hit description =OSJNBa0039C07.7 protein
MFPNAPSKAHRKERQLEQITEDSPAQCGQKRQRSDDNASGRATTTDLQGRLVEILDRSSQMVAAQLEAQNINSRLDREQRKDQVSSLLGVLGKVADALFRIADKL

SEQ ID NO: 104927 - protein, 143 aa, Setaria italica
  Transcript Sequence Number=SeqID_38953
  Gene Ontology: Mol. function=DNA binding
  Homolog annotation: Hit_ID=Q7XLG9; Match level="QueryCoverage=46%, HitCoverage=19%, E-value=1e-11, Identity=65%"; Hit description =OSJNBa0039C07.7 protein
VSKEDVAAALDGGARGAEGAGLFSSSEDEDDQEDDAATPSPTPMATPALAPAPVALPISEKTTDASRQESSEQGTSKRKQLEQITEDSPAQCGQKRQRSDDNASGRATTTDLQGRLVEILDPSTPSRLLTWSFLCSLSSRLLM

SEQ ID NO: 104928 - protein, 88 aa, Setaria italica
  Transcript Sequence Number=SeqID_38954
  Subcellular localization annotation: CTP_CleavageSite=22; ConfidenceScore=5.50e-01
SFLHVFNCISNSFFYISKLFFSYSNKRSFSQLTFASQTLSFVFYTQYGLISHIYISFELIYLFIFVRFSTKSYSKIISEPFSIVQEAQ

SEQ ID NO: 104929 - protein, 133 aa, Setaria italica
  Transcript Sequence Number=SeqID_38955
LHIYIYIYYIYIYKLAYVIHLCQTRTWIHGCVGVYVGTVCEGGPYDGGKGGVTPYDGGNGAYSSSAATNSRFIFLPVSWARDVVSANDETRRRETKHRTTKPLLLALGAIVVYSVCSYVVAYSISSFVYVRID

SEQ ID NO: 104930 - protein, 73 aa, Setaria italica
  Transcript Sequence Number=SeqID_38956
DGAKIVEDKEYFSGSIIETAKRSSGDDDRVIKLELAKEAGDLHDRCIPRKPKAKRDGGYLVISCTAQGNNNKG

SEQ ID NO: 104931 - protein, 92 aa, Setaria italica
  Transcript Sequence Number=SeqID_38957
PTYRAVVVEDKEYFSGSIIETAKRSSGDDDTSQDLAVLRRSSSYNADRVIKLELAKEAGDLHDRCIPRKPKAKRDGGYLVISCTAQGNNNKG

SEQ ID NO: 104932 - protein, 120 aa, Setaria italica
  Transcript Sequence Number=SeqID_38958
  Homolog annotation: Hit_ID=B6SGC8; Match level="QueryCoverage=90%, HitCoverage=90%, E-value=2e-13, Identity=35%"; Hit description=5a2 protein
MTTKSIIQLLVFALVFTLSIMPRGWGEQDCYREKAKFIEICDLSIRRGSAYMEPHYACCLIVRTYDMVCVCRTMTDEDEKTVDVQHAYFVSRDCHKPVPAGNKCGSWTIPEPPSPPPSMH

SEQ ID NO: 104933 - protein, 487 aa, Setaria italica
  misc_feature (49)..(49): Xaa can be any naturally occurring amino acid
  misc_feature (162)..(162): Xaa can be any naturally occurring amino acid
  misc_feature (376)..(376): Xaa can be any naturally occurring amino acid
  Transcript Sequence Number=SeqID_38959
  Gene Ontology: Mol. function=substrate-specific transmembrane transporter activity; Cellular component=integral to membrane; Biological process=transmembrane transport
  Homolog annotation: Hit_ID=B6TI70; Match level="QueryCoverage=99%, HitCoverage=99%, E-value=0.0, Identity=71%"; Hit description=Major myo-inositol transporter iolT
  Pfam annotation: Domain name=MFS_1; Domain location=39-435; Score =79.9; E_value=9e-21; Accession=PF07690.8; Description=Major Facilitator Superfamily
  Pfam annotation: Domain name=Sugar_tr; Domain location=35-484; Score =320.0; E_value=4.8e-93; Accession=PF00083.16; Description=Sugar (and other) transporter
  Pfam module annotation: Pfam domain module=MFS_1::Sugar_tr; Domain location=39-435::35-484
  Subcellular localization annotation: CTP_CleavageSite=38; ConfidenceScore=5.31e-01
MAQRPDAEAPLLGKLGAASPPSPPAKRTNKYPFFCAVLASMTSVLAGYXVAVMSGAQIFMAEDLGISDAQIEVLSGIINLYSLAGALLAGWTSDRLGRRLTIVLANVLFLLGPLCMTLAEGYNALMAGRFIAGIAVGYDFVIAPIYAAEIVAPASSRGLLHXHVPEIFNNTGVMLSYVSNLAFSGLPAHLSWRVMFAAGVVPPVFLAVGTLTMPESPRWLVMKGRVAEAKVVLDRTSDTAAEAEQRLLEIVEVVSGDSGGGKGRSSGAWKEAAAKPGVRRVLAMVLTLQFFQQASGIDSVVLYGPRILATAGVTSTSVLSLNVLFGVAKAGSILIAMALVDRAGRRPLLLVSTGGMTASLLLVGSLFAASAGARQXDAVASTASVLAVVSYVVFFSMGLGPMAWVYSSEILPLRLRAQGAGLGTAMNRVMCAVVIMTFITLYKAITMAGAFYLYAAIAAAAFVFVYTCLPETKGRSLEDMEELFHTK

SEQ ID NO: 104934 - protein, 46 aa, Setaria italica
  Transcript Sequence Number=SeqID_38960
  Pfam annotation: Domain name=Ribosomal_L24e; Domain location=1-45; Score=-19.3; E_value=0.05; Accession=PF01246.12; Description =Ribosomal protein L24e
GQKIYPGKGIRFIRADFKKPSQTPWERSCRRRRRGGSEQWGSLLRE

SEQ ID NO: 104935 - protein, 166 aa, Setaria italica
  misc_feature (122)..(122): Xaa can be any naturally occurring amino acid
  misc_feature (130)..(130): Xaa can be any naturally occurring amino acid
  Transcript Sequence Number=SeqID_38961
  Gene Ontology: Mol. function=nucleoside-triphosphatase activity; Cellular component=mitochondrion
  Homolog annotation: Hit_ID=B6SXQ2; Match level="QueryCoverage=81%, HitCoverage=25%, E-value=2e-51, Identity=71%"; Hit description =Mitochondrial protein
TRSPSSHCYFCRGKKKARRDEPGTGGDRDFVLELSFAAEHTDVAVDQYVPFVMEAAEEVEQRDRALKICMNEGRTWYRVSHHHPATFDTLAMDRDLKRSIVADLDLFASRRDHYRRIGKAWXKRGYLLYXPPGTGKSSLVAAMANHLRYDLYDLDLSHVHLNTSLQ

SEQ ID NO: 104936 - protein, 70 aa, Setaria italica
  Transcript Sequence Number=SeqID_38962
TQVYLNMERYEEAKKEAEEGLKLLLEWGISWDKRMTWEVWVSWGRVMLDKAKENEWPHSAAGITDLGLVK

SEQ ID NO: 104937 - protein, 182 aa, Setaria italica
  Transcript Sequence Number=SeqID_38963
  Gene Ontology: Mol. function=protein binding; Biological process =ubiquitin-dependent protein catabolic process
  Homolog annotation: Hit_ID=Q8H0X8; Match level="QueryCoverage=91%, HitCoverage=95%, E-value=3e-80, Identity=80%"; Hit description =Similar to CGI-126 protein
  Pfam annotation: Domain name=UFC1; Domain location=6-167; Score =418.9; E_value=8.2e-123; Accession=PF08694.3; Description=Ubiquitin -fold modifier-conjugating enzyme 1
MEGWDKGTKSTVGEIPLLTTRAGPRDGEAWRQRLKEEYRALIAYTSVNKAKDNDWFRIAAANPEGTRWEGTCWYVHNLRRYEFPLQFDIPVAYPQVAPEIELPTLDGKTHKMYRGGKICLTVHFKPLWAKNCPRFGIAHALCLGLAPWLAAEVPILVDSGMVKHKDDEAAPAEASGSAAPSS

SEQ ID NO: 104938 - protein, 269 aa, Setaria italica
  Transcript Sequence Number=SeqID_38964
  Gene Ontology: Mol. function=metal ion binding
  Homolog annotation: Hit_ID=B9SU90; Match level="QueryCoverage=58%, HitCoverage=21%, E-value=2e-35, Identity=49%"; Hit description=Zinc finger protein, putative
  Pfam annotation: Domain name=zf-C3HC4; Domain location=27-83; Score =39.6; E_value=1.3e-08; Accession=PF00097.17; Description=Zinc finger, C3HC4 type (RING finger)
KTDKQIRRRTRCAQMSVAERLLKEFACSICQEVIKEPLTTPCAHNFCKTCLLGAYDTQSSVRERSRGGRTLRAQKIVKKCPSCPTDICDFLVNPQINREMMDLIESLQKAVEEGGDDTNECGDDSDDLEETDGGLAKGEDDISLNEDEQGSDEDKKMDCEIEDSDVNADGSVKTVAEIKEGDEQPNKKDKGDAEEGKDAMKNKTNATEVVEVVDALVEEDAVEEIKGSKEVDNNESQQPQKRKGDDTDIGIDGSKRMKTSASLDETAGV

SEQ ID NO: 104939 - protein, 102 aa, Setaria italica
  Transcript Sequence Number=SeqID_38965
  Gene Ontology: Mol. function=signal transducer activity
  Homolog annotation: Hit_ID=Q6A689; Match level="QueryCoverage=100%, HitCoverage=22%, E-value=6e-48, Identity=97%"; Hit description =Putative aerotaxis sensor receptor
LVNGVVADLDAMATSADLTSFRLAVAHVQVESTRSFVSELWAEVDGWQRALPAIDDLSRAVEEAMSEANRRLDEVRGLADRAASRTQELADLMAMPTALLTS

SEQ ID NO: 104940 - protein, 133 aa, Setaria italica
  misc_feature (99)..(99): Xaa can be any naturally occurring amino acid
  Transcript Sequence Number=SeqID_38966
  Subcellular localization annotation: CTP_CleavageSite=56; ConfidenceScore=5.69e-01
MIPALPVLCSGITVGTLQSQSVHQIKSSKSPTSNSFKLSRDPSSLMICSPQRPAIRIQSLSGHQNLKALEMRKGKRPALGMQLDRMGMNIGCFLLFPLXQNILVPLLSKVLGYSIIAASTIAKLPQILKILKH

SEQ ID NO: 104941 - protein, 53 aa, Setaria italica
  Transcript Sequence Number=SeqID_38967
AGSGRSTMLKILAGRANPSQDSGLSGIVIYNEKTVSEVQKSRLIAYVCGQLNK

SEQ ID NO: 104942 - protein, 31 aa, Setaria italica
  Transcript Sequence Number=SeqID_38968
EDSRTHETGVVEWLVSHPHCTAFEQEYRTTI

SEQ ID NO: 104943 - protein, 64 aa, Setaria italica
  Transcript Sequence Number=SeqID_38969
  Gene Ontology: Mol. function=hydrolase activity, acting on ester bonds; Biological process=lipid metabolic process
  Homolog annotation: Hit_ID=B9S951; Match level="QueryCoverage=89%, HitCoverage=17%, E-value=4e-13, Identity=50%"; Hit description=Zinc finger protein, putative
MVGLTEVSRGCCGSGVIEVGQTCRGRRTCGDPSRYLYWDAVHPTETTNQLIANVMMDSIRELYS

SEQ ID NO: 104944 - protein, 266 aa, Setaria italica
  Transcript Sequence Number=SeqID_38970
  Gene Ontology: Mol. function=hydrolase activity, acting on ester bonds; Biological process=lipid metabolic process
  Homolog annotation: Hit_ID=B9S951; Match level="QueryCoverage=96%, HitCoverage=76%, E-value=3e-60, Identity=43%"; Hit description=Zinc finger protein, putative
  Pfam annotation: Domain name=Lipase_GDSL; Domain location=2-257; Score=64.9; E_value=3e-16; Accession=PF00657.14; Description=GDSL -like LipaseAcylhydrolase
GETGYRRTIPGFFDTNLRLAQLRRGVSFASGGSGYDDSTANRINVVSFSAQLHNLFRYKLLIRTLLGPRRAERLVNRATFVISAGTNDILSVYLASNRSNAISMDMYENHLIARVANHTQAMIMLGGRRFVFVGLPPMGCMPIARTLVGTGSDRCDETLNQLATSFNSKLVQLLNFINYQRQIRTSYIDTYTTIHDATVDPKTFGLTEVSRGCCGSGVIEVGQTCRGRRTCGDPSRYLYWDAVHPTETTNQLIANVMMDSIRELYS

SEQ ID NO: 104945 - protein, 320 aa, Setaria italica
  misc_feature (108)..(108): Xaa can be any naturally occurring amino acid
  misc_feature (308)..(308): Xaa can be any naturally occurring amino acid
  Transcript Sequence Number=SeqID_38971
  Gene Ontology: Mol. function=electron carrier activity; Biological process=oxidation reduction
  Homolog annotation: Hit_ID=C0KHL8; Match level="QueryCoverage=87%, HitCoverage=55%, E-value=1e-136, Identity=87%"; Hit description =Putative ferulate 5-hydroxylase
  Pfam annotation: Domain name=p450; Domain location=33-320; Score= -146.3; E_value=0.00014; Accession=PF00067.14; Description=Cytochrome P450
MDAYIYQSLLLSVAAAALLQLVKLALRPRPRLPPGPWKLPVIASMHHLVNVLPHRALRELAAAHGPLMMLRLGETPLVVASSKEAARAVLKTHDTNFATRPKLLAGEXIVGYNWADILFSPSGDYWRKLRQLCAAEILSPKRVLSFRHIREDEVALKLEEIRAAGPSTPVNLSVMFHSLTNSIVSRAAFGKKRKNAPEFMAAIKAGVGLSSGFNIPDLFPTWTTVLAKVTGMKRSLQDIHRTVDSILQEIIDERKAILDEKVRSGAENAEENLVDVLIGLQEKGGFGFHLNNSRIKAIILDMFAGGTXTSASAMEWGMSE

SEQ ID NO: 104946 - protein, 89 aa, Setaria italica
  misc_feature (79)..(79): Xaa can be any naturally occurring amino acid
  Transcript Sequence Number=SeqID_38972
  Gene Ontology: Mol. function=drug transporter activity; Cellular component=membrane; Biological process=multidrug transport
  Homolog annotation: Hit_ID=Q10A00; Match level="QueryCoverage=96%, HitCoverage=17%, E-value=4e-26, Identity=75%"; Hit description=MATE efflux family protein, expressed
MFLGVVRGCGWQKIGACVNLGAYYLIGIPAAFCFAFIYHLGGKGLWFGIICALIVQMLLLLSITLCSNWEKEALKAKDXIFSSSLPVDM

SEQ ID NO: 104947 - protein, 93 aa, Setaria italica
  Transcript Sequence Number=SeqID_38973
LPSKASLSACVYNFISIRMLLISQSYMSCQCIISLSLSLLQINAITVFSRILEILISAETNFIYFESGCRSRCSTMEMRMRNSGCSQGTYADE

SEQ ID NO: 104948 - protein, 83 aa, Setaria italica
  Transcript Sequence Number=SeqID_38974
PETYINIKSRSSYDHEQKIGGKPHAHSIYHDQLKMHKEITHAQKGYDLAFANTQVCQDNQHFLTCTFTHFKNIGHCSMQDTET

SEQ ID NO: 104949 - protein, 143 aa, Setaria italica
  Transcript Sequence Number=SeqID_38975
  Gene Ontology: Mol. function=oxidoreductase activity, acting on single donors with incorporation of molecular oxygen, incorporation of two atoms of oxygen; Cellular component=chloroplast; Biological process=fatty acid biosynthetic process
  Homolog annotation: Hit_ID=Q8H016; Match level="QueryCoverage=93%, HitCoverage=14%, E-value=5e-65, Identity=89%"; Hit description =Probable lipoxygenase 6
HREASRFSLPVSKLDPAIYGSPESSITEADIACQLNGLTVQQAMDEAKLFILDYHDAYLPFLDRINAIEGRKAYATRTILFLTQAGTLKPIAIELSLPPSQPGEPRLSKVLTPPSDATTNWLWMLAKAHVSSNDAGVHQLVNH

SEQ ID NO: 104950 - protein, 264 aa, Setaria italica
  Transcript Sequence Number=SeqID_38976
  Gene Ontology: Mol. function=oxidoreductase activity, acting on single donors with incorporation of molecular oxygen, incorporation of two atoms of oxygen; Cellular component=chloroplast; Biological process=fatty acid biosynthetic process
  Homolog annotation: Hit_ID=A1XCI4; Match level="QueryCoverage=99%, HitCoverage=28%, E-value=1e-145, Identity=94%"; Hit description =Lipoxygenase
  Pfam annotation: Domain name=Lipoxygenase; Domain location=29-264; Score=-293.8; E_value=1.6e-05; Accession=PF00305.11; Description =Lipoxygenase
CNSWVQTTRELPTKRVFFSNKPYLPSETPPGLRELRDKELKDLRGDGTGVRKLSDRIYDYATYNDLGNPDRGKEFIRPILGGEKIPYPRRCRTGRPPTDTNMTAESRVEKPHRIYVPRDEAFEELKQGAFSAGRLRAVLHTLIPSMIATISADTHNFQGFHHVDNLYKEGLRLKLGLQEHLFQKIPLVQKIQESSEGMLRYDTPSILSKDKFAWLRDDEFARQTVAGINPVNIARLTVFPPVSKLDPAIYGSPESSITEADIAI

SEQ ID NO: 104951 - protein, 92 aa, Setaria italica
  Transcript Sequence Number=SeqID_38977
  Gene Ontology: Mol. function=RNA-directed DNA polymerase activity; Biological process=RNA-dependent DNA replication
  Homolog annotation: Hit_ID=Q8S461; Match level="QueryCoverage=76%, HitCoverage=3%, E-value=5e-17, Identity=62%"; Hit description =Putative prpol
RVSPVSRARDTLDARRRTRADREDGVDRGYQIHRGGCYDSKEDRSPSPDPAGPRAFSARILNAPFPPRFRQPTNVAKYSGEMNPGVWLSDYR

SEQ ID NO: 104952 - protein, 102 aa, Setaria italica
  misc_feature (12)..(12): Xaa can be any naturally occurring amino acid
  Transcript Sequence Number=SeqID_38978
GVDCWSCQFTIXYHKHSVCWVLGRRPRWDPVGTLLCEHESTHSSSSSSLERACGMPELVVHILLHWHPRNEVRELFRSNNTFAVCSLLEMFLFCICCTAHLG

SEQ ID NO: 104953 - protein, 499 aa, Setaria italica
  Transcript Sequence Number=SeqID_38979
  Gene Ontology: Mol. function=protein disulfide oxidoreductase activity; Cellular component=cytoplasm; Biological process=electron transport chain
  Homolog annotation: Hit_ID=B4FSW8; Match level="QueryCoverage=100%, HitCoverage=99%, E-value=0.0, Identity=73%"; Hit description=Grx_S17- glutaredoxin subgroup II
  Pfam annotation: Domain name=Glutaredoxin; Domain location=171-235; Score=99.8; E_value=9.4e-27; Accession=PF00462.16; Description =Glutaredoxin
  Pfam annotation: Domain name=Glutaredoxin; Domain location=307-371; Score=86.6; E_value=8.9e-23; Accession=PF00462.16; Description =Glutaredoxin
  Pfam annotation: Domain name=Glutaredoxin; Domain location=414-478; Score=100.0; E_value=8.4e-27; Accession=PF00462.16; Description =Glutaredoxin
  Pfam annotation: Domain name=Thioredoxin; Domain location=7-107; Score=43.3; E_value=9.5e-10; Accession=PF00085.12; Description =Thioredoxin
  Pfam module annotation: Pfam domain module=Glutaredoxin::Glutaredoxin: :Glutaredoxin::Thioredoxin; Domain location=171-235::307-371::414 -478::7-107
MASGGAVREVGSKAELDAAVAGARAAAVHFWAGWCEASKQMDEVFAHLAVDFPHAVFLRVEAEEQPEISEAYGVSAVPYFVFCKEGKTVDTLEGANPASLANKVAKIAGPASVAESAVPASLGVAAGPAVLEKVQELAQRNGSSADEGTNSVGLPDSLNKRLEQLVNSHPVFLFMKGTPEQPRCGFSRKVVDILKQEGVDFGSFDILTDNDVREGMKKFSNWPTFPQLYCKGELLGGCDIVIAMHDSGELKDVFEEHNIPLKPQGSKNVETVEPEAPTGKGGAVSEPVGLTDALKARLESLVNSSPVMVFIKGSPEELKCGFSGKLVHILKQENIPFSSFDILADDDVRQGLKVFSNWPSYPQLYIKGELVGGSDIVMEMHKSGELKKVLSEKGVIPKETLEDRLKALISSAPVMLFMKGTPDAPRCGFSSKVVNALKNEGISFGSFDILSDEEVRQGLKAYSNWPTFPQLYYKSELIGGCDIILEMEKSGELKSTLSE

SEQ ID NO: 104954 - protein, 228 aa, Setaria italica
  misc_feature (18)..(18): Xaa can be any naturally occurring amino acid
  Transcript Sequence Number=SeqID_38980
  Gene Ontology: Mol. function=DNA binding; Biological process =regulation of transcription, DNA-dependent
  Pfam annotation: Domain name=B3; Domain location=1-78; Score=27.3; E _value=6.4e-05; Accession=PF02362.13; Description=B3 DNA binding domain
  Pfam annotation: Domain name=B3; Domain location=105-225; Score=26.4; E_value=8.2e-05; Accession=PF02362.13; Description=B3 DNA binding domain
  Pfam module annotation: Pfam domain module=B3::B3; Domain location=1 -78::105-225
VVQELGARRDLKLRLAGXGMPLWDVEVFADEKRGDVYLAQGWKKFARAHDLRDGYVLVFRYDGGAATLAITVFDRSTCRKQYVHAGAAGGGKAGRRSLAIAEPSQFTVSLRQCNLGTKQNQYLNVPVEFQDAHGYARRRRVELRMGGRSWSVNLKRGRRALGDRTALKYGWHQFCVDNGLEVGDTCFFKVIREGPCVDDDDDEWEDEWEDDEHVLQVEVRKKDGTMLT

SEQ ID NO: 104955 - protein, 246 aa, Setaria italica
  misc_feature (91)..(91): Xaa can be any naturally occurring amino acid
  Transcript Sequence Number=SeqID_38981
  Gene Ontology: Mol. function=hydrolase activity, acting on ester bonds; Biological process=lipid metabolic process
  Homolog annotation: Hit_ID=B6STS8; Match level="QueryCoverage=97%, HitCoverage=62%, E-value=3e-94, Identity=69%"; Hit description=Alpha- L-fucosidase 2
SWVLVRLLPVRPSSGARTFRRGANMAIVGGTALDFAFLESIGLGYPVWNNGAMNVQIQWLRDILPSVCGGGAPPGGPRCRAHLAKSLFVFXPFGGNDYNAMLFFGFTTEHARNYTPKIVDTVASGVEQLIQLGAVDIIVPGALPVGCFAVYLTFLPSSNPADYDEYGCLKPLNELSVYQNALLQRRLAGIRERHPAARIIYADYYGHVERMIRSPARFGFRDGAVPACCGAGGGRFNFELDARCGM

SEQ ID NO: 104956 - protein, 60 aa, Setaria italica
  misc_feature (9)..(9): Xaa can be any naturally occurring amino acid
  Transcript Sequence Number=SeqID_38982
MAGGGKKEXGEGLGRALIRQRNKAAAAAKERGEALAFGRRRAMPLESVIDVSDIDAVLQP

SEQ ID NO: 104957 - protein, 153 aa, Setaria italica
  Transcript Sequence Number=SeqID_38983
  Gene Ontology: Mol. function=transferase activity
  Homolog annotation: Hit_ID=B9S789; Match level="QueryCoverage=100%, HitCoverage=84%, E-value=1e-48, Identity=38%"; Hit description =Pentatricopeptide repeat-containing protein, putative
  Pfam annotation: Domain name=PPR; Domain location=16-50; Score=41.9; E_value=2.6e-09; Accession=PF01535.12; Description=PPR repeat
  Pfam annotation: Domain name=PPR; Domain location=51-85; Score=36.6; E_value=9.8e-08; Accession=PF01535.12; Description=PPR repeat
  Pfam annotation: Domain name=PPR; Domain location=86-120; Score=56.4; E_value=1.1e-13; Accession=PF01535.12; Description=PPR repeat
  Pfam module annotation: Pfam domain module=PPR::PPR::PPR; Domain location=16-50::51-85::86-120
ELVSEMEAKGVKPDVVTYSTILSAYCKSGDTDSAFQVNQKMLEKGVLPDTITYSSLIRGLCEEKRLNDAHVLFENMIKLSLIPDEFTYTSLIDGHCKEGNVEKALSLHDEMIKIGVLPDVVTYSVLINGLSKSARTKEAQRLLFKLYHEDPVP

SEQ ID NO: 104958 - protein, 92 aa, Setaria italica
  misc_feature (17)..(17): Xaa can be any naturally occurring amino acid
  Transcript Sequence Number=SeqID_38984
  Gene Ontology: Mol. function=oxidoreductase activity; Cellular component=integral to membrane; Biological process=oxidation reduction
  Homolog annotation: Hit_ID=Q7XMT4; Match level="QueryCoverage=89%, HitCoverage=31%, E-value=2e-24, Identity=69%"; Hit description =OSJNBa0029L02.3 protein
MIQFLSVSSNNAGIAFXPFKLSEDGIELHFATNHLGHFLLTDLLLGKINVTAKESGIEGRVVIVASDSYKHPYREGIRFDKINDCSISENSL

SEQ ID NO: 104959 - protein, 76 aa, Setaria italica
  Transcript Sequence Number=SeqID_38985
  Gene Ontology: Mol. function=nucleic acid binding
  Homolog annotation: Hit_ID=Q6H3Y8; Match level="QueryCoverage=71%, HitCoverage=9%, E-value=2e-09, Identity=60%"; Hit description=SNF2 domain-containing protein-like
KSKYDRQAKKEHMSKLLFSKEVEHGDLPPELTLNDRILEEMTAREDLKKLFVKIYIDNQTDGSPGETEKNTTCAHA

SEQ ID NO: 104960 - protein, 188 aa, Setaria italica
  Transcript Sequence Number=SeqID_38986
  Gene Ontology: Mol. function=methyltransferase activity
  Homolog annotation: Hit_ID=B9S456; Match level="QueryCoverage=93%, HitCoverage=28%, E-value=9e-57, Identity=59%"; Hit description=ATP binding protein, putative
  Pfam annotation: Domain name=DUF248; Domain location=1-188; Score= -149.5; E_value=1.1e-16; Accession=PF03141.8; Description=Putative methyltransferase
MKHSTTSNNSCRPISWPERLTMKHSTTSNNSSIQFSQERVDSDTDHWKDLVSEVYLNEFAVNWSSVRNVMDMNAGFGGFAASLIHQPLWVMNVVPVDQPDTLPIIFNRGLIGVYHDWCESFNTYPRTYDLLHMSYLLGPLTRRCHIIEVAAEIDRILRPGRWFVLQDTIEVIRKMEPLLRSLHYRTTI

SEQ ID NO: 104961 - protein, 88 aa, Setaria italica
  misc_feature (10)..(10): Xaa can be any naturally occurring amino acid
  Transcript Sequence Number=SeqID_38987
  Gene Ontology: Mol. function=hydrolase activity; Cellular component =extracellular region
  Homolog annotation: Hit_ID=Q9ZT66; Match level="QueryCoverage=98%, HitCoverage=28%, E-value=9e-32, Identity=67%"; Hit description=Endo -1,3;1,4-beta-D-glucanase
YLSEWIKSHXPVTAAQDAKPLLASLRNEGKSIGVGGYCWGGKFAAEIAKTDDTEVVVLSHPAYVTVDDMKEVKWPIEILGAQNDTITP

SEQ ID NO: 104962 - protein, 268 aa, Setaria italica
  Transcript Sequence Number=SeqID_38988
NGLLCIRYTSYHIGPLTPPPITFIANPATQQAKPIPGAPQHLVNNRAVGLVFDPSDDPLAKQKFMIVKALPFATTNDALTKFRFVTFSSDTGRWVMSDTFIIANIEQVRCNKVVCASGVLYWDYQEDLIWFDVTRSVTGSIKMPWKLQESNFEGWERHSIDVSNNGMLMCTIIDKDGLALYQLVTIGDHYWELKHKKGWKDIMETSGDAFQFCHSMKLRNGWQKKFCERWFVRPLGLENGRLVYIGVRLKWKTSDRVLRYDMDSGKVD

SEQ ID NO: 104963 - protein, 129 aa, Setaria italica
  misc_feature (24)..(24): Xaa can be any naturally occurring amino acid
  Transcript Sequence Number=SeqID_38989
  Pfam annotation: Domain name=XYPPX; Domain location=45-49; Score=4.0; E_value=25; Accession=PF02162.9; Description=XYPPX repeat
  Pfam annotation: Domain name=XYPPX; Domain location=50-54; Score=1.6; E_value=1.2e+02; Accession=PF02162.9; Description=XYPPX repeat
  Pfam annotation: Domain name=XYPPX; Domain location=57-61; Score=1.2; E_value=1.7e+02; Accession=PF02162.9; Description=XYPPX repeat
  Pfam annotation: Domain name=XYPPX; Domain location=64-68; Score=1.2; E_value=1.7e+02; Accession=PF02162.9; Description=XYPPX repeat
  Pfam annotation: Domain name=XYPPX; Domain location=71-75; Score=1.2; E_value=1.7e+02; Accession=PF02162.9; Description=XYPPX repeat
  Pfam annotation: Domain name=XYPPX; Domain location=78-82; Score=3.7; E_value=31; Accession=PF02162.9; Description=XYPPX repeat
  Pfam module annotation: Pfam domain module=XYPPX::XYPPX::XYPPX::XYPPX: :XYPPX::XYPPX; Domain location=45-49::50-54::57-61::64-68::71-75::78 -82
MGGGKDKHGESDKGLFSNTMHYVXKSPLSNIMHGVGGGHGYPHQGYPPQGYPPPPGAYPPPPGAYPPPPGAYPPPPGAYPPQHGYPQPGHGGSHGGSHGGLGMGTVLAGGAAAAAAAYGAHKLSHGHSG

SEQ ID NO: 104964 - protein, 48 aa, Setaria italica
  Transcript Sequence Number=SeqID_38990
HTKLLCRTYQNFCCPECLCDVFSRVIVHPSSICLVGYYSLCASDKMVC

SEQ ID NO: 104965 - protein, 146 aa, Setaria italica
  Transcript Sequence Number=SeqID_38991
RTNPPTNQGAYPPPPGAYPPPPGAYPPPPGAYPPQHGYPQPGGYPPHGGYPPAGYPGSSHQGHGGSHGGSHGGLGMGTVLAGGAAAAAAAYGAHKLSHGHSGHGGHGVFGGYGHGGHGFGGHGKFKHGHGHHGKFKHGHGKFKHGK

SEQ ID NO: 104966 - protein, 154 aa, Setaria italica
  Transcript Sequence Number=SeqID_38992
  Pfam annotation: Domain name=XYPPX; Domain location=43-47; Score=4.0; E_value=25; Accession=PF02162.9; Description=XYPPX repeat
  Pfam annotation: Domain name=XYPPX; Domain location=48-52; Score=1.6; E_value=1.2e+02; Accession=PF02162.9; Description=XYPPX repeat
  Pfam annotation: Domain name=XYPPX; Domain location=55-59; Score=1.2; E_value=1.7e+02; Accession=PF02162.9; Description=XYPPX repeat
  Pfam annotation: Domain name=XYPPX; Domain location=62-66; Score=1.2; E_value=1.7e+02; Accession=PF02162.9; Description=XYPPX repeat
  Pfam annotation: Domain name=XYPPX; Domain location=69-73; Score=1.2; E_value=1.7e+02; Accession=PF02162.9; Description=XYPPX repeat
  Pfam annotation: Domain name=XYPPX; Domain location=76-80; Score=3.7; E_value=31; Accession=PF02162.9; Description=XYPPX repeat
  Pfam annotation: Domain name=XYPPX; Domain location=88-92; Score=2.1; E_value=90; Accession=PF02162.9; Description=XYPPX repeat
  Pfam annotation: Domain name=XYPPX; Domain location=94-98; Score=2.2; E_value=83; Accession=PF02162.9; Description=XYPPX repeat
  Pfam module annotation: Pfam domain module=XYPPX::XYPPX::XYPPX::XYPPX: :XYPPX::XYPPX::XYPPX::XYPPX; Domain location=43-47::48-52::55-59::62 -66::69-73::76-80::88-92::94-98
MFFLQVAWETMGGGKDKHGESDKGLFSNIMHGVGGGHGYPHQGYPPQGYPPPPGAYPPPPGAYPPPPGAYPPPPGAYPPQHGYPQPGGYPPHGGYPPAGYPGSSHQGMNCSSILCLAFKSTESSEWIAIAFLLNSIKYLCFFCFQIKNGIGSLH

SEQ ID NO: 104967 - protein, 153 aa, Setaria italica
  misc_feature (27)..(27): Xaa can be any naturally occurring amino acid
  misc_feature (48)..(48): Xaa can be any naturally occurring amino acid
  Transcript Sequence Number=SeqID_38993
  Pfam annotation: Domain name=XYPPX; Domain location=33-37; Score=4.0; E_value=25; Accession=PF02162.9; Description=XYPPX repeat
  Pfam annotation: Domain name=XYPPX; Domain location=38-42; Score=1.6; E_value=1.2e+02; Accession=PF02162.9; Description=XYPPX repeat
  Pfam annotation: Domain name=XYPPX; Domain location=53-57; Score=1.2; E_value=1.7e+02; Accession=PF02162.9; Description=XYPPX repeat
  Pfam annotation: Domain name=XYPPX; Domain location=60-64; Score=1.2; E_value=1.7e+02; Accession=PF02162.9; Description=XYPPX repeat
  Pfam annotation: Domain name=XYPPX; Domain location=67-71; Score=3.7; E_value=31; Accession=PF02162.9; Description=XYPPX repeat
  Pfam annotation: Domain name=XYPPX; Domain location=79-83; Score=2.1; E_value=90; Accession=PF02162.9; Description=XYPPX repeat
  Pfam annotation: Domain name=XYPPX; Domain location=85-89; Score=2.2; E_value=83; Accession=PF02162.9; Description=XYPPX repeat
  Pfam module annotation: Pfam domain module=XYPPX::XYPPX::XYPPX::XYPPX: :XYPPX::XYPPX::XYPPX; Domain location=33-37::38-42::53-57::60-64::67 -71::79-83::85-89
MGGGKDKHGESDKGLFSNIMHGVGGGXGYPHQGYPPQGYPPPPGGVPXPPPGAYPPPPGAYPPPPGAYPPQHGYPQPGGYPPHGGYPPAGYPGSSHQGHGGSHGGSHGGLGMGTVLAGGAAAAAAAYGAHKLSHGHSGHGGHGVFGGYGRDLH

SEQ ID NO: 104968 - protein, 564 aa, Setaria italica
  Transcript Sequence Number=SeqID_38994
  Homolog annotation: Hit_ID=Q9LYR7; Match level="QueryCoverage=100%, HitCoverage=50%, E-value=1e-155, Identity=48%"; Hit description=No exine formation-1
  Subcellular localization annotation: CTP_CleavageSite=32; ConfidenceScore=5.42e-01
LDALQLRQGAFFTVWASLIAADVAFFFSASLSSAAAASLPLTALALLLCAQTSFLIGVWASLQFRWIQLENPTIVAALERLLFACVPIAAPALFTWALVSAVGMANASYYFAAFCMVFYWLFSIPRPSSFNNRKQDAPMQDSDGILGPLESCVHSLYLLFVPVLFHAASHHATLFTSWGSVCELLLLFFIPFLFQLYASTRGALWWITRDAHTMDQIRIANGLVALVVVVLCLEVRVVFHSFGRYIHAPPPLNYLLVTVTMLGGALGLAAHAAGKVGDAASSAAFTVLAVLVSGAGAVVIGFPIMFLPLPMISGYYVARFFTKKSLSSYFTFVAIGSLMVLWFVVHNYWDLNIWIAGMPLKSFTKYVVAAVIMAMAVPGLAHLPTKLRFLLELGLIGHTLLLCNIENRLFNYASMYYFGLEEDIIYPSYMVLITTFLGLAIVRRLYVDQRVGPKAAWILTCLYSSKLSMLFMTSRSVIWVSAVLLLAVTPPLLLYRDKSKGAARMKVWQAYFHASVVAFSAWLCRETIFEALQWWNGRPPSDGLLLGSYILLTGVACIPIVVLH

SEQ ID NO: 104969 - protein, 533 aa, Setaria italica
  misc_feature (14)..(14): Xaa can be any naturally occurring amino acid
  Transcript Sequence Number=SeqID_38995
  Gene Ontology: Cellular component=mitochondrion
  Homolog annotation: Hit_ID=Q9LYR7; Match level="QueryCoverage=100%, HitCoverage=48%, E-value=1e-164, Identity=53%"; Hit description=No exine formation-1
SVIWVSAFCYLPLXPPLVLYRDKSKGAARMKVWQAYFHASVVAFSAWLCRETIFEALQWWNGRPPSDGLLLGSYILLTGVACIPIVVLHFPHVQSAKRFLVLVVATGLLFVIMQPPIKLSWVYRSELITAAHLSDDDTSIYGFVASKPTWPSWLLIATVVLTLAAVTSIIPVKYVVELRALYAVAVGVTLGIYISVQYFFQAVVLYPLLVATIVSAAVFVVFTHLPSESSTRVLPWVFSFLVALFPVTYLLEGQLRAKSFADEDEAEKFTNMLAIEGARMSLLGLYAAIFMIIALEIKFELALLLRDKAADRGVTHGPSSRSSAFPPKARLLQQRRAHAAPTFTIKRLAAEAAWMPAIGNVSTVLCFIICLVLNITLTGGSNRAIFFLAPILLLLNQDSDIFAGFGDRQRYFPVTISISGYLLLTALYRIWEETWPGNGGWALDIGGPGWLFAVKNVALLVLTLPNHILFNRFMWDYVRQTDAKLLLTLPLNLPSIIMTDILTIRVLGLLGAMYSLAQYLISRRIRIAGMKYI

SEQ ID NO: 104970 - protein, 46 aa, Setaria italica
  Transcript Sequence Number=SeqID_38996
VTLEEQFLQCYHGMCIAKTILSTDGDLFVPLTLCTCRGNIGVTVPP

SEQ ID NO: 104971 - protein, 50 aa, Setaria italica
  misc_feature (44)..(44): Xaa can be any naturally occurring amino acid
  Transcript Sequence Number=SeqID_38997
  Gene Ontology: Mol. function=solute:hydrogen antiporter activity; Cellular component=integral to membrane; Biological process =regulation of pH
  Homolog annotation: Hit_ID=B6SP24; Match level="QueryCoverage=98%, HitCoverage=8%, E-value=2e-19, Identity=91%"; Hit description=Inner membrane protein ybaL
QVTTPLIFKLIPVVMHLGILMRWFPTENSVQNELPLQEKAVMLXAHNRSL

SEQ ID NO: 104972 - protein, 200 aa, Setaria italica
  Transcript Sequence Number=SeqID_38998
  Gene Ontology: Mol. function=solute:hydrogen antiporter activity; Cellular component=integral to membrane; Biological process =regulation of pH
  Homolog annotation: Hit_ID=B6SP24; Match level="QueryCoverage=100%, HitCoverage=28%, E-value=4e-51, Identity=55%"; Hit description=Inner membrane protein ybaL
STTDFAHHTLEQVEAIRNLFAALFLASIGMLIHVKFLWNHVDILLAAVILVIIVKSIVVTVVVKAFGYSIRSLFKVGLSLAQIGEFAFVLLSRASHLHLVGVDYSPSISCVSNILSYLEQTPDCHTCMMKTYNLIIIILQGKMYLLLLGTTALSLVTTPLIFKLIPVVMHLGILMRWFPTENSVQNEEKAVMLEAHNRSL

SEQ ID NO: 104973 - protein, 494 aa, Setaria italica
  Transcript Sequence Number=SeqID_38999
  Gene Ontology: Mol. function=solute:hydrogen antiporter activity; Cellular component=integral to membrane; Biological process =regulation of pH
  Homolog annotation: Hit_ID=B6SP24; Match level="QueryCoverage=100%, HitCoverage=84%, E-value=0.0, Identity=82%"; Hit description=Inner membrane protein ybaL
  Pfam annotation: Domain name=Na_H_Exchanger; Domain location=87-457; Score=350.9; E_value=2.4e-102; Accession=PF00999.13; Description =Sodiumhydrogen exchanger family
SNFNNSVSDHQAVLETVAVITHDKKKNDSQNTNSPKPFQIGDMFGGQDETSDDLETVIDKEDNVFVMSNRKTKYPTLQLDLRLIKDLVVIIVSATGGGIIFSCMGQPVIVGYLLAGSLVGPGGLNFISEMVQVETFAQFGVVFLLFALGLEFSLTKLKVVGPVAVLGGLLQIALFMFLCGLTAALCGAKSSEGVFVGAFLSMSSTAVVSKFLVEKGSTNTLHGQVTIGTLILQDCAVGLLFALLPVLGGASGIFGGVMSMAKLLLVLSIFIAVTYMMTWSIVPRFLKLMIQLSSQTNELYQLASVAFCLLLAWCSDYFGLSLELGSFLAGVMISTTDFAHHTLEQVEAIRNLFAALFLASIGMLIHVKFLWNHVDILLAAVILVIIVKSIVVTVVVKAFGYSIRTAFVVGLSLAQIGEFAFVLLSRASHLHLVGGKMYLLLLGTTALSLVTTPLIFKLIPVVMHLGILMRWFPTENSVQNEEKAVMLEAHNRSL

SEQ ID NO: 104974 - protein, 125 aa, Setaria italica
  Transcript Sequence Number=SeqID_39000
IRHSRVHGTKKQKHDHEGGHCGSDLSKVVAVDANRMFPERIGGSAAEKNPIGMNAIQVERERLKIKGEMLKLEQSHLKWLKSSEEEDRELQKMKLENERMQLENEQLEQELKLKEIEMGIKPKRI

SEQ ID NO: 104975 - protein, 75 aa, Setaria italica
  Transcript Sequence Number=SeqID_39001
EGFKSRLVHGFKNLFGRRQEAAGAPSACGEDAGTRTSCFGDKGAAAAAPELEIDDDDVLCMEERWRPHRRNHSLV

SEQ ID NO: 104976 - protein, 68 aa, Setaria italica
  Transcript Sequence Number=SeqID_39002
AETRDIVKCPTKHMSASTMKNYLVLSISSTKIEKSQSGVKTCSGLVQRNITQAKAQEHVTAPVVFQSR

SEQ ID NO: 104977 - protein, 38 aa, Setaria italica
  Transcript Sequence Number=SeqID_39003
KLRLHFRIFLGLVHPNVGPKSVLINFRRAIFIRRVKGS

SEQ ID NO: 104978 - protein, 69 aa, Setaria italica
  Transcript Sequence Number=SeqID_39004
  Subcellular localization annotation: CTP_CleavageSite=36; ConfidenceScore=5.19e-01
TVQISISVNLSSFHLCVLFGQLQLNVAAKILTTMICTSERKQFLSQGSSTTSKQKTPPEHSSSPSEIIV

SEQ ID NO: 104979 - protein, 259 aa, Setaria italica
  misc_feature (241)..(241): Xaa can be any naturally occurring amino acid
  Transcript Sequence Number=SeqID_39005
  Gene Ontology: Mol. function=electron carrier activity; Biological process=oxidation reduction
  Homolog annotation: Hit_ID=Q6ATT7; Match level="QueryCoverage=100%, HitCoverage=49%, E-value=1e-84, Identity=57%"; Hit description =Cytochrome P450, putative
  Pfam annotation: Domain name=p450; Domain location=1-259; Score= -32.2; E_value=4.2e-10; Accession=PF00067.14; Description=Cytochrome P450
LTSGLNVSDLFPSSRLMQVLSTAPRKALACRNRIQHILEQVIQDTKESMDYGNEVATGSEGFVGVLLRLQKESSMAIPLDDNTIVAVMLDMFSAGSETSSTTLNWCMTELVRNPEAMAKAQAEVREAFKGNSTIGEGDLKELSYLNLVIKEALRLHIPAPLLIPRKCRETCQVMGYDVPKGMVVFVNMWAICRNPKYWDNPEEFKPERFENSNLDYKGTDYEFLPFGAGRRICPGINLGVXNIELALASFLYHFDWKLP

SEQ ID NO: 104980 - protein, 64 aa, Setaria italica
  Transcript Sequence Number=SeqID_39006
  Homolog annotation: Hit_ID=B6T786; Match level="QueryCoverage=76%, HitCoverage=17%, E-value=3e-11, Identity=72%"; Hit description =Protein binding protein
STVRHWNLISHFLLNPVYIILISITALLHRCNQRQVVHETPVSEPRGAGGLQPMPPQQHIINIR

SEQ ID NO: 104981 - protein, 182 aa, Setaria italica
  misc_feature (18)..(18): Xaa can be any naturally occurring amino acid
  misc_feature (35)..(35): Xaa can be any naturally occurring amino acid
  Transcript Sequence Number=SeqID_39007
  Gene Ontology: Mol. function=zinc ion binding
  Homolog annotation: Hit_ID=B6T786; Match level="QueryCoverage=80%, HitCoverage=53%, E-value=4e-45, Identity=63%"; Hit description =Protein binding protein
  Pfam annotation: Domain name=zf-C3HC4; Domain location=20-66; Score =56.7; E_value=8.6e-14; Accession=PF00097.17; Description=Zinc finger, C3HC4 type (RING finger)
AEDVQLCVGKAKSGVMVXKCRICQEEGDEAYMETXPCSCKGSLKYAHHRCVQRWCNEKGDTICEICLQQLTPNYTAPLKLFRHGRNLINFRRAVERRENHGASYGHTLDQSDGASSFDSQSSNPKNVIYCRVFAVALMALLVLRDAIFLILRSHKVCSIELITVRHWNLISHFLLNPNLYAN

SEQ ID NO: 104982 - protein, 100 aa, Setaria italica
  Transcript Sequence Number=SeqID_39008
MRGKNTIESTVLNDRTLQLADLLFLLLMPQQLTPNYTAPLKLFRHGRNLINFRCHSMLLLDQSDGASSFDSQSSNPKNVIYCRVFAVAVSVTKHRFSTLT

SEQ ID NO: 104983 - protein, 281 aa, Setaria italica
  misc_feature (78)..(78): Xaa can be any naturally occurring amino acid
  Transcript Sequence Number=SeqID_39009
  Gene Ontology: Mol. function=zinc ion binding
  Homolog annotation: Hit_ID=B6T786; Match level="QueryCoverage=90%, HitCoverage=97%, E-value=4e-78, Identity=62%"; Hit description =Protein binding protein
  Pfam annotation: Domain name=zf-C3HC4; Domain location=65-110; Score =47.1; E_value=6.7e-11; Accession=PF00097.17; Description=Zinc finger, C3HC4 type (RING finger)
MADHFALMTGRLITESTLRSAVHESSADAAVPSTSDGYEHTDPSVVAEDVQLCVGKAKSGVMVECRICQEEGDEAYMXDPCLLQGSLKYAHHRCVQRWCNEKGDTICEICLQQLTPNYTAPLKLFRHGRNLINFRRAVERRENHGASYGHTLDQSDGASSFDSQSSNPKNVIYCRVFAVALMALLVLRDAIFLILRSHKVCSIELITLLMFRTAGIVIPVYIILISITALLHRCNQRQVVHETPVSEPRGAGGFAANATSTAYHQHPVGSCMVIPSQAGAL

SEQ ID NO: 104984 - protein, 83 aa, Setaria italica
  Transcript Sequence Number=SeqID_39010
TPGKGNETGETRFAASSKRAITCNNSESLQIVADGADVTQAQHHQFPTSAISYLIEKEAPRAPPARARRQSARLVQKLVLAKL

SEQ ID NO: 104985 - protein, 118 aa, Setaria italica
  Transcript Sequence Number=SeqID_39011
  Subcellular localization annotation: CTP_CleavageSite=45; ConfidenceScore=5.01e-01
LLNETCRLPSCPSWRSTRCFLLNQVIALFDEAANLVSPVSLPFRRASLAKTRSSRFVAEQRHVGQSKTTEVQRCLLALRKVGIILDEQNLQKLVKNWVANFYGELISEAAYMRWFRNG

SEQ ID NO: 104986 - protein, 102 aa, Setaria italica
  Transcript Sequence Number=SeqID_39012
  Gene Ontology: Mol. function=microtubule motor activity; Cellular component=microtubule associated complex
  Homolog annotation: Hit_ID=B6SY02; Match level="QueryCoverage=90%, HitCoverage=12%, E-value=1e-24, Identity=66%"; Hit description =Kinesin-1
NADVVTVVLLSPQKKENAGTARREMGFKVTPRRNVLSAINNGEANGGTPSAPADGGGGGAEAAPVVEFSGREDVERLLAEKMKGKSKNDYKGRVEQMSDYIK

SEQ ID NO: 104987 - protein, 135 aa, Setaria italica
  Transcript Sequence Number=SeqID_39013
  Gene Ontology: Mol. function=protein serine/threonine kinase activity; Cellular component=integral to plasma membrane; Biological process=protein amino acid phosphorylation
  Homolog annotation: Hit_ID=B6SXS9; Match level="QueryCoverage=68%, HitCoverage=13%, E-value=8e-35, Identity=78%"; Hit description =Receptor protein kinase PERK1
RKHATRGSIQLHCTIVFQIIDSPGGLTVCCLVDDGQVVRALEGDVSLEDLNEGVRPGHSRFFGSYSSSDYDSGQYNEDMKKFRKMAFNNNNYTSSQYSAPTSEYGQIPSASSSEGQQTQEMESGAMKKSGYKLRE

SEQ ID NO: 104988 - protein, 50 aa, Setaria italica
  Transcript Sequence Number=SeqID_39014
MDPVADPSPSRRSLKRRPPARSPELSPKAGGGEPAAAAEAEELIRRVEEL

SEQ ID NO: 104989 - protein, 181 aa, Setaria italica
  Transcript Sequence Number=SeqID_39015
  Gene Ontology: Mol. function=protein serine/threonine kinase activity; Cellular component=integral to plasma membrane; Biological process=protein amino acid phosphorylation
  Homolog annotation: Hit_ID=B6SXS9; Match level="QueryCoverage=100%, HitCoverage=26%, E-value=4e-90, Identity=85%"; Hit description =Receptor protein kinase PERK1
  Pfam annotation: Domain name=Pkinase; Domain location=2-165; Score= -48.2; E_value=1.3e-05; Accession=PF00069.17; Description=Protein kinase domain
  Pfam annotation: Domain name=Pkinase_Tyr; Domain location=3-173; Score=-104.7; E_value=9.1e-07; Accession=PF07714.9; Description =Protein tyrosine kinase
  Pfam module annotation: Pfam domain module=Pkinase::Pkinase_Tyr; Domain location=2-165::3-173
PNNTLEFHLHGRGRPTLDWPTRLKIALGSAKGLAYLHEDCHPKIIHRDIKASNILLDLRFEAKVADFGLAKFTSDTNTHVSTRVMGTFGYLAPEYAASGKLTEKSDVFSFGVMLLELITGRRPVSSRQAPMDDNLVDWARPLMTKAFEDGNHDALVDPRLGSEYNDNEMARMIACAAACVR

SEQ ID NO: 104990 - protein, 212 aa, Setaria italica
  misc_feature (159)..(159): Xaa can be any naturally occurring amino acid
  Transcript Sequence Number=SeqID_39016
  Gene Ontology: Mol. function=protein serine/threonine kinase activity; Cellular component=integral to plasma membrane; Biological process=protein amino acid phosphorylation
  Homolog annotation: Hit_ID=Q76BK8; Match level="QueryCoverage=62%, HitCoverage=47%, E-value=4e-44, Identity=67%"; Hit description=PERK1- like protein kinase (Fragment)
LNTRSFFDFIDIPLEIPFSTLQARPLMTKAFEDGNHDALVDPRLGSEYNDNEMARMIACAAACVRHSSRRRPRMGQVVRALEGDVSLDDLNEGVRPGHSRFMGSYSSSASDYDTNQYKEDLKKFRKMALGGSGVQSGSQETPTSEYGRNPSASSGDGHXDDDAGNGGGGEREERRRRQRWRQPEPGFLRILVFWTVSTVNHRAFVNPPAQPS

SEQ ID NO: 104991 - protein, 596 aa, Setaria italica
  misc_feature (463)..(463): Xaa can be any naturally occurring amino acid
  Transcript Sequence Number=SeqID_39017
  Gene Ontology: Mol. function=protein serine/threonine kinase activity; Cellular component=integral to plasma membrane; Biological process=protein amino acid phosphorylation
  Homolog annotation: Hit_ID=B6SXS9; Match level="QueryCoverage=75%, HitCoverage=64%, E-value=0.0, Identity=80%"; Hit description =Receptor protein kinase PERK1
  Pfam annotation: Domain name=Pkinase; Domain location=224-498; Score =116.6; E_value=8.4e-32; Accession=PF00069.17; Description=Protein kinase domain
  Pfam annotation: Domain name=Pkinase_Tyr; Domain location=224-498; Score=122.6; E_value=1.3e-33; Accession=PF07714.9; Description =Protein tyrosine kinase
  Pfam module annotation: Pfam domain module=Pkinase::Pkinase_Tyr; Domain location=224-498::224-498
  Subcellular localization annotation: CTP_CleavageSite=82; ConfidenceScore=5.91e-01
PSSSTPATPSAPSPSSPGTPSTPSPPSDTPSPPSSGGGGNRSPSPPSSGGSGGRSPSGHSPPKSHNSGGGGGGSGPSTSLVVGVAVGGFVLLLLASFICLCCLRKKRRRAPQPPPHYGYPPPHQPPYKEDPYGGTYHQSWQQQNAPPPPPEHVVKMHPSPPPAYANRPPQAPPPPPPAMLNSSGGSGSNYSGGEILPPPSPGAALGFSKSTFTYEELVRATDGFSDANLLGQGGFGYVHRGLLPNGKEIAVKQLKLGSGQGEREFQAEVEIISRVHHKHLVSLVGYCISGGKRLLVYEFVPNNTLEFHLHGKDRPTMEWPTRLKIALGAAKGLAYLHEDCHPKIIHRDIKSSNILLDFKFEAKVADFGLAKFTSDNNTHVSTRVMGTFGYLAPEYASSGKLTEKSDVFSFGVMLLELITGRRPVDTTQTYMDDSLVDWARPLLMRALEDGDYDELVDPRLGKXDFSPNEIARMIACAAACVRHSARRRPRMSQVVRALEGDVSLEDLNEGVRPGHSRFFGSYSSSDYDSGQYNEDMKKFRKMAFNNNNYTSSQYSAPTSEYGQIPSASSSEGQQTQEMESGAMKKSGYSSGYSGAS

SEQ ID NO: 104992 - protein, 83 aa, Setaria italica
  Transcript Sequence Number=SeqID_39018
  Gene Ontology: Mol. function=voltage-gated potassium channel activity; Cellular component=integral to membrane; Biological process=potassium ion transport
  Homolog annotation: Hit_ID=O04242; Match level="QueryCoverage=78%, HitCoverage=7%, E-value=2e-31, Identity=96%"; Hit description =Potassium channel
CNIANPQATVGYGDLHAENTREMVFNIFYMLFNLGLTAYLIGNMTNLVVHGTSRTRKYRDTIQAATSFALRNQPETPRHTGDR

SEQ ID NO: 104993 - protein, 62 aa, Setaria italica
  Transcript Sequence Number=SeqID_39019
LVAPKMFLRNITMSRSHRSWMTYLALTTCSWTAPTTCSWIFNPTTCLETRINLHGPQKNLVL

SEQ ID NO: 104994 - protein, 51 aa, Setaria italica
  Transcript Sequence Number=SeqID_39020
ITPLSSLFMLPTSQSLTLSAATIQPWILSRLNDPGSPEADDPPDIRRSTVA

SEQ ID NO: 104995 - protein, 215 aa, Setaria italica
  Transcript Sequence Number=SeqID_39021
  Gene Ontology: Mol. function=protein binding; Cellular component =cytoplasm; Biological process=RNA metabolic process
  Homolog annotation: Hit_ID=Q2HSQ9; Match level="QueryCoverage=98%, HitCoverage=17%, E-value=1e-100, Identity=78%"; Hit description =Initiation factor eIF-4 gamma, middle; Up-frameshift suppressor 2
FVANFKIAPSCLVFGCLKACLDDFTHHNIDVACNLLETCGRFLYRLPETTIRMSNMLEILKRLKNVKNLDAHHSTLVENAYYLCKPPERSSRVSKLRPHLHQYIRRLLFSDLDKSTVQHVLLQLLKLSWADCEQYLVKCFLKVHKGKYSHVHLIALLTASLSHYHHDFAVTVVDEVLEEIRVGLELNDYAMQQQRLAHMRFLGELYNYEYIDSSV

SEQ ID NO: 104996 - protein, 36 aa, Setaria italica
  Transcript Sequence Number=SeqID_39022
  Gene Ontology: Mol. function=pyridoxal phosphate binding; Biological process=cysteine biosynthetic process from serine
  Homolog annotation: Hit_ID=B6TEX7; Match level="QueryCoverage=100%, HitCoverage=10%, E-value=1e-11, Identity=88%"; Hit description =Cysteine synthase
ENKGKMIVTMFPSGGERYMNSDLFAAVREECIAMTF

SEQ ID NO: 104997 - protein, 131 aa, Setaria italica
  misc_feature (41)..(41): Xaa can be any naturally occurring amino acid
  misc_feature (99)..(99): Xaa can be any naturally occurring amino acid
  Transcript Sequence Number=SeqID_39023
  Gene Ontology: Mol. function=protein binding; Cellular component =chromatin
  Homolog annotation: Hit_ID=Q5ZD87; Match level="QueryCoverage=87%, HitCoverage=10%, E-value=9e-13, Identity=37%"; Hit description =HcrVf2 protein-like
ARTEPAQLGPWWCRVLSLVAWETTCKQKQHGGIGLKDLELXNKSLLLELLHRLHHPTDSLWARWVLQLANVVDLSGDIAGTHWSDLQNLLPIYRTLHTXVVSDGSATCFWYDRWLPIGRLCETFPMLLSHA

SEQ ID NO: 104998 - protein, 146 aa, Setaria italica
  Transcript Sequence Number=SeqID_39024
  Subcellular localization annotation: CTP_CleavageSite=43; ConfidenceScore=5.18e-01
MAMGLPGLRCCHLPARGSLPPLGPALPRRPLPRTSALRYSSLQAQAGDSIGEEVLRMFLEERQLHGDFVTKISDMVWRRNGANVDAVEATAVQGNAADVAQPEDVQEDVADEGVLRLAATRDWVSGESSLPVSKRRSAKDRQNCSS

SEQ ID NO: 104999 - protein, 253 aa, Setaria italica
  Transcript Sequence Number=SeqID_39025
  Pfam annotation: Domain name=Bac_ATP_syn_I; Domain location=88-233; Score=2.3; E_value=0.0085; Accession=PF05468.3; Description=Bacillus ATP synthase I
VVAVAVAVVEVRAEAADAEHGDDRGNVGDAADVAQPEDVQEDVADEGVLRLAATRDWVSGESSLPVSKRRSAKDRQNESDKRKELNLLKYEALKDELLLLTTGIGAACSLYCLLVFSLKTAVSYAFGVGFSCLYLQLLCQHTDNLSKEDIPEVFLKKKVKKIGITSEDLKNTIEKTLGGAGVALSSPRLVIPAVIFGLSALSDHFQNSFFSFEVLPGMMGFLAYKAAALVQVYRDNEDLRLILPEEDAGSDNA

SEQ ID NO: 105000 - protein, 323 aa, Setaria italica
  Transcript Sequence Number=SeqID_39026
  Gene Ontology: Mol. function=transcription regulator activity; Cellular component=nucleus; Biological process=regulation of transcription
  Homolog annotation: Hit_ID=Q9FXA3; Match level="QueryCoverage=16%, HitCoverage=17%, E-value=2e-09, Identity=52%"; Hit description =Transcription factor bHLH95
  Pfam annotation: Domain name=HLH; Domain location=111-161; Score =40.3; E_value=7.5e-09; Accession=PF00010.18; Description=Helix-loop -helix DNA-binding domain
MAQDSPLHHQDNASSDERSITPPATMTFLGPAENDNGGSRIDSPVGMDASKGKDVVLDDIQGGEHGSASGAKANTNRSKGKHSAAGKASTNTAKDGFPKGKGSLAADEDGDVKAHIVTERERRRRMKDLFSNLHALMPHIPDKVDKATLVGETIHFIKALEKTKVQLEKQKQEQVLARQAAAQAMSSLSVMQTAQGMAAMSNGWGPVPQQQPLAAVAAAAPPPPLAAATGPAGFQTWSAPNVVLSISDEKAVINLCLPRHPRMLTLVMSVLNKHGIDVITAHVAAEGARSMITIYTSVNGGENPSAEDIYKLAVSEIMVWLSS

SEQ ID NO: 105001 - protein, 59 aa, Setaria italica
  misc_feature (22)..(22): Xaa can be any naturally occurring amino acid
  misc_feature (38)..(38): Xaa can be any naturally occurring amino acid
  Transcript Sequence Number=SeqID_39027
  Gene Ontology: Mol. function=RNA-directed DNA polymerase activity; Biological process=RNA-dependent DNA replication
  Homolog annotation: Hit_ID=Q6UUP0; Match level="QueryCoverage=98%, HitCoverage=4%, E-value=3e-09, Identity=49%"; Hit description =Putative polyprotein
KFNQQKHQNLSIEHQEAAKVVXRSSWIMVIREVIRSEXLANPILIKKNNGNWRMCIDFN

SEQ ID NO: 105002 - protein, 37 aa, Setaria italica
  Transcript Sequence Number=SeqID_39028
ILRYADTVKLTHFLRMERSSSMRAAVVLTINHDRVQL

SEQ ID NO: 105003 - protein, 195 aa, Setaria italica
  misc_feature (168)..(168): Xaa can be any naturally occurring amino acid
  Transcript Sequence Number=SeqID_39029
  Gene Ontology: Cellular component=chloroplast
  Homolog annotation: Hit_ID=B6SR15; Match level="QueryCoverage=81%, HitCoverage=67%, E-value=2e-68, Identity=83%"; Hit description =Rhodanese-like domain containing protein
  Pfam annotation: Domain name=Rhodanese; Domain location=48-187; Score= 22.4; E_value=0.0018; Accession=PF00581.12; Description=Rhodanese -like domain
ACLLIYRNISTLVLLIHLIHCSLIVRLLCLAFFIYTRLSFLQVRGVDVKEALRLQKENKFVILDVRPEAEFKESAHPPGAINVQIYRLIKEWTAWDIARRAAFAFFGIFAGTEENPEFIQSVDEKVGKDAKIIVACSTGGTLKPTQNFPDGKQSRSLIAAYLLVLNGXNGYSNVYHLEGGLYTWFKEGLPAVEGE

SEQ ID NO: 105004 - protein, 229 aa, Setaria italica
  Transcript Sequence Number=SeqID_39030
  Gene Ontology: Cellular component=chloroplast
  Homolog annotation: Hit_ID=B6SR15; Match level="QueryCoverage=100%, HitCoverage=100%, E-value=8e-99, Identity=77%"; Hit description =Rhodanese-like domain containing protein
  Pfam annotation: Domain name=Rhodanese; Domain location=85-220; Score= 39.3; E_value=1.5e-08; Accession=PF00581.12; Description=Rhodanese -like domain
  Subcellular localization annotation: CTP_CleavageSite=6; ConfidenceScore=5.02e-01
MITMLAASSVVNSSLACSSRISSGSDLASGHSWRPIEAVKLPRKHAVSSLHISCAATKPAKTPAEEDWKIKRQLLAQKRVRGVDVKEALRLQKENKFVILDVRPEAEFKEAHPPGAINVQIYRLIKEWTAWDIARRAAFAFFGIFAGTEENPEFIQSVDEKVGKDAKIIVACSTGGTLKPTQNFPDGKQSRSLIAAYLLVLNGYSNVYHLEGGLYTWFKEGLPAVEGEE

SEQ ID NO: 105005 - protein, 82 aa, Setaria italica
  Transcript Sequence Number=SeqID_39031
MAALRPRAATAVASAELRPAVRRGACRVSAAAFRYYPCWQLQGNMLNWRSKFASKKLLSTVAGAMPDDSEFESVDAPLEPET

SEQ ID NO: 105006 - protein, 64 aa, Setaria italica
  misc_feature (44)..(44): Xaa can be any naturally occurring amino acid
  misc_feature (57)..(57): Xaa can be any naturally occurring amino acid
  Transcript Sequence Number=SeqID_39032
  Gene Ontology: Mol. function=receptor activity; Cellular component =integral to membrane
  Homolog annotation: Hit_ID=B9SS53; Match level="QueryCoverage=84%, HitCoverage=6%, E-value=5e-15, Identity=68%"; Hit description =Xenotropic and polytropic murine leukemia virus receptor pho1, putative
  Subcellular localization annotation: CTP_CleavageSite=46; ConfidenceScore=5.17e-01
KQVSGSLLSTGVLFCPFNIFYRSTRYCFMRVMRNIIFSPFYKVXLMADFFMADQLTXQTPTTKT

SEQ ID NO: 105007 - protein, 144 aa, Setaria italica
  Transcript Sequence Number=SeqID_39033
  Gene Ontology: Mol. function=receptor activity; Cellular component =integral to membrane
  Homolog annotation: Hit_ID=Q8S403; Match level="QueryCoverage=87%, HitCoverage=16%, E-value=6e-42, Identity=61%"; Hit description =Putative phosphate transporter 1
TVVSPPDEKCSAFQVSEQQRATDLFSEKVKRSPFSSSDKVLQLADEVECIFLRHFAGNDRKVAMKYLKPQQPRNTHMITFLVGLFTGTFVSLFIIYSVLAHVAGIFSSTGSPAYMDIVYHVFSMFALISLHVFLYGCNLFMWKS

SEQ ID NO: 105008 - protein, 357 aa, Setaria italica
  misc_feature (187)..(187): Xaa can be any naturally occurring amino acid
  Transcript Sequence Number=SeqID_39034
  Gene Ontology: Mol. function=receptor activity; Cellular component =integral to membrane
  Homolog annotation: Hit_ID=B9HSH0; Match level="QueryCoverage=90%, HitCoverage=38%, E-value=1e-89, Identity=53%"; Hit description=Pho1 -like protein (Fragment)
  Pfam annotation: Domain name=SPX; Domain location=18-131; Score= -54.1; E_value=0.035; Accession=PF03105.11; Description=SPX domain
LVFREGEEVAKAKKDGSGKQLMGRGALLQLPATVRIDIPPTSPGRAALKVWEELVNVLRKDGADPAAAFVHRKKVQHAEKNIRDAFLALYRGLELLKKFSSLNVKAFTKILKKFVKVSEQQRATDLFSEKVKRSPFSSSDKVLQLADEVECIFLRHFAGNDRKVAMKYLKPQQPRNTHMITFLVGEXASKIESIVFIISDPKCILNSLFLVLSGLFTGTFVSLFIIYSVLAHVAGIFSSTGSPAYMDIVYHVFSMFALISLHVFLYGCNLFMWKSTRINHNFIFDFASNTALTHRDAFLMSASIMCTVVLSLVINLFLRNAGATYTDALPGALLLLSTGVLFCPFNIFYRSTRYCFM

SEQ ID NO: 105009 - protein, 325 aa, Setaria italica
  Transcript Sequence Number=SeqID_39035
  Gene Ontology: Mol. function=receptor activity; Cellular component =integral to membrane
  Homolog annotation: Hit_ID=B9HKS4; Match level="QueryCoverage=98%, HitCoverage=41%, E-value=1e-123, Identity=64%"; Hit description=Pho1- like protein
  Pfam annotation: Domain name=EXS; Domain location=2-304; Score=373.2; E_value=4.6e-109; Accession=PF03124.6; Description=EXS family
  Subcellular localization annotation: CTP_CleavageSite=99; ConfidenceScore=5.04e-01
LSILSYFASNTALTHRDAFLMSASIMCTVVLSLVINLFLRNAGATYTDALPGALLLLSTGVLFCPFNIFYRSTRYCFMRVMRNIIFSPFYKVLMADFFMADQLTSQIPLLRHMEFAACYFMAGTFRNQAYETCTSSPQYTHLAYVISFLPYYWRAMQCLRRYLEEGHDINQLANAGKYVSAMVAAAVRFKYAATPTPLWMWMVVISSSGATIYQLYWDFVMDWGFLNPKSKNLWLRDQLILKNKSIYYVSMMLNLALRLAWAQSVMKLKLGRVESRLLDFSLASLEIIRRGHWNFYRLENEHLNNAGKFRAVKTVPLPFRELETD

SEQ ID NO: 105010 - protein, 331 aa, Setaria italica
  misc_feature (133)..(133): Xaa can be any naturally occurring amino acid
  Transcript Sequence Number=SeqID_39036
  Gene Ontology: Mol. function=phosphoinositide binding; Biological process=cell communication
  Homolog annotation: Hit_ID=Q9XI44; Match level="QueryCoverage=98%, HitCoverage=29%, E-value=1e-26, Identity=33%"; Hit description =F9L1.19 protein
RELLACAVLRPVMNLVNPRFINERIESLALSRANKLEKGVEESMVDATTVKQKEASMPSIDEFSASIDHSSPGVELVPFHQGQSKMASDMQPSKSKNSSSLKPESSNASLIGTSHPLESTSLHSTSHVASGNXFSLHSKSSDIASADSHGRERAQPLGISSQRTHQALALEHLENMWTKGKNYKSENAKHNANIPVGSDSLGSTSSGQQSVPCCTSISQRQALFSQSEDQRLVRHSTTPAYSNGTNHLPKSLSADMAEHAGPEDFGVESESSYATEDDDVNNVTGLDSPVTRVWESKSKGNATSSHIHHPLESSSFHRAKKNRSHVGKLKM

SEQ ID NO: 105011 - protein, 115 aa, Setaria italica
  Transcript Sequence Number=SeqID_39037
  Gene Ontology: Mol. function=RNA-directed RNA polymerase activity
  Homolog annotation: Hit_ID=Q5QMN5; Match level="QueryCoverage=58%, HitCoverage=5%, E-value=1e-12, Identity=55%"; Hit description =Probable RNA-dependent RNA polymerase 3
FSILINNFFLPFSYVLGTSANCWLTLMDRLLTPGVSQSEKDLIKINMLELVDIYYWALDAPKNGNKVVSNHGLICFYRSAIVVLNFPYATSNWYVVNHQKWYTKILCWHFLVIGL

SEQ ID NO: 105012 - protein, 230 aa, Setaria italica
  Transcript Sequence Number=SeqID_39038
  Gene Ontology: Mol. function=nucleic acid binding; Cellular component= ribonucleoprotein complex; Biological process=protein folding
  Homolog annotation: Hit_ID=B9S3X9; Match level="QueryCoverage=47%, HitCoverage=51%, E-value=9e-34, Identity=70%"; Hit description=U1 small nuclear ribonucleoprotein C, putative
  Pfam annotation: Domain name=zf-U1; Domain location=1-38; Score=95.0; E_value=2.7e-25; Accession=PF06220.4; Description=U1 zinc finger
MPRYYCDYCDTYLTHDSPSVRKQHNAGYKHKANVRTYYQQFEEQQTQSLIDQRIKEHLGQAAAFQVGAPFNQHLLSFPGAMARPRLPILPTPGMPHGFPQAPGAPLMPGVRPPILPAPGVPGYPGGPPTMPQPGAPPTMPPPGAPPGSMPQPGAPPGSVPMQIAPLPRPPTLPPPTSGVPGAPIPNNAAPPSMFQTNPPPPAGPTSGAPPAPPSAPQPAFSYAQPSEGNH

SEQ ID NO: 105013 - protein, 194 aa, Setaria italica
  misc_feature (97)..(97): Xaa can be any naturally occurring amino acid
  Transcript Sequence Number=SeqID_39039
KLNSFFIVYGQHASRDKNQYCLRLLQQFQVIHSLKLMLVYRKDIDDFQYLMGDMKMLPQITFLQLAVSNEGHAFGASSFHLFKVIQHKSLGDLCYMXNRNLEAQSTCPSGCICDQPTSWKTEGLVLNHLEHVTIFGLQGAEREVTFVKQLFSWAMVLKNIRITFDYQVTESKARDFCQALAGFSRPETSVEFHL

SEQ ID NO: 105014 - protein, 74 aa, Setaria italica
  Transcript Sequence Number=SeqID_39040
RARAKEIAAKAKAAVQEGGSSYDDLIDMIHHVAELSRTKSYERDPSARPLASAPELGSKSKNSEEMEAFFSVPS

SEQ ID NO: 105015 - protein, 182 aa, Setaria italica
  Transcript Sequence Number=SeqID_39041
  Homolog annotation: Hit_ID=Q8SAW5; Match level="QueryCoverage=76%, HitCoverage=11%, E-value=5e-39, Identity=59%"; Hit description =Putative myosin-like protein
SHQEDIAKYRDLKEKMERYEKSSLFVAENSDIELKKEKEIAAAAEKLAECQETILLLGRQLQTLRPPPLESLSSALNTQPVGQFPEDAGPARSVHSKKPSGQFDADYTFSSAPGTGNVSPLSGYNRHKSPSNAAGSPYLTSPGSSKRPKHRSRSSSSSFSNQLPEKHGRVFSRLFSKGKSDR

SEQ ID NO: 105016 - protein, 51 aa, Setaria italica
  Transcript Sequence Number=SeqID_39042
HDHQYWLVHHYFKSVPPDSNDSCDVLIPSLHINQSCLSIKQVMHTGVPREL

SEQ ID NO: 105017 - protein, 218 aa, Setaria italica
  misc_feature (88)..(88): Xaa can be any naturally occurring amino acid
  misc_feature (191)..(191): Xaa can be any naturally occurring amino acid
  Transcript Sequence Number=SeqID_39043
  Gene Ontology: Mol. function=4 iron, 4 sulfur cluster binding; Cellular component=cytoplasm; Biological process=metabolic process
  Homolog annotation: Hit_ID=Q6YZX6; Match level="QueryCoverage=98%, HitCoverage=23%, E-value=1e-102, Identity=87%"; Hit description =Putative aconitate hydratase, cytoplasmic
  Pfam annotation: Domain name=Aconitase; Domain location=25-218; Score= -193.0; E_value=9.7e-05; Accession=PF00330.12; Description=Aconitase family (aconitate hydratase)
NLSEKLPYSIRILLESAIRNCDNFQVTTNDVEKIIDWENTSPKLAEIPFKPARVLLQDFTGVPAVVDLAAMRDAMAKLGSDANKINPXLVPVDLVIDHSVQVDVARSPNAVQLNMELEFYKVIFSFLKWGSTAFQNMLVVPPGSGIVHQVNLEYLGRVVFNTDGILYPDSVVGTDSHTTMIDGLGVAGWGXVGGIEAEATMLGQPMSMVLPGVVGFKV

SEQ ID NO: 105018 - protein, 114 aa, Setaria italica
  Transcript Sequence Number=SeqID_39044
  Gene Ontology: Mol. function=4 iron, 4 sulfur cluster binding; Cellular component=cytoplasm; Biological process=metabolic process
  Homolog annotation: Hit_ID=Q6YZX6; Match level="QueryCoverage=93%, HitCoverage=11%, E-value=1e-53, Identity=92%"; Hit description =Putative aconitate hydratase, cytoplasmic
  Pfam annotation: Domain name=Aconitase_C; Domain location=1-81; Score= 77.8; E_value=4e-20; Accession=PF00694.11; Description=Aconitase C -terminal domain
MVLGPTGEKLSVFDAAMRYKSEGHATIILAGAEYGSGSSRDWAAKGPMLLGVKAVISKSFERIHRSNLVGMGIIPLCFKAGEDADSLGLTGHERYSIDLPTNLSEIRPGQDGSR

SEQ ID NO: 105019 - protein, 91 aa, Setaria italica
  Transcript Sequence Number=SeqID_39045
  Gene Ontology: Mol. function=catalytic activity; Cellular component =chloroplast envelope; Biological process=metabolic process
  Homolog annotation: Hit_ID=Q53NV4; Match level="QueryCoverage=96%, HitCoverage=29%, E-value=4e-35, Identity=81%"; Hit description=4 -alpha-methyl-sterol C4-methyl-oxidase
MAAPVSALESAWQLVIANFTEFQLATLITFLLHETVFFLSGLPSLLFERFGLLAKYKIQKKSNTSAYQNRCVLRLILYHVCVNLPVIISPT

SEQ ID NO: 105020 - protein, 121 aa, Setaria italica
  Transcript Sequence Number=SeqID_39046
TSTFIRYTCTITRSDKDACLEQVTLTLYAEELAANKLKQFELIIRRIKHAIINGELLHSGHAYHFNCTVRDGNLIQQASRTHIYAVPISKFSGWCPATSAAAALAIYRFFPSFSSTAFALR

SEQ ID NO: 105021 - protein, 262 aa, Setaria italica
  misc_feature (242)..(242): Xaa can be any naturally occurring amino acid
  Transcript Sequence Number=SeqID_39047
  Gene Ontology: Mol. function=catalytic activity; Cellular component =chloroplast envelope; Biological process=metabolic process
  Homolog annotation: Hit_ID=Q53NV4; Match level="QueryCoverage=100%, HitCoverage=97%, E-value=1e-136, Identity=83%"; Hit description=4 -alpha-methyl-sterol C4-methyl-oxidase
  Pfam annotation: Domain name=FA_hydroxylase; Domain location=115-228; Score=120.6; E_value=5.1e-33; Accession=PF04116.5; Description=Fatty acid hydroxylase
MAAPVSALESAWQLVTANFTEFQLATVITFLIHETVFFLSGLPSLLFERFGLFAKYKIQKKSNTSAYQNRCVLRLILYHVCVNLPVMIFSYPAFKFMGLRSSLPLPHWTVVVSQVLFYFVLEDFIFYWGHRALHTKWLYKHVHSVHHEYATPFGLTSEYAHPAEILFLGFATVVGPALTGPHLFTLWLWMVLRVLETVEAHSGYHFPWSPSNFLPLYGGSDFHDYHHRVLYTKSGNYASTFXYMDWLFGTDKDYRKAKAFED

SEQ ID NO: 105022 - protein, 58 aa, Setaria italica
  Transcript Sequence Number=SeqID_39048
MARDILALPCSTDCKEATRTARMAITESGYKYWVERLVCVQNWLKTAGTTAVEPKDDL

SEQ ID NO: 105023 - protein, 111 aa, Setaria italica
  Transcript Sequence Number=SeqID_39049
  Subcellular localization annotation: CTP_CleavageSite=58; ConfidenceScore=5.09e-01
MAWPQGKLMDPIRSPIAATSSFHQSAVKHLQQGVILAHRNGISRRCLLTLLTSTAAIPDSSESRKALLQEYLKKSEENKEKNDKERLDDYYKRNYKDYFGLIEGPAREKKE

SEQ ID NO: 105024 - protein, 128 aa, Setaria italica
  Transcript Sequence Number=SeqID_39050
MADNSGIPSKQMKIWIANRRAQIKKQTIREENARLRIENEMLREENREMSLMQRKKVCGLCVLKAENARLRAEFERLQAIAAMRQNIANPKEELGSSSSAFQTPAPSSATGSQPDPGPGAYVPKDEPP

SEQ ID NO: 105025 - protein, 102 aa, Setaria italica
  Transcript Sequence Number=SeqID_39051
SQNRGGVAGFLTISWGFHLFKCSKEMATAAGDSGDGGGDRCSSRGMGKIIVGFHDKSKKKSTWERAMLCIWKDVMKMLLRWVRNILLVVVMLHNQFREFQVH

SEQ ID NO: 105026 - protein, 42 aa, Setaria italica
  Transcript Sequence Number=SeqID_39052
NHYFVDEKIISTMDAKAGILVSFLFTHYSLFLEEFLCSVSPT

SEQ ID NO: 105027 - protein, 554 aa, Setaria italica
  Transcript Sequence Number=SeqID_39053
  Gene Ontology: Mol. function=acid-amino acid ligase activity; Cellular component=intracellular; Biological process=ubiquitin -dependent protein catabolic process
  Homolog annotation: Hit_ID=Q8GY23; Match level="QueryCoverage=98%, HitCoverage=14%, E-value=1e-127, Identity=48%"; Hit description=E3 ubiquitin-protein ligase UPL1
  Pfam annotation: Domain name=UBA; Domain location=27-64; Score=41.3; E_value=3.7e-09; Accession=PF00627.23; Description=UBATS-N domain
  Pfam annotation: Domain name=UIM; Domain location=72-89; Score=20.1; E_value=0.0092; Accession=PF02809.12; Description=Ubiquitin interaction motif
  Pfam module annotation: Pfam domain module=UBA::UIM; Domain location =27-64::72-89
ICSAVGDLKQSRNIAGVANQRVTSPPLDESAIATIVEMGFSRARAEEALRSVRTNSVEMATDWLFSHPEEFVQEDVQLAQALALSLGNSIETPKEDGSNKNDTATAEEKGVFVLPLDDILTVSTKLFCSSDSAMAFPLTDLLVTLCNRNKGEYRQRVVLYLFEQLRRFSSDTITDAGALYSVAHLLALLLSEDSGIREIGAENGVTPHVLNMLENLKSRTDHTDKTWNSISALLLILDNMLQFNPKLNTETTDGASKSTSDISSADSKANPAPPDEEKTETMDSADDASANVFEKILGKSTGYLTDQESQKALVFCCEFIKKRVPATVMQAVLQLSARLTKTHALAAQFFENGGLSSLLNLPSACIFPGFETLASAIVRHLIEDPQTLQSAMELEIRQSLSNRGSRTPRSFLTNMAPLISRDPVIFMRAVTSVCQLDSSGGRMNVVLLKDKERDREKQKVPSIESGVPCNEPVRVTADIKSVDTPNRWSRSHKKVPASLSQVIDQLLEIIMSYPSASKEQGFDGYSLLTPIDVDEPNTKGKSKVDDGQELGVML

SEQ ID NO: 105028 - protein, 212 aa, Setaria italica
  Transcript Sequence Number=SeqID_39054
  Gene Ontology: Mol. function=transferase activity, transferring glycosyl groups; Biological process=nucleoside metabolic process
  Homolog annotation: Hit_ID=B6U5U2; Match level="QueryCoverage=100%, HitCoverage=92%, E-value=1e-112, Identity=92%"; Hit description =Uracil phosphoribosyltransferase
  Pfam annotation: Domain name=Pribosyltran; Domain location=52-165; Score=43.3; E_value=9.7e-10; Accession=PF00156.19; Description =Phosphoribosyl transferase domain
FKVVVPAHPLISHWVSVLRDRSTPSHAFRSALGELGRLLIYEATRDWLPTVTREIQSPVGTAVVESISEMEPIMIVPILRAGLALADLATSILPSTRTFHLGMARDEKTLLPSVYLNKLPDRFPKGCHILLVDPMLATGGTVTAAVDLVKERGAEISQIRIISAVAAPPALKKLNQRFPGICVYTGAMDQTVNEKGFIVPGLGDAGDRSYGT

SEQ ID NO: 105029 - protein, 76 aa, Setaria italica
  Transcript Sequence Number=SeqID_39055
  Subcellular localization annotation: CTP_CleavageSite=59; ConfidenceScore=5.55e-01
SSCNSPHPSLYLSTISLLPRIQEVPLQRLLSSSIPNPNKASQLSSGNSPASALVFLQALCSASSSLLPTGVQQLQR

SEQ ID NO: 105030 - protein, 115 aa, Setaria italica
  Transcript Sequence Number=SeqID_39056
  Gene Ontology: Mol. function=sequence-specific DNA binding; Cellular component=nucleus; Biological process=regulation of transcription, DNA-dependent
  Homolog annotation: Hit_ID=Q2PJS2; Match level="QueryCoverage=64%, HitCoverage=31%, E-value=2e-38, Identity=98%"; Hit description=WRKY40
  Pfam annotation: Domain name=WRKY; Domain location=37-96; Score =143.3; E_value=7.7e-40; Accession=PF03106.7; Description=WRKY DNA -binding domain
MVGRGEDEEGGGGGGKARRKVREPRFCFKTMSDVDVLDDGYKWRKYGQKVVKNTQNPRSYYRCTQDNCRVKKRVERLAEDPRMVITTYEGRHVHSPSRDEDDDAARANAEMSFIW

SEQ ID NO: 105031 - protein, 221 aa, Setaria italica
  Transcript Sequence Number=SeqID_39057
  Gene Ontology: Mol. function=nucleotide binding; Cellular component =nucleus; Biological process=small GTPase mediated signal transduction
  Homolog annotation: Hit_ID=Q69XM7; Match level="QueryCoverage=99%, HitCoverage=97%, E-value=1e-107, Identity=85%"; Hit description=GTP -binding nuclear protein Ran-3
  Pfam annotation: Domain name=Arf; Domain location=1-171; Score=-96.2; E_value=0.035; Accession=PF00025.13; Description=ADP-ribosylation factor family
  Pfam annotation: Domain name=MMR_HSR1; Domain location=14-128; Score=- 6.0; E_value=0.0036; Accession=PF01926.15; Description=GTPase of unknown function
  Pfam annotation: Domain name=Miro; Domain location=15-128; Score =52.9; E_value=1.2e-12; Accession=PF08477.5; Description=Miro-like protein
  Pfam annotation: Domain name=Ras; Domain location=15-173; Score =226.4; E_value=7.4e-65; Accession=PF00071.14; Description=Ras family
  Pfam module annotation: Pfam domain module=Arf::MMR_HSR1::Miro::Ras; Domain location=1-171::14-128::15-128::15-173
MALPNTQPVDYPSFKLVLVGDGGTGKTTFVKRHISGEFEKRYEPTIGVEVRPLDFTTSHGKLRFYCWDTAGQEKFGGLRDGYYINGQCAIIMFDVTSRLTYKNVPTWHRDISRVCENIPVVLCGNKVDVKNRQVKAKMVTYHRKKNLQYYEISAKSNYNFEKPFLYLARKLAGNMDLRFEAEIALVPADVTIDLAAQKKIEEEITAAASMPLPDEDEDIMD

SEQ ID NO: 105032 - protein, 201 aa, Setaria italica
  Transcript Sequence Number=SeqID_39058
DDGERCGSRGRYADGRHTQEMAYPSSCDQGLHNLGDSKRNLSPHDHGESVQHHLSLRVNPPSPMPMEMSPWDDGYKSPTSPTYRCEDVEQGSRDEDKNETPGWLDSDYDASGISGRDSNFKIEDPVLKTKEDSAYTELVDDFMDAVMKSWRDPNPNIRVDKEADQKLADSRFAELALKRYNKTKQQGKSHSIGAIANLMQL

SEQ ID NO: 105033 - protein, 388 aa, Setaria italica
  Transcript Sequence Number=SeqID_39059
  Gene Ontology: Mol. function=small protein activating enzyme activity; Cellular component=nucleus; Biological process=protein modification process
  Homolog annotation: Hit_ID=B6TJH0; Match level="QueryCoverage=100%, HitCoverage=85%, E-value=0.0, Identity=90%"; Hit description=NEDD8 -activating enzyme E1 catalytic subunit
  Pfam annotation: Domain name=E2_bind; Domain location=284-375; Score =109.6; E_value=1e-29; Accession=PF08825.2; Description=E2 binding domain
  Pfam annotation: Domain name=MoeZ_MoeB; Domain location=213-282; Score=-4.8; E_value=0.0031; Accession=PF05237.5; Description =MoeZMoeB domain
  Pfam annotation: Domain name=ThiF; Domain location=1-127; Score =105.1; E_value=2.4e-28; Accession=PF00899.13; Description=ThiF family
  Pfam annotation: Domain name=UBACT; Domain location=180-246; Score =125.4; E_value=1.8e-34; Accession=PF02134.13; Description=Repeat in ubiquitin-activating (UBA) protein
  Pfam module annotation: Pfam domain module=E2_bind::MoeZ _MoeB::ThiF::UBACT; Domain location=284-375::213-282::1-127::180-246
LALSGFKKLHVIDMDTIDVSNLNRQFLFRVQDVGKSKAEVAAKRVMERVSGVNIVPHFCRIEDKELEFYSQFHIIVLGLDSIEARSYINSVACGFLEYDSNDNPLPETVKPMVDGGTEGFKGHARVIIPGTTPCFECNIWLFPPQVKFPLCTLAETPRTAAHCIEYAHLIKWDEVHSGKPFDADDAEHMQWIYSEALKRAELFGISGVTYSLTQGVVKNIIPAIASTNAIISAACALEAFKLISGCSKSVSNYLTYNGLEGTHIKVTDFVRDKDCLVCGPGTLIELDTSSTLAEFIKMLEEHPKLRISKASVTHEGNNLYMQSPEVLEQMTRPNLSVPMFELLKGVPCATVHATGMAENNGKKVSSLRKLRVAFKGVEASNMDTTESS

SEQ ID NO: 105034 - protein, 238 aa, Setaria italica
  Transcript Sequence Number=SeqID_39060
  Gene Ontology: Mol. function=oxidoreductase activity; Cellular component=extracellular region; Biological process=lignin catabolic process
  Homolog annotation: Hit_ID=Q10ND7; Match level="QueryCoverage=94%, HitCoverage=38%, E-value=1e-112, Identity=84%"; Hit description =Laccase-10
  Pfam annotation: Domain name=Cu-oxidase; Domain location=93-238; Score=162.7; E_value=1.1e-45; Accession=PF00394.14; Description =Multicopper oxidase
  Pfam annotation: Domain name=Cu-oxidase_3; Domain location=1-82; Score=127.9; E_value=3.3e-35; Accession=PF07732.7; Description =Multicopper oxidase
  Pfam module annotation: Pfam domain module=Cu-oxidase::Cu-oxidase_3; Domain location=93-238::1-82
VVSKVVNSVKDNITIHWHGVRQLRTGWSDGPAYVTQCPIRTGQSYVYNFTITGQRGTLFWHAHVSWMRATLYGPIIILPKRGVPYPFPVKPYKEVPIIFGEWFNADPEAIIAQALKTGAGPNISDAFTINGLPGPLYNCSSKDTFKLKVLPGKWYLLRLINAALNDELFFSIANHTLTVVDVDAAYVKPFHTDVVLITPGQTTNVLLRAEPDAGCPAATHLMLARPYGTGQPGTFDNT

SEQ ID NO: 105035 - protein, 80 aa, Setaria italica
  Transcript Sequence Number=SeqID_39061
  Subcellular localization annotation: CTP_CleavageSite=37; ConfidenceScore=5.05e-01
RQSLISSDRSNQSICTTQWKYTKHDKTKTSYLLRRLRQPELSTKNKLSGITTSSIISLMKPSPIRIGSINQRIFKIGNIF

SEQ ID NO: 105036 - protein, 143 aa, Setaria italica
  Transcript Sequence Number=SeqID_39062
  Subcellular localization annotation: CTP_CleavageSite=49; ConfidenceScore=5.49e-01
PERSPPQRASRARRCSWGSRRRRPPDPPRGRARRRCGRARSPPWRRGTRAAPVSLLHCPERRPSATSGGGITLRRGRGSGQQQVRERDAARRAPARSPDSVYANHLPRLRSSLSTTRLVRSAPLLLLGASAPVVATAKPVQPR

SEQ ID NO: 105037 - protein, 422 aa, Setaria italica
  misc_feature (411)..(411): Xaa can be any naturally occurring amino acid
  Transcript Sequence Number=SeqID_39063
  Gene Ontology: Mol. function=4-hydroxyphenylacetaldehyde oxime monooxygenase activity; Cellular component=endoplasmic reticulum membrane; Biological process=oxidation reduction
  Homolog annotation: Hit_ID=O48958; Match level="QueryCoverage=99%, HitCoverage=79%, E-value=1e-155, Identity=60%"; Hit description=4 -hydroxyphenylacetaldehyde oxime monooxygenase
  Pfam annotation: Domain name=p450; Domain location=1-412; Score =161.1; E_value=3.3e-45; Accession=PF00067.14; Description=Cytochrome P450
QAREVLKTHDAACCTRPDTPGARRLSYGYKDVAFTPYSDCWREMRKLIVVELLNARRVQATWPAREAEVDKLIGRLTSGGRRPVYLEDHIFTLMDGIVGTVALGSIYGSEQFAHKKHFHDLFDEAMAVKSSFSAEDYFPNVLGRLVDHLTGLVSRREKVFWELDTFFDKIIDTHLQPSRPTPDNGPGFIDILIGLTKEHEGTFSWFTRDHIKGMLSDTFIGGVDTNSVTVVWAMAELIRNPEVLKKAQDEIRGAMGNKERVEPDDLPKLKYLKMVIKETLRLHPVAPLLAPRETMRHIKICGYDVPAKTRIFVNVWAIGRDPAIWSNPKEFDPDRFEGNDVDFNGAHFELLPFGAGRRMCPGVTMGVAIVEFTLANLLHCFEWELPDGMTAEDVSMEEAGGLTVNKKVPLXLVPTRYKWQRS

SEQ ID NO: 105038 - protein, 220 aa, Setaria italica
  misc_feature (59)..(59): Xaa can be any naturally occurring amino acid
  Transcript Sequence Number=SeqID_39064
  Gene Ontology: Mol. function=transferase activity, transferring glycosyl groups; Biological process=queuosine biosynthetic process
  Homolog annotation: Hit_ID=B9SK81; Match level="QueryCoverage=88%, HitCoverage=47%, E-value=4e-70, Identity=64%"; Hit description =Queuine tRNA-ribosyltransferase, putative
  Pfam annotation: Domain name=TGT; Domain location=1-209; Score=20.5; E_value=1.7e-12; Accession=PF01702.10; Description=Queuine tRNA -ribosyltransferase
DAAAGANSFGFIVGGSSIEQRRLCATEVAKRNVSGFWIGGFGLGDDIEERCSLLNAVTXCLPPEKPRLVSRLGLPEEVLEGVAAGIDLFDSTYIYQLTMGGFALIFPVDMVGREMQNGLFNNDGGDSTKINLRATTYRKDTSRLVDSCSCFTCQNHTRAYLNHLLNVHEMLAQILLEIHNTHHYLRFFRSIREAINVGEFDVFRQQFVKKRRAHITAAVL

SEQ ID NO: 105039 - protein, 85 aa, Setaria italica
  Transcript Sequence Number=SeqID_39065
ESSYRGDTRLHVENPFNVKGKNHGHQPATISLSQEYRVTRLWRLTRESDNLSLFSRLYSRYRTQASGDGPLLCQKPGLFPRVNLE

SEQ ID NO: 105040 - protein, 115 aa, Setaria italica
  Transcript Sequence Number=SeqID_39066
  Gene Ontology: Mol. function=nutrient reservoir activity
  Homolog annotation: Hit_ID=A6N4D4; Match level="QueryCoverage=100%, HitCoverage=61%, E-value=1e-32, Identity=71%"; Hit description=27 kDa pennisetin
  Subcellular localization annotation: CTP_CleavageSite=48; ConfidenceScore=5.31e-01
NIFNQMALANPITAAYWQQQQFLPNVFNQLALTSPITHWQQQQLLSSVFNQVASVNPITTTYWQQQRLLPNVFNQLALTSPIAHWQQQQLVSSVFNQVALANPYLQQPFIGGAIF

SEQ ID NO: 105041 - protein, 131 aa, Setaria italica
  Transcript Sequence Number=SeqID_39067
  Homolog annotation: Hit_ID=A6N4D4; Match level="QueryCoverage=58%, HitCoverage=43%, E-value=3e-18, Identity=68%"; Hit description=27 kDa pennisetin
  Subcellular localization annotation: CTP_CleavageSite=49; ConfidenceScore=5.39e-01
HNISTKWPLANPITAAYWQQQQFLPNVFNQLALTSPITHWQQQQLLSSVFNQVASVNPITTTYWQQQRLLPNVFNQHARYQLLLLYKLIHHLEDGTTNEGLLQVGVCQSHLVEHARYQLLLLPVGDRTRQS

SEQ ID NO: 105042 - protein, 54 aa, Setaria italica
  misc_feature (44)..(54): Xaa can be any naturally occurring amino acid
  Transcript Sequence Number=SeqID_39068
LVVSCFLQITMYFWLLLVILHINLLSAKPHITITVNDTHWCTFXXXXXXXXXXX

SEQ ID NO: 105043 - protein, 362 aa, Setaria italica
  Transcript Sequence Number=SeqID_39069
  Gene Ontology: Mol. function=metal ion binding; Cellular component =vacuole; Biological process=lipid catabolic process
  Homolog annotation: Hit_ID=Q8W5R2; Match level="QueryCoverage=91%, HitCoverage=35%, E-value=1e-77, Identity=49%"; Hit description=Shoot gravitropism 2
RKEEEMDDYCSQVPVGHLVFMVHGIGQRLEKANLVDDVVDFRRVTANLAERYLTSYQRSTQRVLFIPCQWRKGLKLSGEHTVEKLTLDGVKGLRVALGATVHDVLYYMSPIYCQHIIDSVSNQLNKLYMKFLKRNPGYSGKVSLYGHSLGSVLSYDILCHQESLWAPFPTEYLNMEYASDRSQGAKSANEVAAHDSVTEDHGTSTLRHSCAVSVNGAVDEDSTRTDSSHMDGVLPSCVLENSPDNDDTVVSPGAVDAEQNEEENKVENHQTIYTEEGTTSVVSTKDAEGSSVSRSAEEVHEEILEKDKLIVSLEEEVKHLKARLEQLEQQNHVLTKSINGVEHHEGKSANQAMNSVKLFTVV

SEQ ID NO: 105044 - protein, 316 aa, Setaria italica
  Transcript Sequence Number=SeqID_39070
  Gene Ontology: Mol. function=metal ion binding; Cellular component =vacuole; Biological process=Golgi organization and biogenesis
  Homolog annotation: Hit_ID=Q8W5R2; Match level="QueryCoverage=87%, HitCoverage=30%, E-value=2e-83, Identity=52%"; Hit description=Shoot gravitropism 2
  Pfam annotation: Domain name=DDHD; Domain location=56-254; Score =125.7; E_value=1.5e-34; Accession=PF02862.9; Description=DDHD domain
RLEQLEQQNHVLTKSINGVEHHEGKSANQAMNSVKLFTAQGSTNQSYSPQIRYTKLNFKVDTFFAVGSPLGVFLSLRNVRIGIGKGQGYWQDENIIEEMPCCRQMFNIFHPFDPVAYRVEPLVCEDYLKKRPVIVPYHRGGKRIHVGVQEFTEDIAARSQAIARQLKSLKVKAVAAMLALSRNDTEEDCVSANEKERSYGSMMMERLTGSPDGRIDHVLQEKTFQHSYLSALGAHTNYWRDHDTALFILRHLYRDIPEEPPENEIERVPIKLFYERDPFVEETPLTFADEALVKEFSRKVRTCSRRKENDANCETS

SEQ ID NO: 105045 - protein, 463 aa, Setaria italica
  Transcript Sequence Number=SeqID_39071
  Subcellular localization annotation: CTP_CleavageSite=36; ConfidenceScore=5.08e-01
MNLARVSIPPARLSHSPPLTLSPLGPKWMHRMTTTRAQRDLSGEIENDFLGLKEMGGSNCEDHSEYGGRIRMSDVLEETSIFHDGFGTMIPKRSFDRRYRNWVPESAPVSPSIGCIRSLNLVPVRRSLVGSFEESLLSGRYSCGKDNQSIDGFLAILNVTGGNFSPPTQKLPFTVTSIDEDSSLLYYSSIDLAGRLPTNNSKSPKLKRSLSNSDSRSAKSRLRIPVKGRIQLLVSNPEKTPLHTFFCAYDLSDMPAGSKTFMRQKMTLSSASPSYLTKEGSKASDVKVESVQCGSELRERGALFSEFSEKGHNCYPIDESENGGYSNTGCCSMECDVIVNSENVANAGGCCCQIDTSLSGGNKSCCRSSKVNDISAGGVLRYALHLRFLSPFSKKPSRSRQQCKSDLSSEPHSRSTQTEEERRFYLYNDIRVVFPQRHSDADEGELRVEHDFPANPKYFDISN

SEQ ID NO: 105046 - protein, 52 aa, Setaria italica
  Transcript Sequence Number=SeqID_39072
KLQPFFNSADNHITWRVLIYVFYNDTGNITKPTIDLVRALESPLISMHHFIF

SEQ ID NO: 105047 - protein, 104 aa, Setaria italica
  Transcript Sequence Number=SeqID_39073
  Pfam annotation: Domain name=RRM_1; Domain location=9-81; Score=13.2; E_value=0.012; Accession=PF00076.14; Description=RNA recognition motif. (a.k.a. RRM, RBD, o
NIVKEERALFVISFDGYPLTRDELYDFFSWFGVIEEITIEEPSITPDLHWALITFQSTYAVISVLNEDKMFHYVINGKDVWVQRYVEAKGRHFTTNAKDLVNLE

SEQ ID NO: 105048 - protein, 73 aa, Setaria italica
  Transcript Sequence Number=SeqID_39074
FGIREFAPVRIEKRVGVCSKVQGYNNLSQPGNIIFCFFTKINSLARNYLVANGMIVILLVIWTWVVFIYLRTK

SEQ ID NO: 105049 - protein, 80 aa, Setaria italica
  Transcript Sequence Number=SeqID_39075
PVNNVLGVCCKKAVRHSDFLDLLHIPKYTDLVMHVRNQMCFELHLKNHNAWTPQPGSSLKLADKWGSCSISFREKSSLCS

SEQ ID NO: 105050 - protein, 140 aa, Setaria italica
  Transcript Sequence Number=SeqID_39076
  Gene Ontology: Mol. function=transporter activity; Cellular component= membrane; Biological process=transport
  Homolog annotation: Hit_ID=Q6JN48; Match level="QueryCoverage=98%, HitCoverage=12%, E-value=3e-12, Identity=33%"; Hit description =Ethylene insensitive 2
AVALISCASITFALILAVNPLKSACTEAEELLSSVRSQRENLDKARQSEAASLKHSKSAFEHTSHSKSALEHDGNSGTSIQSTAHIINPEAQPSPSINCEETKSAVVDWTQPMSKVCTATIVELSTPENLIVNSLSKKDA

SEQ ID NO: 105051 - protein, 173 aa, Setaria italica
  misc_feature (125)..(125): Xaa can be any naturally occurring amino acid
  Transcript Sequence Number=SeqID_39077
  Homolog annotation: Hit_ID=Q9LNS7; Match level="QueryCoverage=50%, HitCoverage=12%, E-value=5e-16, Identity=52%"; Hit description =T20H2.23 protein
  Subcellular localization annotation: CTP_CleavageSite=40; ConfidenceScore=5.73e-01
MSSSSSALAKGKSAIGSSSGSAKFEAKGKSSSAAAAATKRATTTAARGRGKAVKKVYSLPGQKFDPPEEREPLRIFYESLSKQIPSSEMAEFWLMEHGLLSPERAKKAYERKQKRQQQVRMGTPXIKPSGSKDRPESSKKPVASSNMDSKAKKRVYYSNDDDEFIVKMKRSRG

SEQ ID NO: 105052 - protein, 295 aa, Setaria italica
  Transcript Sequence Number=SeqID_39078
  Gene Ontology: Mol. function=transporter activity; Cellular component= mitochondrial membrane; Biological process=transport
  Homolog annotation: Hit_ID=B9T601; Match level="QueryCoverage=98%, HitCoverage=52%, E-value=1e-107, Identity=67%"; Hit description =Inner membrane transport protein yjjL, putative
SVLGLLFAPPIIQNLGWESVFYIFGLLGIIWCVGFDSLKGQQLGNNEGLFNLGKSSTVSDGLVSSTVSSESSDPSLEDLQNSLKDVPWRAFFKSKAVWAMIYAHFCGNWGHYTCLSWLPTFFSEELNLSLTEAAWVSILPPLGSMVVTSIVAPFADNLISNGVDTTKVRKICQTISFVSPAIFLMLSSMDLGLPPWEIVAFLTIGLSLSNFALSGLYCTHQDISREYASILLGITTTIGSVPGIVGIALTGYLLDSTHSWSVSLFAPAIFFYLTGTAVWLAFASSEPQDFAKSER

SEQ ID NO: 105053 - protein, 72 aa, Setaria italica
  Transcript Sequence Number=SeqID_39079
LSHPKSKSDIAYMHFNHLNENYAVVKSNLHFGNFFQTSLTGWETGPGPIRFFQSCHFWASTHAPYFWQACMA

SEQ ID NO: 105054 - protein, 58 aa, Setaria italica
  Transcript Sequence Number=SeqID_39080
RTSCRRRLLMGRLVVSNCSRVMRRRRNRHRRHLHHDIIIGFISADDQCHHKFLLAAHP

SEQ ID NO: 105055 - protein, 101 aa, Setaria italica
  misc_feature (77)..(77): Xaa can be any naturally occurring amino acid
  Transcript Sequence Number=SeqID_39081
  Gene Ontology: Mol. function=RNA-directed DNA polymerase activity; Cellular component=chromatin; Biological process=RNA-dependent DNA replication
  Homolog annotation: Hit_ID=Q2QVE8; Match level="QueryCoverage=100%, HitCoverage=19%, E-value=2e-21, Identity=48%"; Hit description =Retrotransposon protein, putative, unclassified
PVLQYADDTLILLKADQDGLVALKQVLDLFCEATGLHINFNKSTMVPMNTSSSTTTALQSILGCQLGSFPQTYLPTXGLPLSHEKLRLSVFSPLITRADRH

SEQ ID NO: 105056 - protein, 32 aa, Setaria italica
  Transcript Sequence Number=SeqID_39082
MQAFQVTVRNKKRVGYNYELSLRFRGEWLIKR

SEQ ID NO: 105057 - protein, 197 aa, Setaria italica
  Transcript Sequence Number=SeqID_39083
  Gene Ontology: Mol. function=chaperone activator activity; Cellular component=cytoplasm
  Homolog annotation: Hit_ID=Q012W8; Match level="QueryCoverage=73%, HitCoverage=72%, E-value=5e-11, Identity=30%"; Hit description=[S] KOG2936 Uncharacterized conserved protein
  Pfam annotation: Domain name=Aha1_N; Domain location=61-197; Score =115.9; E_value=1.4e-31; Accession=PF09229.3; Description=Activator of Hsp90 ATPase, N-terminal
MEDTAAAEKAEKASSYRYWVREATGDATPIPVPRKLDPAATGNGNPPPLGSVWNQAGTWEEKNLNSWANSRIKDLLGSLDSLEFPTGKASIDEVSKCSGDAFQVTVRNKKRVGYNYELSLRFRGEWLIKEENKKVKGHLDIPEFSFGELDDLELQVRFSDDKGLASDDKTRICKDLKSFLTPIQEKMRMFEEELKGR

SEQ ID NO: 105058 - protein, 58 aa, Setaria italica
  Transcript Sequence Number=SeqID_39084
QLQRLLHCLKISISCCVLLDSTLPWLCWPSVLLGIVVFQLSFSHVTTLLRALVAVAAF

SEQ ID NO: 105059 - protein, 180 aa, Setaria italica
  misc_feature (82)..(82): Xaa can be any naturally occurring amino acid
  Transcript Sequence Number=SeqID_39085
  Gene Ontology: Mol. function=microtubule motor activity; Cellular component=microtubule associated complex; Biological process =microtubule-based movement
  Homolog annotation: Hit_ID=Q6YZ52; Match level="QueryCoverage=100%, HitCoverage=34%, E-value=4e-96, Identity=94%"; Hit description =Kinesin motor protein 1-like
  Pfam annotation: Domain name=Kinesin; Domain location=1-175; Score =70.6; E_value=2.9e-20; Accession=PF00225.15; Description=Kinesin motor domain
AGQNLRIREDPQGTFVEGIKEEVVLSPAHALSLIAAGEEHRHVGSTNFNLLSSRSHTIFTLTIESSPCGESNEGEAVTFSQXGSESSRAETTGVRRKEGSYINKSLLTLGTVISKLTDGKATHIPYRDSKLTRLLQSSLSGQGRVSLICTVTPASSNSEETHNTLKFAHRAKRIEIQASQ

SEQ ID NO: 105060 - protein, 92 aa, Setaria italica
  Transcript Sequence Number=SeqID_39086
  Gene Ontology: Mol. function=microtubule motor activity; Cellular component=microtubule associated complex; Biological process =microtubule-based movement
  Homolog annotation: Hit_ID=B8Q8B2; Match level="QueryCoverage=65%, HitCoverage=10%, E-value=3e-23, Identity=93%"; Hit description=SKIP interacting protein 26 (Fragment)
FLRFTFFITALPYSVIILTFDYLFQFFGHYDHQSIEIDELKQKVSELIEIKAQLEDRNQKLLEESTYAKGLASAAGVELKALSEEVTKLMNQ

SEQ ID NO: 105061 - protein, 982 aa, Setaria italica
  misc_feature (536)..(536): Xaa can be any naturally occurring amino acid
  Transcript Sequence Number=SeqID_39087
  Gene Ontology: Mol. function=microtubule motor activity; Cellular component=microtubule associated complex; Biological process =microtubule-based movement
  Homolog annotation: Hit_ID=B9SWK1; Match level="QueryCoverage=94%, HitCoverage=92%, E-value=0.0, Identity=67%"; Hit description=Kinesin heavy chain, putative
  Pfam annotation: Domain name=Kinesin; Domain location=65-379; Score =527.7; E_value=1.5e-155; Accession=PF00225.15; Description=Kinesin motor domain
  Subcellular localization annotation: CTP_CleavageSite=29; ConfidenceScore=5.40e-01
TDGRRKGSHQQQQQPQPGSPTSTTTTTTSSSRLTPELSLDGPASPLFAGLDEDPAPKENVTVTVRFRPLSPREIRQGEEVAWYADGDTVVRSEQNPNVAYAYDRVFAPTTTTRHVYDVAAQHVVSGSMEGVNGTIFAYGVTSSGKTHTMHGDQRSPGIIPLAVKDAFSIIQETLNREFLLRVSYLEIYNEVVHDLLNPAGQNLRIREDPQGTFVEGIKEEVVLSPAHALSLIAAGEEHRHVGSTNFNLLSSRSHTIFTLTIESSPCGESNEGEAVTFSQLNLIDLAGSESSRAETTGVRRKEGSYINKSLLTLGTVISKLTDGKATHIPYRDSKLTRLLQSSLSGQGRVSLICTVTPASSNSEETHNTLKFAHRAKRIEIQASQNKIIDEKSLIKKYQTEIRRLKEELEQLKMGIITGTPSKDTGEDNIILWKQKLEDGNVKLQSRLEQEEEAKAALLARIQRLTKLILVSTKATQTSRFSPHPGPRRRHSFGEEELAYLPYRRRDIMMDNESNELLLPVEGFGVSLEDSSKEEKXNRKGLLNWFKLRKRDGASILTSSEGDKSSLTKSTAPSTPIGESVNFRAEPRISNSLAGENVSADLFIIGHGEFPSGSIHGEEIALTSGKTMDHVDLLREQLKILSGEVALQTSVLKRLTEEAGRSPLSENIQMEMKKISDEIKGKKRQIASLEREIAHATLGSQGKADKLELSPSYPELLEQLNEKSFELEVKAADNRVIQDQLNEKINECMGLQAEVTHLKEQLSQALEAKDLLSNSMVQNNRVVNHEVERHADQDSAVPREVSSELLQKQQQSIEIDELKQKVSELIEIKAQLEDRNQKLLEESTYAKGLASAAGVELKALSEEVTKLMNQNEKLATELASLRSPTPRRVTNGPRGGRRESMSRRHEPASRRDTNASHEREKALENMLMEKEQKEAELQRKVEESKQKEAFLESELANMWVLVAKLKKSQGYEHEDSEAKHDVS

SEQ ID NO: 105062 - protein, 55 aa, Setaria italica
  Transcript Sequence Number=SeqID_39088
NFLFTRHFFLLATSSRIEILNYYNCPFYYTAIEHSRIERLFLTFLKEFLTRVKQN

SEQ ID NO: 105063 - protein, 58 aa, Setaria italica
  Transcript Sequence Number=SeqID_39089
TSSPAPPRELAVYVNGVRTANSTGRAQGYRMSGALGAAHVAGLSLPVGKEFELKVVMS

SEQ ID NO: 105064 - protein, 56 aa, Setaria italica
  Transcript Sequence Number=SeqID_39090
YRYVSFCLQLVDFNQTCKSHIFICAVFLFRVLLKSACEVLLEFIFLAEAVITSEAF

SEQ ID NO: 105065 - protein, 405 aa, Setaria italica
  Transcript Sequence Number=SeqID_39091
  Gene Ontology: Mol. function=transferase activity, transferring glycosyl groups; Cellular component=integral to membrane; Biological process=protein amino acid glycosylation
  Homolog annotation: Hit_ID=A8MRC7; Match level="QueryCoverage=95%, HitCoverage=98%, E-value=1e-169, Identity=69%"; Hit description =Probable beta-1,3-galactosyltransferase 2
  Pfam annotation: Domain name=Galactosyl_T; Domain location=150-348; Score=242.7; E_value=9.2e-70; Accession=PF01762.13; Description =Galactosyltransferase
MSFNKSRGGGNGGGGGDELVLRGSISKKWTFLLCLGSFCIGLLFTNRMWTMPEPKEIIRRSTLEVEKMNLVAGDCAPNSIGDAKHVPGEVPRTQDVIQTLDKTISNLEMELASAKATQESMLNVAPTPESTGKRKYFMVIGINTAFSSRKRRDSVRATWMPQGEKRRKMEEEKGIIIRFVIGHSATSGGILDRAIDAEDRKHGDFMRLDHVEGYLELAAKTKAYFVAAVSMWDAEYYIKVDDDVHVNIATLGNTLSRHRSKPRVYVGCMKSGPVLAQKGVRYHEPEYWKFGEWGNKYFRHATGQLYAISKDLASYIALNQHVLHKYANEDVSLGAWFIGLDVEHVDDRRLCCGTPPDCEWKAQAGNVCVASFDWSCSGICKSADRIKEVHQRCGESENAIWNAKF

SEQ ID NO: 105066 - protein, 156 aa, Setaria italica
  misc_feature (64)..(64): Xaa can be any naturally occurring amino acid
  Transcript Sequence Number=SeqID_39092
  Gene Ontology: Mol. function=protein serine/threonine kinase activity; Biological process=protein amino acid phosphorylation
  Homolog annotation: Hit_ID=Q84NG8; Match level="QueryCoverage=75%, HitCoverage=11%, E-value=5e-24, Identity=51%"; Hit description =Putative receptor kinase
YEPNELCRWNGIACNDRRHPGRVTAIRLRGSDLGGTISPHIEYGSGYGVSTDGDIYSYGVLLLXMLTGKRPTDSFDHGTSLVSYVKMAYPNKLLEILDVSATYSGNTQDVIDLVIHPMFGIALACCQDSPRQRIKMDYVVEELKAIKKACAALMGS

SEQ ID NO: 105067 - protein, 32 aa, Setaria italica
  Transcript Sequence Number=SeqID_39093
LPTFKNQAIFTYGSSFLVSLEELEKLAALGDE

SEQ ID NO: 105068 - protein, 140 aa, Setaria italica
  misc_feature (87)..(87): Xaa can be any naturally occurring amino acid
  misc_feature (97)..(97): Xaa can be any naturally occurring amino acid
  Transcript Sequence Number=SeqID_39094
  Gene Ontology: Mol. function=methyltransferase activity
  Homolog annotation: Hit_ID=Q5Z494; Match level="QueryCoverage=75%, HitCoverage=28%, E-value=3e-16, Identity=43%"; Hit description =Putative S-adenosyl-L-methionine
  Pfam annotation: Domain name=Methyltransf_7; Domain location=1-129; Score=-207.5; E_value=0.017; Accession=PF03492.7; Description=SAM dependent carboxyl methyltransferase
MATKQQRLCVNQADGEAGYARNSAPQGLISREMLDSFYVPMYGPSDMELREIIQDEGSFEINKMHVHEPEKSLIAPNTMAHAVRAVXFEPMIVQHFXLSSDVMDEFVRTLEQHLNPGSLHHTFLLGDRCPYSVVRNCLKV

SEQ ID NO: 105069 - protein, 284 aa, Setaria italica
  Transcript Sequence Number=SeqID_39095
  Gene Ontology: Mol. function=methyltransferase activity
  Homolog annotation: Hit_ID=Q5Z494; Match level="QueryCoverage=99%, HitCoverage=76%, E-value=1e-57, Identity=42%"; Hit description =Putative S-adenosyl-L-methionine
  Pfam annotation: Domain name=Methyltransf_7; Domain location=2-283; Score=183.8; E_value=4.9e-52; Accession=PF03492.7; Description=SAM dependent carboxyl methyltransferase
TAVDAVLRHHAAQHDQAPPELRVLLNDLPDNDFNDVAKRLVSFQQSAQSSGLVLTAGIVPGSFYKRLFPNSFLDLVVSSYTLHWISEAPEDLKNNMIPLYDEDEGLRRARRPLVIRAYREQYRKDFSLFLKSRAQELVPGGRMVVSMLGSRPYQCIAPWDTIIIPLNDMASRGLISREMLDSFYVPMYGPSDMELREIIQDEGSFEINKMHVHEPEKSLIAPNTMAHAVRAVFEPMIVQHFGLSSDVMDEFVRTLEQHLNPGSLHHTFLLGDRVLVSVSLTKRF

SEQ ID NO: 105070 - protein, 183 aa, Setaria italica
  Transcript Sequence Number=SeqID_39096
  Gene Ontology: Mol. function=methyltransferase activity
  Homolog annotation: Hit_ID=Q5Z494; Match level="QueryCoverage=95%, HitCoverage=50%, E-value=3e-24, Identity=38%"; Hit description =Putative S-adenosyl-L-methionine
  Pfam annotation: Domain name=Methyltransf_7; Domain location=37-182; Score=-98.0; E_value=3.2e-09; Accession=PF03492.7; Description=SAM dependent carboxyl methyltransferase
MATKQQRLCVNQADGEAGYARNSAPQSAAQNWIKPVIEEALIGLLNLKPTGVPSSMVIADLGCSTGPNALALVSTAVDAVLRHHAAQHDQAPPELRVLLNDLPDNDFNDVAKRLVSFQQSAQSSGLVLTAGIVPGSFYKRLFPNSFLDLVVSSYTLHWISEVNKQCKLCVYQLDKCMFETIKF

SEQ ID NO: 105071 - protein, 56 aa, Setaria italica
  Transcript Sequence Number=SeqID_39097
LLKLNFQAITYNTVWASVIDDIRDGCGNYPNSNAIRITKLLVVHKHSIYSMIQRVT

SEQ ID NO: 105072 - protein, 230 aa, Setaria italica
  misc_feature (146)..(146): Xaa can be any naturally occurring amino acid
  Transcript Sequence Number=SeqID_39098
  Gene Ontology: Mol. function=methyltransferase activity
  Homolog annotation: Hit_ID=Q5Z494; Match level="QueryCoverage=93%, HitCoverage=66%, E-value=7e-37, Identity=38%"; Hit description =Putative S-adenosyl-L-methionine
  Pfam annotation: Domain name=Methyltransf_7; Domain location=22-230; Score=41.1; E_value=9.6e-18; Accession=PF03492.7; Description=SAM dependent carboxyl methyltransferase
EAGYARNSAPQSAAQNWIKPVIEEALIGLLNLKPTGVPSSMVIADLGCSTGPNALALVSTAVDAVLRHHAAQHDQAPPELRVLLNDLPDNDFNDVAKRLVSFQQSAQSSGLVLTAGIVPGSFYKRLFPNSFLDLVVSSYTLHWISXDEGLRRARRPLVIRAYREQYRKDFSLFLKSRAQELVPGGRMVVSMLGSRPYQCIAPWDTIIIPLNDMASRVNFLHHTFFFCSIP

SEQ ID NO: 105073 - protein, 98 aa, Setaria italica
  Transcript Sequence Number=SeqID_39099
  Gene Ontology: Mol. function=nucleic acid binding; Cellular component= cytoplasm; Biological process=multicellular organismal development
  Homolog annotation: Hit_ID=Q69UP6; Match level="QueryCoverage=87%, HitCoverage=7%, E-value=2e-22, Identity=61%"; Hit description =Protein argonaute 18
CVGRLVPLIPAWLRDDNKFTADGLQSLTYNLCYMYSNCTRSVSIAPPAYYAHKLAFRARFYVNQGSDVASSSNLSARAAGPNPLPQIKDELKRSMFYC

SEQ ID NO: 105074 - protein, 49 aa, Setaria italica
  Transcript Sequence Number=SeqID_39100
NWLLQHHNLSIKVKSEYAYSLYNNPHGLAGHLEVQVNIDDEIGNRPNSW

SEQ ID NO: 105075 - protein, 271 aa, Setaria italica
  Transcript Sequence Number=SeqID_39101
  Gene Ontology: Mol. function=DNA-dependent ATPase activity; Cellular component=nucleus; Biological process=DNA metabolic process
  Homolog annotation: Hit_ID=B6TBD6; Match level="QueryCoverage=98%, HitCoverage=91%, E-value=4e-99, Identity=68%"; Hit description=DNA repair protein RAD51
  Pfam annotation: Domain name=Rad51; Domain location=13-257; Score= -68.8; E_value=6.4e-06; Accession=PF08423.3; Description=Rad51
IQDKEMMSQDQPSTEDRCGRFWNGMELLKDVTEKKHLLPTGLEGIDTLLGGGLRRGHLTEVTGPSSSGKTQVCLHSASLVAAKHLGVVMYLDTSNSFSPSRVATIIDGTPDLFGHKAKGCEIEDVMRSIICESVFDIFALFEVLNQLEISLSNDKVNNGGSKICLLIIDSISSLLAPIIGGKYPQGRSMMISVAMILKKLADEHNLSVLVTNHMVSAGNGAVKPALGESWKAVPHVRLVISRECRSNICTATVLKHTLLASGSTVKFTVPS

SEQ ID NO: 105076 - protein, 100 aa, Setaria italica
  Transcript Sequence Number=SeqID_39102
NNAGIDLHKLLVSPAKRWRSISTKGAPTTRWMKPTTNWRRIEGDLHTLSSQDKCQFQNQVAKSCMHSIIASYHITIVTINCSVCNIMTVRYDFMLSMSAM

SEQ ID NO: 105077 - protein, 212 aa, Setaria italica
  misc_feature (116)..(116): Xaa can be any naturally occurring amino acid
  misc_feature (135)..(135): Xaa can be any naturally occurring amino acid
  Transcript Sequence Number=SeqID_39103
  Gene Ontology: Mol. function=RNA-directed DNA polymerase activity; Cellular component=nucleus; Biological process=RNA-dependent DNA replication
  Homolog annotation: Hit_ID=Q2QQV8; Match level="QueryCoverage=98%, HitCoverage=12%, E-value=1e-56, Identity=52%"; Hit description =Retrotransposon protein, putative, unclassified
HQFVLRVLLGEDDPSSINNTCIVLIPKVGQPEELGQFRPISLCNVIYKIGSKVLANRLRRILPEIIAEEQSAFIPGRLTTDNIITTYECMHFMKKKRAQDSRCCALKLDMRKDYDXVEWGYLQSVMIRLGFHRIXMESIMRMVTTVSFSVLFNGERMEGFKPSRGMCQGDPISPYLFLLVAEGLSWLLKSRVQSAQLNGIKVAPSAPVVSHL

SEQ ID NO: 105078 - protein, 229 aa, Setaria italica
  Transcript Sequence Number=SeqID_39104
  Gene Ontology: Mol. function=nucleic acid binding
WRYSLLECNMFRCVWALEHNAITEVLGQAQNQDARGWLKEVMEVLPHDKLIRVVMRLWAVWHARRKAIHENMFQSLLLIHCFVGTVYNRIGDVEIKPKVTTTTGIDSDSEVDTPPHGFAKINVDAAISKNSNTVAVAAVARSAIGAFVGALAVVLKRVTDAKTEEVLACKEGLALASDLLIQEFRLARDCASVVKNLQGAGMGTYGQIIREINAGRGRFEAVEVVNESR

SEQ ID NO: 105079 - protein, 55 aa, Setaria italica
  Transcript Sequence Number=SeqID_39105
HCLYFTVLCVRVVLQATGRHDIMQSYFMAHDAKQKAPIFIISMQFSRWHSHQNTR

SEQ ID NO: 105080 - protein, 193 aa, Setaria italica
  Transcript Sequence Number=SeqID_39106
  Subcellular localization annotation: CTP_CleavageSite=28; ConfidenceScore=5.38e-01
TNTQQAPFSVEVPGYDGSNQQRSTQPTPGSGSSSVAPLGPPPAVTSIGHGHGLGGHVIQQTVPPATPSSPYPPTATSVRPRALSIASYIAAASYRAEDREPHGISRARAANVQNNNIIPSQDIASGFADQPYPHSWGQDTRWRVWRPSAEPGTSSQHNQENSSFPTGISTSGLPPEFLAYLQSRPSDRRHPFL

SEQ ID NO: 105081 - protein, 116 aa, Setaria italica
  Transcript Sequence Number=SeqID_39107
SRYHAKNIADNSERRHKRTRRSRLPHQPFPGWSCTHQQAIDKDADAERCCRHPPFTCPACLLQASSSPRRRGRSAAPHTGESVPTSPPPPLEFLASTAAAAALGATTVARLESGLR

SEQ ID NO: 105082 - protein, 427 aa, Setaria italica
  misc_feature (338)..(338): Xaa can be any naturally occurring amino acid
  Transcript Sequence Number=SeqID_39108
  Gene Ontology: Cellular component=integral to membrane
  Homolog annotation: Hit_ID=B9SEZ5; Match level="QueryCoverage=96%, HitCoverage=63%, E-value=0.0, Identity=73%"; Hit description =Endosomal P24A protein, putative
  Pfam annotation: Domain name=EMP70; Domain location=3-427; Score =509.6; E_value=4e-150; Accession=PF02990.8; Description=Endomembrane protein 70
  Pfam annotation: Domain name=IspA; Domain location=238-351; Score= -98.7; E_value=0.064; Accession=PF04279.7; Description=Intracellular septation protein A
  Pfam module annotation: Pfam domain module=EMP70::IspA; Domain location=3-427::238-351
VNMILDNLPVRRFTEQNGMTIQWTGYPVGYIPEGTSDVYIINHLKFKVLIHKYEGGKVKVVGTGEGMEVISETDSDANSGYEIVGFEVIPCSVKRDPKAMSKLKMYDKVDPVNCPVELEKSQLIKEKEQITFTYEVEFVNSDIRWPSRWDAYLKMEGSKIHWFSIMNSLMVILFLAGIVFVIFLRTVRRDLTRYEELDKEAQAQMNEELSGWKLVVGDVFREPTSSKLLCVMIGDGVQILGMAIVTIFFAAFGFMSPASRGMLLTGMIVLYMLLGIVAGYAAVRLWRTLKGTSEGWRSVSWSTACFFPGIVFIVLTVLNFMLWTRNSTGALPISLFFXFLSLWFCVSVPLTLLGGFFGTRAEPIEFPVRTNQIPREIPTKKYSWLFILGAGTLPFGTLFIELFFILSSIWLGRFYYVFGFLLVVLLL

SEQ ID NO: 105083 - protein, 59 aa, Setaria italica
  Transcript Sequence Number=SeqID_39109
LSCNKYAISKRDRKHYKKIKLIYLEPNKKRCCTLKALIREHIFYNRCSMRTSRAYHVDV

SEQ ID NO: 105084 - protein, 83 aa, Setaria italica
  Transcript Sequence Number=SeqID_39110
YRTLLREATAALLNAYYNAPGGPFLYPTTASVIDHMNGALLSSAQRVLIDGARFRRANAGGGGPAGRTRLPCDLAPCAAQPPR

SEQ ID NO: 105085 - protein, 86 aa, Setaria italica
  Transcript Sequence Number=SeqID_39111
EIVGSSDLMIHSIAQADCLRARAAACPPQGARFHDGPLFSQRQPSALEHQHAGVAMPTAVDDAGLLVRRRRLQERKRENPKNLKRK

SEQ ID NO: 105086 - protein, 65 aa, Setaria italica
  Transcript Sequence Number=SeqID_39112
VAQKLLHFVNVFCNYIMYFEIFSVQFAAFWQQQQLVNQLALTSPAAFLQQPIVGLPSSRLLMSCT

SEQ ID NO: 105087 - protein, 68 aa, Setaria italica
  Transcript Sequence Number=SeqID_39113
KMPYPTELKKAMQTEGIFCWTGITHQSCCMKNTASIRYTAMLVLAPPLLVAARIASSLFMACLFYVLE

SEQ ID NO: 105088 - protein, 387 aa, Setaria italica
  Transcript Sequence Number=SeqID_39114
  Gene Ontology: Mol. function=phosphotransferase activity, alcohol group as acceptor; Cellular component=cytoplasm; Biological process =isoprenoid biosynthetic process
  Homolog annotation: Hit_ID=B6UAN3; Match level="QueryCoverage=100%, HitCoverage=96%, E-value=1e-166, Identity=77%"; Hit description =Mevalonate kinase
  Pfam annotation: Domain name=DUF333; Domain location=143-184; Score= -10.9; E_value=0.033; Accession=PF03891.7; Description=Domain of unknown function (DUF333)
  Pfam annotation: Domain name=GHMP_kinases_C; Domain location=288-367; Score=39.3; E_value=1.5e-08; Accession=PF08544.5; Description=GHMP kinases C terminal
  Pfam annotation: Domain name=GHMP_kinases_N; Domain location=132-215; Score=57.0; E_value=7.3e-14; Accession=PF00288.18; Description=GHMP kinases N terminal domain
  Pfam module annotation: Pfam domain module=DUF333::GHMP_kinases _C::GHMP_kinases_N; Domain location=143-184::288-367::132-215
MEVRARAPGKIILAGEHAVVHGSAAVAAAIDLYTTSSLTLLPEGEDGGAGVVELDLRDSCLTFSWPCSRLRGALGEVGGKAGAPTPCSPDELAAIAKLLEGQEIPEAKIWLSSGLSAFLYLYTSIMGCKPGKAVVTSDLPIGAGLGSSAAFCVSMSGAILTAAGAVGIGGDREADEWELFRKDDLELVNQWAFQGEKIIHGKPSGIDNSVSTFGSMIKFKKGEMTNLKSRNPVKMLITDTRVGRNTKALVAGVSERASRHPDAMASVFHAVDSISEELSSIVELAAEDEIAITSKEEKLAELMEMNQGLLQCMGVSHSSIETVLRTTLKYSLVSKLTGAGGGGCVLTLIPTLSASIVLEKVATELESHGFCCFKVEVGGRGLQVCRG

SEQ ID NO: 105089 - protein, 53 aa, Setaria italica
  misc_feature (6)..(6): Xaa can be any naturally occurring amino acid
  Transcript Sequence Number=SeqID_39115
  Gene Ontology: Mol. function=binding; Cellular component=integral to membrane; Biological process=transport
  Homolog annotation: Hit_ID=Q8LDS8; Match level="QueryCoverage=90%, HitCoverage=14%, E-value=1e-12, Identity=66%"; Hit description =Putative mitochondrial carrier protein
  Pfam annotation: Domain name=Mito_carr; Domain location=3-53; Score= -10.9; E_value=0.033; Accession=PF00153.19; Description=Mitochondrial carrier protein
RPSVMXTTRLLLDEDGWRGFYRGFGPRFLNMSLWGTSMIVTYELIKRLSVKSE

SEQ ID NO: 105090 - protein, 212 aa, Setaria italica
  misc_feature (195)..(195): Xaa can be any naturally occurring amino acid
  misc_feature (199)..(199): Xaa can be any naturally occurring amino acid
  Transcript Sequence Number=SeqID_39116
  Gene Ontology: Mol. function=small conjugating protein ligase activity; Biological process=regulation of protein metabolic process
  Homolog annotation: Hit_ID=Q5RLI8; Match level="QueryCoverage=99%, HitCoverage=42%, E-value=3e-75, Identity=64%"; Hit description =Ubiquitin-conjugating enzyme E2
  Pfam annotation: Domain name=UQ_con; Domain location=80-212; Score =73.0; E_value=1.1e-18; Accession=PF00179.18; Description=Ubiquitin -conjugating enzyme
SVLRAANNYVGIPPGVEAVSPQGTSSEMPHQPSQTEIVNGEVHEKYMAFKKFDTVNDHGDHFYSTKVRAVRKPTKAWVKRIQHEWKVLENDLPDTIYVRAYEDRMDLLRAVIVGSAGTPYHDGLFFFDVYFPYRYPTKPPEVSYRSGGLRLNPNLYECGKVCLSLLNTWTGTGCERWIPSDSTMLQVLVSIQALXLNAXYFNEPGYAMYANT

SEQ ID NO: 105091 - protein, 54 aa, Setaria italica
  Transcript Sequence Number=SeqID_39117
ELGHLAVRWHPIISVALFDLVGTTLNNKSINTVSAESRCCFSLTTVRCNCSGSS

SEQ ID NO: 105092 - protein, 274 aa, Setaria italica
  Transcript Sequence Number=SeqID_39118
  Gene Ontology: Mol. function=transporter activity; Cellular component= membrane; Biological process=oligopeptide transport
  Homolog annotation: Hit_ID=Q9ZTX4; Match level="QueryCoverage=89%, HitCoverage=41%, E-value=1e-48, Identity=41%"; Hit description=LeOPT1
  Pfam annotation: Domain name=PTR2; Domain location=1-272; Score= -25.9; E_value=1.6e-05; Accession=PF00854.13; Description=POT family
REMKASYFSWFYGVGNLAVLTSGTLLVWVEEKVSWGLGYGACAASMAVAVAGLAATAPVYRIVPPVGSPLKGACQVLVAVAHKAGVRVPDDAADLYEEVHDKTPLLDEPAREQLEHTDEFRCLDKAAVVTGADLQGASPWRLCTVTQVEELKTLLRLVPIWLTSAVYFVANSQTQTTFVQQGTMTDTRIRIAGGAFSVPAASMTSVMTVSVVVYIALYNRAAAPVARRFLGRAEALTPLQLMGLGHGAVVAAVALAAFAEVRRLASARAGAPPM

SEQ ID NO: 105093 - protein, 289 aa, Setaria italica
  misc_feature (191)..(191): Xaa can be any naturally occurring amino acid
  misc_feature (214)..(214): Xaa can be any naturally occurring amino acid
  misc_feature (243)..(243): Xaa can be any naturally occurring amino acid
  Transcript Sequence Number=SeqID_39119
  Gene Ontology: Mol. function=zinc ion binding
  Homolog annotation: Hit_ID=B6SL08; Match level="QueryCoverage=68%, HitCoverage=57%, E-value=2e-13, Identity=29%"; Hit description =Ubiquitin-protein ligase/ zinc ion binding protein
LDGISSPLLQLSKSEALAKEEPNNHHPSTKEDISELSLQDISKIWGLHPSEFGPGEPGPSTRQPRVAPLTDDEVAKFTCGICLETLPIFDLFHGMPCPHKFCARCMDTYIEGRTRAGEVPIPCPDPACKEEGNGGGVLHPEDCKKSIDFAVFCSWSDQLTENAIPPSLRIYCPNRECRIMLESTCTNKTPXQGVVPGVQQHYVQGVWPVLEHRXVATSTTVLRGRGHAREEARLRAQVEAMPXCRMLVEKNMGCDVMTCRCHTVFCYDCGRSMMPLQDGAELCRCRNVH

SEQ ID NO: 105094 - protein, 125 aa, Setaria italica
  misc_feature (34)..(34): Xaa can be any naturally occurring amino acid
  misc_feature (67)..(67): Xaa can be any naturally occurring amino acid
  misc_feature (96)..(96): Xaa can be any naturally occurring amino acid
  Transcript Sequence Number=SeqID_39120
PTVCIKSLEDGEFYLGKSINGIYCASLFQESQLXDKAEWVLKHDRDIFPILPNLNYDKQCDGPWILXQEFYYWRHEQHSDEDSDPEDNEAIVEEKXEEKFEWDSDNDNVLEPGSRSKDSYIVSFG

SEQ ID NO: 105095 - protein, 56 aa, Setaria italica
  Transcript Sequence Number=SeqID_39121
FRPVFPSQQQQEIPAWKRSKEEFKDEVWRLMTGIAKIVDPLTDKNGFFPYHLFRAQ

SEQ ID NO: 105096 - protein, 114 aa, Setaria italica
  Transcript Sequence Number=SeqID_39122
  Gene Ontology: Mol. function=mismatched DNA binding; Cellular component=membrane; Biological process=mismatch repair
  Homolog annotation: Hit_ID=B9SAN7; Match level="QueryCoverage=97%, HitCoverage=12%, E-value=1e-41, Identity=66%"; Hit description=DNA mismatch repair protein pms2, putative
  Pfam annotation: Domain name=DNA_mis_repair; Domain location=1-99; Score=85.2; E_value=2.3e-22; Accession=PF01119.11; Description=DNA mismatch repair protein, C-terminal domain
GCQVEGFLSKPGPGTGRNSGDRQFFYVNGRPVDMPKVTKLVNELYRSSNAKQYPVAILDFRIPTTSYDVNVAPDKRKIFFSSESIILRSLREAVENLYSPQQCSFSVNRVEDPE

SEQ ID NO: 105097 - protein, 59 aa, Setaria italica
  Transcript Sequence Number=SeqID_39123
ICDVRHSGFQHKSLPSYSLRLMLCLYALFFSRINSLMTNNIWFTFFPLFGKSFWEIMRQ

SEQ ID NO: 105098 - protein, 157 aa, Setaria italica
  Transcript Sequence Number=SeqID_39124
  Gene Ontology: Mol. function=potassium ion transmembrane transporter activity; Cellular component=integral to membrane; Biological process=potassium ion transport
  Homolog annotation: Hit_ID=B6SS13; Match level="QueryCoverage=98%, HitCoverage=18%, E-value=9e-65, Identity=83%"; Hit description =Potassium transporter 10
VQGSSKFNGMSDDFDKDEEQRMSVVRSGSIRMLEEDGPVENTVGPSHAREIQSPSLTPAPAPVVGVKKRVRFVLPAASPKPNVGVQEELQELSDAREAGMAFILGNSHVKAKSGSSFLRRFVINFCYDFLRRNSRGPNYAVTIPHASTLEVGMMYYV

SEQ ID NO: 105099 - protein, 609 aa, Setaria italica
  misc_feature (590)..(590): Xaa can be any naturally occurring amino acid
  Transcript Sequence Number=SeqID_39125
  Gene Ontology: Mol. function=potassium ion transmembrane transporter activity; Cellular component=integral to membrane; Biological process=potassium ion transport
  Homolog annotation: Hit_ID=B6SS13; Match level="QueryCoverage=94%, HitCoverage=70%, E-value=0.0, Identity=86%"; Hit description =Potassium transporter 10
  Pfam annotation: Domain name=K_trans; Domain location=13-608; Score =997.5; E_value=5.4e-297; Accession=PF02705.8; Description=K+ potassium transporter
AAGDDDQLLDAAAAGAAKKAAAENGNAVTLGGRGGGAAASVRRLLERHKVLQRVLLVLALVGTCMVIGDGVLTPAISVFSAVSGLELSMEKEHHKYVELPIACIILVCLFALQHYGTHRVGFIFAPIVITWLLCISMIGVYNIIHWEPTVYRALSPYYMYKFLRKTQRGGWMSLGGILLCVTGSEAMFADLGHFNQLSIQIAFTCMVYPALILAYMGQAAYLCRHHIMESDYRIGFYVSVPEKIRWPVLAIAILAAVVGSQAVITGTFSMIKQCTSLGCFPRVKIVHTSAKVHGQIYIPEINWILMILCLAVTIGFRDTKHLGNASGLAVITVMLVTTCLMSLVIVLCWHKSIFLAIGFIVFFGTIEALYFSAALIKFREGAWVPIVLAFIFMLIMCIWHYGTIKKYEFDVQSKVSINWLLGLSPNLGIVRVRGIGLIHTELETGIPAIFSHFVTNLPAFHQVLIFMCIKNVPIPHVRPEERFLVGRIGPKEYRIYRCIVRYGYHDFHKDDMEFEKELVCSIAEFIRSGSSKFNGMSDDFDKDEEQRMSVVRSGSIRMLEEDGPVENTVGPSHAREIQSPSLTPAPAPVXIKKRVRFVLVYLFLSKFIC

SEQ ID NO: 105100 - protein, 69 aa, Setaria italica
  Transcript Sequence Number=SeqID_39126
ARGGEEIGRSMWCAPILKHRKPYKILASGSQIGLARRPHEAHNLIYPDGPLSCKAQPNYIKKRVKYLGW

SEQ ID NO: 105101 - protein, 47 aa, Setaria italica
  Transcript Sequence Number=SeqID_39127
PVLLGLHRPISNDDHALDRSSWNYTVRLLFSMWCISTTNHLVTSKHL

SEQ ID NO: 105102 - protein, 131 aa, Setaria italica
  Transcript Sequence Number=SeqID_39128
  Gene Ontology: Mol. function=ubiquitin-protein ligase activity; Cellular component=ubiquitin ligase complex; Biological process =ubiquitin-dependent protein catabolic process
  Homolog annotation: Hit_ID=B9R8N3; Match level="QueryCoverage=99%, HitCoverage=19%, E-value=6e-46, Identity=71%"; Hit description =Spotted leaf protein, putative
  Pfam annotation: Domain name=Arm; Domain location=1-31; Score=2.2; E _value=6.4; Accession=PF00514.15; Description=Armadillobeta-catenin -like repeat
  Pfam annotation: Domain name=Arm; Domain location=32-72; Score=25.2; E_value=0.00028; Accession=PF00514.15; Description=Armadillobeta -catenin-like repeat
  Pfam annotation: Domain name=Arm; Domain location=73-113; Score=24.9; E_value=0.00033; Accession=PF00514.15; Description=Armadillobeta -catenin-like repeat
  Pfam module annotation: Pfam domain module=Arm::Arm::Arm; Domain location=1-31::32-72::73-113
DGGSQLLISLVSYPDKKIQENTVTALLNLSIDETNKVLIAKGGAIPLIIEVLKNGSVEGQENSAAALFSLSMIDENKAAIGILGGIAPLVHLLRDGTIRGKKDASTAIFNLILNHPNKFRAIEAGIVTVLL

SEQ ID NO: 105103 - protein, 164 aa, Setaria italica
  Transcript Sequence Number=SeqID_39129
  Gene Ontology: Mol. function=hydrolase activity; Cellular component =chromosome; Biological process=ovarian follicle development
  Homolog annotation: Hit_ID=B6TWI5; Match level="QueryCoverage=100%, HitCoverage=42%, E-value=4e-89, Identity=96%"; Hit description =Meiotic recombination protein SPO11
  Pfam annotation: Domain name=TP6A_N; Domain location=1-43; Score=8.9; E_value=0.00027; Accession=PF04406.6; Description=Type IIB DNA topoisomerase
KHCSKRDIYYMYPSIFVEVAVVDRAINDICILFKCSRHNLNVVPVVKGLVMGWIRFVEGEKKVYCITSVNAAFSIPVSIEAIKDVVSVAHYILVVEKETVFQRLANDKFCERNRCIVITGRGYPDIPTRRFLRHLVEQLHLPAYCLVDSNPYGFDILATYKFGS

SEQ ID NO: 105104 - protein, 300 aa, Setaria italica
  misc_feature (115)..(115): Xaa can be any naturally occurring amino acid
  misc_feature (142)..(142): Xaa can be any naturally occurring amino acid
  misc_feature (162)..(162): Xaa can be any naturally occurring amino acid
  Transcript Sequence Number=SeqID_39130
  Gene Ontology: Mol. function=hydrolase activity; Cellular component =chromosome; Biological process=female gamete generation
  Homolog annotation: Hit_ID=B6TWI5; Match level="QueryCoverage=100%, HitCoverage=72%, E-value=1e-137, Identity=81%"; Hit description =Meiotic recombination protein SPO11
  Pfam annotation: Domain name=TP6A_N; Domain location=1-51; Score =36.3; E_value=1.2e-07; Accession=PF04406.6; Description=Type IIB DNA topoisomerase
VQQLLQQNKHCSKRDIYYMYPSIFVEVAVVDRAINDICILFKCSRHNLNVVPVVKGLVMGWIRFVEGEKKVYCITSVNAAFSIPVSIEAIKDVVSVAHYILVVEKETVFQRLANXFYDITLSPQGRGYPDIPTRRHVLFILXVHFVIPEHAIPVMNSFFPYXFLRHLVEQLHLPAYCLVDSDPYGFDILATYKFGSLQLAYDANLLRVPDIRWLGVFTSDFEDFCLPDCCLLHLSPEDRRKAESILARCYLHKEAPEWRSELEAMLQKGVKFEIEALSASSISFLSDKYIPQKIKQGRHL

SEQ ID NO: 105105 - protein, 143 aa, Setaria italica
  Transcript Sequence Number=SeqID_39131
  Gene Ontology: Mol. function=nucleotide binding; Cellular component =plasma membrane; Biological process=response to stress
  Homolog annotation: Hit_ID=B6SXY0; Match level="QueryCoverage=100%, HitCoverage=24%, E-value=8e-77, Identity=94%"; Hit description=Heat shock 70 kDa protein 1
LNLGIRADGDGFAAIIPRNTTVPARRDMLFTTTHDNQTEALIAVYEGEGERAEDNHLLGYFKIAGIPPAPKGSVEISVCMDIDASNVLRVFAGVVKPQGPAIPPFIEVRMPTLDDGHGWCGQALAKMYGKTLDLAVLPKKLQP

SEQ ID NO: 105106 - protein, 44 aa, Setaria italica
  Transcript Sequence Number=SeqID_39132
VELVPLLTTFRAFLYTSLKSVTIEIDPPCQSYLSYYTDLQFILK

SEQ ID NO: 105107 - protein, 81 aa, Setaria italica
  Transcript Sequence Number=SeqID_39133
  Gene Ontology: Mol. function=phospho-N-acetylmuramoyl-pentapeptide -transferase activity; Cellular component=integral to membrane; Biological process=peptidoglycan biosynthetic process
  Homolog annotation: Hit_ID=B9T2R7; Match level="QueryCoverage=96%, HitCoverage=15%, E-value=1e-10, Identity=48%"; Hit description =Phospho-n-acetylmuramoyl-pentapeptide-transferase, putative
REVGSNSNGVNGAAMITLIFAMLGLLDDISSLATDRNRKIPQWIRFLVQIVAGTYFSIWLGSADILTPYSMKFLVPLPPPL

SEQ ID NO: 105108 - protein, 620 aa, Setaria italica
  misc_feature (32)..(32): Xaa can be any naturally occurring amino acid
  Transcript Sequence Number=SeqID_39134
  Homolog annotation: Hit_ID=Q66LH0; Match level="QueryCoverage=100%, HitCoverage=80%, E-value=0.0, Identity=60%"; Hit description=CENP-C1
EAEKEIRRLNGEVVDEMVMNFDPVVEPKRRSXFAGRKSVRTFKFADADTQDPTEVPASQTETMTGSQLSQDDAHASFAEKNEQSVPPRSGQCAISDVSEKEDSLAEKDGDDLTYVLASLKNLDGSEEEDFLRKILKMRKIEKENVCLHNSVPEDRPRRSNTARKKSMRVPPENPLPQSCQSRVSELEKHLFPGVAGNDKCADLQEDDESEGSPDIVMGEQSLVHDSSDVLVTDETFAASEIDKETPNLGVKAADHVIDPEPNMPDRAGERQAGGSPLGLYTASEYDRETPNLGVKAAEHVLDPEPIMSDHADERQAEGSPLGLYSNTEVAKEKAACSRSDISMVEDNVPIDNPTDMSNNETEVSSPHHLEGSLAEVLARTPVRNVASDGVDQTSHAAEDNIQHLEAVEEDGVIQDKSSHPSEVPLEDIDPVNQPQMHDGNNKKLAADLSNAVSPIKEKKRQAARKGKKKQQSKRSQKVADESNHPLEISQANFDSENQSRMDENIEQQRVVTSSALSPNKAKGQKGAQMRNRTKHLNQRKSLGDAGLAWQSGVRRSTRIRSRPLEHWRGERFVYGRIHDTMATVIGIKAYSPGQDGKKTLKVKSFVPEQYSDLVAESAKY

SEQ ID NO: 105109 - protein, 265 aa, Setaria italica
  Transcript Sequence Number=SeqID_39135
  Gene Ontology: Cellular component=extracellular region; Biological process=cell wall organization and biogenesis
  Homolog annotation: Hit_ID=Q7XT40; Match level="QueryCoverage=92%, HitCoverage=91%, E-value=1e-103, Identity=75%"; Hit description =Expansin-B15
  Pfam annotation: Domain name=DPBB_1; Domain location=71-153; Score =127.2; E_value=5.2e-35; Accession=PF03330.10; Description=Rare lipoprotein A (RlpA)-like double
  Pfam annotation: Domain name=Pollen_allerg_1; Domain location=165 -248; Score=132.5; E_value=1.3e-36; Accession=PF01357.13; Description= Pollen allergen
  Pfam module annotation: Pfam domain module=DPBB_1::Pollen_allerg_1; Domain location=71-153::165-248
MASKVRFFFMAFAALACLLRPGAPVELHRKLSGWSDGACATWYGSPNGAGSDGGACGYQNAVDLPPFSSMIAAGSPSIFQSGKGCGSCYQVRCTGHAACSGTPVTVVLTDECPDGVCLEEPVHFDLSGTAFGAMAKPGQADQLRSAGRLKIQYTRVPCNWKGMEITFGVDTGSNPNYLAVLIEYESGDGDLRSVELMQAGGGRAAWAPMQQSWGAVWRYNSGSALQAPFSIRITSGSGRAVVANNVIPAGWTPGGTYRSVVNFNY

SEQ ID NO: 105110 - protein, 57 aa, Setaria italica
  Transcript Sequence Number=SeqID_39136
RRESFPVNCDYEQIVCKQRRKSHQAFISHYPIFVSLAAGYLQAADEVVGRDSIRSNL

SEQ ID NO: 105111 - protein, 46 aa, Setaria italica
  Transcript Sequence Number=SeqID_39137
STNNCIKLYPISQQRHSNSRIESGQYDCSLIVSISCIITVTDNRML

SEQ ID NO: 105112 - protein, 83 aa, Setaria italica
  Transcript Sequence Number=SeqID_39138
AGFQIREQYWDLYLEHKLVESHGSWKGKWFHIEDHKPSLPKITRYRPKYSSRWLDEPTTAESIQVPDLLTKIVVLKKQGLTGV

SEQ ID NO: 105113 - protein, 97 aa, Setaria italica
  misc_feature (22)..(22): Xaa can be any naturally occurring amino acid
  Transcript Sequence Number=SeqID_39139
  Gene Ontology: Mol. function=protein serine/threonine kinase activity; Cellular component=cytoplasm; Biological process=protein amino acid phosphorylation
  Homolog annotation: Hit_ID=B2KTA6; Match level="QueryCoverage=100%, HitCoverage=17%, E-value=3e-41, Identity=86%"; Hit description =Calcium-dependent protein kinase
  Pfam annotation: Domain name=efhand; Domain location=41-69; Score =37.5; E_value=5.2e-08; Accession=PF00036.24; Description=EF hand
PDKPLDSAVLSRLKQFSAMNKXKKMALRVIAESLSEEEIAGLKEMFKMLDTDNSGHITLEELKTGLHRVGATLMDSEINALMEAADIDNSGTIDYGE

SEQ ID NO: 105114 - protein, 90 aa, Setaria italica
  Transcript Sequence Number=SeqID_39140
  Subcellular localization annotation: CTP_CleavageSite=45; ConfidenceScore=5.56e-01
MLRLPTLTALKPSTPAICSNPIRICGSHGRRRKPLLASSAPPPPSSSSRPPKPTPSPEPPKPAHEARSQNPEDPAATAFPTTKPRKPRRG

SEQ ID NO: 105115 - protein, 152 aa, Setaria italica
  misc_feature (32)..(32): Xaa can be any naturally occurring amino acid
  misc_feature (100)..(100): Xaa can be any naturally occurring amino acid
  Transcript Sequence Number=SeqID_39141
  Gene Ontology: Mol. function=hydrolase activity; Cellular component =intracellular
  Homolog annotation: Hit_ID=Q8LHS7; Match level="QueryCoverage=96%, HitCoverage=24%, E-value=7e-27, Identity=46%"; Hit description =Putative histone deacetylase
CDSDVKPFCAEVIGISSLIGSHTDGKASTGNXQACSFTYDHADAIVEDVKVAVARSGHAESPDHDGCQTAKNRSCMAVDDLPQEFEREQAGATLEELFSXNDEEEDDSDWDPASSLVVNRWFCLNCTMPNVDEITNCLNCHELKGSVVRLVL

SEQ ID NO: 105116 - protein, 71 aa, Setaria italica
  Transcript Sequence Number=SeqID_39142
  Gene Ontology: Mol. function=DNA binding; Biological process =regulation of transcription
AGCCWAGAVDNDTGGGGANAIPTFLTPLGVQAAATYHHHAILGTPVPPEAAAAACSFQHPYQQLSGVNWNP

SEQ ID NO: 105117 - protein, 115 aa, Setaria italica
  Transcript Sequence Number=SeqID_39143
  Gene Ontology: Mol. function=protein serine/threonine kinase activity; Biological process=protein amino acid phosphorylation
  Homolog annotation: Hit_ID=B6TXW5; Match level="QueryCoverage=96%, HitCoverage=29%, E-value=3e-46, Identity=85%"; Hit description =Serine/threonine-protein kinase receptor
MLYESGDLDSIIDRTLKLDFDTEEARRLLKIGLLCHQDSPKIRPSMSMVAKMLKGECAVGDKIMRPGLITDVMDLKVRTVEPVQFSLSPSMSPALSNSLLSTLAVAGSTVVEESP

SEQ ID NO: 105118 - protein, 42 aa, Setaria italica
  Transcript Sequence Number=SeqID_39144
  Gene Ontology: Mol. function=nucleotide binding; Cellular component =plasma membrane; Biological process=small GTPase mediated signal transduction
  Homolog annotation: Hit_ID=Q9M2X1; Match level="QueryCoverage=100%, HitCoverage=22%, E-value=8e-13, Identity=80%"; Hit description=ADP -RIBOSYLATION FACTOR-like protein
WYCRGLKTITDREVACFMISCKNSTNIDSVIDWLVKHSKKKN

SEQ ID NO: 105119 - protein, 41 aa, Setaria italica
  misc_feature (35)..(35): Xaa can be any naturally occurring amino acid
  Transcript Sequence Number=SeqID_39145
MFILFWLCSYVVDAADRENMAIAKGELHDLLSKPXLTGIPL

SEQ ID NO: 105120 - protein, 184 aa, Setaria italica
  Transcript Sequence Number=SeqID_39146
  Gene Ontology: Mol. function=nucleotide binding; Cellular component =plasma membrane; Biological process=small GTPase mediated signal transduction
  Homolog annotation: Hit_ID=B9SH09; Match level="QueryCoverage=98%, HitCoverage=18%, E-value=2e-90, Identity=85%"; Hit description=GTP binding protein, putative
  Pfam annotation: Domain name=Arf; Domain location=7-180; Score=139.2; E_value=1.3e-38; Accession=PF00025.13; Description=ADP-ribosylation factor family
  Pfam annotation: Domain name=GTP_EFTU; Domain location=17-182; Score=- 72.2; E_value=0.00096; Accession=PF00009.19; Description=Elongation factor Tu GTP binding domain
  Pfam annotation: Domain name=MMR_HSR1; Domain location=20-132; Score =28.3; E_value=2.4e-06; Accession=PF01926.15; Description=GTPase of unknown function
  Pfam annotation: Domain name=Miro; Domain location=21-132; Score =36.5; E_value=1.1e-07; Accession=PF08477.5; Description=Miro-like protein
  Pfam annotation: Domain name=Ras; Domain location=24-182; Score= -15.7; E_value=3.8e-08; Accession=PF00071.14; Description=Ras family
  Pfam annotation: Domain name=SRPRB; Domain location=17-173; Score= -76.8; E_value=0.064; Accession=PF09439.2; Description=Signal recognition particle receptor beta su
  Pfam module annotation: Pfam domain module=Arf::GTP_EFTU::MMR _HSR1::Miro::Ras::SRPRB; Domain location=7-180::17-182::20-132::21 -132::24-182::17-173
MGFWEAFLNWLRSLFFKQEMELSLIGLQNAGKTSLVNVIATGGFSEDMIPTVGFNMRKVTKGNVTIKLWDLGGQPRFRSMWERYCRAVSAIVYVVDAADRENMAIAKGELHDLLSKPSLTGIPLLVIGNKIDKPEAFPKQSFTEVMGLKTITDREVACFMISCKNSTNIDSVIDWLVKHSKKKN

SEQ ID NO: 105121 - protein, 59 aa, Setaria italica
  misc_feature (10)..(10): Xaa can be any naturally occurring amino acid
  Transcript Sequence Number=SeqID_39147
  Homolog annotation: Hit_ID=Q84NP6; Match level="QueryCoverage=74%, HitCoverage=8%, E-value=2e-09, Identity=70%"; Hit description=Leaf senescence related protein-like
HPSVYTITRXGKPLTTEQQRQPLTYADCSHWCLPGLPDTWNVLLLDSLMRPPSNVHLLG

SEQ ID NO: 105122 - protein, 165 aa, Setaria italica
  misc_feature (70)..(70): Xaa can be any naturally occurring amino acid
  misc_feature (84)..(84): Xaa can be any naturally occurring amino acid
  misc_feature (144)..(144): Xaa can be any naturally occurring amino acid
  Transcript Sequence Number=SeqID_39148
  Gene Ontology: Mol. function=nucleic acid binding
  Homolog annotation: Hit_ID=Q84LL7; Match level="QueryCoverage=67%, HitCoverage=25%, E-value=2e-22, Identity=50%"; Hit description=Salt tolerance protein 6
  Pfam annotation: Domain name=RRM_1; Domain location=23-117; Score =5.8; E_value=0.057; Accession=PF00076.14; Description=RNA recognition motif. (a.k.a. RRM, RBD, o
TVYEKKKLGIAVTLSSNYFAIGLCGWLDSNVNEEYLRQTFTPYGEIAYVKIPVGKRCGFVQFTSRFINSXSSLADSCDLISVSXFFFARLACNTFRSSAEEAIRMLNGSLIGGQNVRLSWGRSPQNKQAPQQDANSQYNGNNYXIYQQQGYEGYGYSAPNLQDSS

SEQ ID NO: 105123 - protein, 113 aa, Setaria italica
  Transcript Sequence Number=SeqID_39149
  Gene Ontology: Mol. function=nucleic acid binding
  Homolog annotation: Hit_ID=Q2PEV8; Match level="QueryCoverage=35%, HitCoverage=9%, E-value=2e-09, Identity=77%"; Hit description =Putative DNA binding protein (Fragment)
MIPTIQQSSAEEAIRMLNGSLIGGQNVRLSWGRSPQNKQAPQQDANSQYNGNNYYGYQQQGYEGYGYSAPNLQDSSVQNYYGYPGYGNYEQQQQQVAAPQQQPPPAQTKQQGR

SEQ ID NO: 105124 - protein, 225 aa, Setaria italica
  misc_feature (108)..(108): Xaa can be any naturally occurring amino acid
  Transcript Sequence Number=SeqID_39150
  Gene Ontology: Mol. function=nucleic acid binding
  Homolog annotation: Hit_ID=Q2PEV8; Match level="QueryCoverage=92%, HitCoverage=49%, E-value=3e-72, Identity=65%"; Hit description =Putative DNA binding protein (Fragment)
  Pfam annotation: Domain name=RRM_1; Domain location=12-83; Score =75.6; E_value=1.8e-19; Accession=PF00076.14; Description=RNA recognition motif. (a.k.a. RRM, RBD, o
  Pfam annotation: Domain name=RRM_1; Domain location=127-191; Score =76.9; E_value=7.2e-20; Accession=PF00076.14; Description=RNA recognition motif. (a.k.a. RRM, RBD, o
  Pfam annotation: Domain name=RRM_3; Domain location=127-215; Score= -5.1; E_value=0.062; Accession=PF08777.3; Description=RNA binding motif
  Pfam module annotation: Pfam domain module=RRM_1::RRM_1::RRM_3; Domain location=12-83::127-191::127-215
DKRGDNGSDHTIFVGDLAADVTDSMLEEVFRASYPSVRGAKVVIDKPTGRPKGYGFVRFGDLNEQARAMTEMNGMMLSTRQMRIGPAANKKNMDAQQTYATNGCHAIXAFRSSQGNLSENDPNNTTVFVGGLDSNVNEEYLRQTFTPYGEIAYVKIPVGKRCGFVQFTSRSSAEEAIRMLNGSLIGGQNVRLSWGRSPQNKQAPQQDANSQYNGNNYYGYQQQGY

SEQ ID NO: 105125 - protein, 236 aa, Setaria italica
  misc_feature (74)..(74): Xaa can be any naturally occurring amino acid
  misc_feature (203)..(203): Xaa can be any naturally occurring amino acid
  Transcript Sequence Number=SeqID_39151
  Gene Ontology: Mol. function=nucleic acid binding
  Homolog annotation: Hit_ID=Q7EZ58; Match level="QueryCoverage=78%, HitCoverage=87%, E-value=2e-70, Identity=71%"; Hit description=RNA Binding Protein-like
  Pfam annotation: Domain name=RRM_1; Domain location=9-65; Score=1.1; E_value=0.16; Accession=PF00076.14; Description=RNA recognition motif. (a.k.a. RRM, RBD, o
  Pfam annotation: Domain name=RRM_1; Domain location=92-163; Score =75.6; E_value=1.8e-19; Accession=PF00076.14; Description=RNA recognition motif. (a.k.a. RRM, RBD, o
  Pfam module annotation: Pfam domain module=RRM_1::RRM_1; Domain location=9-65::92-163
WMDESYLNYHAFAPVAPQIANVKIIRNKQNGQSEGYGFIEFHTRAAAEYTLMNFNGRMMPNVDMAFKLNWASAXSRLGVLSLWGTNGSDHTIFVGDLAADVTDSMLEEVFRASYPSVRGAKVVIDKPTGRPKGYGFVRFGDLNEQARAMTEMNGMMLSTRQMRIGPAANKKNMDAQQTYATNGAYQSSQGNLSENDPNNTTVXAEEAIRMLNGSLIGGQNVRLSWGRSPQNKQAPQ

SEQ ID NO: 105126 - protein, 126 aa, Setaria italica
  misc_feature (45)..(45): Xaa can be any naturally occurring amino acid
  Transcript Sequence Number=SeqID_39152
  Gene Ontology: Mol. function=nucleic acid binding
  Homolog annotation: Hit_ID=Q7EZ58; Match level="QueryCoverage=84%, HitCoverage=51%, E-value=4e-41, Identity=76%"; Hit description=RNA Binding Protein-like
  Pfam annotation: Domain name=RRM_1; Domain location=15-86; Score =71.3; E_value=3.6e-18; Accession=PF00076.14; Description=RNA recognition motif. (a.k.a. RRM, RBD, o
RLGDKRGDNGSDHTIFVGDLAADVTDSMLEEVFRASYPSVRGAKXVIDKPTGRPKGYGFVRFGDLNEQARAMTEMNGMMLSTRQMRIGPAANKKNMDAQQTYATNGMYLLDFHRFLFPFFCCFILP

SEQ ID NO: 105127 - protein, 476 aa, Setaria italica
  misc_feature (37)..(37): Xaa can be any naturally occurring amino acid
  Transcript Sequence Number=SeqID_39153
  Gene Ontology: Mol. function=nucleic acid binding
  Homolog annotation: Hit_ID=Q2PEV8; Match level="QueryCoverage=61%, HitCoverage=71%, E-value=1e-104, Identity=64%"; Hit description =Putative DNA binding protein (Fragment)
  Pfam annotation: Domain name=RRM_1; Domain location=102-174; Score =23.4; E_value=0.00094; Accession=PF00076.14; Description=RNA recognition motif. (a.k.a. RRM, RBD, o
  Pfam annotation: Domain name=RRM_1; Domain location=197-268; Score =75.6; E_value=1.8e-19; Accession=PF00076.14; Description=RNA recognition motif. (a.k.a. RRM, RBD, o
  Pfam annotation: Domain name=RRM_1; Domain location=307-371; Score =76.9; E_value=7.2e-20; Accession=PF00076.14; Description=RNA recognition motif. (a.k.a. RRM, RBD, o
  Pfam annotation: Domain name=RRM_3; Domain location=307-395; Score= -5.1; E_value=0.062; Accession=PF08777.3; Description=RNA binding motif
  Pfam module annotation: Pfam domain module=RRM_1::RRM_1::RRM_1::RRM _3; Domain location=102-174::197-268::307-371::307-395
  Subcellular localization annotation: CTP_CleavageSite=19; ConfidenceScore=5.02e-01
MQPPHQPPMNGQQGAPPPQGSGAPAPPPQQQAPPPPXPQQYPPPPQQYAPPPQQYAPPPQQYAPPPPQQYAPPPQQYAPPPQQYAPPPQYGTAPGSGEIRSLWIGDLQYWMDESYLNYHAFAPVAPQIANVKIIRNKQNGQSEGYGFIEFHTRAAAEYTLMNFNGRMMPNVDMAFKLNWASASAGDKRGDNGSDHTIFVGDLAADVTDSMLEEVFRASYPSVRGAKVVIDKPTGRPKGYGFVRFGDLNEQARAMTEMNGMMLSTRQMRIGPAANKKNMDAQQTYATNGAYQSSQGNLSENDPNNTTVFVGGLDSNVNEEYLRQTFTPYGEIAYVKIPVGKRCGFVQFTSRSSAEEAIRMLNGSLIGGQNVRLSWGRSPQNKQAPQQDANSQYNGNNYYGYQQQGYEGYGYSAPNLQDSSVQNYYGYPGYGNYEQQQQQVAAPQQQPPPAQPAQEEQQQQPPPPQQQQPQSQQPLQQ

SEQ ID NO: 105128 - protein, 98 aa, Setaria italica
  Transcript Sequence Number=SeqID_39154
HPLRHEMSKTAAVRPRKLLNAAAVREQNGVADCAGGEGRGDSFRRPVAFPAPKPSAALILPPPPRPSLDAQLARFHAEFAVSRPVGIQLNSSTSHIAK

SEQ ID NO: 105129 - protein, 293 aa, Setaria italica
  Transcript Sequence Number=SeqID_39155
  Gene Ontology: Mol. function=iron-sulfur cluster binding; Biological process=abscisic acid biosynthetic process
  Homolog annotation: Hit_ID=Q8LHR9; Match level="QueryCoverage=98%, HitCoverage=20%, E-value=1e-104, Identity=67%"; Hit description =Putative aldehyde oxidase
  Pfam annotation: Domain name=FAD_binding_5; Domain location=34-211; Score=195.3; E_value=1.7e-55; Accession=PF00941.13; Description=FAD binding domain in molybdopterin dehydrogenase
YEEGSIGVFPEFLKAEIRASAGIEGCTPPALLGSGSTWHWPRSVEEYYKLVGSELFGKSGTKVVVGNTAAGVYREAEVYDRYIDLRCIPELNSVSKEAKGVEIGAAVSISKAIEALREDGGCNDVIFCKIADHMEKVASPFVRNTASLGGNLIMAQRDQFSSDIATILLAAGSSLRIQVSSERLTITLEEFLQMPPCDYKTLLLSIYIPRWTPIGDLSGDGTMDRTVSTRGNSVLFETYRAAPRPLGNAVAYLNAAFLAHVASDGTSGSIILRELCLAFGAYGTQHAIRLAML

SEQ ID NO: 105130 - protein, 155 aa, Setaria italica
  Transcript Sequence Number=SeqID_39156
  Gene Ontology: Mol. function=endonuclease activity; Cellular component=intracellular
  Homolog annotation: Hit_ID=B9RLT0; Match level="QueryCoverage=54%, HitCoverage=6%, E-value=1e-29, Identity=74%"; Hit description=ATP binding protein, putative
NFSSAQNVVFVELPKSASELLQAEDRAHRRGQTNAVNIYIFCAKNTLDESHWLQLNQSLFRVSSLMNGKKDAIREIEVDQVCHLEEIRNSEEKIQCQLHPLENHNTEIDDISIECFPGIDDLELDSDFTIRTIPLEFEDESYGTSLKNNSTPTVP

SEQ ID NO: 105131 - protein, 42 aa, Setaria italica
  misc_feature (9)..(9): Xaa can be any naturally occurring amino acid
  Transcript Sequence Number=SeqID_39157
  Homolog annotation: Hit_ID=B6U8P2; Match level="QueryCoverage=100%, HitCoverage=6%, E-value=5e-11, Identity=81%"; Hit description =Receptor-like protein kinase RK20-1
SSDGITMPXKQPAYSYAKLDESVNVTVLSSRNDVTITTINGR

SEQ ID NO: 105132 - protein, 140 aa, Setaria italica
  misc_feature (56)..(56): Xaa can be any naturally occurring amino acid
  Transcript Sequence Number=SeqID_39158
  Homolog annotation: Hit_ID=B6SUD3; Match level="QueryCoverage=95%, HitCoverage=85%, E-value=2e-36, Identity=57%"; Hit description =Meiosis 5
MMSGKALLVAVLLVGVASRCSASRGLQGDHVAEQKYGGGYTPGYSGTGTCDYWKSXHPDAIISCIGSLGSILGSFGDVCSAFFGSKLQTLQDALCNTRTDCYGDLLREGAAAYLNSIAAKKYAYSTQQVKDCIAVRAHLP

SEQ ID NO: 105133 - protein, 167 aa, Setaria italica
  misc_feature (98)..(98): Xaa can be any naturally occurring amino acid
  misc_feature (108)..(108): Xaa can be any naturally occurring amino acid
  Transcript Sequence Number=SeqID_39159
  Homolog annotation: Hit_ID=B6SUD3; Match level="QueryCoverage=60%, HitCoverage=58%, E-value=6e-30, Identity=65%"; Hit description =Meiosis 5
MMSGGGGGGGYGGGGGGYTPGYSGTGTCDYWKSHPDAIISCIGSLGSILGSFGDVCSAFFGSKLQTLQDALCNTRTDCYGDLLREGAAAYLNSIAAKXYAYSTQQVKXCIAVALTSEVAAAAQAAMFKSRRVSPDRRGLILVSARRLHMAMMMHDAVPSRCLLRSSV

SEQ ID NO: 105134 - protein, 67 aa, Setaria italica
  Transcript Sequence Number=SeqID_39160
GPSIRGDTSGPASIIMHTRTYLTSTTTTLTMEASSSILVAGEVGLLEHGGLRGGGDLGGERDGDASP

SEQ ID NO: 105135 - protein, 86 aa, Setaria italica
  Transcript Sequence Number=SeqID_39161
  Pfam annotation: Domain name=GRP; Domain location=1-66; Score=-3.5; E_ value=0.00018; Accession=PF07172.3; Description=Glycine rich protein family
MMSGKALLVAVLLVGVASRCSASRGLQGDHVAEQKYGGGGYGGGGGGYGGGGGGGGLRWRRRAGRHVQEGQLRLPLLMMMKLPSSA

SEQ ID NO: 105136 - protein, 431 aa, Setaria italica
  Transcript Sequence Number=SeqID_39162
  Gene Ontology: Mol. function=nucleic acid binding; Cellular component= intracellular; Biological process=biological_process
  Homolog annotation: Hit_ID=Q5ZA07; Match level="QueryCoverage=84%, HitCoverage=99%, E-value=1e-131, Identity=61%"; Hit description=Zinc finger CCCH domain-containing protein 41
  Pfam annotation: Domain name=zf-C3HC4; Domain location=279-336; Score= 28.6; E_value=2.5e-05; Accession=PF00097.17; Description=Zinc finger, C3HC4 type (RING finger)
  Pfam annotation: Domain name=zf-CCCH; Domain location=211-236; Score =14.4; E_value=0.019; Accession=PF00642.16; Description=Zinc finger C- x8-C-x5-C-x3-H type (and similar)
  Pfam annotation: Domain name=zf-CCCH; Domain location=367-394; Score =7.4; E_value=0.16; Accession=PF00642.16; Description=Zinc finger C -x8-C-x5-C-x3-H type (and similar)
  Pfam annotation: Domain name=zf-CCCH; Domain location=69-94; Score =13.0; E_value=0.029; Accession=PF00642.16; Description=Zinc finger C- x8-C-x5-C-x3-H type (and similar)
  Pfam annotation: Domain name=zf-CCCH; Domain location=97-122; Score =17.1; E_value=0.0083; Accession=PF00642.16; Description=Zinc finger C-x8-C-x5-C-x3-H type (and similar)
  Pfam module annotation: Pfam domain module=zf-C3HC4::zf-CCCH::zf -CCCH::zf-CCCH::zf-CCCH; Domain location=279-336::211-236::367 -394::69-94::97-122
MLPYCRCCCAEARGRRKVPTERSFALHRPNPRRSAGGTRGGGDGGGPRVALVSPDSSTVQLDPGSAGMSRRVPCKFFLHGACFKGDYCEFSHDCNDQPDNVCTFYQKGACSFGSHCRNEHVEVHRNCSQPATTAARASSNSSQLVTSSGSHCSEYQTDLWDQTQQICESTTALSAHQPAWAVDYHEHDTPEDANSWPSYQTVQNQTSQDPAYMSICSSAAAGTCPYGKDCSQMHGDLCAFCEKQCLHPYRPDESGVHVKLCKKNNRLLDALRKSEDIECGVCLDRVFSKPTAAERRFGLLSDCDHSFCISCIRNWRSTSPTSGMDVNSTLRACPICRKLSYYVVPSVTWYSSKEEKQEIVEGYKAKLRSIDCKHFDFGKGTCPFGSSCFYKHAYSDGRLEDALLNHNDADGASAAIARLMRLSYLLTRLHV

SEQ ID NO: 105137 - protein, 82 aa, Setaria italica
  misc_feature (11)..(11): Xaa can be any naturally occurring amino acid
  Transcript Sequence Number=SeqID_39163
  Subcellular localization annotation: CTP_CleavageSite=19; ConfidenceScore=5.09e-01
RHLCILRSLSXQGCAAPVRVRSRQAGCRGGDNVAPVRVRFRQLGARELKRNIFCFASCPGLQVLIGRSWGSSAVVMRDGIHL

SEQ ID NO: 105138 - protein, 64 aa, Setaria italica
  Transcript Sequence Number=SeqID_39164
NELHARNSKAKQIIPSPLPLPGAPINKKYSHYLVITSWLYAKFQGSIIASGICKLPLKLIQVIG

SEQ ID NO: 105139 - protein, 59 aa, Setaria italica
  Transcript Sequence Number=SeqID_39165
RTYTTVLHNGGQNTETCMRTHQRHSVCKGARSCKNKLYKSWPQVPTEKMKGRKRGEFSS

SEQ ID NO: 105140 - protein, 92 aa, Setaria italica
  Transcript Sequence Number=SeqID_39166
GRRRHAEPSEEDDDNSSRRRRQRQTEDEASSEAGAASPEQIYEALKEIPDLGRADLLRAYSKLIHDARQFRCLMALPSDMRKDWLLMEIGNQ

SEQ ID NO: 105141 - protein, 619 aa, Setaria italica
  misc_feature (395)..(395): Xaa can be any naturally occurring amino acid
  Transcript Sequence Number=SeqID_39167
  Gene Ontology: Cellular component=plasma membrane
  Homolog annotation: Hit_ID=Q84VD9; Match level="QueryCoverage=54%, HitCoverage=66%, E-value=1e-137, Identity=73%"; Hit description =Centromere protein-like protein (Fragment)
  Pfam annotation: Domain name=TBPIP; Domain location=437-602; Score= -54.5; E_value=0.1; Accession=PF07106.5; Description=Tat binding protein 1(TBP-1)-interacting pro
LSTAEERCLLLERANQNLHLELDNLKLASKEKHDELNEKHIELEKLSISIQEEQLKSMQAEMARLSLEKQLAQAQEKLRLLSLEKHGEASKIENIEATKVQLQKELETIREENRKLDDQNHSSASVIIRLQDEIISLKNTQRRLEEEVSRHVEEKRVLQHELSYLKDNKGDLDRKHFSIKEQIQVVNFNVESLQSLAQEVRDGNVELKETIKNHEGVKALYVENLMLLERTLEKNAHLERSLSAATTEIEGLRDKKVALEESCKHLNSKVNGHQSERAMFVARIEGISHTMEKLSEKNVFLENLLSDNNTELEILRRKLKDSEESTHTFRNQNSVLRSEKRTLMREVDSINSALLSLETQYAELEGRCLDLEQDRDKALDEVIKLRELLRLEKEXHKEATSSDITQFSAIQKQISLLLKEVKHKENQLQEEEHKIVEAQTEIFILQRCLGDMAEANSDVVAQLQKQQEVCKVQEEKADFLSQNNQLLTEGIGSVMEVLHLDEKYGSLDLMKIDVVVQLLLHEIKCLLNTISDAQDVKQNQILEKSLVVTLLEHFGREVADLRSERSVLKQEWQAQSDELVKLQSERHDLLKISCELRKEMEARNRKVDELKSEAKFLVR

SEQ ID NO: 105142 - protein, 739 aa, Setaria italica
  Transcript Sequence Number=SeqID_39168
  Gene Ontology: Cellular component=plasma membrane
  Homolog annotation: Hit_ID=Q84VD9; Match level="QueryCoverage=29%, HitCoverage=41%, E-value=7e-96, Identity=81%"; Hit description =Centromere protein-like protein (Fragment)
SCKVFDELVKLQSERHDFLKISCELRKEMEARNRKVDELKSEAKFLVRQLTELQESRQSLQAEIIKLIEENTSLSSKVYGSREKEKSFEDDFSTLVGEAVRTDILGVIFRSLHDERTSQLQCLHEDFGSLHAAGNELYQEIKLMNKKLGDLQLENNYLEKELSRTLSICDGSGAEISIGSRRRAMRRDTKLLKSGRKSQETGQNMEQRKEVDNAGLEKSNEMLREELQKLKSELQVLRSKEQPVIDVKSCDAEITKLLANMQLATANASLFKEKVLELIVTCESFEISDMVQKEVLKEEITRRNSYVDELKDKLNAVEIENRRLKVDLNGDFTLLGALQTEVDALEKQTLSLAKDCLPPSMLKEENALSPQLSKIAVRPSEDQNTTKMVKDMELQKLHGTIKALQKVVSDTGVVLEQERLDFNNNLQDARKQIEMLKLKEILDSDASDVNYERMMKDIQLDLVQTPSRRAASHGHHRKKKSVAGQSDDKMLALWSVDRVSSGSRRHDVDLRPPQSEAAENDNKGKKRSCSEPVVTVKDLGVDKQEVLPRPVVTTVATTTMEPQREWKKKVIDRLSSEAQRLRDLRSIVQELRGGVEASSDAELDGVKVQMADAEDAIEELIDANGKLLKKAEEFTSAAAGDDVDLRSRSQRKILERVRKMSEKAGRLELELQRFQHALLRHEEERAARRAAKAAATVQVQRRSRVQLVEYLYGRRRDSRRPKQKTRGPSCCMRAKAIDD

SEQ ID NO: 105143 - protein, 173 aa, Setaria italica
  misc_feature (10)..(10): Xaa can be any naturally occurring amino acid
  misc_feature (28)..(28): Xaa can be any naturally occurring amino acid
  misc_feature (64)..(64): Xaa can be any naturally occurring amino acid
  misc_feature (149)..(149): Xaa can be any naturally occurring amino acid
  Transcript Sequence Number=SeqID_39169
  Gene Ontology: Mol. function=transcription regulator activity; Cellular component=nucleus; Biological process=regulation of transcription
  Homolog annotation: Hit_ID=B6SIB8; Match level="QueryCoverage=100%, HitCoverage=91%, E-value=6e-69, Identity=80%"; Hit description =Protein SPATULA
  Pfam annotation: Domain name=HLH; Domain location=3-54; Score=42.3; E_ value=1.9e-09; Accession=PF00010.18; Description=Helix-loop-helix DNA- binding domain
SRSAEFHNFXSERRRRDRINEKLKALQXELLPNCTKTDKVSMLDEAIDYLKSLQLQLQMLVMGXGMAPVVPPELQQYMHYITADPAHMPPLRPSGQQPRPFQLTQANPQRQSNVESDFLSQMQNLHPSEPPQNFLRPPKLQLYTPEPRXGGLASTSHNGGWIPERSSSYNFME

SEQ ID NO: 105144 - protein, 210 aa, Setaria italica
  Transcript Sequence Number=SeqID_39170
  Gene Ontology: Mol. function=DNA-directed RNA polymerase activity; Cellular component=nucleus; Biological process=transcription
  Homolog annotation: Hit_ID=B3TLL2; Match level="QueryCoverage=96%, HitCoverage=99%, E-value=2e-84, Identity=75%"; Hit description=DNA -directed RNA polymerases II 24 kDa polypeptide
  Pfam annotation: Domain name=RNA_pol_Rpb5_C; Domain location=137-210; Score=149.0; E_value=1.4e-41; Accession=PF01191.11; Description=RNA polymerase Rpb5, C-terminal domain
  Pfam annotation: Domain name=RNA_pol_Rpb5_N; Domain location=6-95; Score=105.0; E_value=2.5e-28; Accession=PF03871.6; Description=RNA polymerase Rpb5, N-terminal domain
  Pfam module annotation: Pfam domain module=RNA_pol_Rpb5_C::RNA_pol _Rpb5_N; Domain location=137-210::6-95
MSAGLVTDEVTMGRLYRIRRTVMQMLRDRGYLVVEHELATSRRDFLRKFGESFHREDLLINKYKKNDPSDQIYVFFPNDDKVGMKHIKKYVEMMTHENVSRAVLVLQQNLTPFAKSFLIELEPKIHLEIFQEAELLINIKEHVLVPEHQVLTNEEKKTLLERYTLKETQLPRIQITDPIARYYGLKRGQVVKIIRPSETAGRYVTYRYVV

SEQ ID NO: 105145 - protein, 75 aa, Setaria italica
  Transcript Sequence Number=SeqID_39171
HSVFLLCFLLPSRDILQCLLSFIGALGLLYLLMLVFLGSFLLNNQISVFWVVRVKQMKQNLAFTVLWLLKLPIAI

SEQ ID NO: 105146 - protein, 272 aa, Setaria italica
  Transcript Sequence Number=SeqID_39172
  Gene Ontology: Mol. function=ER retention sequence binding; Cellular component=integral to membrane; Biological process=protein retention in ER lumen
  Homolog annotation: Hit_ID=Q8LD89; Match level="QueryCoverage=98%, HitCoverage=98%, E-value=1e-127, Identity=81%"; Hit description =Putative ER lumen protein retaining receptor
  Pfam annotation: Domain name=ER_lumen_recept; Domain location=72-216; Score=217.7; E_value=2.9e-62; Accession=PF00810.10; Description=ER lumen protein retaining receptor
MRGTKRPLGAVTSWVRRQPPKVKAFLAVVAGMAALVFIRFIVHDHDNLFVAAEAAHALGIGVLIYKLTKERTCAGLSLKSQDLTALFLAVRLYCSFVMEYDIHTVLDTATLVATLFVIYMIRFKLRSTYMVDKDNFALYYVVLPCAGLALLIHPSTSHNIVNRISWAFCVYLEAVSVLPQLRLMQNTKIVEPFTAHYVFALGVARFLSCAHWVLQVLDTRGRLLTALGYGLWPSMVLLSEIVQTFILADFCYYYVKSLVGGQLVLRLPSGVV

SEQ ID NO: 105147 - protein, 47 aa, Setaria italica
  Transcript Sequence Number=SeqID_39173
ICIDYDVYPSRPRRVPIYTLNIKTSSPSRLRQNIRSISKETNSLNKI

SEQ ID NO: 105148 - protein, 90 aa, Setaria italica
  Transcript Sequence Number=SeqID_39174
IKEDGWLILLLLSFFAVVRTVSSEEPKNPYCTHLFCSKLFQLLYNLTTLLHTSLLQVVLHLTGQCTWQQFWGACEFTSMIIKVHFVWYIF

SEQ ID NO: 105149 - protein, 87 aa, Setaria italica
  Transcript Sequence Number=SeqID_39175
REMQLSYFLSYLHFLPSDDIKSLTLRGLIFGKVCVYLYALTKIDVYLSPSFIWYICSFSSYSDFCCSKFYMQLRSHLFLTLDALNST

SEQ ID NO: 105150 - protein, 206 aa, Setaria italica
  Transcript Sequence Number=SeqID_39176
  Gene Ontology: Mol. function=serine-type endopeptidase inhibitor activity
  Homolog annotation: Hit_ID=P29421; Match level="QueryCoverage=86%, HitCoverage=83%, E-value=2e-24, Identity=39%"; Hit description=Alpha- amylase/subtilisin inhibitor
  Pfam annotation: Domain name=Kunitz_legume; Domain location=23-201; Score=102.1; E_value=1.9e-27; Accession=PF00197.10; Description =Trypsin and protease inhibitor
NILLLIPLLAATLPCIIGDATQLVYDTDGHELISNSSYYVLPVERGVGGGLTKSYQWRRCNFLVLQMRNEAKVGMAVRIEPLNASISDPVAVHLSTNVKISFDVITVCAEPMYWHVSDLPPFSTSQPRQFIAVGKDEGAEMPSPPSPDMLFRIERNNGAMKGYKLVSCIGTEPCKYLGLHAFKKENWLTTSASPFVVVFKKGHMYA

SEQ ID NO: 105151 - protein, 122 aa, Setaria italica
  Transcript Sequence Number=SeqID_39177
MRLPSTLVLLIFAFVGGNLLMGISSNARSAKNSTDPGHGNIELNGRKLKERYTIRKTRGLENIRTDDYQPVDPSPSSKATIRPGPIEHGAPILPYVPQYPPPPGGHPRGCVSCWIPFHLDAR

SEQ ID NO: 105152 - protein, 63 aa, Setaria italica
  Transcript Sequence Number=SeqID_39178
  Subcellular localization annotation: CTP_CleavageSite=40; ConfidenceScore=5.59e-01
EFLAAKIVTGVPVRVWTRPQQTGFSSNYNTRAKKPNFSVVSFSVSGMMQLDLTTIFSNKCMRS

SEQ ID NO: 105153 - protein, 66 aa, Setaria italica
  Transcript Sequence Number=SeqID_39179
HVSYVHCLLTHNHLDKIFNTHRYLCTARRSFCKLCALLVEALSDITTHYWTLATFTNYIKLLDRLY

SEQ ID NO: 105154 - protein, 72 aa, Setaria italica
  Transcript Sequence Number=SeqID_39180
GNTNTLTVYQWFIRLLVTHPLQAKRTIIFFAEVELIGLKTVQRSMKCLLFPHRVSCKCLTGSSNSVKILVTT

SEQ ID NO: 105155 - protein, 66 aa, Setaria italica
  Transcript Sequence Number=SeqID_39181
STIRIVILLKQKFESLHHGQQMSMSCNSTIHLNDTKNIIYFRTIVGLQGAHHQHKLWHNKLQDTTH

SEQ ID NO: 105156 - protein, 132 aa, Setaria italica
  Transcript Sequence Number=SeqID_39182
TVNVLVWKRKHLPDVHHRNTTTQRETQASTFMIQEAEVLYLLPVLYSMMQPLMFFHNFRCTLVWFWNTGPCSMSNVLGVDWQIRHEDCNLLSAFGVLRSPGASSAPMKAIGEEDCGRTWIDIVFSLFQVLRL

SEQ ID NO: 105157 - protein, 70 aa, Setaria italica
  Transcript Sequence Number=SeqID_39183
  Gene Ontology: Mol. function=glycerophosphodiester phosphodiesterase activity; Biological process=glycerol metabolic process
QCHTFGVQVIFEHAKDRPILFSSFQPDAALLMRKLQSKYPVYFLTNGGTEIYIDVRRNSLEEAIKLCLSS

SEQ ID NO: 105158 - protein, 57 aa, Setaria italica
  misc_feature (46)..(46): Xaa can be any naturally occurring amino acid
  Transcript Sequence Number=SeqID_39184
  Gene Ontology: Mol. function=glycerophosphodiester phosphodiesterase activity; Biological process=glycerol metabolic process
ISVLQVTKDGCPIIFHDNFIYTEEDGKISQKRVTDLQLEDFVQYGXTNEKGKIGKPL

SEQ ID NO: 105159 - protein, 99 aa, Setaria italica
  Transcript Sequence Number=SeqID_39185
  Gene Ontology: Mol. function=glycerophosphodiester phosphodiesterase activity; Biological process=glycerol metabolic process
EIVDKYKKDALCTLQEAFEKVNTRLGFNVELKFDDNLEYQEEELTRILQAILKVIFEHAKDRPILFSSFQPDAALLMRKLQSKYPVSMLNTAQAFVSCL

SEQ ID NO: 105160 - protein, 219 aa, Setaria italica
  misc_feature (45)..(45): Xaa can be any naturally occurring amino acid
  misc_feature (96)..(96): Xaa can be any naturally occurring amino acid
  misc_feature (102)..(102): Xaa can be any naturally occurring amino acid
  misc_feature (172)..(172): Xaa can be any naturally occurring amino acid
  Transcript Sequence Number=SeqID_39186
  Gene Ontology: Mol. function=glycerophosphodiester phosphodiesterase activity; Cellular component=integral to membrane; Biological process=glycerol metabolic process
  Homolog annotation: Hit_ID=A1DE31; Match level="QueryCoverage=46%, HitCoverage=8%, E-value=6e-12, Identity=38%"; Hit description=Cyclin dependent kinase (Pho85), putative
  Pfam annotation: Domain name=GDPD; Domain location=5-219; Score=16.8; E_value=8.6e-07; Accession=PF03009.9; Description=Glycerophosphoryl diester phosphodiesterase family
MNALASADRRLQEVRENTVRSFNDAARFPVDYVEFDVQMLRREPXISVLQVTKDGCPIIFHDNFIYTEEDGKISQKRVTDLQLEDFVQYGPQNYEXEQILRXTKEGKKTKLRQSSRPILKVIFEHAKDRPILFSSFQPDAALLMRKLQSKYPVYFLTNGGTEIYIDVRRNSXLEEAIKLCLSSGLQGIVSEARGIFRHPAAIPKIKEANLSLLTYGTLK

SEQ ID NO: 105161 - protein, 81 aa, Setaria italica
  Transcript Sequence Number=SeqID_39187
MRLGSINGLRFKQLKLVILAFFMLFPFWKWDKGTYYDSGILQPDPLVLTHPANLKLDDQHFFKKFFISNLSLFFFLLNFCS

SEQ ID NO: 105162 - protein, 75 aa, Setaria italica
  Transcript Sequence Number=SeqID_39188
ATLVIARVSTCHTQQVWRKYECIKRGTEIAISDAQPVLKKGLGTSTEGIMSSCTRGVDFKAVCRIKFSLYQRMCI

SEQ ID NO: 105163 - protein, 81 aa, Setaria italica
  Transcript Sequence Number=SeqID_39189
ACKPWHTLMNIEHQSVKLYPGISAYEKLMFTERMIEEVICNGKCLTMFQCIYFDRHHKEIYLFFINKIELYRLNSPINSFL

SEQ ID NO: 105164 - protein, 61 aa, Setaria italica
  Transcript Sequence Number=SeqID_39190
TKPMFKHPKTVVGKPYVDEERQGPFYPYGTRAPAASSARSAALKQPLAAAEPARSSGPIGL

SEQ ID NO: 105165 - protein, 262 aa, Setaria italica
  Transcript Sequence Number=SeqID_39191
  Gene Ontology: Mol. function=transporter activity; Cellular component= integral to membrane; Biological process=transport
  Homolog annotation: Hit_ID=Q9ATL7; Match level="QueryCoverage=100%, HitCoverage=100%, E-value=1e-114, Identity=81%"; Hit description =Aquaporin TIP3-1
  Pfam annotation: Domain name=MIP; Domain location=18-238; Score =351.6; E_value=1.5e-102; Accession=PF00230.12; Description=Major intrinsic protein
MSTGARPGRRFTVGRSEDATHPDTIRAAISEFLATAIFVFAAEGSVLSLGKMYHDMSTAGGLVAVALAHALALSVAVAVAVNISGGHVNPAITFGALIGGRISLVRAVFYWVAQLLGAIAASLLLRLATGGMRPPGFALASGVGDWHAVLLEAAMTFGLMYAYYATVIDPKRGSVGTIGPLAVGFLLGANVLAGGPFDGAGMNPARVFGPALVGWRWRHHWVYWLGPFLGAGVAGLVYEYLVIPSADAAAPHAHQPLAPEDY

SEQ ID NO: 105166 - protein, 84 aa, Setaria italica
  Transcript Sequence Number=SeqID_39192
MTSLSITVMTLNLHEGEQPSESPNTWEKRRDICVSVITSYSPTILCTQQGLRLVQLDYLQQCLPGKICALQCYQLFLYVNLISV

SEQ ID NO: 105167 - protein, 133 aa, Setaria italica
  Transcript Sequence Number=SeqID_39193
  Gene Ontology: Mol. function=(+)-abscisic acid 8'-hydroxylase activity; Cellular component=integral to membrane; Biological process=oxidation reduction
  Homolog annotation: Hit_ID=Q0J185; Match level="QueryCoverage=90%, HitCoverage=24%, E-value=9e-54, Identity=80%"; Hit description =Abscisic acid 8'-hydroxylase 3
RPRSPQRLGVLFAAQDTTASVLTWILKYLHDNPKLLEAVKAEQMAVYEENDGGRLPLTWAQTRTMPITNLVILESLRLASIITFAFREAVEDVDYEGFLIPKGWKVMPLFRNIHHSPEFFQDPQKFRPFLGSW

SEQ ID NO: 105168 - protein, 457 aa, Setaria italica
  misc_feature (70)..(70): Xaa can be any naturally occurring amino acid
  misc_feature (437)..(437): Xaa can be any naturally occurring amino acid
  Transcript Sequence Number=SeqID_39194
  Gene Ontology: Mol. function=(+)-abscisic acid 8'-hydroxylase activity; Cellular component=integral to membrane; Biological process=oxidation reduction
  Homolog annotation: Hit_ID=Q0J185; Match level="QueryCoverage=87%, HitCoverage=79%, E-value=1e-159, Identity=68%"; Hit description =Abscisic acid 8'-hydroxylase 3
  Pfam annotation: Domain name=p450; Domain location=51-457; Score =101.5; E_value=2.8e-27; Accession=PF00067.14; Description=Cytochrome P450
  Subcellular localization annotation: CTP_CleavageSite=10; ConfidenceScore=5.10e-01
GKATHGFLPRCSLRLRRRTRRAGAARREQAPEGRRRRPKRKPPRRRGSSCPPGSLGLPYLGETLQLYLQXPNIFFAARLKRYGEVFKTHVLGCPCVVLASPEAARMVLVSRAHLFRPTYPPSKERMIGPQALFFHQGDYHLRMRRAVQGWLGPDALRALVPDVEAAVASTLRWWEGRETSTFHTMKRLTFDVGVVTIFGRRVAEHVKEELRRNYFIVENGYNSFPIPVVPWTRYSQAIKARQRLGAILSGILSERRALGDLGDDLLGTLMRYRDDGGTALSDDQVADNVLGVLFAAQDTTASVLTWILKYLHDNPKLLEAVKAEQMAVYEENDGGRLPLTWAQTRTMPITNLVILESLRLASIITFAFREAVEDVDYEGFLIDQNAKSRTCRTWTYHSPEFFQDPQKFDPSRFMVAPKPGTFLPFGSGVHACPGNDXAKLEMVVLVHRLVTNYRWQV

SEQ ID NO: 105169 - protein, 73 aa, Setaria italica
  Transcript Sequence Number=SeqID_39195
SDIHQHMHAQLHIIPCFAVHQTIETVKHDHITRLLQKKNILALLYSEIYEVVIYVVNSYHCLGMPWKFGSIHL

SEQ ID NO: 105170 - protein, 88 aa, Setaria italica
  Transcript Sequence Number=SeqID_39196
HEMFLLWHLLFANIFITRFRHSVVLSSATCYCPLAYISQIFTAHARTIAHYSIVLQYIKQLKLSSMTISQGYYRRRIYLPCYILKYMK

SEQ ID NO: 105171 - protein, 141 aa, Setaria italica
  Transcript Sequence Number=SeqID_39197
  Gene Ontology: Mol. function=substrate-specific transmembrane transporter activity; Cellular component=integral to membrane; Biological process=transmembrane transport
  Homolog annotation: Hit_ID=Q2R4G0; Match level="QueryCoverage=76%, HitCoverage=14%, E-value=2e-29, Identity=62%"; Hit description =Hexose transporter, putative, expressed
PGAVLQMLRGRDDVAGEMALLVEGLGTAGDTAIEEYIVGPAPPPQAEDDDGDRGVTLYGPERGMSWVAQPLPLGAQGSMLGSVIGGLGSRQGSVLDHLRDPVVALLDSVHDIKAPAPPPGPVPARQQAAAAGGRAGDHASQ

SEQ ID NO: 105172 - protein, 63 aa, Setaria italica
  Transcript Sequence Number=SeqID_39198
LLYSTRHRNDCVFNGAVPSMVTALTLAREETELWCLAGAKGLSLLVARGLGNFAVLSFGWVVS

SEQ ID NO: 105173 - protein, 115 aa, Setaria italica
  Transcript Sequence Number=SeqID_39199
  Gene Ontology: Mol. function=transferase activity, transferring groups other than amino-acyl groups
  Homolog annotation: Hit_ID=Q01MP2; Match level="QueryCoverage=95%, HitCoverage=24%, E-value=2e-49, Identity=85%"; Hit description =H1005F08.2 protein
SRPGVAGLPRPYSTLQCVVAHLWRCMTTARGLEEGQSTSVCIAVDGRARMNPQVPDGYTGNVVLWARPTATAGELVARPLQHAVGLINREVARINDAYFKSFIDFASSGAVEKER

SEQ ID NO: 105174 - protein, 70 aa, Setaria italica
  Transcript Sequence Number=SeqID_39200
IEDYINQDTAMALLRRNQTRADPWETRTQAPALLMPTSSNNGQLRAVPWETRTQAPKLLRPTSSNNDHLR

SEQ ID NO: 105175 - protein, 65 aa, Setaria italica
  Transcript Sequence Number=SeqID_39201
  Subcellular localization annotation: CTP_CleavageSite=15; ConfidenceScore=5.13e-01
AQGWNSSTVVCPRTRMKLTWSGDDSFSARPFVNGFHFRLFTPYFSEIFPQQRPVPQIDLPEFSPI

SEQ ID NO: 105176 - protein, 85 aa, Setaria italica
  Transcript Sequence Number=SeqID_39202
  Gene Ontology: Mol. function=nucleic acid binding; Cellular component= chloroplast
  Homolog annotation: Hit_ID=Q9FJE9; Match level="QueryCoverage=89%, HitCoverage=67%, E-value=7e-20, Identity=53%"; Hit description =Similarity to RNA binding protein
  Pfam annotation: Domain name=RRM_1; Domain location=9-76; Score=91.3; E_value=3.4e-24; Accession=PF00076.14; Description=RNA recognition motif. (a.k.a. RRM, RBD, o
LNSFYCAFAGLSFYTTEEELKDVFSPFGNVKEARLMRDSQTGRLKGFGFVNYSSQAEAEKAVKAMHGRILRGRLIFVEMAQGRKS

SEQ ID NO: 105177 - protein, 79 aa, Setaria italica
  Transcript Sequence Number=SeqID_39203
FFLYSSLSTWICRKYCMSCIYATGRYVLQRENILALVKSVIESAQYDNISPICRLDIPSKNKSVQNTKTKRSTLGRHML

SEQ ID NO: 105178 - protein, 104 aa, Setaria italica
  Transcript Sequence Number=SeqID_39204
  Gene Ontology: Mol. function=nucleic acid binding; Cellular component= chloroplast
  Homolog annotation: Hit_ID=B9T4D6; Match level="QueryCoverage=78%, HitCoverage=87%, E-value=5e-20, Identity=56%"; Hit description=Cold -inducible RNA binding protein, putative
  Pfam annotation: Domain name=RRM_1; Domain location=25-95; Score =108.9; E_value=1.7e-29; Accession=PF00076.14; Description=RNA recognition motif. (a.k.a. RRM, RBD, o
MMIRGARMVGLSSQVLGMRCFSTEIFVSRLSFYTTEEELKDVFSPFGNVKEARLMRDSQTGRLKGFGFVNYSSQAEAEKAVKAMHGRILRGRLIFVEMAQGRKS

SEQ ID NO: 105179 - protein, 179 aa, Setaria italica
  Transcript Sequence Number=SeqID_39205
  Gene Ontology: Mol. function=drug transporter activity; Cellular component=membrane; Biological process=multidrug transport
  Homolog annotation: Hit_ID=B9RZD1; Match level="QueryCoverage=84%, HitCoverage=30%, E-value=5e-34, Identity=49%"; Hit description =Multidrug resistance pump, putative
  Pfam annotation: Domain name=MatE; Domain location=46-179; Score =49.0; E_value=1.9e-11; Accession=PF01554.10; Description=MatE
MPCHDNMASSPKLEDEPENEPNKLIMKRLVIRCWQESRLLWRLAFPALLTEVFQFSIGFVTTGFVGHLGEVELAAVSVVENILDSSAYGFLFGMGSALETLSGQAVGAGQLERLGTYTQQSWIICGATAAALAPAYAFATPILHSFLRQPAAVARAAGPYARWAVPRLFAHAANIPLLM

SEQ ID NO: 105180 - protein, 210 aa, Setaria italica
  misc_feature (181)..(181): Xaa can be any naturally occurring amino acid
  Transcript Sequence Number=SeqID_39206
  Gene Ontology: Cellular component=intracellular
LLKYLNLRKLVLWRSILSLETITDDILEDLSAVSDIVNKNQDSNSCKLESLLGSMHDLSQRPGLAKFLRNAILLLLDVFPRNHVLEEAILVTTEMFAAKENSSSKANTSRSLAKNLLKKDRQDFLLCGIYGRTEAMHRNFEQARKIFDMALLSTEATTEDLRKKVPILYLWYAEMEIAVSXKNNSDSMHRAIYILSCLGSNIKYSSFHWP

SEQ ID NO: 105181 - protein, 35 aa, Setaria italica
  Transcript Sequence Number=SeqID_39207
TGHQLLISLSVLGTMPHCSSLNFDRCMLTAAIRTL

SEQ ID NO: 105182 - protein, 62 aa, Setaria italica
  Transcript Sequence Number=SeqID_39208
MHAVVAASVFIVMVMLSITKLALSCSKQAPTERMCMSDVAAEMRRIRDCHVKTRHKRGSSMQ

SEQ ID NO: 105183 - protein, 109 aa, Setaria italica
  Transcript Sequence Number=SeqID_39209
LCCSICVYSHGKSLSITKLALSCSKQAPTERMCMSDVAAEMRRIRDCHVKQGKERKLHAVTCVRLGDGGFFYVNRSLFEDNCTAVPIENEALIPPFHLSTRCDSIPHQV

SEQ ID NO: 105184 - protein, 338 aa, Setaria italica
  Transcript Sequence Number=SeqID_39210
  Homolog annotation: Hit_ID=Q01HB9; Match level="QueryCoverage=92%, HitCoverage=76%, E-value=3e-69, Identity=48%"; Hit description =OSIGBa0136O08-OSIGBa0153H12.5 protein
  Pfam annotation: Domain name=DUF295; Domain location=229-275; Score =12.9; E_value=0.031; Accession=PF03478.10; Description=Protein of unknown function (DUF295)
LPPEARGKVPCGSSCGWLALMDEAASVTLLNPFTGALVELPPADENIAAASTMQTMLVSKKGGRWVLHPEDDNASAIALDEMRQFFFNEIVLSAPPDADGRGCVAMAVLAGSTEVAFCRVGVDTAWTLLQTNLECTVGSVVYCQGRFLAIDSTGEISMFSDIANTVTPTATPMPSLSPPEDLSNRSYLEWNGELYVVGAMLDLFRWGLKFDYRVVVCRCSNLLDPTPAWSRVKDAGDLTLFVSTHFRHSFGGTSVSRFKRNSVYFSDPPYGDQDYLGHSLEIANIATGKSEVTKPFHPKVQGFEALGWIRPNLWRGRRGDVEPEENPQEEAAPGPAPA

SEQ ID NO: 105185 - protein, 122 aa, Setaria italica
  misc_feature (87)..(87): Xaa can be any naturally occurring amino acid
  misc_feature (100)..(100): Xaa can be any naturally occurring amino acid
  Transcript Sequence Number=SeqID_39211
  Gene Ontology: Mol. function=hydrolase activity, hydrolyzing O -glycosyl compounds; Biological process=carbohydrate metabolic process
  Homolog annotation: Hit_ID=Q75RZ0; Match level="QueryCoverage=100%, HitCoverage=21%, E-value=1e-42, Identity=63%"; Hit description =Putative 1,4-beta-xylanase
PGNKGLKYGIGLESHFDKPNIPYMRGSLDTLAAADVPVWLTEVDVTKGPKQVEYLEEVMREGFGHPGVRGIVMWGAWHAKGCYVMCXTDNKFKNLPVGDXVDKLLDEWRKVPEKPRTDDKGV

SEQ ID NO: 105186 - protein, 89 aa, Setaria italica
  misc_feature (59)..(59): Xaa can be any naturally occurring amino acid
  Transcript Sequence Number=SeqID_39212
  Subcellular localization annotation: CTP_CleavageSite=52; ConfidenceScore=5.60e-01
PAPASTPGMSSPAATGRPSPAPPAPPPPPGTAPTPPPPPPPPASPPAPPPPPATSATPXPPPSLTPSAPLAPKSQPRPMLRRCPPWTGA

SEQ ID NO: 105187 - protein, 111 aa, Setaria italica
  misc_feature (97)..(97): Xaa can be any naturally occurring amino acid
  Transcript Sequence Number=SeqID_39213
  Gene Ontology: Mol. function=transferase activity, transferring groups other than amino-acyl groups
  Homolog annotation: Hit_ID=B6SZH6; Match level="QueryCoverage=83%, HitCoverage=19%, E-value=2e-20, Identity=58%"; Hit description =Transferase
  Subcellular localization annotation: CTP_CleavageSite=11; ConfidenceScore=5.34e-01
MAVAPEQHQQPAGASSSPRIRVHDTTLVSPSPSPREASLPLTFFDIFWLNSPPVERLFFYRLSPDADVATIVSNLKKSLQQAVRAFYPLAGRLRLTXPGTSDRYELYYRPG

SEQ ID NO: 105188 - protein, 201 aa, Setaria italica
  misc_feature (85)..(85): Xaa can be any naturally occurring amino acid
  Transcript Sequence Number=SeqID_39214
  Gene Ontology: Mol. function=copper ion binding; Cellular component =ribonucleoprotein complex
  Homolog annotation: Hit_ID=B9RYQ8; Match level="QueryCoverage=96%, HitCoverage=38%, E-value=3e-73, Identity=67%"; Hit description =Cytochrome C oxidase assembly protein cox11, putative
  Pfam annotation: Domain name=Rsm22; Domain location=27-201; Score= -55.9; E_value=1.2e-08; Accession=PF09243.2; Description =Mitochondrial small ribosomal subunit
APSGAEQRAARWKVRSAYGDIGLRYREDETVAYVASRMPAIYAACHRVLREVRRRLPEFAPAKVLDFGAGPSSALWAMRAVWPKXSIERVNLVEPSKEMQRAGQSLLDNLKGLPLIHSYDSIQELNRNIEKHERGHDLVISSYALGEIPSLSDRITIVRQLWDLTSDVLVLLEPGTPQGAKIISQMRSYILWMEKDVGRLR

SEQ ID NO: 105189 - protein, 239 aa, Setaria italica
  Transcript Sequence Number=SeqID_39215
  Gene Ontology: Mol. function=protein serine/threonine kinase activity; Biological process=protein amino acid phosphorylation
  Homolog annotation: Hit_ID=B9S9R7; Match level="QueryCoverage=93%, HitCoverage=34%, E-value=8e-69, Identity=53%"; Hit description =Kinase, putative
  Pfam annotation: Domain name=Pkinase; Domain location=1-204; Score =10.9; E_value=3.9e-09; Accession=PF00069.17; Description=Protein kinase domain
  Pfam annotation: Domain name=Pkinase_Tyr; Domain location=3-204; Score=-70.3; E_value=4.7e-09; Accession=PF07714.9; Description =Protein tyrosine kinase
  Pfam module annotation: Pfam domain module=Pkinase::Pkinase_Tyr; Domain location=1-204::3-204
GWCCSKDELVLVYEFMPNGNLDCALHTMGGATLPWEARFRAVLGIASALEYLHDGCDHRILHRDVKSSNVLLDAEFNARLGDFGLARLVSHGGLPHTTQPAGTLGYLAPEYVHSGVATERSDVYSFGVLALEVATGRRPTERGISVVDWVWVLWGRRRLVDAADQRLQGRFVAEEMRRVLLVGLSCVHPDCRKRPGMRRVVKMLDGTAPLTLVPDKKPPVMLQTQVNQASSMNSVDTIN

SEQ ID NO: 105190 - protein, 227 aa, Setaria italica
  Transcript Sequence Number=SeqID_39216
  Gene Ontology: Cellular component=chloroplast
  Homolog annotation: Hit_ID=A9JQE3; Match level="QueryCoverage=56%, HitCoverage=78%, E-value=1e-27, Identity=49%"; Hit description =Putative proline-rich family protein (Fragment)
  Subcellular localization annotation: CTP_CleavageSite=70; ConfidenceScore=5.74e-01
MACPAQSMLSASGCIFLRSKPQASLVRGGIIGGVSSSRPFLLSCNASSSPSPSSPPPAPAQEDSDCNEVECAPEKEVGSLSAEWLAEERTRVVGTFPPKKRGWTGLIEKDTAGQTNIYSVEPMVYVAESAISSGAAGTSAEGAENTAAIAAGLVLITVAAASSILIQVSKNQPQVAEVAYNGPPLSYYVAKFQPAPAPAPAETLEAPAPAEAVEASVAAPEAEQLSS

SEQ ID NO: 105191 - protein, 266 aa, Setaria italica
  Transcript Sequence Number=SeqID_39217
  Gene Ontology: Cellular component=protein complex
  Homolog annotation: Hit_ID=B9T883; Match level="QueryCoverage=96%, HitCoverage=85%, E-value=3e-24, Identity=34%"; Hit description =Proteasome inhibitor, putative
  Pfam annotation: Domain name=PI31_Prot_Reg; Domain location=168-230; Score=64.8; E_value=3.3e-16; Accession=PF08577.3; Description=PI31 proteasome regulator
TTTRRWYGGPDALTDPPPSGDEEVGIDGWNSMENCYAFLYSKEEKGKKKRVLVKCLVIGELLAVDVLDLEAQDKGPYNIQINVKDFFSEEQPKNYGDMYKNFAGLIETVNSNVLCKLDGKDDGAVAGKNPDAAAKNTDAESSSSIHSSENPSPRTTDPNSLIYPPIAPLGSDDLFPGPGAGFYPHGGIGSGGSMHVGPNDPRFFPSNPFPAPFGGPGSVPPGGRYDPIGPPGVPGFEPSSFVRRPRRPPGGSTHPDLEFFQQGPDF

SEQ ID NO: 105192 - protein, 59 aa, Setaria italica
  Transcript Sequence Number=SeqID_39218
ADALSGSDKAILSPVPRPIASETQTCTAPPCWLTGPIHQAIIGNETLGRSWQWRRHPCS

SEQ ID NO: 105193 - protein, 80 aa, Setaria italica
  Transcript Sequence Number=SeqID_39219
HRLPKSDTKVVCYHFFYRPLPTLLREDLRTDTNVGDQLATRKLKHLFTTQFDTRLTCTLFVWLSYHDTTTLHGYLAISYL

SEQ ID NO: 105194 - protein, 27 aa, Setaria italica
  Transcript Sequence Number=SeqID_39220
LKLQLIQTGQQFFLCSPNLPIHICLFL

SEQ ID NO: 105195 - protein, 55 aa, Setaria italica
  Transcript Sequence Number=SeqID_39221
RINPIKNCTSPIMCSLPSDAAIYMQFTKRQTILITFNVCKTKSQALVTFSNTKYS

SEQ ID NO: 105196 - protein, 46 aa, Setaria italica
  Transcript Sequence Number=SeqID_39222
WHFFSNDFKLKLAFHAIALPHHIVLLLIVSFIDMAWEFSIELLQIL

SEQ ID NO: 105197 - protein, 166 aa, Setaria italica
  misc_feature (47)..(47): Xaa can be any naturally occurring amino acid
  Transcript Sequence Number=SeqID_39223
  Gene Ontology: Mol. function=nucleoside-triphosphatase activity; Cellular component=membrane; Biological process=transport
  Homolog annotation: Hit_ID=B8XSN5; Match level="QueryCoverage=87%, HitCoverage=10%, E-value=2e-54, Identity=68%"; Hit description=PDR -like ABC transporter
KCIGYYKLYYLLKKQSMLLSAPAIEYNGSIPRKCCINGQEEEIDIHXKSNDRANMTQEAKMVMPTMQLALTFRNLNYYVDTPKEMLKQGYPVRRIQLLNSVTGVFRPGVLTALMGVSGAGKTTLLDVLAGRKTGGYIEGDIRIGGRTKVQETFVRILGYCEQVDMH

SEQ ID NO: 105198 - protein, 168 aa, Setaria italica
  misc_feature (14)..(14): Xaa can be any naturally occurring amino acid
  misc_feature (112)..(112): Xaa can be any naturally occurring amino acid
  Transcript Sequence Number=SeqID_39224
  Gene Ontology: Mol. function=nucleoside-triphosphatase activity; Cellular component=membrane; Biological process=transport
  Homolog annotation: Hit_ID=B8XSN5; Match level="QueryCoverage=92%, HitCoverage=10%, E-value=8e-65, Identity=76%"; Hit description=PDR -like ABC transporter
  Pfam annotation: Domain name=ABC2_membrane; Domain location=1-130; Score=-32.1; E_value=0.091; Accession=PF01061.16; Description=ABC-2 type transporter
KKRYYFYPSWAYAXIPASILKVPISLLDSIVWICITYYGIGYTATASRFFCQFLILCLLHQSVSSSYRFIASYAQTHILTFFYQFISLAVFLVFGGFVLSKSSMPGWLSWGXFWISPLAYAQISMAINEFLAPRWQKETMQTKTIGNQILTNHGLYYNWYFYWYYSKV

SEQ ID NO: 105199 - protein, 59 aa, Setaria italica
  Transcript Sequence Number=SeqID_39225
GLFSSLSEGWLIFCVAGYCHNCGKLRQTKCHTSAMSLRNYGVRVRACVHNCSGYRNVAT

SEQ ID NO: 105200 - protein, 61 aa, Setaria italica
  Transcript Sequence Number=SeqID_39226
  Gene Ontology: Mol. function=DNA binding
  Homolog annotation: Hit_ID=B4FN06; Match level="QueryCoverage=96%, HitCoverage=45%, E-value=2e-23, Identity=96%"; Hit description =Programmed cell death protein 5
  Pfam annotation: Domain name=dsDNA_bind; Domain location=3-61; Score =13.8; E_value=3.6e-06; Accession=PF01984.12; Description=Double -stranded DNA-binding domain
MPQKAEERRQMMLAQILSSEARERLSRIALVKPDKARGVEDVLLRAAQTGGISEKVSEERL

SEQ ID NO: 105201 - protein, 128 aa, Setaria italica
  Transcript Sequence Number=SeqID_39227
  Gene Ontology: Mol. function=DNA binding; Biological process =induction of apoptosis
  Homolog annotation: Hit_ID=B4FN06; Match level="QueryCoverage=100%, HitCoverage=100%, E-value=4e-45, Identity=76%"; Hit description =Programmed cell death protein 5
  Pfam annotation: Domain name=dsDNA_bind; Domain location=9-119; Score= 125.2; E_value=2.1e-34; Accession=PF01984.12; Description=Double -stranded DNA-binding domain
MADPELEAIRQRRMQELMAQRGGANQQNAGQQKAQEDAKQEAEERRQMMLAQILSSEARERLSRIALVKPDKARGVEDVLLRAAQTGGISEKVSEERLISLLEQINTHTSKQTKVTIQRRRSVLDDDD

SEQ ID NO: 105202 - protein, 89 aa, Setaria italica
  Transcript Sequence Number=SeqID_39228
  Pfam annotation: Domain name=dsDNA_bind; Domain location=9-88; Score=- 1.3; E_value=7.3e-05; Accession=PF01984.12; Description=Double -stranded DNA-binding domain
MADPELEAIRQRRMQELMAQRGGANQQNAGQQKAQEDAKQEAEERRQMMLAQILSSEARERLSRSSIDDTFDVLIAVLNHLHSNGYWRY

SEQ ID NO: 105203 - protein, 152 aa, Setaria italica
  Transcript Sequence Number=SeqID_39229
  Gene Ontology: Mol. function=transferase activity
  Homolog annotation: Hit_ID=Q2R047; Match level="QueryCoverage=96%, HitCoverage=41%, E-value=1e-53, Identity=44%"; Hit description=Salt -inducible protein, putative
  Pfam annotation: Domain name=PPR; Domain location=5-39; Score=53.1; E_ value=1.1e-12; Accession=PF01535.12; Description=PPR repeat
  Pfam annotation: Domain name=PPR; Domain location=91-125; Score=36.0; E_value=1.5e-07; Accession=PF01535.12; Description=PPR repeat
  Pfam module annotation: Pfam domain module=PPR::PPR; Domain location =5-39::91-125
TPDATVYTVLMNGYCRAGQFQEAWKLFDQMVKLNIKPDVVAYTVLLNGTLKETIQRGLQGFAKERRRYLLREKHQKLLSSMEGEDIEPDVQCYTVLIDGRCKAEFLEEARVLFDEMFQKGLTPDVDTYRVLIDGYRRQGEIRKAEVLQKNER

SEQ ID NO: 105204 - protein, 244 aa, Setaria italica
  misc_feature (232)..(232): Xaa can be any naturally occurring amino acid
  Transcript Sequence Number=SeqID_39230
MFIPAVNLVMPPAGDFLKLESLSLRSCDVSVDSLLPRCPRLRKLCIQRTRILSITGHSPSLEELDVTTHGVLLRVDIEAPLLKKLSIYAVVGISNEFSISYSAPKLEELSWMCGHNSKSGVGLGIWRMSSLTLETRKLLGDKQLADDKESTCLQPQHCPRVDTVSVCIWTRAHYKDATRSFRQHMSHLPVANFSILELDILTRGHAYGGVVLDLLMICSTVQSLKMKLREVXPVEECLVDCTCD

SEQ ID NO: 105205 - protein, 102 aa, Setaria italica
  Transcript Sequence Number=SeqID_39231
TNRFSWVTNQIMLHRAIILTASVSTLYLSMLFTCTRDNNIEKPKKLKWGKPQRWRKTDTASAKEPILYSITHLLSLLLFFFSFCFEDIFYITMHFSFFDSPT

SEQ ID NO: 105206 - protein, 44 aa, Setaria italica
  Transcript Sequence Number=SeqID_39232
  Gene Ontology: Mol. function=DNA-directed DNA polymerase activity; Cellular component=intracellular; Biological process=DNA replication
  Homolog annotation: Hit_ID=Q6L9M0; Match level="QueryCoverage=100%, HitCoverage=7%, E-value=9e-19, Identity=90%"; Hit description=DNA polymerase lambda
VIIVCGGSYRRGKATCGDMDIVITHPDGESHVGFLPKFVQRLKE

SEQ ID NO: 105207 - protein, 66 aa, Setaria italica
  Transcript Sequence Number=SeqID_39233
TYQQSGSLKQSSVMRYKQILSRKACFAEQAVKVVISEVVQRILCIKYFVPKLGYVRLKGHELTAAT

SEQ ID NO: 105208 - protein, 178 aa, Setaria italica
  Transcript Sequence Number=SeqID_39234
  Gene Ontology: Mol. function=protein binding
  Homolog annotation: Hit_ID=Q01KP1; Match level="QueryCoverage=84%, HitCoverage=31%, E-value=3e-33, Identity=50%"; Hit description =OSIGBa0107E14.10 protein
PLTDESLKALGLTCHMLEVIELTFTFCSSRYPSEIGFTQEGIVMLVQSCPIRVLMLNGANNFDDEGMKGLSSAHFLETLELVDCERITDAGISCITSTPSLSSLTLRQCKKVTDNGMDELARSWKLESLTVVGCRRVSRKAVQGAARSVHYSMESESFASLKGMIKMETSTLFRQIFS

SEQ ID NO: 105209 - protein, 182 aa, Setaria italica
  Transcript Sequence Number=SeqID_39235
  Gene Ontology: Mol. function=structural constituent of cell wall; Cellular component=chloroplast; Biological process=lipid transport
  Homolog annotation: Hit_ID=Q5DNZ7; Match level="QueryCoverage=43%, HitCoverage=41%, E-value=1e-13, Identity=52%"; Hit description =Putative proline-rich protein (Fragment)
  Pfam annotation: Domain name=Tryp_alpha_amyl; Domain location=99-180; Score=88.6; E_value=2.2e-23; Accession=PF00234.14; Description =Protease inhibitorseed storageLTP f
  Subcellular localization annotation: CTP_CleavageSite=23; ConfidenceScore=5.43e-01
PPVTRPPVTYPPITGPPTTPPVVGPPVTYPPITGPPVTVPPITGPPVTVPPITGPPSTTPPVTGPPVTYPPGGGGGGSPSTPCPPPPPSTPTTPSSPTCPADSLKLGACVDLLGGLVHVGLGDPVVNKCCPVLEGLVELEAAVCLCTTIKLKLLNINIYLPLALQLLLTCGKTPPPGYTCTV

SEQ ID NO: 105210 - protein, 172 aa, Setaria italica
  misc_feature (153)..(153): Xaa can be any naturally occurring amino acid
  Transcript Sequence Number=SeqID_39236
  Gene Ontology: Mol. function=nucleic acid binding; Cellular component= cytoplasm; Biological process=multicellular organismal development
  Homolog annotation: Hit_ID=Q851R2; Match level="QueryCoverage=98%, HitCoverage=16%, E-value=2e-58, Identity=61%"; Hit description =Protein argonaute MEL1
NNIIQMVGRNNYSADRLAQVFRITVANHMVEVQARVLPPPVLKYHESGREKTVAPSVGEWNMINKKMVNGRTVDRWTCLSFSRMVHHDVVRICYDLVQMCKSIGMDFNATPVIEVQSASPNNIEAALRNVHINAPNLQLLIVILPEISGHYGXIKKLCETELDIVSQCIIQS

SEQ ID NO: 105211 - protein, 223 aa, Setaria italica
  misc_feature (172)..(172): Xaa can be any naturally occurring amino acid
  Transcript Sequence Number=SeqID_39237
  Gene Ontology: Mol. function=nucleic acid binding; Cellular component= cytoplasm; Biological process=multicellular organismal development
  Homolog annotation: Hit_ID=Q851R2; Match level="QueryCoverage=84%, HitCoverage=17%, E-value=2e-69, Identity=65%"; Hit description =Protein argonaute MEL1
  Pfam annotation: Domain name=PAZ; Domain location=4-123; Score=124.9; E_value=2.6e-34; Accession=PF02170.14; Description=PAZ domain
NPNAAFSDRDRLKIKKALRGVRVETTHQQGKRSIYKITGITSVPLAQLSFSCNDGPQLTVVQYFEQRYKYRLQYTAWPCLQSGKDSKPIYLPMEVCEIIEGQKYPRKLSDPQVANILKATCKRPQERENNIIQMVGRNNYSADRLAQVFRITVANHMVEVQARVLPPPVLKXHESGREKTVAPSVGKWNMINKEKNANKRFVFLELAFVGLGILYLLRFTLCF

SEQ ID NO: 105212 - protein, 83 aa, Setaria italica
  Transcript Sequence Number=SeqID_39238
GLISPFRVLFSIHLIHQPLSSPHLSFQVRTSRYCYLFSTQDPHIPPGCILYTVCAQHQWHLTNVQYDTLPSSTPKDFGTKSLM

SEQ ID NO: 105213 - protein, 98 aa, Setaria italica
  Transcript Sequence Number=SeqID_39239
VSRRQKQMGIINKGNTTIPGAKTKEKYFLDIVRESKYSNKFHGSYKSLNVGPKYYTTGDSLRKSEGRKEPWHGVRGWRGWGGGVLGPIQGQKCHNSWP

SEQ ID NO: 105214 - protein, 66 aa, Setaria italica
  Transcript Sequence Number=SeqID_39240
  Gene Ontology: Mol. function=drug transporter activity; Cellular component=membrane; Biological process=multidrug transport
  Homolog annotation: Hit_ID=Q9LUH2; Match level="QueryCoverage=80%, HitCoverage=11%, E-value=2e-09, Identity=54%"; Hit description =Aberrant lateral root formation 5
VAFYFIGMPLAIFFAFKLKLNTMGLWAGLICGLVCQACSLVVITVRTKWSKIAEAIQEEKASYGIA

SEQ ID NO: 105215 - protein, 96 aa, Setaria italica
  Transcript Sequence Number=SeqID_39241
  Gene Ontology: Mol. function=protein serine/threonine kinase activity; Cellular component=plasma membrane; Biological process =protein amino acid phosphorylation
  Homolog annotation: Hit_ID=B9RKH6; Match level="QueryCoverage=89%, HitCoverage=11%, E-value=2e-21, Identity=54%"; Hit description =Serine-threonine protein kinase, plant-type, putative
KVDVYSFGVVLLELTTGKKANDGGELGCLAEWARHHYQSGAAILDVIDKSIRYAGYPSEIETVFSLGVQCTATFPLTRPTMKNVLRILLKCCDQTL

SEQ ID NO: 105216 - protein, 142 aa, Setaria italica
  Transcript Sequence Number=SeqID_39242
  Gene Ontology: Mol. function=methyltransferase activity; Cellular component=nucleus; Biological process=rRNA processing
  Homolog annotation: Hit_ID=Q1EPL1; Match level="QueryCoverage=100%, HitCoverage=16%, E-value=5e-51, Identity=67%"; Hit description=FtsJ -like methyltransferase family protein
KVFRSQDYNAIMYCLKQFFEKVEATKPTASRSTSAEIYIICLKYKAPAKIQPELLDIKHLFSVVPDTNKSRDVMDGRHKRHRDGYEEGNTTLRKVGLASDFIWSDAQTPLEFLGSYNAISFDNPESLPIKNHELTNDDIKNF

SEQ ID NO: 105217 - protein, 292 aa, Setaria italica
  misc_feature (245)..(245): Xaa can be any naturally occurring amino acid
  Transcript Sequence Number=SeqID_39243
  Gene Ontology: Mol. function=methyltransferase activity; Cellular component=nucleus; Biological process=rRNA processing
  Homolog annotation: Hit_ID=Q1EPL1; Match level="QueryCoverage=88%, HitCoverage=40%, E-value=5e-32, Identity=51%"; Hit description=FtsJ -like methyltransferase family protein
APKGAFITKVFFSQDYNAIMYCLKQFFEKVEATKPTASRSTSAEIYIICLKYKAPAKIQPELLDIKHLFSVVPDTNKSRDVMDGRHKRHRDGYEEGKWRIRLRKALASSSQITPKVDDDAETTKVKDDDQLLQEMEELTSVIDRNKRREKKRLSKRRAKDKARKATGMQIDATGDDYGDPDLFSISVIKGGKELQAVESAELDVEDDIEDSENEDMDSDEEQQRYDAQLEEMLDEAYERFVTKKXGGEVKQERKRAKRINPDADADLLEGSEDDGDDVEMDQGFDDDQDPET

SEQ ID NO: 105218 - protein, 107 aa, Setaria italica
  Transcript Sequence Number=SeqID_39244
  Gene Ontology: Mol. function=glucosyltransferase activity; Cellular component=endoplasmic reticulum membrane; Biological process=GPI anchor biosynthetic process
  Homolog annotation: Hit_ID=B6T7F4; Match level="QueryCoverage=100%, HitCoverage=21%, E-value=3e-34, Identity=71%"; Hit description =Dolichyl-P-Man Man
  Subcellular localization annotation: CTP_CleavageSite=29; ConfidenceScore=5.43e-01
LGIPGVVPRTFIGAFVISIFSSPAVFVMRLLHVPKFYSLLTVRLLLSFVTLLSLRLLRVQVKKKFGHQAEVFFVILTAIQFHLLFYSSRPLPNIFALALVNLAYSLW

SEQ ID NO: 105219 - protein, 145 aa, Setaria italica
  misc_feature (8)..(8): Xaa can be any naturally occurring amino acid
  misc_feature (85)..(85): Xaa can be any naturally occurring amino acid
  Transcript Sequence Number=SeqID_39245
  Gene Ontology: Mol. function=protein serine/threonine kinase activity; Biological process=defense response
  Homolog annotation: Hit_ID=A7LM74; Match level="QueryCoverage=94%, HitCoverage=45%, E-value=3e-32, Identity=48%"; Hit description =Jasmonate-induced protein
  Pfam annotation: Domain name=Jacalin; Domain location=10-140; Score =84.8; E_value=3.2e-22; Accession=PF01419.9; Description=Jacalin-like lectin domain
MIGMWGGXGGEEFDVTEPPKRLDSVMIRAGEIIDSFGFSYIDQAGQKHTLGPYGGKGGKLTTIQLAPTEYVKGFSGTTGLMLDHXVVASLAIETNLREYGPYGEEQDMHFSIPLPKNASVVGFFGSAGNLLDAIGVYVMNGSIPN

SEQ ID NO: 105220 - protein, 196 aa, Setaria italica
  misc_feature (83)..(83): Xaa can be any naturally occurring amino acid
  Transcript Sequence Number=SeqID_39246
  Gene Ontology: Mol. function=protein serine/threonine kinase activity; Biological process=defense response
  Homolog annotation: Hit_ID=Q2QVI2; Match level="QueryCoverage=50%, HitCoverage=38%, E-value=2e-24, Identity=52%"; Hit description =Jasmonate-induced protein, putative
  Pfam annotation: Domain name=Jacalin; Domain location=80-187; Score= -35.0; E_value=0.041; Accession=PF01419.9; Description=Jacalin-like lectin domain
VPSPGKEIPFSIPLPEDTSIVGFFGRAGANLEAIGVYVKSTNIDTIEETTSNLDTCSPDEPIIIAEAVPIKIGAWGGDGGRSXDVTEPPKRLDSVMIRAGEIIDSFGFSYIDQACQKHTLGPYGGKGGKLTTIQLAPTEYVKGFSGTTGTYVGSQVVASLAIETIHHVNANCIKKVASTSKEAHNASVLRVGVIVL

SEQ ID NO: 105221 - protein, 528 aa, Setaria italica
  Transcript Sequence Number=SeqID_39247
  Gene Ontology: Mol. function=protein serine/threonine kinase activity; Cellular component=cellular_component; Biological process =agglutination
  Homolog annotation: Hit_ID=Q2R1E7; Match level="QueryCoverage=97%, HitCoverage=64%, E-value=6e-81, Identity=37%"; Hit description =Jacalin-like lectin domain containing protein
  Pfam annotation: Domain name=Jacalin; Domain location=20-168; Score =39.7; E_value=1.2e-08; Accession=PF01419.9; Description=Jacalin-like lectin domain
  Pfam annotation: Domain name=Jacalin; Domain location=208-342; Score =64.6; E_value=3.7e-16; Accession=PF01419.9; Description=Jacalin-like lectin domain
  Pfam annotation: Domain name=Jacalin; Domain location=393-523; Score =88.0; E_value=3.4e-23; Accession=PF01419.9; Description=Jacalin-like lectin domain
  Pfam module annotation: Pfam domain module=Jacalin::Jacalin::Jacalin; Domain location=20-168::208-342::393-523
MDRIRETLPIKVGPWGGSEANPFDITEEPKRLESVTVRSGAVINSFGFTYVDLAGQKHTVGPVGGNGGKLTTIQFAPTEYVKGFCGSVGPTQGTWVVTCLNIETNLRTHEIYDQGNMFLSLPGKVPFGVPSPGKEIPFSIPLPEDTSIVGFFGRAGANLEAIGVYVKSTNIDTIEETTSNLDTCSPDEPIIIAEAVPIKIGAWGGDGGTEFDVTEPPKRLQSMTIRAGDSIDSIGFSYIDEAGKKHSEGPFGGTGGQLTTIKFAPLEYVKKFSGTIGRAVGSGEMLFVASLEIETNVKKYGPYGKEDNEYPFSIPLPENTSVVGFFGRAGRLIDAVGVYIYYCKSPLIDATEETSGNKDEETSKNKDTTSAPPRTITGQTSPIMIGMWGGDGGEEFDVTEPPKRLDSVMIRAGEIIDSFGFSYIDQAGQKHTLGPYGGKGGKLTTIQLAPTEYVKGFSGTTGTYVGSQVVASLAIETNLREYGPYGEEQDMHFSIPLPKNASVVGFFGSAGNLLDAIGVYVMNGSIPN

SEQ ID NO: 105222 - protein, 305 aa, Setaria italica
  misc_feature (49)..(49): Xaa can be any naturally occurring amino acid
  misc_feature (92)..(92): Xaa can be any naturally occurring amino acid
  misc_feature (141)..(141): Xaa can be any naturally occurring amino acid
  Transcript Sequence Number=SeqID_39248
MPPHKRRRACTPRGTSSPTAAVTLPAELILEIAARSEADTLFRCDAACXAKLFRREILSPAFVRRICRAPDGVVPPRLLGFLDETFSLVHPXTPAAASFAEESLAPFVSRSAADLLEQEYEAVTSRADIPRRACRPGAQRXDMCVYDPMTGGRTFLPLPPDVGRDDHLYTTCTYVLLTAADGIGIGCSFLLLAADLAGLHQARSCARCIRVQTVSSDAGGEWSPVTVARAPRLPRCLASTGDHYDVAVVLGGVVHWLLHDYVLTKASWLNTFGSNCCCCQAVVMGFAKGTWLNTLATSVCCCKWA

SEQ ID NO: 105223 - protein, 273 aa, Setaria italica
  misc_feature (18)..(18): Xaa can be any naturally occurring amino acid
  Transcript Sequence Number=SeqID_39249
  Gene Ontology: Mol. function=thioredoxin-disulfide reductase activity; Cellular component=cytoplasm; Biological process=removal of superoxide radicals
  Homolog annotation: Hit_ID=Q69PS6; Match level="QueryCoverage=100%, HitCoverage=82%, E-value=1e-133, Identity=91%"; Hit description =Thioredoxin reductase
  Pfam annotation: Domain name=Pyr_redox; Domain location=101-196; Score=84.6; E_value=3.4e-22; Accession=PF00070.19; Description =Pyridine nucleotide-disulphide oxidore
  Pfam annotation: Domain name=Pyr_redox_2; Domain location=1-241; Score=52.0; E_value=2.3e-12; Accession=PF07992.6; Description =Pyridine nucleotide-disulphide oxidore
  Pfam module annotation: Pfam domain module=Pyr_redox::Pyr_redox_2; Domain location=101-196::1-241
ENFPGFPEGILGAELMDXRCRAQSARFGTKILTETVTSVDLSARPFRVASDDTVVHADSVVVATGAVARRLHFAGSDAFWNRGISACAVCDGAAPIFRNKPIAVVGGGDSAMEEANFLTKYGSQVYIIHRRNAFRASKIMQARALSNPKIQVVWDSEVVEAYGGAEGGPLAGVKVKNVVSGEVSDLQVAGLFFAIGHEPATKFLGGQLELDSDGYVVTKPGSTHTSVKGVFAAGDVQDKKYRQAITAAGSGCMAALDAEHYLQEVGAQEGKTD

SEQ ID NO: 105224 - protein, 69 aa, Setaria italica
  Transcript Sequence Number=SeqID_39250
KNLLNWYKHSNPALDEQSKHLNQKSNYTICCSQCMTSTNAHIRTRNSRIFNKHCSSSEVDLCIMLHYYY

SEQ ID NO: 105225 - protein, 155 aa, Setaria italica
  misc_feature (84)..(84): Xaa can be any naturally occurring amino acid
  misc_feature (140)..(140): Xaa can be any naturally occurring amino acid
  Transcript Sequence Number=SeqID_39251
MARGYLRYIIDMYKKGLCWQGDWKDSDMKVRSDGREFTITKVPEYNISKDGMKEDFKKFFEILFPYYMHESEETNSVSGKIEKXKVLPYYFLQFQQDCAEVPHPQRESVKFENFQKFLGSHPAFMSPLAMTTFIGDLFIXCDNLRHHNAEFLPLQ

SEQ ID NO: 105226 - protein, 125 aa, Setaria italica
  misc_feature (118)..(118): Xaa can be any naturally occurring amino acid
  Transcript Sequence Number=SeqID_39252
  Homolog annotation: Hit_ID=B4G1N4; Match level="QueryCoverage=93%, HitCoverage=29%, E-value=4e-10, Identity=42%"; Hit description =CsAtPR5
QAEQLRVSPTIQCQRLLERAFISKRSTVFFTLGQIRSSVEATIFVRVMGGSWRCGFHGQFGARVTRDPRGRAPDTSIDYEKVTLLVCEDLVEQSRVTDSGDILLSRRVLSAVAGGKLXSFVRAWQ

SEQ ID NO: 105227 - protein, 111 aa, Setaria italica
  Transcript Sequence Number=SeqID_39253
  Gene Ontology: Mol. function=zinc ion binding
  Homolog annotation: Hit_ID=B6SYA5; Match level="QueryCoverage=81%, HitCoverage=17%, E-value=6e-36, Identity=75%"; Hit description =Protein binding protein
HQASRVLSSKPTADRTAATTPSRYRVWHGTPILVIISMLAYFCFLEQLLVGDHGTAALAISLPFACVLGLFSSLTTTKMVSRRYVWIYSAVQFLFIVLFTHLFYRYVRSSL

SEQ ID NO: 105228 - protein, 88 aa, Setaria italica
  Transcript Sequence Number=SeqID_39254
EEMQQNISAIGHRSVTFERERIANIHDRIVYNNQLFSPQHSEQYHLLKILVSIHKVHKYLTLGMRSWEGTLQLQQRFFFPCPHENWQT

SEQ ID NO: 105229 - protein, 205 aa, Setaria italica
  misc_feature (109)..(109): Xaa can be any naturally occurring amino acid
  misc_feature (124)..(124): Xaa can be any naturally occurring amino acid
  misc_feature (131)..(131): Xaa can be any naturally occurring amino acid
  misc_feature (155)..(155): Xaa can be any naturally occurring amino acid
  misc_feature (187)..(187): Xaa can be any naturally occurring amino acid
  Transcript Sequence Number=SeqID_39255
  Gene Ontology: Mol. function=protein binding; Cellular component =ribonucleoprotein complex; Biological process=nuclear mRNA splicing, via spliceosome
  Homolog annotation: Hit_ID=B6TS72; Match level="QueryCoverage=41%, HitCoverage=30%, E-value=1e-32, Identity=81%"; Hit description=U2 small nuclear ribonucleoprotein A
TLLVNNNRITRINPNLGEFLPKLHTLVLTNNRLTNLAEIDPLASLPNLQYLSLLDNTVTKQPDYRLYVIHKLKHLRLLDFKKVKQQVVYSFPLEWLQIMFWNGPRQCWXKRDKQAALLTLYFHXLDACTPXALADMFSHCLCLVYIAVLSVSESXSRYLFCFVGESCGSTKVSLEGGRGRGKEGTCXGVYSWTARCSRHHRGAGS

SEQ ID NO: 105230 - protein, 361 aa, Setaria italica
  misc_feature (281)..(281): Xaa can be any naturally occurring amino acid
  Transcript Sequence Number=SeqID_39256
  Gene Ontology: Mol. function=zinc ion binding
  Homolog annotation: Hit_ID=B6SYA5; Match level="QueryCoverage=33%, HitCoverage=21%, E-value=1e-29, Identity=53%"; Hit description =Protein binding protein
  Pfam annotation: Domain name=zf-C3HC4; Domain location=223-269; Score= 49.7; E_value=1.1e-11; Accession=PF00097.17; Description=Zinc finger, C3HC4 type (RING finger)
  Subcellular localization annotation: CTP_CleavageSite=59; ConfidenceScore=5.09e-01
MEAAESKQQQSNTTSLFLCNINSFLPSLQHQLPSLPVQGAGISRSSSTLPMEHAHGGTLCAEDQKKPLTVTSCLLPARSLRSTAAVAPAAQAQSQADGDLGIRSLSFSKILSFRMARAPSSLSTNSDNYIDQLDHHVAAAKGNSTKQEREEEEKLKQVCRSQSVPASVSRFKLTKGLRRVAAEENIRVFRLRVVPLVPPEAGVTAAGEEAAAAEDIAAEEAVCRICMVALSEEAVLKLECCCKGELALAHRGCAIKWFSIKGNGTCDVCSKEVLTFPVQPXRRLHDHPPSIIHQAQGAQQQADADRTAATTPSRYRVWHGTPILVIISMLAYFCFLEQLLVALLSVYLEQLICCLPDRSNS

SEQ ID NO: 105231 - protein, 370 aa, Setaria italica
  Transcript Sequence Number=SeqID_39257
  Gene Ontology: Mol. function=acid-amino acid ligase activity; Cellular component=intracellular; Biological process=ubiquitin -dependent protein catabolic process
  Homolog annotation: Hit_ID=Q6YU89; Match level="QueryCoverage=88%, HitCoverage=18%, E-value=1e-149, Identity=86%"; Hit description =Putative HECT ubiquitin-protein ligase 3
  Pfam annotation: Domain name=Arm; Domain location=155-195; Score=8.3; E_value=1.1; Accession=PF00514.15; Description=Armadillobeta-catenin -like repeat
  Pfam annotation: Domain name=Arm; Domain location=198-236; Score =22.2; E_value=0.0021; Accession=PF00514.15; Description =Armadillobeta-catenin-like repeat
  Pfam annotation: Domain name=HEAT; Domain location=203-238; Score =21.7; E_value=0.0031; Accession=PF02985.14; Description=HEAT repeat
  Pfam module annotation: Pfam domain module=Arm::Arm::HEAT; Domain location=155-195::198-236::203-238
STALQGLLRRLGAGLDDLLPSSSSAPSSATSAHLKRILAGLQAHGDESRQLQSLMQLCEMLSIGTEDSLAAFPVDAFVPILVGMLGREDEPATAGASPDVMLLAARALANLVDVLPSSCSAVVHYGAIQCFCARLLTIEYMDLAEQSLQALKKISLEHPTACLRAGALMAVLSYLDFFSTGVQRVALSTAANICRKLPSDASEFVMEAVPLLTNLLNHHDSKVLEHASVCLTRIAEAFAHYPEKLDELCNHGLVAQAASLISVGNSSGQASLSTSTYTGLIRLLSICASGSLLAVKTLLLLGISGTLKDILSGSGLISGTSVAPALTRPADQMFEIVSLADDLLPHMPARIINLPTYYHAYKSSSTKKSA

SEQ ID NO: 105232 - protein, 194 aa, Setaria italica
  Transcript Sequence Number=SeqID_39258
  Gene Ontology: Cellular component=mitochondrion
  Homolog annotation: Hit_ID=B9T4E7; Match level="QueryCoverage=94%, HitCoverage=15%, E-value=2e-41, Identity=44%"; Hit description =Pentatricopeptide repeat-containing protein, putative
  Pfam annotation: Domain name=PPR; Domain location=17-51; Score=2.3; E_ value=4.8; Accession=PF01535.12; Description=PPR repeat
  Pfam annotation: Domain name=PPR; Domain location=52-86; Score=28.2; E_value=3.4e-05; Accession=PF01535.12; Description=PPR repeat
  Pfam annotation: Domain name=PPR; Domain location=87-121; Score=8.8; E_value=0.81; Accession=PF01535.12; Description=PPR repeat
  Pfam module annotation: Pfam domain module=PPR::PPR::PPR; Domain location=17-51::52-86::87-121
WLIFQRLEDLGFAPDATTFGIFIFHSFREMKLKSAFVYLSECFSRHIKPRVCAYNAILGGVFREGLYRHAKYIFEDMVERKVTPNISTYKIILAGYCWYRQFDDIEQVLRDMKTIGVNDFPSGNCAFSKALSFLGLDHLGVKIKRDNATGFPKAEFFDSVGNGLYLDTDSKKFEISLAHILDTAIHPVVNSEPP

SEQ ID NO: 105233 - protein, 85 aa, Setaria italica
  Transcript Sequence Number=SeqID_39259
  Gene Ontology: Mol. function=heat shock protein binding
  Homolog annotation: Hit_ID=B6U723; Match level="QueryCoverage=100%, HitCoverage=18%, E-value=5e-36, Identity=86%"; Hit description=Heat shock protein binding protein
GYSGQYGASFGYLEKVEGFRSIFTRRDVGTHAVHSLQEGDLGALSHQIPARKVTKGEGSALPPGDCWELDPASLPPELLRLEPQK

SEQ ID NO: 105234 - protein, 62 aa, Setaria italica
  Transcript Sequence Number=SeqID_39260
KILLSKESGTRKSEKQVKVLNFLSLSPFNHVVISPISLRGKFMPASAMLVCQVIHHLKKTCC

SEQ ID NO: 105235 - protein, 472 aa, Setaria italica
  Transcript Sequence Number=SeqID_39261
  Gene Ontology: Mol. function=transferase activity, transferring glycosyl groups; Biological process=metabolic process
  Homolog annotation: Hit_ID=A1IWC6; Match level="QueryCoverage=99%, HitCoverage=99%, E-value=0.0, Identity=71%"; Hit description =Putative glucosyl transferase
  Pfam annotation: Domain name=UDPGT; Domain location=4-470; Score= -28.3; E_value=7.5e-10; Accession=PF00201.10; Description=UDP -glucoronosyl and UDP-glucosyl transferase
MTKTVVLYPGLGVGHLTPMVELAKLFLQHGVAVTVALVEPPVKAPDFSAAVARAAASNPSITFHVLPPLAADAPPAGSSSDDTPKHHVIQMFDHLGAMNAPLRDFLRSLPAVDALVIDMFCADALDVAAELKLPAYFFYASGAGDLAVFLNMPSVRANMTMSLEEFRDSVLSLPGAPPFKASDLPAAILTDSEAAKAVLRMFQRMPESNGILINTFESLETRAARALRDGLCVPYRATPPVYCVGPLVSGGGEKEHECIRWLDAQPDRSVVFLTFGSLGTFPKKQLEEIAAGLEKSGQRFLWVVRSPRSADQNLNEPLGEPDLDALLPDGFLERTKGRGLVLKSWAPQVDVLRHRATGAFVTHCGWNSTLEGIVAGLQLLCWPLYAEQRMNMVFIVEEMKLGVEMRGYDEEMVTAEEVETKLRWVMESEDGRALRERVLVVKDRAADALKEGGSSYAAFVEFLEDLETVNRS

SEQ ID NO: 105236 - protein, 84 aa, Setaria italica
  Transcript Sequence Number=SeqID_39262
IQPYFNFKLDPLVHFLQLFLCNGIWLLYSSTQKLLQTLFNIRFAINKSHFVHIVDRISRIISAAFFFFSIVLAEKQYFVLAEKQ

SEQ ID NO: 105237 - protein, 90 aa, Setaria italica
  Transcript Sequence Number=SeqID_39263
  Gene Ontology: Mol. function=DNA binding; Cellular component =mitochondrion
  Homolog annotation: Hit_ID=B6ST71; Match level="QueryCoverage=53%, HitCoverage=7%, E-value=6e-14, Identity=75%"; Hit description=DNA -binding protein
LLNEIFNYALQYPLKRLLILFQGNRLPSYLRSSTCEIIFTIFLQLLEWVEESKLLEFVERDYASRVDLTAKVYGLHKAEQYIEKIPAAHR

SEQ ID NO: 105238 - protein, 138 aa, Setaria italica
  Transcript Sequence Number=SeqID_39264
VGYLIFKALAVQLDVSREFQNGVVPGIISVSAKLLPTIQNLVNKVAAEQQPEHHHPPPIEPPQPQMQPPPLLLSPRSPMSELRRMHMPPLSPRKVASPSPSSSSSSAVSSPRHVAEDQKPRTVVAGHENEPNIADSIV

SEQ ID NO: 105239 - protein, 226 aa, Setaria italica
  Transcript Sequence Number=SeqID_39265
  Gene Ontology: Mol. function=protein serine/threonine kinase activity; Cellular component=integral to membrane; Biological process=protein amino acid phosphorylation
  Homolog annotation: Hit_ID=A7VM26; Match level="QueryCoverage=92%, HitCoverage=35%, E-value=1e-75, Identity=62%"; Hit description =Receptor-like kinase (Fragment)
  Pfam annotation: Domain name=Pkinase; Domain location=1-207; Score= -14.7; E_value=1.3e-07; Accession=PF00069.17; Description=Protein kinase domain
  Pfam annotation: Domain name=Pkinase_Tyr; Domain location=1-207; Score=-75.2; E_value=9.9e-09; Accession=PF07714.9; Description =Protein tyrosine kinase
  Pfam module annotation: Pfam domain module=Pkinase::Pkinase_Tyr; Domain location=1-207::1-207
GDERFLIYEYMKNGSLEMWLRNQADAIEALGWPDRLKICLGSARGLSFLHHGFVPHIIHRDMKSSNILLDENFEPRVSDFGLARIISACETHVSTDIAGTFGYIPPEYGMTMKSSTKGDVYSFGVVMLELLTGRPPTGQEEGEGGGNLVGWVRWMIAHGKEHELFDPCLPISSLWREQMACVLAIARDCTADEPWKRPTMLEVVKGLKMAQTMECGPLVVTVTRDV

SEQ ID NO: 105240 - protein, 197 aa, Setaria italica
  misc_feature (70)..(70): Xaa can be any naturally occurring amino acid
  Transcript Sequence Number=SeqID_39266
  Gene Ontology: Mol. function=ribonuclease activity; Cellular component=cytoplasm; Biological process=carbohydrate metabolic process
  Homolog annotation: Hit_ID=B0LV36; Match level="QueryCoverage=34%, HitCoverage=7%, E-value=7e-22, Identity=68%"; Hit description =Ribonuclease E
VELLLEPIKNNVQCDSIYLGIVTKLVPHMGGAFVDIGILRPSLMSIKQNRDPFVYPQVVKNSKKTRIPSXIEFLTINEDNLPTYDEDDDMSDDEFADEETHDGSSSFPVENITDNEEGMADAKIDIVDSTEFEGISGYDEDKDDENDHMEDEYSEEILQADQSEISNDLKTLSSIQHALRESDDDTNGSRWSQVRKG

SEQ ID NO: 105241 - protein, 223 aa, Setaria italica
  misc_feature (82)..(82): Xaa can be any naturally occurring amino acid
  misc_feature (205)..(205): Xaa can be any naturally occurring amino acid
  misc_feature (210)..(210): Xaa can be any naturally occurring amino acid
  Transcript Sequence Number=SeqID_39267
  Homolog annotation: Hit_ID=Q2QNV4; Match level="QueryCoverage=87%, HitCoverage=17%, E-value=2e-39, Identity=41%"; Hit description =Pentatricopeptide, putative, expressed
ISLYAVALNSCAGLAALRNGNALSSCALKTGHWAHLVVGNALMNMYSKSGSIEDACRVFTSMPLCDVISWNLIITGYAHHGXAEEVPSYVTSIGVLSACAQLGLVDEGFYYLNTMMKEVGVTPGNEHYTCMVGLLCRAGRLDEAERFIVDNGIGIDVVASRSLLSSCQIYRNYGLGHRVAEQILQLKPNDIGTYVLLSNVYAKAXNRWDXGVVKLRKQMRDEG

SEQ ID NO: 105242 - protein, 105 aa, Setaria italica
  misc_feature (22)..(22): Xaa can be any naturally occurring amino acid
  Transcript Sequence Number=SeqID_39268
  Gene Ontology: Mol. function=electron carrier activity; Cellular component=integral to membrane; Biological process=oxidation reduction
  Homolog annotation: Hit_ID=C0KHM0; Match level="QueryCoverage=94%, HitCoverage=17%, E-value=7e-39, Identity=74%"; Hit description =Putative ferulate 5-hydroxylase
VFLNYWESAEEFMPERFMEGGXSAFAMEYRGNDFIYLPFGTGRRICPGISFAISVVEIMLANLVYHFNWELPPESKDRGIDMSESFGLTVHRTEKLLLVPVLPQE

SEQ ID NO: 105243 - protein, 91 aa, Setaria italica
  Transcript Sequence Number=SeqID_39269
WRDRLKLLSKRQSALRSRLNPIKVVASRQLTRIILLHAAGQRSSSATAVGAGLGVPQGQLQAILVGVVLAAHLPIPRERELARLHLHVAVA

SEQ ID NO: 105244 - protein, 72 aa, Setaria italica
  Transcript Sequence Number=SeqID_39270
LNSLRLSLSAPENVASCKSAKYGCVPKGIVCKSTIRKSLLLYFSYAYYLTRSKIVYLIRLHGLNFKKSFLSD

SEQ ID NO: 105245 - protein, 377 aa, Setaria italica
  Transcript Sequence Number=SeqID_39271
  Gene Ontology: Mol. function=oxidoreductase activity; Biological process=oxidation reduction
  Homolog annotation: Hit_ID=B6TFG1; Match level="QueryCoverage=92%, HitCoverage=100%, E-value=1e-177, Identity=87%"; Hit description =NADP-dependent oxidoreductase P1
  Pfam annotation: Domain name=ADH_zinc_N; Domain location=187-334; Score=110.8; E_value=4.4e-30; Accession=PF00107.18; Description=Zinc- binding dehydrogenase
TLESRHKNEANQTPTCCCSGTGPRRRCGMEKEAAVARNRKVVLRGYIDRAPREDDMELVDGGAVALRVPGGAGGPAVLVKNLYLSCDPYMRGRMRDFQGSYIPPFKPGSPLEGFGVGKVIDSTHPGFSAGDFVSGMTGWEDYSLITKPEQLRKIQQSDIPLSYHLGLLGMPGFTAYVGFYEICSPKKGEFVFVSAASGAVGQIVGQLAKLHGCYVVGSAGTNQKVELLKEKLGFDAAFNYKEEPDLTAALKRYFPEGIDIYFENVGGPMLDAVLLNMRIHGRIAVCGMVSQHGVTAPSGIHNLFSLISKRIEMKGFIQSDYLHLFPRFVDDITKHYRDGKIVYVEDMSVGLESGPAAFVGLFSGKNVGKQVVRVSQD

SEQ ID NO: 105246 - protein, 236 aa, Setaria italica
  misc_feature (20)..(20): Xaa can be any naturally occurring amino acid
  misc_feature (47)..(47): Xaa can be any naturally occurring amino acid
  misc_feature (119)..(119): Xaa can be any naturally occurring amino acid
  misc_feature (213)..(213): Xaa can be any naturally occurring amino acid
  misc_feature (220)..(220): Xaa can be any naturally occurring amino acid
  Transcript Sequence Number=SeqID_39272
  Gene Ontology: Mol. function=receptor activity
  Homolog annotation: Hit_ID=B6UEB9; Match level="QueryCoverage=99%, HitCoverage=58%, E-value=8e-68, Identity=55%"; Hit description=F-box domain containing protein
FDPADSSHFHLVQFWDDVRXEEIEAVHSYSSETRAWSDRASKWKRGXGGEWGQWGQAILKLTFGRAFINGLLYFIVYHVQKSEALILAVDGEGKACRIIRWHDKHKLANAAFIAQCQGXLQCISMDSQLKGFRIYFTQLSVWVLEDNDTQEWILKHNVSCSQLFGFLSCPSHDLDIVAIHPDHNSVIFVQRWNRKLVLYNMDTKELHPLRSLXGGYRFIXPYVPCFVESSVLATKY

SEQ ID NO: 105247 - protein, 140 aa, Setaria italica
  Transcript Sequence Number=SeqID_39273
  Gene Ontology: Mol. function=carbonate dehydratase activity; Cellular component=chloroplast; Biological process=carbon utilization
  Homolog annotation: Hit_ID=C0P441; Match level="QueryCoverage=99%, HitCoverage=56%, E-value=5e-48, Identity=61%"; Hit description =Carbonic anhydrase
  Pfam annotation: Domain name=Pro_CA; Domain location=1-139; Score =81.7; E_value=2.7e-21; Accession=PF00484.11; Description=Carbonic anhydrase
TVRNIAGLVPAYHQNMHSSVASAIEFAVTILKVKCIVVIGHSCCGGIRELLSLKEDRPQTYHFIDNWVKIGLAIKKKVEREHALLSFDDQCTMLEIEAVNLSLRNLTTYPFVKDKLGKGTLKLIGARYDFVHGSFQTWHA

SEQ ID NO: 105248 - protein, 107 aa, Setaria italica
  misc_feature (36)..(36): Xaa can be any naturally occurring amino acid
  misc_feature (39)..(39): Xaa can be any naturally occurring amino acid
  Transcript Sequence Number=SeqID_39274
  Subcellular localization annotation: CTP_CleavageSite=49; ConfidenceScore=5.43e-01
DLLSCNLQICCRKSRAKPGRKSGSGKAEVGTSTPKXRKXVNETTLNTTPAMNTRRQLALNKEAGAGTSQEVNTTTTMEVITTMEVTTPIKKKRAVKKQLTPRKANNC

SEQ ID NO: 105249 - protein, 104 aa, Setaria italica
  Transcript Sequence Number=SeqID_39275
EPKTMLSILENKILVLKGYAQTVVYHYRFCSTATSNSCTERSQLGAAWFLASIGHATHARATACGRLSRRHSQRAQMLLAMLWRGYCSCGELWPTTKHPLSHKR

SEQ ID NO: 105250 - protein, 48 aa, Setaria italica
  Transcript Sequence Number=SeqID_39276
KKRKYLRIKLDRNILRNCCVMCAFNSQSLTFFHSAVWKHSVCKAAVDI

SEQ ID NO: 105251 - protein, 79 aa, Setaria italica
  Transcript Sequence Number=SeqID_39277
PETLQKLVVSFVQLTNPGTISRQKCLEIDFTKNSISTLASWTWQSHDSRCVKQLTRGWKYVATWTWTAVSLKSIWLSYL

SEQ ID NO: 105252 - protein, 52 aa, Setaria italica
  Transcript Sequence Number=SeqID_39278
ILGQPEHCTFVYLQHVLTDAHNMEPTVVKCKLLMRHIILEQSLSNLKHRGWK

SEQ ID NO: 105253 - protein, 132 aa, Setaria italica
  Transcript Sequence Number=SeqID_39279
  Gene Ontology: Mol. function=hydrolase activity; Biological process =tRNA processing
  Homolog annotation: Hit_ID=B6SKI3; Match level="QueryCoverage=99%, HitCoverage=31%, E-value=4e-56, Identity=77%"; Hit description =Hydrolase/ zinc ion binding protein
RDRMLFPSSTPITMPDSNGNLEDYSDNEPAKRLKMDTKDKEQSTDESCCGDLSETTRPYLCTGFDIYLVWEPCAMCAMALVHQRFKRVFYAFRNPVTGALGGVYRLHGEKSLNHHYNVFQVSVPETYLNGFE

SEQ ID NO: 105254 - protein, 160 aa, Setaria italica
  Transcript Sequence Number=SeqID_39280
  Homolog annotation: Hit_ID=Q5Z6M5; Match level="QueryCoverage=74%, HitCoverage=38%, E-value=1e-33, Identity=58%"; Hit description =Aluminum-activated malate transporter-like
MHAAEARAGLVATLNGIVRLFISQSSVDVVAHRRSKDKVATIDQTLCIHPKSFLGNSFLRRYDSTSTMDGFKLSWPAQRSFNPNVPLEDEDSKTYESASALSLATFASLLIEFVARLGNVVDAFKELSQEANFKDPVEEPTTVSTSDGGYFDKIRKLVGF

SEQ ID NO: 105255 - protein, 141 aa, Setaria italica
  Transcript Sequence Number=SeqID_39281
  Gene Ontology: Mol. function=electron carrier activity; Cellular component=integral to membrane; Biological process=oxidation reduction
  Homolog annotation: Hit_ID=C0KHM0; Match level="QueryCoverage=100%, HitCoverage=27%, E-value=7e-54, Identity=70%"; Hit description =Putative ferulate 5-hydroxylase
EVRLVVAKIREAAAAGTAMDLSDLLNSFTNDIVCHAVSGKFFREEGRNKLFRELVEANSSLIGGFNVEDYFPALVKLGIVKRMVCAKAHRVNKMWDDLLEKLIDDHASRPPASERDGEETEFIDVLLSVQQEYRLTRDHIK

SEQ ID NO: 105256 - protein, 232 aa, Setaria italica
  Transcript Sequence Number=SeqID_39282
  Gene Ontology: Mol. function=microtubule motor activity; Cellular component=microtubule associated complex; Biological process =microtubule-based movement
  Homolog annotation: Hit_ID=Q7XKR9; Match level="QueryCoverage=91%, HitCoverage=19%, E-value=1e-98, Identity=83%"; Hit description =OSIGBa0144C23.2 protein
  Pfam annotation: Domain name=Kinesin-related; Domain location=15-232; Score=12.5; E_value=2.8e-15; Accession=PF06548.3; Description=Kinesin- related
MLINLALVLMLEMANSKLNLAASIQKGLQVIESHQNNSAWRRASVVLNARIMDIQPCKVDVAIQTDPEESEARDNPLALIPSCLLEASANESRDPSACRDLQLVPADGAVPSDDQKQQHFLKAVEKVLAGAIRREMARDEQCAKQAAEIQQLNRLVQQYKHERECNAVIAQTLEGKIARLESLMDGTLPTEEFMNEEYLSLMNEHKILQKKYENHPDVLRAEIEVKRQQSTN

SEQ ID NO: 105257 - protein, 369 aa, Setaria italica
  Transcript Sequence Number=SeqID_39283
  Gene Ontology: Mol. function=microtubule motor activity; Cellular component=microtubule associated complex; Biological process =microtubule-based movement
  Homolog annotation: Hit_ID=Q7XKR9; Match level="QueryCoverage=97%, HitCoverage=32%, E-value=1e-119, Identity=62%"; Hit description =OSIGBa0144C23.2 protein
  Pfam annotation: Domain name=Kinesin-related; Domain location=1-304; Score=342.1; E_value=1.1e-99; Accession=PF06548.3; Description =Kinesin-related
RKKLTIEIEEYLSLMNEHKILQKKYENHPDVLRAEIEVKRLQEELDMFRNSGDEKEVLQEEIQDLKNQLHYMLSSSSSIRRLLPPLPLSQGAYSGPGTKDKDGDINVADAPDWTEAESKWITLTEELRVELEATKSLVGKLQSELESEKKCSEELKEAVQTAIQGAARHLEQYADLQENHFRLLALHRRMREGVEDVKMRAEKAGIKGAELRFINALAAEISVLKAQNEGLQGQLRDTAEAVQAAGELLVRLKDAEEAEALAKKRRLVAEQETEKAYQEIEKLKKNYDQEILSLNERLAESSQSQCKDGAVQPEEPSDLEPPRYDTAGSPSGSQQWKVELDTLQQGGSFEVSKSTDLNSWFYGYDKCNI

SEQ ID NO: 105258 - protein, 211 aa, Setaria italica
  Transcript Sequence Number=SeqID_39284
TSTTSSELHWLLGFPSFIFFFFIDHDQTTTWMIRSILASSTRPRCCCLLPHRHCCCCSCPHGHHHQQPAAPALLTTATAGAHYRKQQPKGASVPDPYPAGAPPAVGQMSHPSSHAHADASHQMKVAPEEMAAPPSRHTGNPPLRMPTKDGIVPVGLEGRDNGGKGREWWSLPGSSPKLPLPADYERREHVGEVGGHRCRSSRHHSILVCLS

SEQ ID NO: 105259 - protein, 79 aa, Setaria italica
  Transcript Sequence Number=SeqID_39285
SFMSYDDWSYIIYVNIGVDFHTVVIDNQSDWMHPNSVILAAFELHEIVNTPPLYLHSSLSNFFRFSCFWKHGSTCVLDS

SEQ ID NO: 105260 - protein, 31 aa, Setaria italica
  Transcript Sequence Number=SeqID_39286
EDAWRARAEEREERRHQLVAALLAKLGGDSS

SEQ ID NO: 105261 - protein, 149 aa, Setaria italica
  Transcript Sequence Number=SeqID_39287
  Gene Ontology: Mol. function=sequence-specific DNA binding; Cellular component=nucleus; Biological process=regulation of transcription, DNA-dependent
  Homolog annotation: Hit_ID=Q7XUV3; Match level="QueryCoverage=96%, HitCoverage=62%, E-value=1e-56, Identity=77%"; Hit description =OSJNBa0072F16.13 protein
  Pfam annotation: Domain name=K-box; Domain location=1-83; Score=72.9; E_value=1.2e-18; Accession=PF01486.9; Description=K-box region
QREAASLRQQLHNLQENHRQLMGQDLSGLGVKELQNLENQLEMSLRCIRTKKDQLLVDEIHELSRKGSLIQQDNMELCRKVNVIHQENVELYKLYEKEAAGEVSGDSTTPYNFAVVENANIPIHLELNTLPQEDVEQPAPPKLGLQLNP

SEQ ID NO: 105262 - protein, 72 aa, Setaria italica
  Transcript Sequence Number=SeqID_39288
FHLEMFDLQLLNVPKYQVGNQNTILSFEQHLKHKIPQKQKYKSKIMVLRIRQVKTTQKFSTFHLNILKRKLE

SEQ ID NO: 105263 - protein, 137 aa, Setaria italica
  Transcript Sequence Number=SeqID_39289
  Gene Ontology: Mol. function=hydrolase activity, hydrolyzing O -glycosyl compounds; Biological process=carbohydrate metabolic process
  Homolog annotation: Hit_ID=Q3Y6U9; Match level="QueryCoverage=100%, HitCoverage=14%, E-value=8e-47, Identity=62%"; Hit description =Putative xylanase Xyn2
  Pfam annotation: Domain name=CBM_4_9; Domain location=3-132; Score =30.9; E_value=5.2e-06; Accession=PF02018.9; Description=Carbohydrate binding domain
VVPPMAKESLALDDDEPLNGKHIHVTNRTQTWMGPAQIITDKLTLYATYQVSAWVRVGALPAGASPQNINVAVAVDSQWLNGGQVMARDERWYEVGGAFRVEAKPATRVMIYVQGPDAGVDLMVAGLQVFPVDRKVR

SEQ ID NO: 105264 - protein, 45 aa, Setaria italica
  Transcript Sequence Number=SeqID_39290
WAGYIQLLAEGVDPRHQTFSYRSRFKKRRRLETTAEKFRHVHSHI

SEQ ID NO: 105265 - protein, 92 aa, Setaria italica
  Transcript Sequence Number=SeqID_39291
  Gene Ontology: Mol. function=zinc ion binding; Cellular component =intracellular; Biological process=regulation of transcription, DNA -dependent
  Homolog annotation: Hit_ID=Q2L9Y1; Match level="QueryCoverage=98%, HitCoverage=14%, E-value=2e-46, Identity=87%"; Hit description=EMF -like
  Pfam annotation: Domain name=VEFS-Box; Domain location=1-85; Score =128.4; E_value=2.3e-35; Accession=PF09733.1; Description=VEFS-Box of polycomb protein
RMLDDFVDVTKDEKLIMHMWNSFVRKQRVLADGHIPWACEAFSQSHGQQLVQNPALLWGWRFFMIKLWNHSLLDARTMDTCNTILQGFQDKK

SEQ ID NO: 105266 - protein, 622 aa, Setaria italica
  Transcript Sequence Number=SeqID_39292
  Gene Ontology: Mol. function=zinc ion binding; Cellular component =intracellular; Biological process=regulation of transcription, DNA -dependent
  Homolog annotation: Hit_ID=Q2L9Y1; Match level="QueryCoverage=100%, HitCoverage=99%, E-value=0.0, Identity=79%"; Hit description=EMF-like
  Pfam annotation: Domain name=VEFS-Box; Domain location=477-617; Score= 347.2; E_value=3.1e-101; Accession=PF09733.1; Description=VEFS-Box of polycomb protein
MPGLPLPQPPAQTTECEYAHPGPAGHIFRQRSRAGLSPDEKLAAEKDLALYCKPVELYNIIQRRAIKNPPFMQRCLLYNILAKRKKRIQITISLSGSANTELQAQNIFPLYVLLARPTSNVLLEGHSPIYRFSRVCLLTSFSEFGNKDNTEATFIIPDVKNLSTSRSCNLDIILISCGQVGQSTGEDYCSGNHVESSSLQKLEGKCSWGKIPTNLLASSLESCVTLSLGTIVELASKVTMRPSFLEAKFLEQDSCLTFCSHKVDATGSYQLQLCMSAQEAGAKDMSLSPYNSYSYNDLPPSSFSDIIRLRAGNVIFNYKYYYDTMHETEVTEDFSCPFCYVRCGSFKGLGCHLNSSHDQFCFEFWISEEYQVVNVRLKADASRTELLAEGVDPRHQTFSYRSRFKKRRRLETTAEKFRHVHSHIMESGSHEDAQALSEDDYVQRENGSSVADAPVDPSHTVPGSNLPPPTVLQFGKSRKLSVERSDPRNRQLLQKRQFFHSHRAQPMALEQVFSDRDSEDEVDDDIADFEDRRMLDDFVDVTKDEKLIMHMWNSFVRKQRVLADGHIPWACEAFTRSHGQQLVQNPALLWGWRFFMIKLWNHSLLDARTMNTCNIILQSYQD

SEQ ID NO: 105267 - protein, 216 aa, Setaria italica
  misc_feature (18)..(18): Xaa can be any naturally occurring amino acid
  misc_feature (79)..(79): Xaa can be any naturally occurring amino acid
  misc_feature (145)..(145): Xaa can be any naturally occurring amino acid
  misc_feature (174)..(174): Xaa can be any naturally occurring amino acid
  Transcript Sequence Number=SeqID_39293
  Gene Ontology: Mol. function=zinc ion binding; Cellular component =nucleus
  Homolog annotation: Hit_ID=B9SEU6; Match level="QueryCoverage=76%, HitCoverage=49%, E-value=5e-21, Identity=37%"; Hit description =Polynucleotide kinase-3'-phosphatase, putative
  Pfam annotation: Domain name=zf-PARP; Domain location=43-119; Score =67.0; E_value=7e-17; Accession=PF00645.10; Description=Poly(ADP -ribose) polymerase and DNA-Ligase Zn-finger region
HELEKNPKREQTAVSPLXEPSPKKVKTQSPAEGVSDKASVSVEYAKSGRSTCKGCNENIAKATLRLGASFHDTRGFENXKWYHVTCFPTSSYPVFPVESLKGFDSIKSNDREKLQELEENYKRDDNAADQLKKEMAHSMGDSKEXLEINLEAVKLAAGNNRIRPAISFSVSDIXKDYKGATLPTHWKAFETVIFREQEDGLHCLSVLSICLVLFLL

SEQ ID NO: 105268 - protein, 329 aa, Setaria italica
  Transcript Sequence Number=SeqID_39294
  Gene Ontology: Mol. function=zinc ion binding; Cellular component =nucleus; Biological process=regulation of transcription, DNA -dependent
  Homolog annotation: Hit_ID=Q94FY6; Match level="QueryCoverage=70%, HitCoverage=99%, E-value=1e-114, Identity=84%"; Hit description =Diphosphonucleotide phosphatase 2
  Pfam annotation: Domain name=PNK3P; Domain location=151-313; Score =274.4; E_value=2.6e-79; Accession=PF08645.3; Description =Polynucleotide kinase 3 phosphatase
KGALGLTWPAHDPRGYDSTKWYHVACFPASSYPVFPVESLKGFDSIKSNDREKLQELEENYKRDGNAADQSSEPNLKEQMVDSMGVSKEGAENNLEAVKLAAGNNRIRPAISFSVSDISKDYKGATLPTHWKAFETVIFREQEDGLHASAKIAAFDFDGCLAKTSVRIIGADKWSLQHKSIPEKLQRLYIDGYKLVIFTNESNIDRWKNKRQEAIDSKVGRLDNFIECVKVPIQVFIACGLGKGKGTPDDPYRKPNPGMWCLMAQHFNSGIEIDMDKSFYVGDAAGRENDHSDADIEFAKVIGLKFHVPEEYFGPLRHATGDRQGTQGI

SEQ ID NO: 105269 - protein, 153 aa, Setaria italica
  Transcript Sequence Number=SeqID_39295
  Gene Ontology: Mol. function=zinc ion binding; Cellular component =nucleus; Biological process=regulation of transcription, DNA -dependent
  Homolog annotation: Hit_ID=Q94FY6; Match level="QueryCoverage=95%, HitCoverage=62%, E-value=4e-77, Identity=92%"; Hit description =Diphosphonucleotide phosphatase 2
  Pfam annotation: Domain name=PNK3P; Domain location=1-151; Score =218.1; E_value=2.3e-62; Accession=PF08645.3; Description =Polynucleotide kinase 3 phosphatase
TFCKCSIGADKWSLQHKSIPEKLQRLYIDGYKLVIFTNESNIDRWKNKRQEAIDSKVGRLDNFIECVKVPIQVFIACGLGKGKGTPDDPYRKPNPGMWCLMAQHFNSGIEIDMDKSFYVGDAAGRENDHSDADIEFAKAIGLKFHVPEEYFGP

SEQ ID NO: 105270 - protein, 134 aa, Setaria italica
  Transcript Sequence Number=SeqID_39296
  Homolog annotation: Hit_ID=B9S314; Match level="QueryCoverage=82%, HitCoverage=38%, E-value=4e-25, Identity=50%"; Hit description =Copper ion binding protein, putative
LYRLTPTPTTPTPYDPNTPPFAGPCTYWMTHPGVVWGLFGFWCPLVRLFGPSAAVPFGHDLTVPEALANTRQDGVGALFREGTASLLNSMVDNRFAFTTQEVKDAFGAALSSGDNGAAAAQAQLFKKANEGRVK

SEQ ID NO: 105271 - protein, 76 aa, Setaria italica
  Transcript Sequence Number=SeqID_39297
MRRKRGKWGGGRVLVKKRVIPSLEPLTCCEKLSPLLRQKLVVFLSSSNPGAAEDSCGKPTDVVSKETELKKSVCSS

SEQ ID NO: 105272 - protein, 64 aa, Setaria italica
  Transcript Sequence Number=SeqID_39298
PTKLVSNTVDGEYVEDGWVDKTCKICKKDTRGEPRQVDKLGRYVHVACLENPKPANFFTKLFAR

SEQ ID NO: 105273 - protein, 153 aa, Setaria italica
  Transcript Sequence Number=SeqID_39299
  Subcellular localization annotation: CTP_CleavageSite=66; ConfidenceScore=5.09e-01
TVKRTTWRLLGSLAHLHPHDSARTPLAAAPFPSIFACAGGPSPPSVPVAMPRHQAGHFSSPTPPLVAAKPREVERMKQRHIRGPLWSGELCYQLSPEPVTLSGPLRVRELRKLNVCCKLKDNNYNRLSELGLQGFIRVVRDSHSLDLTLQYFR

SEQ ID NO: 105274 - protein, 132 aa, Setaria italica
  Transcript Sequence Number=SeqID_39300
ACSRNLDVRMGNFHANVEFKAHLNVNILSMMCCNKSGHNAGRGLVRVRSDKLQDASPGRTRLFVSAFVADRPTAIDAGSRVPICKHTGGEEGDKKTASSSAWPVGPARSLPVTYIVHPFSSKTLICSCFIVD

SEQ ID NO: 105275 - protein, 178 aa, Setaria italica
  misc_feature (177)..(177): Xaa can be any naturally occurring amino acid
  Transcript Sequence Number=SeqID_39301
  Subcellular localization annotation: CTP_CleavageSite=12; ConfidenceScore=5.77e-01
SFTLPSYTTTILASLAGSGFTSTSSTTTIFSISIDFSTPMSSTSIAIFSTSKGFSTPTSSTTSLVVTRPSSFCFFQGLSSSTLFALAGSTSFTLPSCTTSLAGSSLKLLRSTAATFSISVGFSTPMSSTATTSFSTSKGFSTPTSSITSLVIARTSVFRSFQGLSSSTMSTLARLTXF

SEQ ID NO: 105276 - protein, 144 aa, Setaria italica
  Transcript Sequence Number=SeqID_39302
CPWNEQNAKDLATTSEAVEDVGLEKDLEVENITATIEDISVEKSTNIENIVAVKGDDVKPEPVSNTSIVIMNDGSEVDLASEDNVLEDSPRKEQNAEGLVTTSEVVEDVSIKKYLEVENIATAVEDITIFCYNSNIFNLLLGLL

SEQ ID NO: 105277 - protein, 58 aa, Setaria italica
  Transcript Sequence Number=SeqID_39303
  Gene Ontology: Mol. function=damaged DNA binding; Cellular component =nucleus; Biological process=nucleotide-excision repair
NSYSSRRSEREPSSSKLQTDQDHEHVHEYPEEDQSFDEETFVRTKRCPCGFSIQVEEL

SEQ ID NO: 105278 - protein, 79 aa, Setaria italica
  Transcript Sequence Number=SeqID_39304
  Subcellular localization annotation: CTP_CleavageSite=72; ConfidenceScore=5.06e-01
ADADMLCAVRALAECPCGPYRASRRPPASDGCLRTRPASMLAILPSTPLDRTSRGLTRRRSPWPVSEMGLARCVSERVD

SEQ ID NO: 105279 - protein, 49 aa, Setaria italica
  Transcript Sequence Number=SeqID_39305
  Gene Ontology: Mol. function=DNA binding; Cellular component=nucleus; Biological process=regulation of transcription
  Homolog annotation: Hit_ID=Q9SNM6; Match level="QueryCoverage=100%, HitCoverage=12%, E-value=4e-22, Identity=100%"; Hit description =Putative NAM (No apical meristem) protein
  Pfam annotation: Domain name=NAM; Domain location=11-49; Score=-49.4; E_value=0.008; Accession=PF02365.7; Description=No apical meristem (NAM) protein
MSISVNGQSVVPPGFRFHPTEEELLTYYLKKKVASERIDLDVIRDVDLN

SEQ ID NO: 105280 - protein, 173 aa, Setaria italica
  Transcript Sequence Number=SeqID_39306
  Gene Ontology: Cellular component=integral to membrane; Biological process=transport
  Homolog annotation: Hit_ID=B6TE63; Match level="QueryCoverage=94%, HitCoverage=77%, E-value=4e-90, Identity=96%"; Hit description =Transmembrane emp24 domain-containing protein 3
  Pfam annotation: Domain name=EMP24_GP25L; Domain location=23-173; Score=52.6; E_value=1.5e-12; Accession=PF01105.16; Description =emp24gp25Lp24 family
MGVPSWRAVCLSVLCAVLFLRPAAGIRFVIDREECFSHNVEYEGDTVHVSFVVIKADTPWHYSEEGVDLVVKDPNGAQVRDSRDKTSDKFEFIVQKRGVHRFCFTNKSPYHETIDFDVHVGHFSYFEQHAKDEHFAPLFEQIAKLDEALYNIQFEQHWLEAQTDRQAICGIIP

SEQ ID NO: 105281 - protein, 161 aa, Setaria italica
  Transcript Sequence Number=SeqID_39307
  Gene Ontology: Cellular component=integral to membrane
  Homolog annotation: Hit_ID=B4FU25; Match level="QueryCoverage=76%, HitCoverage=37%, E-value=2e-58, Identity=89%"; Hit description =Membrane protein
CTSTASTTPPAAAGGGYGYGYGYGGYEGPEERKWWPWLVPTVIVACIAVFVVEMYENNCPKHGSPLGECVAGFLRRFSFQPLRENPLLGPSSSTLGKMGALDWNKIVHQHQGWRLISCIWLHAGLIHLVVNMLSLLFIGIRLEQQFGFGKLMTVLNDCYDF

SEQ ID NO: 105282 - protein, 119 aa, Setaria italica
  misc_feature (15)..(15): Xaa can be any naturally occurring amino acid
  Transcript Sequence Number=SeqID_39308
  Gene Ontology: Cellular component=integral to membrane
  Homolog annotation: Hit_ID=B4FU25; Match level="QueryCoverage=98%, HitCoverage=35%, E-value=3e-31, Identity=63%"; Hit description =Membrane protein
  Pfam annotation: Domain name=Rhomboid; Domain location=1-108; Score =59.9; E_value=9.3e-15; Accession=PF01694.14; Description=Rhomboid family
QQFGFVRIGAIYLLXGFGGSVLSALFLRNNYISVGASGALFGLLGSMLSELLMNWTIYSNKAAAIITLLFIIALNLAIGILPHADNFAHIGGFATGFLLGFVLLARPQFGWMERHELSF

SEQ ID NO: 105283 - protein, 142 aa, Setaria italica
  Transcript Sequence Number=SeqID_39309
  Gene Ontology: Mol. function=DNA binding; Cellular component=nucleus; Biological process=regulation of transcription
  Homolog annotation: Hit_ID=B9SVG2; Match level="QueryCoverage=80%, HitCoverage=29%, E-value=3e-21, Identity=48%"; Hit description=NAC domain-containing protein, putative
LVFYKGRAPHGQKSDWIMHEYRLDDPSGDAAAAAATVAAAAAAASDASQEDGWVVCRVFKKKHHHKESSGGGGGGGGRNGGKEAAVNHGLQYSSSDDALDQILQYMGRSCKQEHEQLLSPQLLVGRSVGRRGRVGRRLPSGP

SEQ ID NO: 105284 - protein, 373 aa, Setaria italica
  Transcript Sequence Number=SeqID_39310
  Gene Ontology: Mol. function=DNA binding; Cellular component=nucleus; Biological process=regulation of transcription
  Homolog annotation: Hit_ID=B9SVG2; Match level="QueryCoverage=73%, HitCoverage=88%, E-value=9e-73, Identity=50%"; Hit description=NAC domain-containing protein, putative
  Pfam annotation: Domain name=NAM; Domain location=39-168; Score =302.9; E_value=6.8e-88; Accession=PF02365.7; Description=No apical meristem (NAM) protein
MNKVLCSFFFSLRTHERQSRIRIQQQRSMSISVNGQSVVPPGFRFHPTEEELLNYYLKKKVASQEIDLDVIRDVDLNKLEPWDIQEKCRIGSGPQNDWYFFSHKDKKYPTGTRTNRATAAGFWKATGRDKAIYNAVKRIGMRKTLVFYKGRAPHGQKSDWIMHEYRLDDPSGGGRNGGKEAAVNHGLQYSSSDDALDQILQYMGRSCKQEHEQLLSPQLSGGGGAGRAARYLRPIETVLDRHGFMKLPPLESPSSAALTTPQPHVSAAGDAAAATAGGDDLLLHGGVSGITDWAMMDRLVASHLNGQAPDAAAPAADHLCFDGGADDADGLAFYTAATTRLLGGGGGEDDLWSFTRTSSAPATSTERLSHVSL

SEQ ID NO: 105285 - protein, 281 aa, Setaria italica
  Transcript Sequence Number=SeqID_39311
  Gene Ontology: Cellular component=integral to membrane
  Homolog annotation: Hit_ID=B4FU25; Match level="QueryCoverage=95%, HitCoverage=81%, E-value=1e-104, Identity=73%"; Hit description =Membrane protein
  Pfam annotation: Domain name=Rhomboid; Domain location=109-254; Score= 207.4; E_value=3.9e-59; Accession=PF01694.14; Description=Rhomboid family
MASNGDGKGRVAAAAAGGGYGYGYGYGGYEGPEERKWWPWLVPTVIVACIAVFVVEMYENNCPKHGSPLGECVAGFLRRFSFQPLRENPLLGPSSSTLGKMGALDWNKIVHQHQGWRLISCIWLHAGLIHLVVNMLSLLFIGIRLEQQFGFVRIGAIYLLSGFGGSVLSALFLRNNYISVGASGALFGLLGSMLSELLMNWTIYSNKAAAIITLLFIIALNLAIGILPHADNFAHIGGFATGFLLGFVLLARPQFGWMERHELPQTSQPPKYKPYQKQDKR

SEQ ID NO: 105286 - protein, 162 aa, Setaria italica
  Transcript Sequence Number=SeqID_39312
  Gene Ontology: Cellular component=integral to membrane
  Homolog annotation: Hit_ID=B4FU25; Match level="QueryCoverage=100%, HitCoverage=49%, E-value=1e-51, Identity=65%"; Hit description =Membrane protein
  Pfam annotation: Domain name=Rhomboid; Domain location=1-90; Score =16.1; E_value=0.00015; Accession=PF01694.14; Description=Rhomboid family
GSVLSALFLRNNYISVGASGALFGLLGSMLSELLMNWTIYSNKAAAIITLLFIIALNLAIGILPHADNFAHIGGFATGFLLGFVLLARPQFGWMERHELPQTSQPPKYKAYQYVLWVVALVLLLIGFVISLVMLFEGKNGNDGCHWCHYLNCVPTSKWKCNT

SEQ ID NO: 105287 - protein, 212 aa, Setaria italica
  Transcript Sequence Number=SeqID_39313
  Gene Ontology: Mol. function=ATP-dependent helicase activity; Cellular component=integral to membrane; Biological process=transport
  Homolog annotation: Hit_ID=B6TE63; Match level="QueryCoverage=98%, HitCoverage=98%, E-value=1e-116, Identity=97%"; Hit description =Transmembrane emp24 domain-containing protein 3
  Pfam annotation: Domain name=EMP24_GP25L; Domain location=23-204; Score=157.3; E_value=4.5e-44; Accession=PF01105.16; Description =emp24gp25Lp24 family
MGVPSWRAVCLSVLCAVLFLRPAAGIRFVIDREECFSHNVEYEGDTVHVSFVVIKADTPWHYSEEGVDLVVKDPNGAQVRDSRDKTSDKFEFIVQKRGVHRFCFTNKSPYHETIDFDVHVGHFSYFEQHAKDEHFAPLFEQIAKLDEALYNIQFEQHWLEAQTDRQAILNENMSRRAVHKALFESAALIAASVIQVYLLRRLFERKLGTSRV

SEQ ID NO: 105288 - protein, 74 aa, Setaria italica
  Transcript Sequence Number=SeqID_39314
NFVSSSSSYLWVLIVSYGMSTSFHLRLLEQSAMHQSRSLQRPGSLWKFSSGLHDATNTCIFFPIWPLGSFHCTN

SEQ ID NO: 105289 - protein, 86 aa, Setaria italica
  Transcript Sequence Number=SeqID_39315
  Subcellular localization annotation: CTP_CleavageSite=3; ConfidenceScore=5.18e-01
GFPGAARTSPSVRALGRKIRILKEVRKQLRFTQGPKKSSKDLVSTNHSWSTTSSSTSVIDGGWLLQSPHEHYVGETVCECISNTPS

SEQ ID NO: 105290 - protein, 198 aa, Setaria italica
  Transcript Sequence Number=SeqID_39316
  Gene Ontology: Mol. function=phosphotransferase activity, alcohol group as acceptor; Cellular component=chromosome
  Homolog annotation: Hit_ID=B9RB21; Match level="QueryCoverage=99%, HitCoverage=6%, E-value=2e-29, Identity=37%"; Hit description=Ataxia telangiectasia mutated, putative
ADSALILLGGMIVRDQVHTSFLSEDTWNLQIFKQMPSPSALYFIACYFSRIGFQGDLSNSIFIRKNLLRSTLELVHSKEFSLLNEQNVVLIPEAIFSLCAAFSSLPINSSDTLQLFGDCKIYSKSLENESWVLKDELLYSVEALSEITLDSSAKVISDKCHRVHLPGTIQQPMLLELMDFIKGFVASNEQFEKLDLSN

SEQ ID NO: 105291 - protein, 103 aa, Setaria italica
  Transcript Sequence Number=SeqID_39317
  Homolog annotation: Hit_ID=Q60DK1; Match level="QueryCoverage=46%, HitCoverage=7%, E-value=2e-16, Identity=85%"; Hit description =Transposon protein, putative, CACTA, En/Spm sub-class
CCTSFPFVPLSDCATGVAAVPKFCRRRAEVLPPRHNESRIADREFDACDADENYNPMPSSSASGWPEDEPLVEDVNMNAFRDELAHALFMECYFFFVSLIEDL

SEQ ID NO: 105292 - protein, 56 aa, Setaria italica
  Transcript Sequence Number=SeqID_39318
GERTEVVVVEGEPREALCRAAADMGAGLLVVGSRGLGAIKRHVTWRPLVSQHVEFG

SEQ ID NO: 105293 - protein, 91 aa, Setaria italica
  misc_feature (47)..(47): Xaa can be any naturally occurring amino acid
  Transcript Sequence Number=SeqID_39319
  Gene Ontology: Cellular component=vacuole; Biological process =response to stress
  Homolog annotation: Hit_ID=Q75LL0; Match level="QueryCoverage=89%, HitCoverage=40%, E-value=2e-14, Identity=51%"; Hit description =Putative stress-related protein
RTCHQRGVSAEVVVVEGEPREALCRAAADMGAGLLVVGSRGLGAIKXTPGCGRRAFLGSVSDYCAHHASCPIMVVKPPRDDDDHAQRTEAS

SEQ ID NO: 105294 - protein, 176 aa, Setaria italica
  Transcript Sequence Number=SeqID_39320
SWKLLKIVCRFFSRDVRCTTILGFNACPNSLLLIMWKLNLLSDSKTQDVIRLRQKEVGHAKEIGVRFYVTEHFRGRSTWSRGEREVIARLRIRNCWQLKLMCNFYSVYLVPSMLTNVVPKIRLILVGADNFARRVSVEIQTGPNSQHAFCNKHAKELLGLLWTTAKDCGPAILSIY

SEQ ID NO: 105295 - protein, 66 aa, Setaria italica
  Transcript Sequence Number=SeqID_39321
  Subcellular localization annotation: CTP_CleavageSite=38; ConfidenceScore=5.69e-01
QPNNGLISNRVYFLFPAFVPSTSLFFSSFPTRAYTCTHVMMLQPTSAPVRYVHRRCCKNFINNILG

SEQ ID NO: 105296 - protein, 422 aa, Setaria italica
  misc_feature (88)..(88): Xaa can be any naturally occurring amino acid
  Transcript Sequence Number=SeqID_39322
  Gene Ontology: Cellular component=nucleoplasm; Biological process =anaphase-promoting complex-dependent proteasomal ubiquitin-dependent protein catabolic process
  Homolog annotation: Hit_ID=B9SQN9; Match level="QueryCoverage=91%, HitCoverage=23%, E-value=1e-139, Identity=60%"; Hit description =Meiotic checkpoint regulator cut4, putative
FTAEGQMNYGLQMAVSLAIGFLFLGGGTHTFSTQNSGIAALLVSLYPRLPTGPNDNRCHLQAFRHLYVISTEPRWVQTVDVDTELPVXFCPLEVTIAETEYYDETNYCEVTPCLLPERSVLKSIRVCGPRYWPQVIKLTPEDKPWWRSGDKTDPFNGGVLYIKRKVGSCSYSDDPIGCQSLISRAMHEVCDTPSASCSNQPNSTDHSSFRVDQIVSTFSANPSLIAFAKLCSESWKNRCNGNFREFCSQVLYECMSKDRPSLLQVYISFYTIIESMWEHLKMGHFPFYDSLFLPNLKVALAYNEALVDGRITNGGIIQSMFLESLMKRMGDIFAELPNLKDNLGRYLTTGRWPDAQNDVVILSWYLQWYSIPPPHVVASAVNKVRPRVPAGVSMLPLLRLLLPTTHLVGLMEIEKFHAALKA

SEQ ID NO: 105297 - protein, 112 aa, Setaria italica
  Transcript Sequence Number=SeqID_39323
  Gene Ontology: Mol. function=nucleic acid binding; Cellular component= nucleus; Biological process=regulation of transcription, DNA-dependent
  Homolog annotation: Hit_ID=Q67W65; Match level="QueryCoverage=82%, HitCoverage=5%, E-value=6e-12, Identity=48%"; Hit description =Transcription initiation factor TFIID subunit 1
GTSIYGRGAIKSKQSEAGQMIKSSAHSAALTPKGSTATEVKEAWNSFAEGRLPLKLKAAMTFDGNDILLVKRSALGMDALECDHYGVLCDYVVLVVNSLPSACAKSASRSRE

SEQ ID NO: 105298 - protein, 209 aa, Setaria italica
  Transcript Sequence Number=SeqID_39324
  Gene Ontology: Mol. function=nucleic acid binding; Cellular component= nucleus; Biological process=regulation of transcription, DNA-dependent
  Homolog annotation: Hit_ID=Q67W65; Match level="QueryCoverage=74%, HitCoverage=11%, E-value=8e-42, Identity=49%"; Hit description =Transcription initiation factor TFIID subunit 1
  Pfam annotation: Domain name=zf-CCHC; Domain location=28-47; Score =5.7; E_value=0.081; Accession=PF00098.15; Description=Zinc knuckle
EQYLLVKRSALGMDALEEKRQCGKYGTLICGACGQLGHIRTNKLCPKYGEDQENSGMDTNSTKSNPLDEVSQMRIKTPSKKLTTMVLSEVPETRGPECIEKKKSVQVKFKCGDDYPPDTLKASVVFQPPAELGKDIPCKMITIKQPKVLVDQERHVEFLASENKSREDWCDRESGQMNSLHGSRSSLEERSSSNRIIMENDGSLITFKG

SEQ ID NO: 105299 - protein, 70 aa, Setaria italica
  Transcript Sequence Number=SeqID_39325
SHNPMLSCIQKCIFINNYQLQFIPSSDVRKLCIMLTYSVQCFQTSSQVYQQLNCFTKSTANKSGGFLLLY

SEQ ID NO: 105300 - protein, 63 aa, Setaria italica
  Transcript Sequence Number=SeqID_39326
RSFHTRGQFNNLFKILRVFSEFQKIHFQSFCFYDMMYAIVKDAKPFRTKDYTPYLHDKVANQH

SEQ ID NO: 105301 - protein, 181 aa, Setaria italica
  misc_feature (106)..(106): Xaa can be any naturally occurring amino acid
  Transcript Sequence Number=SeqID_39327
  Gene Ontology: Mol. function=chromatin binding; Cellular component =chromatin; Biological process=chromatin assembly or disassembly
  Homolog annotation: Hit_ID=Q01MB4; Match level="QueryCoverage=86%, HitCoverage=20%, E-value=2e-31, Identity=37%"; Hit description =OSIGBa0132O24.3 protein
TRKASSRLEKEVGTRTVLELKGFLFDLPYWTTLKLPHNLDVMHMEKNICKILIGTLLKIAEKTKDTINVRVDLEEIGIRPHLHMLNTTEEESCKMPEAPYTMGKKXLGNFFRQLCCKTLKLDILNKLKIDILIILCKLEKIFPPAFFDVMVHLAVHLPDEAIIRGPVQYGWMYPVERRCWR

SEQ ID NO: 105302 - protein, 103 aa, Setaria italica
  Transcript Sequence Number=SeqID_39328
  Gene Ontology: Mol. function=oxidoreductase activity; Cellular component=chloroplast; Biological process=metabolic process
  Homolog annotation: Hit_ID=Q6PLQ9; Match level="QueryCoverage=100%, HitCoverage=24%, E-value=5e-48, Identity=83%"; Hit description =Polyphenol oxidase (Fragment)
  Pfam annotation: Domain name=Tyrosinase; Domain location=1-103; Score= -28.4; E_value=3.5e-05; Accession=PF00264.12; Description=Common central domain of tyrosinase
LQIHNCWLFFPWHRFYLYFHERILGKLINDDTFALPFWNWDAPDGMALPAIYANMSSPLYDERRNPAHQPPFTLDLDYSGTDSTIPREQQIDQNLRIMYRQVV

SEQ ID NO: 105303 - protein, 195 aa, Setaria italica
  misc_feature (86)..(86): Xaa can be any naturally occurring amino acid
  Transcript Sequence Number=SeqID_39329
  Gene Ontology: Mol. function=oxidoreductase activity; Cellular component=chloroplast; Biological process=metabolic process
  Homolog annotation: Hit_ID=C0SPI2; Match level="QueryCoverage=100%, HitCoverage=35%, E-value=4e-87, Identity=79%"; Hit description =Polyphenol oxidase
  Pfam annotation: Domain name=Tyrosinase; Domain location=65-195; Score=3.9; E_value=6.7e-08; Accession=PF00264.12; Description=Common central domain of tyrosinase
LPRTSAPDLSCCLTSRTGTEIVDFKPPPASAPLRVRPAAHLVDQEHLAKYERAVSLMKQLPDDDPRSFGQQWRVHCAYCDAAYDQXGFPNLDLQIHNCWLFFPWHRFYLYFHERILGKLINDDTFALPFWNWDAPDGMALPAIYANMSSPLYDERRNPAHQPPFTLDLDYSGTDSTIPREQQIDQNLRIMYRQVV

SEQ ID NO: 105304 - protein, 152 aa, Setaria italica
  Transcript Sequence Number=SeqID_39330
KSMPARPKSGGHADCDDDNDDKNYDPPPRKPIKADEDDEALVKPVVRSSPDDGSHTSVKAHKKPKLRVRISFAKSVASASVTARHSGLEYEEEVARSPSTSTESSEDSDGLGGGSPGSQHQLQKGEDGNDTAEDSSPKMVLDTAKSTDSEPK

SEQ ID NO: 105305 - protein, 628 aa, Setaria italica
  misc_feature (587)..(587): Xaa can be any naturally occurring amino acid
  Transcript Sequence Number=SeqID_39331
  Gene Ontology: Mol. function=metal ion binding
  Pfam annotation: Domain name=DUF594; Domain location=560-621; Score =82.5; E_value=1.5e-21; Accession=PF04578.5; Description=Protein of unknown function, DUF594
SILWILCATKVLQRIAFTEVGKRSYAHGKNARLISSYMSQMLEWEPPQDAHLQQEDDNDTLIKTCNYIVMGEEKLVDIEPTADGYKLGKAKSPGYDSIVKLLEENDSIITVRKVWELDDKDKFFSLQQIQSLKRICLSFALFKLLRRRFEHLPAVTKEEARNSQNLILKGLYNKGQTSSSAEAVFQVLNDEVNFLSEYYHSVVPVVLASPFFLFINYFLVNIVVAFLCFMTVILCGNGDVRYALHSLGADNYTLQYGVGNIAICLLLKATSSPSAFFSIVDLSITILLFIIFFYEEIWEFFVFLLSNWFMVSLVYNYIAKPSWLKRSTFPGGLVLGGFSIIMWLRTKMSHADLRMKQFSVLNLRWPPKLPLFATFTSMAVKTVVVPSSVKESIMKYLANQHDDPQANPLTNGMSTLHNRNNNLYCQDLSWACRSNSVAEVILTWHIATSIMEVKCDTPQNGEDISRRKVAFRLSKYCAYLVAFHPELLPDNPEKVECVFEDMKAELKAMLGCQDYYLSSQHKRVQKIMDEKTTPLRQSQPSSTAGQSDDDKIKVVQDGVNLARSLMTKTNKWQVLADVWTEIIIYLXPSSDEERVKGHEEALVQGGEFITVLWALTTHIGISRPSKSE

SEQ ID NO: 105306 - protein, 298 aa, Setaria italica
  Transcript Sequence Number=SeqID_39332
  Gene Ontology: Mol. function=RNA methyltransferase activity; Cellular component=nucleus; Biological process=RNA processing
  Homolog annotation: Hit_ID=Q10T58; Match level="QueryCoverage=92%, HitCoverage=16%, E-value=1e-113, Identity=72%"; Hit description=RNA methyltransferase, TrmH family protein, expressed
  Pfam annotation: Domain name=SpoU_methylase; Domain location=129-272; Score=107.8; E_value=3.8e-29; Accession=PF00588.11; Description=SpoU rRNA Methylase family
RPEVSEFECVPVSVMERVIEFLNDVREDLRHAMAKDTVTIKNEGLAVEGHGDEDKSGEKVSVLLQPGCQDALDFQKKITPRRDSEQALNLNARDHSRLISEIEEDDQLFNLALEARLHAAETIKQSQQELIVVASLVDRIPNLAGLTRTCEVFRAAGLVVADKSILLDKQFQLISVTAEKWLPITELPVDSVKAYLERKRAQGYSVIGLEQTAHSRPLDRFEFPRRTVLVLGREKEGIPVDIIHILDACVEIPQLGVVRSLNVHVSGAIAVWEYTRQHSQQPRPSSSVLTLLNADATS

SEQ ID NO: 105307 - protein, 41 aa, Setaria italica
  Transcript Sequence Number=SeqID_39333
ALYSLVISPLLMTFIFDTSFSLLLVAHVPTYGFILAYPGCL

SEQ ID NO: 105308 - protein, 68 aa, Setaria italica
  Transcript Sequence Number=SeqID_39334
IVSMHVLESILSYSTNSHITIFQYLCFLGNQSSLVKPLYTVKNIGCVYIKNLNHSNFQGSAQCNVRGL

SEQ ID NO: 105309 - protein, 156 aa, Setaria italica
  Transcript Sequence Number=SeqID_39335
  Subcellular localization annotation: CTP_CleavageSite=61; ConfidenceScore=5.81e-01
PDATPGAAKAEASSSVSVKFTLPSPVTRSGVVKVSSSYASVNSTLPSAITESATIQAATPCASANSALPSPFAKSGVIEATSSVTNSGCAPFALPCPSMHSTSSEDIESLYALLLQDNSDPSGAQAAVGGTAIKAVNVSKQVTTTKPIMQASPIQV

SEQ ID NO: 105310 - protein, 145 aa, Setaria italica
  Transcript Sequence Number=SeqID_39336
TKSDGITSNTVNLEVFEHLKVSLHHGRIVDHENEVVANAIGVGPHEVFRAADPDAPIQIINEDQEVVNLPEVVEFLQATGLTDFGLQQLIESAQDEQVFVLFWNRSFHTMIKHDGNLYALHNYMDNISTNIVWREFNLQGEGQFF

SEQ ID NO: 105311 - protein, 123 aa, Setaria italica
  misc_feature (27)..(27): Xaa can be any naturally occurring amino acid
  Transcript Sequence Number=SeqID_39337
  Gene Ontology: Mol. function=protein kinase activity; Cellular component=plasma membrane; Biological process=protein amino acid phosphorylation
  Homolog annotation: Hit_ID=B6SWT1; Match level="QueryCoverage=86%, HitCoverage=16%, E-value=5e-36, Identity=71%"; Hit description =Protein kinase
  Pfam annotation: Domain name=LysM; Domain location=53-96; Score=26.0; E_value=0.00016; Accession=PF01476.12; Description=LysM domain
  Subcellular localization annotation: CTP_CleavageSite=40; ConfidenceScore=5.05e-01
ANITYQGLTTCQALIAQNPLHDSRGLXSLTVPLRCACPSSAQAARGVRHLLSYLVMWGDDVTSIAARFRVAARDVLEANSLDADQIIFPFTTLLIPLRTPPTTDMLASPAPPPAPTPPQTAPP

SEQ ID NO: 105312 - protein, 158 aa, Setaria italica
  misc_feature (116)..(116): Xaa can be any naturally occurring amino acid
  Transcript Sequence Number=SeqID_39338
  Gene Ontology: Mol. function=nucleotide binding; Biological process =defense response
  Homolog annotation: Hit_ID=Q5CAF9; Match level="QueryCoverage=98%, HitCoverage=15%, E-value=7e-61, Identity=74%"; Hit description =OSJNBa0065H10.8 protein
  Pfam annotation: Domain name=LRR_1; Domain location=30-51; Score =10.1; E_value=3.6; Accession=PF00560.25; Description=Leucine Rich Repeat
  Pfam annotation: Domain name=LRR_1; Domain location=53-74; Score=4.9; E_value=35; Accession=PF00560.25; Description=Leucine Rich Repeat
  Pfam annotation: Domain name=LRR_1; Domain location=7-28; Score=2.8; E_value=90; Accession=PF00560.25; Description=Leucine Rich Repeat
  Pfam module annotation: Pfam domain module=LRR_1::LRR_1::LRR_1; Domain location=30-51::53-74::7-28
TSTRFRLLTVLSLWYIPITKLPSSVTNLLNLRYLGIRSTLIKELPHELGRLHKLQTLDAKWSMVQRLPGSITKLKGLRHLILFRRVAADFRFLYPGKAVVLPIGMENLTCLQTLKXIEADEKTVESLRSLKQMRSLELFGVHEGNIIHLPSSISKMSH

SEQ ID NO: 105313 - protein, 249 aa, Setaria italica
  Transcript Sequence Number=SeqID_39339
  Gene Ontology: Mol. function=binding; Biological process=protein modification process
  Homolog annotation: Hit_ID=Q5SNE4; Match level="QueryCoverage=92%, HitCoverage=37%, E-value=6e-70, Identity=57%"; Hit description =Ankyrin-like protein-like
  Pfam annotation: Domain name=Ank; Domain location=1-33; Score=13.7; E_ value=0.39; Accession=PF00023.22; Description=Ankyrin repeat
  Pfam annotation: Domain name=Ank; Domain location=35-66; Score=16.1; E_value=0.14; Accession=PF00023.22; Description=Ankyrin repeat
  Pfam annotation: Domain name=TPR_1; Domain location=126-159; Score =9.8; E_value=0.39; Accession=PF00515.20; Description=Tetratricopeptid e repeat
  Pfam annotation: Domain name=TPR_1; Domain location=193-226; Score =29.5; E_value=1.3e-05; Accession=PF00515.20; Description =Tetratricopeptide repeat
  Pfam annotation: Domain name=TPR_2; Domain location=126-159; Score =10.8; E_value=1.5; Accession=PF07719.9; Description=Tetratricopeptide repeat
  Pfam annotation: Domain name=TPR_2; Domain location=193-226; Score =27.9; E_value=4.3e-05; Accession=PF07719.9; Description =Tetratricopeptide repeat
  Pfam module annotation: Pfam domain module=Ank::Ank::TPR_1::TPR _1::TPR_2::TPR_2; Domain location=1-33::35-66::126-159::193-226::126 -159::193-226
TNYFLLMGALIYHSLKCMKLLIKAGADVNGKGSLISPLVIATMRGGYTNEVRLLLKAGADPNIPDDLGRLPVELAALNDCMEEVEMLFPLTSPIPGVPNWSVDGVISHAKLEHKKPLEERHIARRKAMFKSQASKAFKLKDYDLASKCYGLAIDHAPDATLYSNRSLCRLQMGDGEGALSDAYKCRMMRPDWAKGCYRLAAAHMLLGEHKQAYDALLDAQKLDPGNEEIERELRKAMELMKASPDEDEL

SEQ ID NO: 105314 - protein, 263 aa, Setaria italica
  misc_feature (75)..(75): Xaa can be any naturally occurring amino acid
  Transcript Sequence Number=SeqID_39340
  Gene Ontology: Mol. function=transposase activity; Biological process= transposition, DNA-mediated
  Homolog annotation: Hit_ID=Q2QPA1; Match level="QueryCoverage=97%, HitCoverage=84%, E-value=1e-32, Identity=38%"; Hit description =Transposon protein, putative, CACTA, En/Spm sub-class
KYGPKQQHLNALGYAEVEKGFKERTGIVATKGQIKNKWDKLKEDFKAWKKLMLRQTGTGWDPIRKTIAMDDEWWXKLRSEIPGCGKFQKKGLENEDELAKCFADITTIGIDHWSPYVANVEALENVDETQDEEINCEPQDDEFIPDTQEEDIGITPPPASGKRLARSIDRSGKKAKSGNALLIQEALTSMASSANEYVSKRHGKYSIDEVMEVVIACGAGYDSNEHYMASELFVKKEQREMFMTLPTNEIRFNWLRRKYKDKY

SEQ ID NO: 105315 - protein, 101 aa, Setaria italica
  Transcript Sequence Number=SeqID_39341
  Gene Ontology: Mol. function=methionine-tRNA ligase activity; Cellular component=cytoplasm; Biological process=tRNA aminoacylation for protein translation
  Homolog annotation: Hit_ID=Q9ZTS1; Match level="QueryCoverage=100%, HitCoverage=12%, E-value=6e-51, Identity=87%"; Hit description =Probable methionyl-tRNA synthetase
AIHNEVYKWFDIKFDKFGRTSSPQQTEICQAIFHKLMKNNCLTENTMQQLYCDTCQRFLADRLVEGACPTEGCTNQAARGDQCDNCSHMLNPTELIDPKCK

SEQ ID NO: 105316 - protein, 696 aa, Setaria italica
  Transcript Sequence Number=SeqID_39342
  Gene Ontology: Mol. function=methionine-tRNA ligase activity; Cellular component=cytoplasm; Biological process=tRNA aminoacylation for protein translation
  Homolog annotation: Hit_ID=Q9ZTS1; Match level="QueryCoverage=99%, HitCoverage=86%, E-value=0.0, Identity=84%"; Hit description =Probable methionyl-tRNA synthetase
  Pfam annotation: Domain name=tRNA-synt_1g; Domain location=1-307; Score=355.7; E_value=8.6e-104; Accession=PF09334.3; Description=tRNA synthetases class I (M)
  Pfam annotation: Domain name=tRNA_bind; Domain location=540-635; Score=174.8; E_value=2.4e-49; Accession=PF01588.12; Description =Putative tRNA binding domain
  Pfam module annotation: Pfam domain module=tRNA-synt_1g::tRNA_bind; Domain location=1-307::540-635
VLGGTSSPEQTEVCHAIFHKLMENNWLTENTMQQLYCDTCQRFLADRLVEGTCPNKVCNASARGDQCESCSTLLNPTELIDPKCKVCKNTPRIRDTDHLFLELPLLKDKLVNYINETSVAGLWSQNAIQATNAWLKEGLKPRCITRDLKWGVPVPHEKYKDKVFYVWFDAPIGYVSITASYTPDWEKWWKDPDNVELFQFMGKDNVPFHTIMFPSTLLGTGEKWTMMKTISVTEYLNYEAGKFSKSKGIGVFGNDARDTNLPPEVWRYYLLMNRPEASDTLFTWADLQAKLNSELLNNLGNFINRVLSFVAKPAGAGYDSIVPDAPNAESHPLTKALAEKTSKWVEQYLDAMEKVKLKQGLKSAMAISSDGNAYLQESQFWKLYKEDSAACAIVMKTSVGLVYLLACLLEPFMPSFSEEVLRQLNLSPEENLSFSEEKGEIAKAKSPWDFVPAGHTIGKPAPLFKELRDEDVALHREKYAGSQAERSSKAAADAEANKVANQLKGTKLSGGGPKKEQKKQSGGSKSKTAEADITVAKLDIRVGLIRKAEKHPDADSLYVEEIDVGEDAPRTVVSGLVKFIPLEEMQNRKVCVLCNLKPVAMRGIKSHAMVLAASNEDHTKVELVEPPESAAVGERVTFAGYSGEPEASLSGKSKTWEKLAAELHSNGELVACYKDVPFTTSAGICKVKTIANGEIR

SEQ ID NO: 105317 - protein, 160 aa, Setaria italica
  misc_feature (110)..(110): Xaa can be any naturally occurring amino acid
  Transcript Sequence Number=SeqID_39343
  Gene Ontology: Mol. function=protein binding
  Homolog annotation: Hit_ID=B9RFV2; Match level="QueryCoverage=98%, HitCoverage=70%, E-value=3e-28, Identity=41%"; Hit description =Serine-threonine protein kinase, plant-type, putative
  Pfam annotation: Domain name=LRR_1; Domain location=110-132; Score =12.6; E_value=1.2; Accession=PF00560.25; Description=Leucine Rich Repeat
  Pfam annotation: Domain name=LRR_1; Domain location=134-155; Score =15.4; E_value=0.24; Accession=PF00560.25; Description=Leucine Rich Repeat
  Pfam annotation: Domain name=LRR_1; Domain location=62-84; Score=3.0; E_value=82; Accession=PF00560.25; Description=Leucine Rich Repeat
  Pfam annotation: Domain name=LRR_1; Domain location=86-108; Score =15.4; E_value=0.24; Accession=PF00560.25; Description=Leucine Rich Repeat
  Pfam module annotation: Pfam domain module=LRR_1::LRR_1::LRR_1::LRR _1; Domain location=110-132::134-155::62-84::86-108
LDLSGNKFVGFIPDGGLDAKEEQNSGGGQGIPSEGVLPPQLFVSASVDTVSWQLDLVYDLQATTGIDLSRNELRGEIPEGLVAMKGLEYLNLSCNYLAGKIPAGLGGMGXLHTLDFSHNGLSGEVPPGIAAMAELEVLNLSYNSLSGPLPTILKLPKEDN

SEQ ID NO: 105318 - protein, 131 aa, Setaria italica
  Transcript Sequence Number=SeqID_39344
  Gene Ontology: Mol. function=protein binding
  Homolog annotation: Hit_ID=B9RFV2; Match level="QueryCoverage=90%, HitCoverage=15%, E-value=2e-11, Identity=35%"; Hit description =Serine-threonine protein kinase, plant-type, putative
  Pfam annotation: Domain name=LRR_1; Domain location=25-48; Score =16.7; E_value=0.098; Accession=PF00560.25; Description=Leucine Rich Repeat
VCHTLDFAPCGLSGEVPPGIAAMAELEVLNLSYNSLSGPLPTSKFPGALAGNPGICTGEGCSEDARMPEGKMEGSNHRGWLGGWHGENGWVSLGAFCISTMTSFYVSLATLLCSPKARNFVFRPVRVEYLQ

SEQ ID NO: 105319 - protein, 258 aa, Setaria italica
  Transcript Sequence Number=SeqID_39345
  Gene Ontology: Mol. function=transcription repressor activity; Cellular component=chloroplast; Biological process=regulation of nitrogen utilization
  Homolog annotation: Hit_ID=Q10W15; Match level="QueryCoverage=89%, HitCoverage=82%, E-value=5e-59, Identity=47%"; Hit description=Male sterility-like
  Pfam annotation: Domain name=3Beta_HSD; Domain location=11-252; Score= -135.3; E_value=0.071; Accession=PF01073.11; Description=3-beta hydroxysteroid dehydrogenaseisomerase family
  Pfam annotation: Domain name=Epimerase; Domain location=10-234; Score= -32.8; E_value=0.00011; Accession=PF01370.13; Description=NAD dependent epimerasedehydratase family
  Pfam annotation: Domain name=NAD_binding_4; Domain location=12-221; Score=-44.7; E_value=3.1e-06; Accession=PF07993.4; Description=Male sterility protein
  Pfam annotation: Domain name=NmrA; Domain location=10-250; Score= -70.1; E_value=0.0003; Accession=PF05368.5; Description=NmrA-like family
  Pfam module annotation: Pfam domain module=3Beta_HSD::Epimerase::NAD _binding_4::NmrA; Domain location=11-252::10-234::12-221::10-250
  Subcellular localization annotation: CTP_CleavageSite=24; ConfidenceScore=5.06e-01
VAPKASSKLVLVVGGTGGVGQLVVASLLSRNIKSRLLLRNPEKAESLFGKQDESVLQVYKGDTRNPNDLDPQMFEGVTHVICCTGTTAFPSKRWDGDNTPERVDWDGIRNLVSALPRTIKRLIFVSSIGVTKYNEIPWSIMNLFGVLKYKKMAEDFVRSSGIPFTIIRPGRLTDGPYTSYDLNTLLKATAGERRAVVIGKGDKLVGEVSRLVVAEACIQALDIESTEGQIYEINSVKGEGPGTDPVKWEQLFSSAQST

SEQ ID NO: 105320 - protein, 61 aa, Setaria italica
  Transcript Sequence Number=SeqID_39346
FQGQKSYFYLKGCNSNKTTHKLVNYLSFQSIAQLNKWPMQAHFRSIGKYVGDIMKLYTKIF

SEQ ID NO: 105321 - protein, 231 aa, Setaria italica
  Transcript Sequence Number=SeqID_39347
  Gene Ontology: Mol. function=ATP binding; Cellular component=integral to membrane
  Homolog annotation: Hit_ID=B6UEQ9; Match level="QueryCoverage=96%, HitCoverage=60%, E-value=1e-112, Identity=89%"; Hit description=CF9
PSGLVRFVGSFARNLVLSSCDTRTAAAGDREEPRWLAALCSATGKEAAADLVRVFVSTAVAAYLDRTAAVRTNDQLLTGLSDPRHEAKVKDLAVSVCNGAVETFLRTSRQLAKEASVARIEALAMERVGQNSDTNCVIQKVSSTLAVPSNRRFVLDVTGRVTAETVRSFLDFLAQRMSDGARKSIVIARDEVAERGLVAVKYLGAKSMAIFTISVALCMHILMGTRFLLPA

SEQ ID NO: 105322 - protein, 39 aa, Setaria italica
  Transcript Sequence Number=SeqID_39348
AIKLIIIHLGHLSLLSVYVVVEQILLNFVCPTSSICAVH

SEQ ID NO: 105323 - protein, 255 aa, Setaria italica
  Transcript Sequence Number=SeqID_39349
  Gene Ontology: Mol. function=protein serine/threonine kinase activity; Cellular component=plasma membrane; Biological process =protein amino acid phosphorylation
  Homolog annotation: Hit_ID=B9T3S1; Match level="QueryCoverage=67%, HitCoverage=27%, E-value=9e-38, Identity=54%"; Hit description =BRASSINOSTEROID INSENSITIVE 1-associated receptor kinase 1, putative
  Pfam annotation: Domain name=LRRNT_2; Domain location=1-33; Score =23.7; E_value=0.00076; Accession=PF08263.4; Description=Leucine rich repeat N-terminal domain
  Pfam annotation: Domain name=LRR_1; Domain location=108-130; Score =16.4; E_value=0.12; Accession=PF00560.25; Description=Leucine Rich Repeat
  Pfam annotation: Domain name=LRR_1; Domain location=132-157; Score =5.8; E_value=23; Accession=PF00560.25; Description=Leucine Rich Repeat
  Pfam annotation: Domain name=LRR_1; Domain location=36-58; Score=6.1; E_value=21; Accession=PF00560.25; Description=Leucine Rich Repeat
  Pfam annotation: Domain name=LRR_1; Domain location=60-82; Score=8.1; E_value=8.5; Accession=PF00560.25; Description=Leucine Rich Repeat
  Pfam annotation: Domain name=LRR_1; Domain location=84-106; Score =20.4; E_value=0.0073; Accession=PF00560.25; Description=Leucine Rich Repeat
  Pfam module annotation: Pfam domain module=LRRNT_2::LRR_1::LRR_1::LRR_ 1::LRR_1::LRR_1; Domain location=1-33::108-130::132-157::36-58::60 -82::84-106
AIRAALVDPNRVLRDWDVTAGGDPCAWPMVTCNQGHVYQLSLRHQNLSGTLSPAIEKLTLLQNLFLCNNTISGPIPDVIGRMEFLESLDLSNNQFTGSIPSTLGGLTNLQYLKLNNNSLSGPIPDSLATAPMILNLDLSFNNLSGTWPIFHERINVLLVGNPLLNAPAKEPLDLPIHKPTDTEDIIDIRVRIISVLALRVAIVCVATLITVVVVLFRHGRRREQVTAVDDVPSAISVTDSGLSQYSISSSILILP

SEQ ID NO: 105324 - protein, 74 aa, Setaria italica
  Transcript Sequence Number=SeqID_39350
  Gene Ontology: Mol. function=transition metal ion binding
  Homolog annotation: Hit_ID=B6UIE2; Match level="QueryCoverage=62%, HitCoverage=19%, E-value=1e-16, Identity=89%"; Hit description=Fiber protein Fb38
MARGARLLLVLALLAALLAVVLQLYRLRKPRLWTVEELSVYNGTDEGLPILLGILGSVFDVTKGRSHYGPGGGY

SEQ ID NO: 105325 - protein, 76 aa, Setaria italica
  Transcript Sequence Number=SeqID_39351
EGKKEEQKLRCCQVADLTKAQQNQNCGSDMELTEFRARCSGLFLHYSYSWEFLGPSSSGQWVVLKLLHQVYSPHSA

SEQ ID NO: 105326 - protein, 95 aa, Setaria italica
  Transcript Sequence Number=SeqID_39352
  Gene Ontology: Mol. function=diphthine synthase activity; Cellular component=cytoplasm; Biological process=peptidyl-diphthamide biosynthetic process from peptidyl-histidine
  Homolog annotation: Hit_ID=Q10L98; Match level="QueryCoverage=94%, HitCoverage=32%, E-value=4e-42, Identity=88%"; Hit description =Diphthine synthase
VPTCRGKKVYEPPRFVSVNTAISQLLEVEESRGGSAYGRNTLCIGVARLGSDDQQIVAGPMEKLLDVDFGPPLHCLIIVGETHPLEEEMLEFYKM

SEQ ID NO: 105327 - protein, 108 aa, Setaria italica
  Transcript Sequence Number=SeqID_39353
NLSGDPDSKLNLEMSTKYMLSNSITGLRSKYMKYTGPLLSINYRAETQKRPRQIEVLVLSIEEARYRCMSFHLEVAGFWPRLTLGSFVLHCTWMLTTLPPADSLGMVR

SEQ ID NO: 105328 - protein, 106 aa, Setaria italica
  Transcript Sequence Number=SeqID_39354
TFIDQLEIKPCIQNFRYQVFFLAAEYDVYWDAVVVVQALLPLSRILTPSTYAGQGSPYHISGLLPKSLIRVHLTKQSPTFEFKFTITNYPISECVHENLSAYLVTL

SEQ ID NO: 105329 - protein, 79 aa, Setaria italica
  Transcript Sequence Number=SeqID_39355
  Gene Ontology: Mol. function=aminoacyl-tRNA ligase activity
MGTAAVDLEARQLRILGRIADLELAVQQRRIGALSISAASPEDGEAEAGATEARLSVLLAARGVRDFAFRRVPAEYYDR

SEQ ID NO: 105330 - protein, 63 aa, Setaria italica
  Transcript Sequence Number=SeqID_39356
  Subcellular localization annotation: CTP_CleavageSite=26; ConfidenceScore=5.36e-01
SKTKSKQNPSWATLLGVYKNLNSPFRSSSVGSEPCYSPGWCLTKWNTKVGIKLKARTCSYSVS

SEQ ID NO: 105331 - protein, 99 aa, Setaria italica
  misc_feature (60)..(60): Xaa can be any naturally occurring amino acid
  misc_feature (64)..(64): Xaa can be any naturally occurring amino acid
  Transcript Sequence Number=SeqID_39357
SVFILVFHYVEKLSFLGDKITSYLLELRNRARIIYKLKEQLDAEKLNNKFHPQLEEIHLXNEIXAMLKELHNMVIALGKFQDIFSSIGREEMKSSSPLS

SEQ ID NO: 105332 - protein, 195 aa, Setaria italica
  misc_feature (26)..(26): Xaa can be any naturally occurring amino acid
  Transcript Sequence Number=SeqID_39358
  Homolog annotation: Hit_ID=B6U6A3; Match level="QueryCoverage=92%, HitCoverage=40%, E-value=4e-32, Identity=51%"; Hit description=F-box domain containing protein
FCEACYFSVPAILEDLELHNCSCQFXSVTSDSLKTLVLKNCKWCNLSEITSPTLKTLVIDGSSNTDGCVLVILTPAVSYLHLAVSVYFFSGGISTNEMPSLVKASIHLRDHRNSVSESNKLGGNQFKLLSSVSNATSLELSAVGKKVLGKEPTFLEFMNLRNLFLGNCDLRGDFRTLGFFLQSSPNLEKLTLRVG

SEQ ID NO: 105333 - protein, 249 aa, Setaria italica
  Transcript Sequence Number=SeqID_39359
  Gene Ontology: Mol. function=transferase activity, transferring groups other than amino-acyl groups; Cellular component=membrane; Biological process=fatty acid biosynthetic process
  Homolog annotation: Hit_ID=A9L9N2; Match level="QueryCoverage=95%, HitCoverage=50%, E-value=1e-104, Identity=74%"; Hit description =Putative very long chain fatty acid condensing enzyme CUT1;2
  Pfam annotation: Domain name=ACP_syn_III_C; Domain location=135-219; Score=8.6; E_value=2.1e-06; Accession=PF08541.2; Description=3 -Oxoacyl-[acyl-carrier-protein (ACP)
  Pfam annotation: Domain name=Chal_sti_synt_C; Domain location=75-221; Score=20.9; E_value=3.6e-05; Accession=PF02797.7; Description =Chalcone and stilbene synthases, C-te
  Pfam annotation: Domain name=FAE1_CUT1_RppA; Domain location=1-121; Score=7.9; E_value=1.4e-15; Accession=PF08392.4; Description =FAE1Type III polyketide synthase-like
  Pfam module annotation: Pfam domain module=ACP_syn_III_C::Chal_sti _synt_C::FAE1_CUT1_RppA; Domain location=135-219::75-221::1-121
  Subcellular localization annotation: CTP_CleavageSite=56; ConfidenceScore=5.24e-01
ALVVSTEMVSYQFYTGRNRAMLLPNVLFRMGGAAVLLSTSRSKSRFKLMHTVRTITAARDKSYQCAFLQEDDTGEIGVNLSKDLVAIAGETLQANITAIGSLVLPFSEQLLFVLSLIARKLLNRKTKPYVPDFRMAFEHFCIHAGGRAVIDAVQRSLCLSDEDVEPSRMTLHRFGNTSSSSVWYELGYIDAKSQMRKGDRVWMIGFGSGFKCNSVVWQCIQPASTLDGPWADCIHGYPVTVGITKVASR

SEQ ID NO: 105334 - protein, 357 aa, Setaria italica
  misc_feature (87)..(87): Xaa can be any naturally occurring amino acid
  Transcript Sequence Number=SeqID_39360
  Gene Ontology: Mol. function=methyltransferase activity; Cellular component=nucleus; Biological process=DNA methylation
  Homolog annotation: Hit_ID=Q8LER4; Match level="QueryCoverage=97%, HitCoverage=96%, E-value=1e-128, Identity=63%"; Hit description=DNA methyltransferase PMT1-like protein
  Pfam annotation: Domain name=DNA_methylase; Domain location=7-355; Score=40.6; E_value=8.4e-15; Accession=PF00145.9; Description=C-5 cytosine-specific DNA methylase
MEAPAPWRVLEFYSGIGGMRYSLMASGARAEVVEAFDINDVANDVYEHNFGHRPCQGNIQTLTASDLDKYKAHAWLLSPPCQPYTRXLQKHSADARAFSFIKILNLMQNMSHPPQMLFVENVVGFEVSDTHDQLLEVLSSLNFNLQEFILSPLQFGVPYSRPRYFCLAKREPMGFQNASFNKKLLWTPMCVSQTMNSTSQDSDLRTEEELDPVCKPVKDFLVKEDDGGIRNETILQDYIVPLNLIERWGNAMDIVYPESKRCCCFTKSYYRYVKGTGSLLATSENFKCVPEEKLAVSSLKELGLRFFTPREVANFHSFPSSFCFPDHISLRQQYAMLGNSLSVAVVGPLLRYLFAEA

SEQ ID NO: 105335 - protein, 227 aa, Setaria italica
  misc_feature (108)..(108): Xaa can be any naturally occurring amino acid
  misc_feature (180)..(180): Xaa can be any naturally occurring amino acid
  misc_feature (188)..(188): Xaa can be any naturally occurring amino acid
  Transcript Sequence Number=SeqID_39361
  Homolog annotation: Hit_ID=Q2QRF9; Match level="QueryCoverage=97%, HitCoverage=26%, E-value=5e-44, Identity=38%"; Hit description =Retrotransposon protein, putative, Ty3-gypsy subclass
  Pfam annotation: Domain name=Transposase_28; Domain location=1-129; Score=61.1; E_value=4.2e-15; Accession=PF04195.4; Description =Putative gypsy type transposon
SDETIILAYFIKCGLALLASDFFRGLLEYYKLELVHLNPNDILHTAIFVHLCEAFLGIRLHFQLFRKFFRVKSQPKREHTQVVEGAGIQMWKKLSSLYLDYELIDSNXGWKEKWCYIGNHDPKVPKLTRHRPTWNNQWLDEPNHEDCLQLLELLDRISKLKQEGLAGVGVAFSFMKRRIXPCSSDANXSYEYSSINDPYRMYLEELSTKEIMARLRRMFKNVGEIPP

SEQ ID NO: 105336 - protein, 131 aa, Setaria italica
  misc_feature (8)..(8): Xaa can be any naturally occurring amino acid
  misc_feature (40)..(40): Xaa can be any naturally occurring amino acid
  Transcript Sequence Number=SeqID_39362
  Gene Ontology: Mol. function=nucleotide binding; Cellular component =cytoskeleton; Biological process=cell division
  Homolog annotation: Hit_ID=Q6I614; Match level="QueryCoverage=100%, HitCoverage=24%, E-value=4e-64, Identity=87%"; Hit description =Putative dynamin
  Pfam annotation: Domain name=Dynamin_M; Domain location=1-131; Score=- 108.9; E_value=0.00014; Accession=PF01031.12; Description=Dynamin central region
PIAADAGXKLYTIMEICRMFDSIYKEHLDGARSGGEKIYXFFDNQFPVALKRLQFEKHLAMENVKKLITQADGYQPHLIAPEQGYRRLIESCLISIKGPAEAAVDAVHAILKELVHRAIKETRELKQFPTL

SEQ ID NO: 105337 - protein, 41 aa, Setaria italica
  Transcript Sequence Number=SeqID_39363
KNLVDYCLHGVENSIFKCYTVASLIRPYIFSPGMTIKLVIC

SEQ ID NO: 105338 - protein, 67 aa, Setaria italica
  Transcript Sequence Number=SeqID_39364
QSKSTMAGNLASPHRPITFPSNNLVSVTAYLLHRAWQHAITSEHLDGMDKRSAQQVYQVDHAGVPLK

SEQ ID NO: 105339 - protein, 54 aa, Setaria italica
  Transcript Sequence Number=SeqID_39365
RGVNRQFQLKSQHFKNLISNTRGKLFLATLQLGEGLQPRVTRYYSISSKVICSK

SEQ ID NO: 105340 - protein, 84 aa, Setaria italica
  misc_feature (49)..(49): Xaa can be any naturally occurring amino acid
  Transcript Sequence Number=SeqID_39366
  Gene Ontology: Mol. function=hydrolase activity
  Homolog annotation: Hit_ID=B6TJ32; Match level="QueryCoverage=100%, HitCoverage=22%, E-value=5e-32, Identity=85%"; Hit description =Catalytic/ hydrolase
VKSSAELLLPESVKGLKALLSIATHRKLWFPDRLHRDYLECGCLCTHRXVMFTNRKERAELLEGLVVSNKDATVPVLPQKILLL

SEQ ID NO: 105341 - protein, 82 aa, Setaria italica
  Transcript Sequence Number=SeqID_39367
  Gene Ontology: Mol. function=hydrolase activity
  Homolog annotation: Hit_ID=B6TJ32; Match level="QueryCoverage=75%, HitCoverage=18%, E-value=3e-24, Identity=85%"; Hit description =Catalytic/ hydrolase
MVNLVEAQKPLLHFLVRRAGLRQHTVDVDGAGTVITFWVPKDKVPKEKPTVRDVTPGPASADEATNKLPPPPPPVAKNDRAR

SEQ ID NO: 105342 - protein, 255 aa, Setaria italica
  misc_feature (27)..(27): Xaa can be any naturally occurring amino acid
  Transcript Sequence Number=SeqID_39368
  Gene Ontology: Mol. function=hydrolase activity
  Homolog annotation: Hit_ID=B6TJ32; Match level="QueryCoverage=100%, HitCoverage=75%, E-value=1e-105, Identity=76%"; Hit description =Catalytic/ hydrolase
  Pfam annotation: Domain name=Abhydrolase_1; Domain location=60-255; Score=29.6; E_value=1.3e-05; Accession=PF00561.12; Description =alphabeta hydrolase fold
  Pfam annotation: Domain name=PGAP1; Domain location=28-205; Score= -76.9; E_value=0.0092; Accession=PF07819.5; Description=PGAP1-like protein
  Pfam module annotation: Pfam domain module=Abhydrolase_1::PGAP1; Domain location=60-255::28-205
VRDVTPGPASADEATTAAAAAAAGWSXKNDRPAVVLVHGFSLGIVTLGTQLQVGALAKHYDVYVPDLLYFGGSTSPSSDRSPGFQAECLAAALRKLGVGSCAVVGFSYGGMVSFKMAEAHPDLVRSLVVSGSVVAMTDSISETTLERIGVKSSAELLLPESVKGLKALLSIATHRKLWFPDRLHRDYLEVMFTNRKERAELLEGLVVSNKDATVPVLPQKILLLWGENDNIFNIELAKAMKEQLGEKTMLQSIRK

SEQ ID NO: 105343 - protein, 38 aa, Setaria italica
  Transcript Sequence Number=SeqID_39369
GGLMHAPSPLLFDGPTGPLIGDDFLIHNRIGPDFRQLI

SEQ ID NO: 105344 - protein, 133 aa, Setaria italica
  Transcript Sequence Number=SeqID_39370
RRSAPRADALASGARWSCCRSCQAALLTATSASGPHAAGLGVSSRCGSEWKQRRIYYSIQLGSTALVLTVRFAHPIVRFFSNTGAALRPLTLSRLQVRLPLGPFCTSKRCVVLNQIKPIGRIKHLHQRIGNII

SEQ ID NO: 105345 - protein, 237 aa, Setaria italica
  Transcript Sequence Number=SeqID_39371
  Homolog annotation: Hit_ID=Q10AI1; Match level="QueryCoverage=100%, HitCoverage=62%, E-value=1e-118, Identity=84%"; Hit description =Transducin family protein, putative, expressed
  Pfam annotation: Domain name=WD40; Domain location=14-53; Score=14.1; E_value=0.6; Accession=PF00400.24; Description=WD domain, G-beta repeat
  Pfam annotation: Domain name=WD40; Domain location=153-191; Score =15.0; E_value=0.31; Accession=PF00400.24; Description=WD domain, G -beta repeat
  Pfam annotation: Domain name=WD40; Domain location=197-235; Score =14.5; E_value=0.45; Accession=PF00400.24; Description=WD domain, G -beta repeat
  Pfam annotation: Domain name=WD40; Domain location=59-98; Score=12.0; E_value=1.5; Accession=PF00400.24; Description=WD domain, G-beta repeat
  Pfam module annotation: Pfam domain module=WD40::WD40::WD40::WD40; Domain location=14-53::153-191::197-235::59-98
QVSMTNLISGQRKVTFLPEKPHTKGIINNISFMPWSDACFVTGGSDHAVILWEDKDDSWKHKRVHKDFHSSAVMGVAGLQQKKTIISVGCDKRIIGFDLSAGRTEFKNLIDSKCMSVLTNPCDFNLYMVQTGAPGSQLRLFDIRLRQTEVHAFGWKQESSESQSALINQSWSPDGWYVSSGSADPVIHIFDIRYHGQKPCQSVQAHQKRVFKAVWHQTSPYLTSISSDLNIGIHKYS

SEQ ID NO: 105346 - protein, 62 aa, Setaria italica
  Transcript Sequence Number=SeqID_39372
LPSCLNGRSQRVNFEEIKIRQKDIVLSIITECEILNTSTLTILQHNVDELHNQGRRSYSPHS

SEQ ID NO: 105347 - protein, 305 aa, Setaria italica
  Transcript Sequence Number=SeqID_39373
  Gene Ontology: Mol. function=protein serine/threonine kinase activity; Cellular component=integral to membrane; Biological process=protein amino acid phosphorylation
  Homolog annotation: Hit_ID=B6E503; Match level="QueryCoverage=96%, HitCoverage=29%, E-value=1e-101, Identity=61%"; Hit description =Putative leucine rich repeat transmembrane protein kinase
  Pfam annotation: Domain name=Pkinase; Domain location=1-273; Score =119.5; E_value=1.1e-32; Accession=PF00069.17; Description=Protein kinase domain
  Pfam annotation: Domain name=Pkinase_Tyr; Domain location=5-273; Score=23.0; E_value=3e-15; Accession=PF07714.9; Description=Protein tyrosine kinase
  Pfam module annotation: Pfam domain module=Pkinase::Pkinase_Tyr; Domain location=1-273::5-273
GSGELVAVKKLWVSAARRTKQQHDVQVLTSTTSSGWLGDRELRTEVETLGSIRHKNIVKLYCCYSGADSNLLVYEYMPNGNLWEALHGCFLLLDWPTRHRVALGVAQGLAYLHHDLMFPIVHRDIKSSNILLDADFEPKVADFGIAKVLQARGAGADRDASTTTIAGTYGYLAPEYAYSSKATTKCDVYSFGVVLMELATGRKPIEPEFGDTRDIVHWVSGKVAAGAEADALDKRLAWSPYKEEMVQALRVAVRCTCSIPGLRPAMADVVQMLAEAGPRTPKDKLDSNKDSKGSAGQQLAAQATS

SEQ ID NO: 105348 - protein, 65 aa, Setaria italica
  Transcript Sequence Number=SeqID_39374
TLKCQSFYIFLLSFEALPSSKSLSSAQEDISIDLEKIHHLETHKIVLTYSIVTGDIFSHKGYHCL

SEQ ID NO: 105349 - protein, 101 aa, Setaria italica
  misc_feature (80)..(80): Xaa can be any naturally occurring amino acid
  Transcript Sequence Number=SeqID_39375
  Gene Ontology: Mol. function=RNA-directed DNA polymerase activity; Cellular component=exocyst; Biological process=exocytosis
  Homolog annotation: Hit_ID=B6SVA0; Match level="QueryCoverage=99%, HitCoverage=15%, E-value=6e-34, Identity=76%"; Hit description =Protein binding protein
TANSVITLFSFGDAVAKSKRSPEKLFVLLDMYEVMRELQPEIEEIFEGKPCTEMREAASSLTKRLAQTAQETFAEFEEAXVEKDASKTIVQDWNSYYPFVL

SEQ ID NO: 105350 - protein, 354 aa, Setaria italica
  misc_feature (78)..(78): Xaa can be any naturally occurring amino acid
  Transcript Sequence Number=SeqID_39376
  Gene Ontology: Mol. function=RNA-directed DNA polymerase activity; Cellular component=exocyst; Biological process=exocytosis
  Homolog annotation: Hit_ID=B6SVA0; Match level="QueryCoverage=100%, HitCoverage=56%, E-value=0.0, Identity=94%"; Hit description=Protein binding protein
  Pfam annotation: Domain name=Exo70; Domain location=1-343; Score =459.7; E_value=4.2e-135; Accession=PF03081.7; Description=Exo70 exocyst complex subunit
MRIAVKLLLAGERKICDQIFDGVNFNKGHCFAELTANSVITLFSFGDAVAKSKRSPEKLFVLLDMYEVMRELQPEVNXCTEMREAASSLTKRLAQTAQETFADFEEAVEKDASKTIVQDGTVHPLTSYVINYVKFLFDYQSTLKLLFQEFDNSTEAESQLAAVTTRIMQALQNNLDGKSKQYKDAALTYLFLMNNIHYMVRSVRRSEAKDILGDDWIQRHRRIVQQNANQYKRVAWAKILQTLSVQGAGSTGDLSSSGVSRAMIKERFKSFNMQFEELHAKQSQWIVPDQELRESLRLAVAEVLLPAYRSFIKRFGNLVENNKNPQKYVRYSPEAVDQLLGQFFEGQQWAEQKR

SEQ ID NO: 105351 - protein, 245 aa, Setaria italica
  Transcript Sequence Number=SeqID_39377
  Homolog annotation: Hit_ID=B6TBN8; Match level="QueryCoverage=91%, HitCoverage=58%, E-value=5e-10, Identity=27%"; Hit description=F-box domain containing protein
SNVLCASTDEGHIHGACHSDPFQVVVVAGDSERFYGCIYSSETRAWGNLFWIMRPPQIRTTRATYGSQLFRNSICLLLIEEKIAILEFDWSRQNLVIIDVPYALDFYDFITARSQFLIKLSDGGGLSFVAQEVFTVHVWKRTSDGDGVATWMLGNTIDLSSVLSLGLPEDLWMHLVILSSDGDGNVLFRKTSSRVVYVVNLESRKVKKLPKTYPFKVGHPFSSFYTPGMHVNTGHDNEVQKIPGA

SEQ ID NO: 105352 - protein, 59 aa, Setaria italica
  Transcript Sequence Number=SeqID_39378
PLARPSNPTPSLWAGQVWRINFYPRGAYEIAAISNDHFSFSSSVRSCPTDPSSPSSRYY

SEQ ID NO: 105353 - protein, 203 aa, Setaria italica
  Transcript Sequence Number=SeqID_39379
  Gene Ontology: Mol. function=nucleotide binding; Cellular component =intracellular; Biological process=small GTPase mediated signal transduction
  Homolog annotation: Hit_ID=B6TF60; Match level="QueryCoverage=100%, HitCoverage=100%, E-value=1e-102, Identity=89%"; Hit description=ARF- related protein
  Pfam annotation: Domain name=Arf; Domain location=1-184; Score=175.4; E_value=1.7e-49; Accession=PF00025.13; Description=ADP-ribosylation factor family
  Pfam annotation: Domain name=GTP_EFTU; Domain location=26-183; Score=- 86.0; E_value=0.013; Accession=PF00009.19; Description=Elongation factor Tu GTP binding domain
  Pfam annotation: Domain name=MMR_HSR1; Domain location=18-136; Score =6.9; E_value=0.00023; Accession=PF01926.15; Description=GTPase of unknown function
  Pfam annotation: Domain name=Miro; Domain location=19-136; Score =27.9; E_value=2.6e-05; Accession=PF08477.5; Description=Miro-like protein
  Pfam annotation: Domain name=Ras; Domain location=19-186; Score= -53.5; E_value=2.7e-05; Accession=PF00071.14; Description=Ras family
  Pfam annotation: Domain name=SRPRB; Domain location=15-177; Score= -52.8; E_value=0.0011; Accession=PF09439.2; Description=Signal recognition particle receptor beta su
  Pfam module annotation: Pfam domain module=Arf::GTP_EFTU::MMR _HSR1::Miro::Ras::SRPRB; Domain location=1-184::26-183::18-136::19 -136::19-186::15-177
MFSLFYGLWNHVFSKTEFHVLILGVHKAGKTTFLEKLKSIYLKGEGLPHDRIVPTVGLNIGRIEDANVKLVFWDLGGQPGLRTIWEKYYEEAHAVIYVIDSAAAASFEDAKSALEKVLRHEDLQGAPILIFANKQDSPAAVSEEELARHLHLKELDERPCMFQAGSAFDGTGIKHGVDWLVEEMERSKRTELLRVRTEAAGKI

SEQ ID NO: 105354 - protein, 138 aa, Setaria italica
  Transcript Sequence Number=SeqID_39380
  Gene Ontology: Mol. function=kinase activity; Cellular component =plasma membrane
  Homolog annotation: Hit_ID=UPI0001A88FE0; Match level="QueryCoverage =100%, HitCoverage=25%, E-value=3e-70, Identity=93%"; Hit description= plant synaptotagmin
  Pfam annotation: Domain name=C2; Domain location=21-103; Score=67.6; E_value=4.5e-17; Accession=PF00168.22; Description=C2 domain
DGEGTASARREADGDSSGGVLLVSVENAEDVEGKRHTNPYAEVLFRGERKKTKVIRKTRDPRWSEEFQFMLDEPPVEDKIHIEVKSKRRGLPYPNKESLGHVNINLVDVVNNGRINEKYHLINSRNGMIQVEIKWSTV

SEQ ID NO: 105355 - protein, 93 aa, Setaria italica
  Transcript Sequence Number=SeqID_39381
GELRQLQITLMSHTLTIVTIPASITELKKLQYIHAVPAPPAYSSAPHTVAFKSSKLHRYLQLVGVQVMSGIGKLTALHTLGVVNVGAAGAKSS

SEQ ID NO: 105356 - protein, 72 aa, Setaria italica
  Transcript Sequence Number=SeqID_39382
LFVFEVIPVDENMRLAPYYQVSRGMCISLLALNQPQTVANGTVQLHAEIFHVEINALLVFRSLTMTLNCLIC

SEQ ID NO: 105357 - protein, 168 aa, Setaria italica
  misc_feature (26)..(26): Xaa can be any naturally occurring amino acid
  misc_feature (162)..(162): Xaa can be any naturally occurring amino acid
  Transcript Sequence Number=SeqID_39383
  Gene Ontology: Mol. function=inorganic anion exchanger activity; Cellular component=integral to membrane; Biological process=anion transport
  Homolog annotation: Hit_ID=B6SV45; Match level="QueryCoverage=99%, HitCoverage=25%, E-value=9e-59, Identity=64%"; Hit description=Boron transporter-like protein 2
GDSVSAHNELKDLKNAIIPEGMEKGXVPEVFDPEKHVEAYLPVRVNEQRLSNLLQSLLVAGCIGVTPLIQRIPTSVLWGYFAYMSIDSVPGNQFWERIQLLFITPQRRYKVFEGAHASFVESVPFNIISAFTLFQLIYLLLVFGMTWIPMAGILFPLLFFFXIVIRQH

SEQ ID NO: 105358 - protein, 76 aa, Setaria italica
  Transcript Sequence Number=SeqID_39384
  Homolog annotation: Hit_ID=B9S5I4; Match level="QueryCoverage=98%, HitCoverage=15%, E-value=5e-18, Identity=56%"; Hit description =Pentatricopeptide repeat-containing protein, putative
  Pfam annotation: Domain name=PPR; Domain location=13-47; Score=18.3; E_value=0.033; Accession=PF01535.12; Description=PPR repeat
AERIFQLEHNNTGCYVVLSSMYADAGRWEDVERIRSLMKEKGFQRTEARSLVELHDKECSFVNGDMSHPQSEEIHV

SEQ ID NO: 105359 - protein, 56 aa, Setaria italica
  Transcript Sequence Number=SeqID_39385
VKYVTLYSLNTNAIIAQRCYCLVVPFRIKMSFILNPFFISKILNPFSEVCNCIVFV

SEQ ID NO: 105360 - protein, 71 aa, Setaria italica
  Transcript Sequence Number=SeqID_39386
QTFFKDHMGVDLYMEPNFEDYSCQFNFGVPPPPLDTDKALKEPCLDICTNARRRREIGRNSSPDELGCPQV

SEQ ID NO: 105361 - protein, 113 aa, Setaria italica
  Transcript Sequence Number=SeqID_39387
CSRLETDDEEDVEEDEEEGEEGEEGEGEDGDEDDGDGEGEGDEEDAEDGEGDDDEEEEEEEGDEEAEDEADEADDDELDADEEDKENIESKAGGSSLPNKRKRDNDDDTNGDE

SEQ ID NO: 105362 - protein, 99 aa, Setaria italica
  Transcript Sequence Number=SeqID_39388
  Gene Ontology: Cellular component=membrane
  Homolog annotation: Hit_ID=B9SAE9; Match level="QueryCoverage=68%, HitCoverage=57%, E-value=3e-23, Identity=72%"; Hit description =Transmembrane protein 14, putative
  Pfam annotation: Domain name=Tmemb_14; Domain location=1-65; Score =52.8; E_value=1.3e-12; Accession=PF03647.5; Description =Transmembrane proteins 14C
APLLECTKAFEKRRNSYLALALETLCAFALTYVMGQRYLETSKVMPAGVVAGLSALMSAFYLFKIATGGNHIQSNIYYKLNLGLLFLWWDVVATGCNLE

SEQ ID NO: 105363 - protein, 33 aa, Setaria italica
  Transcript Sequence Number=SeqID_39389
YQTVCAFALTYVMGQRYLETSKVMPAGVVAGLR

SEQ ID NO: 105364 - protein, 132 aa, Setaria italica
  Transcript Sequence Number=SeqID_39390
  Gene Ontology: Cellular component=membrane
  Homolog annotation: Hit_ID=B9SAE9; Match level="QueryCoverage=88%, HitCoverage=98%, E-value=2e-35, Identity=61%"; Hit description =Transmembrane protein 14, putative
  Pfam annotation: Domain name=Tmemb_14; Domain location=4-107; Score =196.1; E_value=9.7e-56; Accession=PF03647.5; Description =Transmembrane proteins 14C
MHDFCFTIPYGFAVLAGGVLGYLRRGSTASLAGGAGAGALLLLAGFVSLKAFEKRRNSYLALALETLCAFALTYVMGQRYLETSKVMPAGVVAGLSALMSAFYLFKIATGGNHIQSNIYYKLNLGLLFLWWI

SEQ ID NO: 105365 - protein, 109 aa, Setaria italica
  misc_feature (46)..(46): Xaa can be any naturally occurring amino acid
  misc_feature (53)..(53): Xaa can be any naturally occurring amino acid
  misc_feature (95)..(95): Xaa can be any naturally occurring amino acid
  Transcript Sequence Number=SeqID_39391
  Gene Ontology: Mol. function=RNA-directed DNA polymerase activity; Cellular component=exocyst; Biological process=RNA-dependent DNA replication
  Homolog annotation: Hit_ID=Q10IE3; Match level="QueryCoverage=97%, HitCoverage=6%, E-value=2e-31, Identity=62%"; Hit description =Retrotransposon protein, putative, unclassified
HRQFPLEFYQIFLHAIKDGLTASFEDFHNGTLPLHSLNFGTIILLXDSSDAKXIQLYRSICLLNVSFKIFNEVATNRIMKIAQTIMRPSQTVLPXRNITDDILHETLHE

SEQ ID NO: 105366 - protein, 96 aa, Setaria italica
  Transcript Sequence Number=SeqID_39392
  Homolog annotation: Hit_ID=B6TK66; Match level="QueryCoverage=100%, HitCoverage=30%, E-value=9e-26, Identity=67%"; Hit description =Embryonic protein DC-8
KAEAAGKKAQQSKEAAEGKATEKAASAKDAAWETVEAAKEKANEGYEKVKEKARETADTAKERIEEVKEKVAGPDADNKGKHRRADADKYRSEDEL

SEQ ID NO: 105367 - protein, 117 aa, Setaria italica
  Transcript Sequence Number=SeqID_39393
  Subcellular localization annotation: CTP_CleavageSite=52; ConfidenceScore=5.16e-01
SSGRKKKNASITNTSHQASGFFHGPARSVQNYIHKYKNHRPKVTPDRPEPVSTSTTNQQQAGMAAWVCCYAETQSPSWVVSLPCWAAGGSPRQPQTSSKQSWPHGCAAMLRPSRPAG

SEQ ID NO: 105368 - protein, 149 aa, Setaria italica
  Transcript Sequence Number=SeqID_39394
  Gene Ontology: Mol. function=heat shock protein binding; Biological process=protein folding
  Pfam annotation: Domain name=DnaJ_CXXCXGXG; Domain location=75-143; Score=-31.0; E_value=0.013; Accession=PF00684.11; Description=DnaJ central domain (4 repeats)
  Subcellular localization annotation: CTP_CleavageSite=45; ConfidenceScore=5.67e-01
MEVSAGLRQPPVAPAASLRGRRSVRPPLRAVSPSTRSVSRAVKVRASAIYDLQRSKSNLESLFCYDKSVPEEDIGKPTGLNLEKKNVGENPPCSSCEAKGAVLCATCAGTGLYVDSILESQGIIVKVRCLGCGGTGNIMCSKCGGRGHT

SEQ ID NO: 105369 - protein, 59 aa, Setaria italica
  Transcript Sequence Number=SeqID_39395
QQNLSFLVISSIDSLSVNTEKLCMSILIRTKMDQNSKRLNLASGLTWLDFHKWVRTLHI

SEQ ID NO: 105370 - protein, 380 aa, Setaria italica
  Transcript Sequence Number=SeqID_39396
  Gene Ontology: Mol. function=metal ion binding; Cellular component =cell wall; Biological process=cell redox homeostasis
  Homolog annotation: Hit_ID=B6T559; Match level="QueryCoverage=100%, HitCoverage=100%, E-value=1e-87, Identity=70%"; Hit description=RING finger protein 126
  Pfam annotation: Domain name=zf-C3HC4; Domain location=262-302; Score= 33.5; E_value=8.4e-07; Accession=PF00097.17; Description=Zinc finger, C3HC4 type (RING finger)
MDEGQGVRYWCHMCEEVIDPMPEMKCPNCEGGFVEEMDSEGFEPATNTRSDRSLSLLAPLLLGVLGGSSRRSRLRRAAMEDADADEDDDEDDSDRELEVPSRRRRRRGSSALARLLQTIHDDIRGLDDTDSDTERDMERERRERQRAERRVERQRAERRAERLREIERLSDRGRERTESLILINSNNEAIILQGTFGRDDNQEESSNTSSGVSLGDYFLGPGLDILLQRLAESDLSRSGTPPAKKEAVDSLPTVNIKELLGCSVCLEDFEMGAEAKQMPCQHKFHPHCILPWLELHSSCPVCRFQLPTEETKNPCESASGAGAMNGDGDNAAASSSSDTEGTNRNGDNRSDSPIFSALSALFSDPSSSDDDEGAPHSSES

SEQ ID NO: 105371 - protein, 120 aa, Setaria italica
  misc_feature (101)..(101): Xaa can be any naturally occurring amino acid
  Transcript Sequence Number=SeqID_39397
  Gene Ontology: Mol. function=RNA binding; Cellular component =chloroplast
  Homolog annotation: Hit_ID=B6TPG8; Match level="QueryCoverage=100%, HitCoverage=39%, E-value=3e-57, Identity=92%"; Hit description=RNA -binding S4
  Pfam annotation: Domain name=S4; Domain location=67-113; Score=33.7; E_value=7.2e-07; Accession=PF01479.17; Description=S4 domain
TREKVGDILLQGERGAQVLVDPELVDYLISTLEKVGKVGVSCTQIPLLALEYEPPRTKSSKTVEASLRVDALASAGFKISRTKLASLISAGDVRVNWTPVXENGVTLKSGDIVSVSGMGR

SEQ ID NO: 105372 - protein, 152 aa, Setaria italica
  Transcript Sequence Number=SeqID_39398
  Subcellular localization annotation: CTP_CleavageSite=64; ConfidenceScore=5.04e-01
FGCAGGDFGCYHRWYVRLCFSLLSHRRCSSRLSLDARRRLRLHAAHPEAAPSSTTTSLRPRRLCCSSTPSIGFEVVVQESSDDRFNQIFGSSEKMDIVGYLIHFEPSLGVVPPLCLHVFVAPLAAQPLGFAACRRRRRLCLLCSFAFIKKSR

SEQ ID NO: 105373 - protein, 53 aa, Setaria italica
  Transcript Sequence Number=SeqID_39399
VLCLNNRLLLHTVYCISIINQLSVYIIKLLKEEGCFSYFVHIKNKTFLKGYLS

SEQ ID NO: 105374 - protein, 366 aa, Setaria italica
  Transcript Sequence Number=SeqID_39400
DHARLATSAKVSWYYNLHFLGWSLEGNARHHEFGIDHLGYLKGHTTLLKFLKKVSLNGRSKDMLTCANCIEHAIHPSSPSVTLPEDLMQLIHLLRNFDPKYYPLVLGHVCHEVEAIKCALYVKMFNRLMVLKRANITTYFKIMKALPYSNVWISEASKNVHLAHVLHYDGRQMSKKIQKIVVRFLTTRIKYDTGAEGLLNFRRNGEAHLEKDYSVDFGGHVEAALTGAKAVLDLQPGVAAGPPNPIVRKLASRIGSAVAAVLQKSYSSPEAAKQAAIAAATTVAQNPNLCKKIAQNRAATAAKAAAAKAAVWPPAVPQAPLMFDSDQIEHMFDVSTPLLLAQFQKAMFDEWQVFQLDDGQKVACLL

SEQ ID NO: 105375 - protein, 128 aa, Setaria italica
  misc_feature (125)..(125): Xaa can be any naturally occurring amino acid
  Transcript Sequence Number=SeqID_39401
  Subcellular localization annotation: CTP_CleavageSite=62; ConfidenceScore=5.48e-01
EYRPVTAAMTPLRHHHVLLLSPLPRRRCRRTAAASRRTAPFTATTRISTSSETWLMMSEKARAVHGVHACVGMGRLRARWRCCGREQDGDVSRDSSKAAYKTCVRCICDGDLHMSLQCGGCACTXKRI

SEQ ID NO: 105376 - protein, 103 aa, Setaria italica
  Transcript Sequence Number=SeqID_39402
HVIRAVHGVHACVGMGRLRARWRCCGREQDGDVSRDSSKAASKHVSDVYVMEISICLCSAVGVHVLYKRIIRKLTSYVIVIVIVWACMYLTSEWFVNSPILPY

SEQ ID NO: 105377 - protein, 184 aa, Setaria italica
  Transcript Sequence Number=SeqID_39403
  Gene Ontology: Mol. function=transporter activity; Cellular component= membrane; Biological process=oligopeptide transport
  Homolog annotation: Hit_ID=Q5N741; Match level="QueryCoverage=97%, HitCoverage=32%, E-value=5e-55, Identity=57%"; Hit description =Putative oligopeptide transporter
LVACAQGGHKPCVQAFGADQFDENDPEECASRSSFFNWWYFGAYGSNIVTVSILNYIQDNISWQFGFGIPCIAMAVSLTIFWLGTKKYRFYPPMSSGGLFGHIGKSLLAWIRCWCTSWSAKSPDDSHCATASPSKGDKYKAETKLFSDNAVAVLKLLPVGATCLIYAVVFAQWMTLFTKQDKSK

SEQ ID NO: 105378 - protein, 59 aa, Setaria italica
  misc_feature (1)..(1): Xaa can be any naturally occurring amino acid
  misc_feature (14)..(14): Xaa can be any naturally occurring amino acid
  Transcript Sequence Number=SeqID_39404
XFIKAVHISEDCIXHLITPVSHKLMEKVNIIFQSCIAVPSCLLQVSDTLSDITGRLLKL

SEQ ID NO: 105379 - protein, 275 aa, Setaria italica
  Transcript Sequence Number=SeqID_39405
  Gene Ontology: Mol. function=transcription cofactor activity; Biological process=regulation of transcription, DNA-dependent
  Homolog annotation: Hit_ID=Q6MW71; Match level="QueryCoverage=97%, HitCoverage=18%, E-value=1e-56, Identity=47%"; Hit description =B1340F09.12 protein
SEIPVAKKPIDRLLDAVRTSSPSMLCSAANSVYSVLNMNDYVPPREIDAFQYSQQGGSNTVNKMKRVFESTSLCSESAPLGSMDGSCMTFDWTISEAEYSAERGAKRQKVQNAKDTLLDEINSVNNMLLDTFISIAQDNGTDGMASGNGGTLIELFYTAISLTPDLASLFATSGMSIVMPVKVLVPVDYPRSSPVLVCDQGDEQMSEDEMRKRFSEISGAADVAFRRTLYGLQEPMSVVDMARAWDASVRRSIVDFAQRHGGGMFSSRYGEWTWC

SEQ ID NO: 105380 - protein, 221 aa, Setaria italica
  misc_feature (31)..(31): Xaa can be any naturally occurring amino acid
  misc_feature (95)..(95): Xaa can be any naturally occurring amino acid
  misc_feature (113)..(113): Xaa can be any naturally occurring amino acid
  misc_feature (127)..(127): Xaa can be any naturally occurring amino acid
  misc_feature (185)..(185): Xaa can be any naturally occurring amino acid
  misc_feature (206)..(206): Xaa can be any naturally occurring amino acid
  Transcript Sequence Number=SeqID_39406
  Gene Ontology: Mol. function=aspartic-type endopeptidase activity; Cellular component=chromatin; Biological process=DNA integration
  Homolog annotation: Hit_ID=Q25AL5; Match level="QueryCoverage=92%, HitCoverage=11%, E-value=1e-50, Identity=49%"; Hit description =H0102C09.1 protein
IRSMASSSSSSNLLLGVHITEKLSKGNRALXQVHVLTVICNARMEGHITGKTGAPEAEIDEKQTDNKIVKAPNPAYEEWFALDQQVLGLIFTSVXKDVLMQIAPAKTAIEAWXLVEEMYTAKTRARXVNVRLALATTKKGTLTITKYFAKMKELADEMAASRKPLDDEGVASYIINGLDSEFNPXGIIGDGKGRNPVSISELYSQXLSFETRINLQQEGHS

SEQ ID NO: 105381 - protein, 88 aa, Setaria italica
  Transcript Sequence Number=SeqID_39407
MAPRDPKDGGAGDGGGAGAGAADPEADIETPLLASSSSSFFLDPAGEDGDDGADERRRRRRRLLLGSHTQSNTTSQVALVGADVCPIQ

SEQ ID NO: 105382 - protein, 55 aa, Setaria italica
  Transcript Sequence Number=SeqID_39408
EQIKFNAKQGYQQNNIHLKISRMISYYFYTKIPLRYCLKAMIISVFRHSVNVDYK

SEQ ID NO: 105383 - protein, 68 aa, Setaria italica
  Transcript Sequence Number=SeqID_39409
STLTECLNTNGGHHIDIAYERGIENPDYDVSQACNLIRVRHHKIHVVPLRQAQARQHDDGKDTLNFIG

SEQ ID NO: 105384 - protein, 91 aa, Setaria italica
  Transcript Sequence Number=SeqID_39410
FTLFSSSAIGRNYGWMKALLPHQVIHSLAVKSFHRLYTCCCVLLCCLVLYRHPHTFSDIFNHAYVNSFIIKFDTYRCLSYEYAKICVTMKS

SEQ ID NO: 105385 - protein, 176 aa, Setaria italica
  misc_feature (52)..(52): Xaa can be any naturally occurring amino acid
  misc_feature (68)..(68): Xaa can be any naturally occurring amino acid
  Transcript Sequence Number=SeqID_39411
  Gene Ontology: Mol. function=RNA-directed DNA polymerase activity; Biological process=RNA-dependent DNA replication
  Pfam annotation: Domain name=DUF594; Domain location=29-86; Score =84.3; E_value=4.3e-22; Accession=PF04578.5; Description=Protein of unknown function, DUF594
MRLPQGIESGETCESKEEIFHKGMRLGKQLEGMEEGARWKVLADFWAEMLLXRKPSGRVNDHVECLAXKGGEFITHLWALLTHAGILERGPMIVIPNNKENAEGQQPHQEQAQGLQPDQPHTEGTQNPVNHHEIEEEEDGGAHIHGNGGFSSLPAQGNYDSNAISSANNQPPVETV

SEQ ID NO: 105386 - protein, 102 aa, Setaria italica
  Transcript Sequence Number=SeqID_39412
  Gene Ontology: Mol. function=zinc ion binding; Cellular component =intracellular
  Pfam annotation: Domain name=zf-FCS; Domain location=58-95; Score =12.7; E_value=0.024; Accession=PF06467.6; Description=MYM-type Zinc finger with FCS sequence mot
HQTPQQILIAKEEERQRKLAEEREKRAAAAERRLAALAAQSAGISGATAPAAGNSAQKAAPDDNSCSCCFASLAGKVPFHRYNYKYCSTTCMHLHSEMLQDD

SEQ ID NO: 105387 - protein, 72 aa, Setaria italica
  Transcript Sequence Number=SeqID_39413
QKINWPINLLSKAPVWKILRLFKDHTLEIVNIFMEALSIQCDSQMAYVFTSNFHILILSSKLSPHNDGQYTF

SEQ ID NO: 105388 - protein, 45 aa, Setaria italica
  Transcript Sequence Number=SeqID_39414
GNSELYTCSCFIWNRKPRTRLTSSCGNQWLYQHKTILPIARKNGR

SEQ ID NO: 105389 - protein, 104 aa, Setaria italica
  Transcript Sequence Number=SeqID_39415
SNQTRGKKKPSCGVQVHPNLIDTNVKIRFLSDGRQKQQRKSMVTASQDMNIRLQIDSLFSKKTIIYILITNKLKAIRHVQSKHYESDKNYAQKAVLQYLQGKIL

SEQ ID NO: 105390 - protein, 125 aa, Setaria italica
  Transcript Sequence Number=SeqID_39416
  Gene Ontology: Mol. function=protein binding; Cellular component =cytoplasm; Biological process=protein amino acid autophosphorylation
  Homolog annotation: Hit_ID=Q8S5N8; Match level="QueryCoverage=100%, HitCoverage=10%, E-value=6e-57, Identity=78%"; Hit description =Putative F-box protein family
  Pfam annotation: Domain name=Mob1_phocein; Domain location=1-115; Score=129.3; E_value=1.2e-35; Accession=PF03637.9; Description =Mob1phocein family
PKYEYRCFDGVKIKRPIEVSAPKYVEYLMDWIEAQLDDENIFPQKLGTPFPPNFRDVVKTIFKRLFRVYAHIYLSHFQIIMKLQEEAHLNTCFKHFTLFTLEFRLIDRVELAPLSELIDPIILGC

SEQ ID NO: 105391 - protein, 115 aa, Setaria italica
  Transcript Sequence Number=SeqID_39417
  Gene Ontology: Mol. function=ATP-dependent DNA helicase activity; Biological process=DNA repair
  Homolog annotation: Hit_ID=B9RA07; Match level="QueryCoverage=100%, HitCoverage=10%, E-value=2e-45, Identity=74%"; Hit description=ATP -dependent DNA helicase pcrA, putative
QDMWQAVVVDEFQDTSAMQYCLLKILASHNHITIVGDEDQSIFSFNGADVSGFDSFRRDFPNHKEIRLSKNYRSTRAIVEAATALIHNNTKRHHHTLVETDNPSGCKITVKECHS

SEQ ID NO: 105392 - protein, 93 aa, Setaria italica
  Transcript Sequence Number=SeqID_39418
NSEQGRRQFMTERIHLRAEYTGVSQWTPATDICPCTQVDHIFFYLFAVKIVRRIMRRSRSDIARDDMVPLAGVGVPAGDVGLGGGGGTAAGTP

SEQ ID NO: 105393 - protein, 215 aa, Setaria italica
  Transcript Sequence Number=SeqID_39419
  Gene Ontology: Mol. function=protein binding; Cellular component =cytoplasm; Biological process=multicellular organismal development
  Homolog annotation: Hit_ID=A0S6X4; Match level="QueryCoverage=80%, HitCoverage=97%, E-value=3e-91, Identity=93%"; Hit description=FT -like protein
  Pfam annotation: Domain name=PBP; Domain location=60-205; Score =210.5; E_value=4.6e-60; Accession=PF01161.12; Description =Phosphatidylethanolamine-binding protein
RRRRIPINCWALARVRRWTEPPERRTTATRGKKGARGSSASSMQRGDPLVVGRVIGDVVDPFVRRVPLRVAYAAREVSNGCELRPSAIAEQPRVEVGGPDMRTFYTLVLVDPDAPSPSDPNLREYLHWLVTDIPATTGVSFGTEIVCYESPRPVLGIHRLVFLLFQQLGRQTVYAPGWRQNFSTRDFAELYNLGLPVAAVYFNCQRESGTGGRRM

SEQ ID NO: 105394 - protein, 61 aa, Setaria italica
  Transcript Sequence Number=SeqID_39420
  Subcellular localization annotation: CTP_CleavageSite=33; ConfidenceScore=5.60e-01
MSSTTSTQPSPSSGGASTSAGENARPPDLGTNSAGPARSRLSLQLDQRSLHFSVNAWVLIV

SEQ ID NO: 105395 - protein, 269 aa, Setaria italica
  Transcript Sequence Number=SeqID_39421
  Homolog annotation: Hit_ID=Q6L565; Match level="QueryCoverage=81%, HitCoverage=24%, E-value=1e-71, Identity=55%"; Hit description =Putative RNA polymerase sigma factor
  Pfam annotation: Domain name=UPF0121; Domain location=32-257; Score= -137.1; E_value=0.052; Accession=PF03661.5; Description =Uncharacterised protein family (UPF0121)
  Subcellular localization annotation: CTP_CleavageSite=33; ConfidenceScore=5.65e-01
MSSTTSTQPSPSSGGASTSAGENARPPDLGTNSAGPARSRLSLQLDQRSLHFSVNAWVLIVALIGIFPLAPRSLQYKGYRLSLLGTTCTTGYALFPLYRLPRAGNLQAVQAWCHHVTSSKDFIPFMYCLMFVTSKLHLKLVLVPVICWALEHVARFLRRHFTSSSLYRTYLEQPCTWVEANTTAVHFLRSNAEILLGFLLIISLFSRQRNAMQTFMYWQLLKLMYHSPFTAAYHRAIWLKIGRTINPYIHRYTPFLHDPINAGMRWWFR

SEQ ID NO: 105396 - protein, 115 aa, Setaria italica
  Transcript Sequence Number=SeqID_39422
  Subcellular localization annotation: CTP_CleavageSite=39; ConfidenceScore=5.17e-01
QERQKKINRQQFGRVARKSRSPLPSFPERCNVRFSQIPSAMPRWICPSLDLTTPGTVQRCSFECGHRHCAAPGKLFHGAAAVFSHQCRLQNRKTVFTCRQTAPVRNTDTMQLDRG

SEQ ID NO: 105397 - protein, 71 aa, Setaria italica
  Transcript Sequence Number=SeqID_39423
WSIPQCPSLGLAYIYVRGWHNGTVGWTAVLSVSMIFVGYFLSFTIVQVYLHIVVINIILDDSINLCMYSSN

SEQ ID NO: 105398 - protein, 114 aa, Setaria italica
  misc_feature (62)..(62): Xaa can be any naturally occurring amino acid
  Transcript Sequence Number=SeqID_39424
  Gene Ontology: Mol. function=hydrogen-translocating pyrophosphatase activity; Cellular component=membrane; Biological process=proton transport
  Homolog annotation: Hit_ID=B6UEE8; Match level="QueryCoverage=87%, HitCoverage=12%, E-value=4e-19, Identity=55%"; Hit description =Pyrophosphate-energized vacuolar membrane proton pump
MAVLGTAAIEVFIPVAALIGIAFAVLQWYVVARVPVADHGSAARGKGRRGEGRSGALEEEGXEEEEDGVDRVAAEARCAEIQQAISIGATSFLLTEYKYLAVFMAAFAAVIFVF

SEQ ID NO: 105399 - protein, 717 aa, Setaria italica
  Transcript Sequence Number=SeqID_39425
  Gene Ontology: Mol. function=1-deoxy-D-xylulose-5-phosphate synthase activity; Biological process=terpenoid biosynthetic process
  Homolog annotation: Hit_ID=O22567; Match level="QueryCoverage=100%, HitCoverage=100%, E-value=0.0, Identity=89%"; Hit description =Probable 1-deoxy-D-xylulose-5-phosphate synthase, chloroplastic
  Pfam annotation: Domain name=TPP_enzyme_C; Domain location=160-353; Score=-37.8; E_value=0.008; Accession=PF02775.13; Description =Thiamine pyrophosphate enzyme, C-term
  Pfam annotation: Domain name=Transket_pyr; Domain location=390-557; Score=231.6; E_value=2e-66; Accession=PF02779.16; Description =Transketolase, pyrimidine binding dom
  Pfam annotation: Domain name=Transketolase_C; Domain location=571 -694; Score=158.8; E_value=1.6e-44; Accession=PF02780.12; Description= Transketolase, C-terminal domain
  Pfam annotation: Domain name=Transketolase_N; Domain location=86-379; Score=-205.5; E_value=0.027; Accession=PF00456.13; Description =Transketolase, thiamine diphosphate b
  Pfam module annotation: Pfam domain module=TPP_enzyme_C::Transket _pyr::Transketolase_C::Transketolase_N; Domain location=160-353::390 -557::571-694::86-379
MALSTTFSVPRGFLGVPAQDSHFAPAAELHAHKQLQARPIKPRRRPACVSASLSEREAEYYSQRPPTPLLDTINYPVHMKNLSVKELRQLADELRSDVIFHVSKTGGHLGSSLGVVELTVALHYVFNAPQDRILWDVGHQSYPHKILTGRRDKMPTMRQTNGLAGFTKRAESEYDSFGTGHSSTTISAALGMAVGRDLKGSKNHVVAVIGDGAMTAGQAYEAMNNAGYLDSDMIVILNDNKQVSLPTATLDGPVPPVGALSSALSKLQSSRPLRELREVAKGVTKQIGGSVHELAAKVDEYARGMISGPGSSLFEELGLYYIGPVDGHNIDDLITILNDVKSTKTTGPVLIHVITEKGRGYPYAERAADKYHGVAKFDPATGKQFKSPAKTLSYTNYFAEALIAEAEQDSKIVAIHAAMGGGTGLNYFLRRFPNRCFDVGIAEQHAVTFAAGLACEGLKPFCAIYSSFLQRGYDQVVHDVDLQKLPVRFAMDRAGLVGADGPTHCGAFDVTYMACLPNMVVMAPSDEAELCHMVATAAAIDDRPSCFRYPRGNGIGVPLPPNYKGTPLEVGKGRILLEGDQVALLGYGSAVQYCLAAATLVERHGLKVTVADARFCKPLDQALIRSLAKSHEVLITVEEGSIGGFGSHVAQFMALDGLLDGKLKWRPLVLPDRYIDHGSPADQLAEAGLTPSHIAATVFNVLGQNREALAIMAMPNA

SEQ ID NO: 105400 - protein, 129 aa, Setaria italica
  misc_feature (122)..(122): Xaa can be any naturally occurring amino acid
  Transcript Sequence Number=SeqID_39426
  Gene Ontology: Mol. function=flavin-containing monooxygenase activity; Cellular component=vacuole; Biological process=oxidation reduction
  Homolog annotation: Hit_ID=A8MRX0; Match level="QueryCoverage=96%, HitCoverage=27%, E-value=8e-32, Identity=55%"; Hit description =Flavin-containing monooxygenase FMO GS-OX5
IFVDQIDAIQDDGRVHFAEGSAVAADTILFAFRYRYHFPFLDLDGLTVDDNRVGPLYRHVFPPKYAPNLSFVGLPFKTIIFQALELESKWVAAVLSGHTALPSEEGMMTAVREDYRRMEEAXGRPKRHT

SEQ ID NO: 105401 - protein, 323 aa, Setaria italica
  Transcript Sequence Number=SeqID_39427
  Gene Ontology: Mol. function=flavin-containing monooxygenase activity; Cellular component=vacuole; Biological process=oxidation reduction
  Homolog annotation: Hit_ID=C5H9Q6; Match level="QueryCoverage=91%, HitCoverage=64%, E-value=2e-73, Identity=48%"; Hit description =Flavin-monooxygenase
  Pfam annotation: Domain name=FMO-like; Domain location=4-315; Score= -295.5; E_value=7.6e-12; Accession=PF00743.11; Description=Flavin -binding monooxygenase-like
  Pfam annotation: Domain name=Pyr_redox; Domain location=74-151; Score= 4.9; E_value=0.002; Accession=PF00070.19; Description=Pyridine nucleotide-disulphide oxidore
  Pfam module annotation: Pfam domain module=FMO-like::Pyr_redox; Domain location=4-315::74-151
EVLRVAPLGQGERWAVAWRGEDGEVAEEVFDAVVVCNGHCTAPLVPKIRGIDKWRGKQIHSHNYRVPEPFRDQSVVVVGFAASGIDIAAEISRVAKEVHIAARYSEDRLGKIELYQNVWMHAEIDGIQDDGRVHFAEGSAVAADTILYCTGYRYHFPFLDLDGLTVDDNRVGPLYRHVFPPKYAPNLSFVGLPFKTIIFQALELESKWVAAVLSGHTALPSEEGMMTAVREDYRRMEEAGRPKRHTHALWPEWVEYMNWLADQVGEPHLEARRRDVYDRVLKCIWSLDDRYRDRWEEEEESATVATLQRKGSICQASYRDSSR

SEQ ID NO: 105402 - protein, 160 aa, Setaria italica
  Transcript Sequence Number=SeqID_39428
  Gene Ontology: Mol. function=protein binding
  Homolog annotation: Hit_ID=Q7XED0; Match level="QueryCoverage=78%, HitCoverage=33%, E-value=9e-29, Identity=51%"; Hit description =BTB/POZ domain containing protein, expressed
  Pfam annotation: Domain name=BTB; Domain location=83-160; Score=-2.1; E_value=0.021; Accession=PF00651.23; Description=BTBPOZ domain
LATDREVRPVPCRTRACSFQNWSPHEGWEWVCSDFITREDLDRQKYLDDGSFTVSCDIAIKPFTAKATDAFVTVPPSDLHQHLGNLLACEDGTDVTFKVAGGGGTGTFSAHRCVLAARSPVFRAQLFGEMKEGKEAATGGVVIAVDDMEAHVFRSLLHFV

SEQ ID NO: 105403 - protein, 151 aa, Setaria italica
  misc_feature (73)..(73): Xaa can be any naturally occurring amino acid
  Transcript Sequence Number=SeqID_39429
  Gene Ontology: Mol. function=hydrolase activity; Biological process =metabolic process
  Homolog annotation: Hit_ID=B6SXT6; Match level="QueryCoverage=98%, HitCoverage=44%, E-value=1e-30, Identity=50%"; Hit description =Gibberellin receptor GID1L2
  Pfam annotation: Domain name=Abhydrolase_3; Domain location=3-129; Score=-26.4; E_value=8.4e-06; Accession=PF07859.5; Description =alphabeta hydrolase fold
VRHGSGELPLTPLRLAGCVMLWPYFGGEELTPSEAASPPGEPMGMALFDQLWRLALPAGATKDHPIANPLAPXGVPFGDLGGDFPPVLVLDPDQDVLHDRVGEYVARLRAAGKEVELVVFEGQGHAFFVTEPCGEASDELIRVIRRFVHSG

SEQ ID NO: 105404 - protein, 71 aa, Setaria italica
  Transcript Sequence Number=SeqID_39430
TLIFFHTPGKSCCLLEGDDKREMCAEGRIAKGRVIVFFRGKSKQDCIQKDNCLINNLQARSYLKHLLMLKM

SEQ ID NO: 105405 - protein, 44 aa, Setaria italica
  Transcript Sequence Number=SeqID_39431
IMLLTEIYLKLVHKEFLKTCDFFKKIELAIFTWQYCKLELITTT

SEQ ID NO: 105406 - protein, 467 aa, Setaria italica
  Transcript Sequence Number=SeqID_39432
  Homolog annotation: Hit_ID=Q8GRM2; Match level="QueryCoverage=100%, HitCoverage=34%, E-value=1e-138, Identity=60%"; Hit description=COP1- interacting protein 7 (CIP7)-like
VKPFVAHLRAAEEQASAQPPPPAIRLQLERRAPWFSKGTLERFVRFVSTPEVLELANTYDLEMSQLEGARKIYAQGGTGDATSGAAAENVTTSAAAAAAADNTKKELLRAIDVRLSALKQDLAAACSRASSAGFNPNSVSELLLFANHFGANRLSEACTKFMSLCQRHPDISPQNAPPAVSSHWKGFDDGNVRGSSSSDMSIDEPQVDLGESNNKSTVGGSDSQIHRLSNSQGSVHVSSEPVAEQQTKSTIQQAADKQETETDASPATAIGVSRRLSVKDRISMFESQKKEQTPSSGNSTSAGTGRVVPGKGEHRRVPSGASMEKLVRRWSSVSDMSIDLSNNDSGNLNDRKENGTPVATPTSADLEANSKAGVDEGSNELKDSVTSQSCPCQKDNVSMDSTTKNLCPAPNLSNTPAPHNESTYSAEDDMVINSSIESESSFGKEPGFIQGHTRMSNKADSNVSTRS

SEQ ID NO: 105407 - protein, 41 aa, Setaria italica
  Transcript Sequence Number=SeqID_39433
RGTSVICYIKNQSRVLNSLWSKGTRRQNHCIPIINWLCNCF

SEQ ID NO: 105408 - protein, 84 aa, Setaria italica
  Transcript Sequence Number=SeqID_39434
  Homolog annotation: Hit_ID=B6TKT6; Match level="QueryCoverage=57%, HitCoverage=12%, E-value=2e-19, Identity=89%"; Hit description =Sucrose cleavage protein-like
MASPTAGDASLAAHAPAADATDAAPAAAAAMPDPDAEFGFQRPELGKEKLAGTVGFHERQVFLCYKGPEVWPSHLEAAESDRLP

SEQ ID NO: 105409 - protein, 386 aa, Setaria italica
  Transcript Sequence Number=SeqID_39435
  Gene Ontology: Mol. function=identical protein binding; Cellular component=cytoplasm
  Homolog annotation: Hit_ID=B6TKT6; Match level="QueryCoverage=93%, HitCoverage=90%, E-value=1e-162, Identity=79%"; Hit description =Sucrose cleavage protein-like
  Pfam annotation: Domain name=Suc_Fer-like; Domain location=39-253; Score=334.7; E_value=1.9e-97; Accession=PF06999.4; Description =Sucraseferredoxin-like
HFHHHSAPPRSAHQPAAAAAMPDPDAEFGFQRPELGKEKLAGTVGFHERQVFLCYKGPEVWPSHLEAAESDRLPRLLAAAIKARKPNLKKTTKLTICEGEDGTESSNGDVLIFPDMIRYKGLTHFDVDNFVEEVLVKDTEWLPGCPEAISGSYVFVCSHGSRDKRCGVCGPALIKRFKEEINGLGLDGKVAVSACSHVGGHKYAGNVIIFRSDDKGEVTGHWYGYVVPDDVPVLLHKHIAEGEIVDHLWRGQMGLSEEQQKQALELRNMTNGAKESLEETGTDGASCIPPATGGGCCQGNGGFTCCQTDLPKEKQDKSVAAEQNQKGSEKENDKESGAGSKKGHTKTCPMPTWFETWERADTYAALAVVAAAASVFVAFRIYKNLN

SEQ ID NO: 105410 - protein, 89 aa, Setaria italica
  Transcript Sequence Number=SeqID_39436
QPIHDLQWLPRSCGARHPATRALVLQAIEEQARTSRTSNSIGNMEMKTNSCSFYWGSESSRTDGLVDTRVYKEVAMAKLSTKQNPICSW

SEQ ID NO: 105411 - protein, 130 aa, Setaria italica
  misc_feature (57)..(57): Xaa can be any naturally occurring amino acid
  misc_feature (88)..(88): Xaa can be any naturally occurring amino acid
  Transcript Sequence Number=SeqID_39437
RPPPGHHVTFGPRKERDPIQHVLVLDSDCSSGPTCNGRHDLIRTPFWAFKYSLESLXSLFSYGSGLMSISILRRPQSPKYYREVFCPXRCCVTLFWPDGPCIKLDPLGTCPRVGARPQHPLVVLLGINKD

SEQ ID NO: 105412 - protein, 154 aa, Setaria italica
  misc_feature (135)..(136): Xaa can be any naturally occurring amino acid
  Transcript Sequence Number=SeqID_39438
QELIADDVQGDASQCAATLLMQELGADYGQGDAAQCTTTLQTEELTADDGQDTAAQFTPTLELTQDDEQGGDVPCTTALKRQQLNPDDGQDAVALCTTTLPRQKSISDGAQGDVPRITTALQRQESDAAHGKGNXXQCTTSHRQEFLAADDSMT

SEQ ID NO: 105413 - protein, 116 aa, Setaria italica
  Transcript Sequence Number=SeqID_39439
PISTPKVAPETTVPTEVAAEHVVEKVVEEAKEEPAAAAVTEPPATAEPEQKAEEPPEAIVEPEHKEEQVLEKIVEEDQKPAAPVEEKTAAAIEVAEEPTEVKKDAGEEEEEKPTQS

SEQ ID NO: 105414 - protein, 103 aa, Setaria italica
  Transcript Sequence Number=SeqID_39440
ERIRQTYIPVRDLEDPARPVGPKAGPRPAEPKGAQNWPKRTHVAGTVARRVLPVYLGIRKSLDNRMACKPSKLKLLENQVMSPLYNRGLMYQMNQAKNYGVKP

SEQ ID NO: 105415 - protein, 144 aa, Setaria italica
  misc_feature (94)..(94): Xaa can be any naturally occurring amino acid
  misc_feature (98)..(98): Xaa can be any naturally occurring amino acid
  misc_feature (106)..(106): Xaa can be any naturally occurring amino acid
  Transcript Sequence Number=SeqID_39441
  Gene Ontology: Mol. function=zinc ion binding; Biological process=RNA- dependent DNA replication
  Homolog annotation: Hit_ID=Q2QXK8; Match level="QueryCoverage=73%, HitCoverage=10%, E-value=1e-24, Identity=53%"; Hit description =Transposon protein, putative, Mutator sub-class
YVYSCFLLVLVRIDPDAAFRLCVRISQFPAKLDDGNSSHALALIITSRNPKMEEYLHPYFLVRNFRLAYSGVIKPLTNKSQRAHVGLEFKLRPXLQKXAVGRQRKXRIPSCLGNKGNKAKSKGKWQVQCSNCLGHGYRSTSPKC

SEQ ID NO: 105416 - protein, 174 aa, Setaria italica
  Transcript Sequence Number=SeqID_39442
LELSHADTCTTPHKETYTIDRWYSLFTTLKHETAAFTAYIRRKRCSCVSRECHGVVGDEEDGPGAPICRLRMQVRVAIPRGPPALPCLGGEPPPLLVEFLLEVLVPALRHAESLVHVKVDGPVVQTAVAALAGDQDLGVARAVTVEVRDHRCHDAGRAGADLSGDAEACGGGLG

SEQ ID NO: 105417 - protein, 52 aa, Setaria italica
  Transcript Sequence Number=SeqID_39443
LGDSHMAMNLDMEECITIVPPLINKEIASTLGDHMCLCVLLIESFGVPFARN

SEQ ID NO: 105418 - protein, 41 aa, Setaria italica
  Transcript Sequence Number=SeqID_39444
MMVVHLTVPSVVNCHASVAFQAWLSRPQLLENGQNPFLTRG

SEQ ID NO: 105419 - protein, 414 aa, Setaria italica
  Transcript Sequence Number=SeqID_39445
  Gene Ontology: Mol. function=transferase activity, transferring glycosyl groups; Cellular component=integral to membrane
  Homolog annotation: Hit_ID=B6SV44; Match level="QueryCoverage=96%, HitCoverage=75%, E-value=1e-168, Identity=73%"; Hit description =Transferase, transferring glycosyl groups
  Pfam annotation: Domain name=Glyco_transf_8; Domain location=49-372; Score=181.7; E_value=2e-51; Accession=PF01501.12; Description =Glycosyl transferase family 8
YDARLDMEAVAIKMMAMLLKMDRKVKSSRVRALFNRHLASLGVPKSVHCLTLRLAEEFAVNSAARSPVPPPEHAPRLTDASYLHVANVPDNVLAAAVAVASAVRSAADPGRLVFHIVTDKKSYVPLHSWFALHPVSPAVVEVRGLHQFDWRDAGVIASVMRTVEEVQRSSLDYHQCDGSAEREHRRLEASKPSTFSLLNYLKIHLPEFFPELGRVMLLDDDVVVRKDLTGLWEQDLDGKVIGAVGAHEGGGICIDKTFGDHLNFSDPAVSGVHSSQCAWSWGINIVDLDAWRRTNVTETYQFWLQKNRESGFRLWQMASLPPALIAFDGRVQAIEPLWHLPGLGWRVPDPKLVEFAAVLHFSGPRKPWLEVAFPELRQRWLGHLNASDSFLQGCGVLEWQELGTAEHRVGREKN

SEQ ID NO: 105420 - protein, 45 aa, Setaria italica
  Transcript Sequence Number=SeqID_39446
ENLFYNLQLLTASIFIPQLFNCLNPQPLKKLGLNLDYLQQGSVEL

SEQ ID NO: 105421 - protein, 223 aa, Setaria italica
  misc_feature (150)..(150): Xaa can be any naturally occurring amino acid
  Transcript Sequence Number=SeqID_39447
  Gene Ontology: Mol. function=hydrolase activity, acting on acid anhydrides, catalyzing transmembrane movement of substances; Cellular component=integral to membrane; Biological process =metabolic process
  Homolog annotation: Hit_ID=Q5SMI5; Match level="QueryCoverage=100%, HitCoverage=25%, E-value=1e-106, Identity=85%"; Hit description =Plasma membrane H+-ATPase
KMITGDQLAIGKETGRRLGMGTNMYPSTTLLGDKNSTVNGMPIDELIEKADGFAGVFPEHKYEIVKRLQDRKHICGMTGDGVNDAPALKKADIGIAVDDATDAARSASDIVLTEPGLSVIVSAVLTSRAIFQRMKNYTIYAVSITIRIVXLGFLLVALVWEFDFAPFMVLIIAILNDGTIMTISKDRVKPSPTPDSWKLKEIFATGIVLGTYMALTTALFFYL

SEQ ID NO: 105422 - protein, 72 aa, Setaria italica
  Transcript Sequence Number=SeqID_39448
  Gene Ontology: Mol. function=protein binding
  Homolog annotation: Hit_ID=Q84Z52; Match level="QueryCoverage=95%, HitCoverage=24%, E-value=4e-18, Identity=53%"; Hit description =TDPOZ4-like
AQKLWENVSVETVCDALACAEIYNCPELKGKCIEFVVADKNLKKIVLTDSFMQLGQKFPSIITEVRRRLAGI

SEQ ID NO: 105423 - protein, 72 aa, Setaria italica
  misc_feature (56)..(56): Xaa can be any naturally occurring amino acid
  Transcript Sequence Number=SeqID_39449
  Subcellular localization annotation: CTP_CleavageSite=62; ConfidenceScore=5.68e-01
TLRLRDPAITAAMASTARLSTSCSLATGSITIRSRRTTMAAIGCAPSGSRTHRRSXGLSLCRSSTAGAEGAG

SEQ ID NO: 105424 - protein, 178 aa, Setaria italica
  Transcript Sequence Number=SeqID_39450
  Gene Ontology: Mol. function=nucleoside-triphosphatase activity; Cellular component=mitochondrion
  Homolog annotation: Hit_ID=B6TNP7; Match level="QueryCoverage=96%, HitCoverage=33%, E-value=7e-80, Identity=87%"; Hit description=ATP binding protein
LVEDLDRYLRGGDGETAAARTARVLSFMDGVASCCGEERVMVFTMRGGKDAVDAAVVRPGRLDVHIHFTLCDFEAFKALASNYLGLKDHKLYPQVEEGFHAGARLSPAELGEIMLANRASPSRALRNVITKLQHVSGGGAPPRHPAHKRNTSWSGAGQQWEEQPARASAESTGGRRDR

SEQ ID NO: 105425 - protein, 94 aa, Setaria italica
  Transcript Sequence Number=SeqID_39451
MVYFINKYVQSVCAETQIFWVSDGGHSVHVMSALDIESTNGDDEGVIVERELATIKLSAIEAIFLSERVQDIVPLSKDTVLILGQGNMFLYGTS

SEQ ID NO: 105426 - protein, 161 aa, Setaria italica
  misc_feature (11)..(11): Xaa can be any naturally occurring amino acid
  Transcript Sequence Number=SeqID_39452
  Gene Ontology: Mol. function=drug transporter activity; Cellular component=membrane; Biological process=multidrug transport
  Homolog annotation: Hit_ID=Q8H7P0; Match level="QueryCoverage=100%, HitCoverage=43%, E-value=1e-55, Identity=70%"; Hit description=MatE family protein, expressed
  Subcellular localization annotation: CTP_CleavageSite=26; ConfidenceScore=5.29e-01
FIPLHFSFAIXPLQRFLQCQMKNFVNAAASAVALAVHVLVSWLLVSRFQFGLVGIALTLNFSWWATATMLFAYVSCGGCPETWHGFSVEAFAGMWEFLKLSSASGVMLCLENWYYRILILLTGNLKNAAIAVDALSICMTINGWEMMIPLAFFAGTGVRVA

SEQ ID NO: 105427 - protein, 113 aa, Setaria italica
  Transcript Sequence Number=SeqID_39453
  Gene Ontology: Mol. function=nucleoside-triphosphatase activity
  Homolog annotation: Hit_ID=B6DMK2; Match level="QueryCoverage=100%, HitCoverage=9%, E-value=4e-45, Identity=79%"; Hit description =Meiotic crossover 1
IYKKSYRSAINSMILANSLHQKLWERSPFLLKQLPGIGIVTAKALKSAGICDFDTLAAADARKIESVTGRNYPFGNHIKELMSSLPPKIDIHIEDAGNRLGKSTITVTLTRLS

SEQ ID NO: 105428 - protein, 448 aa, Setaria italica
  misc_feature (38)..(38): Xaa can be any naturally occurring amino acid
  misc_feature (84)..(84): Xaa can be any naturally occurring amino acid
  Transcript Sequence Number=SeqID_39454
  Gene Ontology: Mol. function=phosphopyruvate hydratase activity; Cellular component=phosphopyruvate hydratase complex; Biological process=glycolysis
  Homolog annotation: Hit_ID=P26301; Match level="QueryCoverage=100%, HitCoverage=100%, E-value=0.0, Identity=95%"; Hit description =Enolase 1
  Pfam annotation: Domain name=Enolase_C; Domain location=150-445; Score=727.6; E_value=9.4e-216; Accession=PF00113.14; Description =Enolase, C-terminal TIM barrel domain
  Pfam annotation: Domain name=Enolase_N; Domain location=4-142; Score =235.4; E_value=1.4e-67; Accession=PF03952.8; Description=Enolase, N -terminal domain
  Pfam module annotation: Pfam domain module=Enolase_C::Enolase_N; Domain location=150-445::4-142
MAVTITSVKARQIFDSRGNPTVEVDVGLSDGSFARGAXVPSGASTGIYEALELRDGGSDYLGKGVLKAVNNVNSIIGPAIIGKXDPTEQVDIDNFMVQQLDGTSNDWGWCKQKLGANAILAVSLAVCKAGAMVKKIPLYQHIANLAGNKTLVLPVPAFNVINGGSHAGNKLAMQEFMILPTGASSFKEAMKMGVEVYHHLKSIIKKKYGQDATNVGDEGGFAPNIQENKEGLELLKAAIEKAGYTGKVVIGMDVAASEFFSEKDKTYDLNFKEDNNDGSNKISGDSLKDLYKSFVSEYPIVSIEDPFDQDDWSTYAKLTDEIGQQVQIVGDDLLVTNPTRVAKAISEKTCNALLLKVNQIGSVTESIEAVRMSKRAGWGVMASHRSGETEDTFIADLSVGLSTGQIKTGAPCRSERLAKYNQLLRIEEELGAAAIYAGENFRAPVEPY

SEQ ID NO: 105429 - protein, 106 aa, Setaria italica
  Transcript Sequence Number=SeqID_39455
  Gene Ontology: Mol. function=oxidoreductase activity; Biological process=oxidation reduction
  Homolog annotation: Hit_ID=P50160; Match level="QueryCoverage=100%, HitCoverage=32%, E-value=1e-30, Identity=63%"; Hit description=Sex determination protein tasselseed-2
HGIRVNCISPFGVATPMLINAWRRRGDGDEDDDAMAAPSSCSSSSLDVEKMEEVVRGLANLKGATLRASDIAEAALFLASDESTYVSGHNLVVDGGVTTSKNVIGL

SEQ ID NO: 105430 - protein, 120 aa, Setaria italica
  misc_feature (42)..(42): Xaa can be any naturally occurring amino acid
  misc_feature (73)..(73): Xaa can be any naturally occurring amino acid
  misc_feature (93)..(93): Xaa can be any naturally occurring amino acid
  misc_feature (100)..(100): Xaa can be any naturally occurring amino acid
  Transcript Sequence Number=SeqID_39456
  Gene Ontology: Mol. function=protein serine/threonine kinase activity; Biological process=RNA-dependent DNA replication
  Homolog annotation: Hit_ID=Q109T6; Match level="QueryCoverage=90%, HitCoverage=13%, E-value=4e-32, Identity=66%"; Hit description =Transposon protein, putative, CACTA, En/Spm sub-class
MGTELWTFENPLFWCQWVKLTGGGVTTDNHGMTIVDLNKIGXDEPFVLANDVTQVFYMKDMSCKPIRKGANKXNDQPKRHIVVPEERKIVGVXDKTDISXDYDRFNDLAPFSIKVNPSIR

SEQ ID NO: 105431 - protein, 120 aa, Setaria italica
  Transcript Sequence Number=SeqID_39457
MTMFLGKGAIVLVLVCSIVFIDPVLGKYPTCSVTQKKLIMRKCRKLIVDKSAWVPKNGPCCMAVRMVPNRNMLCVVALLTDSEKKRYNQERILDFKNLCDISRPPSERGVEELQTRYIGY

SEQ ID NO: 105432 - protein, 174 aa, Setaria italica
  Transcript Sequence Number=SeqID_39458
EIGSPCSSAPQTAEDDAVAGAGPQQQAPADDIAVSGHARWAGPPEPLPVEMVEEILRRLPLDDAVRTSALAKPWRYRWAECPGLELVAGDPPAAVDAVLNRYTCNVSRAQLDVPEESYCKIDGWLRALATKGIRYLVVCFTPVLLLRLPLLPSSLFSCRELTSLLLKHCDIPPC

SEQ ID NO: 105433 - protein, 419 aa, Setaria italica
  misc_feature (6)..(6): Xaa can be any naturally occurring amino acid
  misc_feature (50)..(50): Xaa can be any naturally occurring amino acid
  Transcript Sequence Number=SeqID_39459
MLDPSXNGLMAVTTRFELPRFLTNRTPTWFKKILSPLKKSENGPVFRFFXDLNDAVSYVKRLNVPSGMVGACRLDVAYEHFKEKPHMFQFVPNEKQVKAANKLLKSLPQRGRRKRLGGVPVFSAQNLNIAVATNDGIRWYTPYFFDKNLLDNILEASMDQHFHSIMQNRHKQRRRDIVDDSLTSEIIEESADSLLEPPEVQELMNEIGPAGIPLNVVTKAAEIQLLDVVDKVLLGNKWLRKAAGIQPRFPYVVDSFEERTAVSIANIATTSSFTASNDSCCQNDQQSQSSDPSIENSYRSHSNQDHNQFHFPFSNLLPNIWPGHDRKFKEQESDSKFSRYDADMKTDLQSNPLLPKITMVGISMSEGGQMSKANLKKTMEDLTKELEQTSEKNTFGDEKDPLFVANVGDYSRITKISST

SEQ ID NO: 105434 - protein, 63 aa, Setaria italica
  Transcript Sequence Number=SeqID_39460
EIPPQINSALFPRESGYIDLRFTSIAGRVQVVSALSGLSCASFLFFPHPRRLNPEELSGKPFY

SEQ ID NO: 105435 - protein, 36 aa, Setaria italica
  Transcript Sequence Number=SeqID_39461
KRTSYRPWRSATHCSLHDHQWSDNLKSRPIRKYQIA

SEQ ID NO: 105436 - protein, 82 aa, Setaria italica
  Transcript Sequence Number=SeqID_39462
LPAVGLLIRRLESQNYGQDEWVKGTGWSHENQLPLRGVDHRTTDPCLSHSQRLIKRSPRHATGINQAINQPNNQRNLSNDSL

SEQ ID NO: 105437 - protein, 295 aa, Setaria italica
  misc_feature (12)..(12): Xaa can be any naturally occurring amino acid
  Transcript Sequence Number=SeqID_39463
  Gene Ontology: Mol. function=nucleotide binding; Biological process =defense response
  Homolog annotation: Hit_ID=Q9ATQ3; Match level="QueryCoverage=95%, HitCoverage=30%, E-value=5e-79, Identity=52%"; Hit description=LRR14
  Pfam annotation: Domain name=LRR_1; Domain location=138-160; Score =1.8; E_value=1.4e+02; Accession=PF00560.25; Description=Leucine Rich Repeat
  Pfam annotation: Domain name=LRR_1; Domain location=184-206; Score =6.0; E_value=22; Accession=PF00560.25; Description=Leucine Rich Repeat
  Pfam annotation: Domain name=LRR_1; Domain location=207-228; Score =9.0; E_value=5.7; Accession=PF00560.25; Description=Leucine Rich Repeat
  Pfam annotation: Domain name=LRR_1; Domain location=230-251; Score =5.9; E_value=23; Accession=PF00560.25; Description=Leucine Rich Repeat
  Pfam module annotation: Pfam domain module=LRR_1::LRR_1::LRR_1::LRR _1; Domain location=138-160::184-206::207-228::230-251
WNNVYEELEMQXTKNVIPGVDAILKVSLEDLPFYIKSCFLHCALFPEDSAMQRRMLIRQWITAGFIKEKDNKTLEEVAEGCLNVLVNQSLLQVLSKNEFGRVKWCQMHDVIRHLALEKADKECFGKVYDGSRSFLLDGTHRLSINNTNIAPLSQSSATHLRAINVFMTYINIDLLRPVLASSNLLSALDLQGAQIEMLPKEVFSLFNLRFLGLRYTKLQILPESVGRLQNLEVLDAFLTALQSLPKGVGTLKKLSYLYASKEFNTKGSSTHFGAIKVPRGIKELCTGTCLLSSCL

SEQ ID NO: 105438 - protein, 70 aa, Setaria italica
  Transcript Sequence Number=SeqID_39464
CASVHHRKYSQYTTILHKISSLWTLEHVHCTNMRIPGSFMFNKLMGYRYGFVHSSANVYLAQGHARNKEI

SEQ ID NO: 105439 - protein, 197 aa, Setaria italica
  Transcript Sequence Number=SeqID_39465
  Gene Ontology: Mol. function=binding; Biological process=embryonic development ending in birth or egg hatching
  Homolog annotation: Hit_ID=Q9LFX3; Match level="QueryCoverage=90%, HitCoverage=38%, E-value=4e-53, Identity=52%"; Hit description =T7N9.21
PRDPAGAAAFLAAAADNLGNATEYERAVFGTLSAMVGEQRKEEVALQRHFELLKNFPRDILSLKRAQHLCFYLGNPDLSLKFVEQVLPENQDQNYIYGMLAFPLLELGKMDEAERAARKGLAINKNDVWSQHNLCHVFQQECRFREATEFMESCSPSWIACTSFLLTHNWWHVAVCYLEADMIYGTFTWFNETMVNL

SEQ ID NO: 105440 - protein, 211 aa, Setaria italica
  Transcript Sequence Number=SeqID_39466
  Gene Ontology: Cellular component=intracellular
  Homolog annotation: Hit_ID=B4FSV8; Match level="QueryCoverage=77%, HitCoverage=47%, E-value=5e-82, Identity=92%"; Hit description =Oligosaccharide transporter
  Pfam annotation: Domain name=OST3_OST6; Domain location=15-211; Score= -2.6; E_value=2.7e-07; Accession=PF04756.5; Description=OST3  OST6 family
MAPPPPHPRLLLLPLLLLAAAAASTARADDLVAELQSLRARSPSGVIHLTDTSVTRFLSAPSARRPYSVLVFFDAASLHSKTDLHLPQLRTEFALLSASFLAHNPGSGDLFFADIEFAESQHSFHQFGVNSLPHVRLVRPEHASLGGSEQMDQSHFSRLADSMAEFIESRTGLEIGPIVRPPLLSRNQIILLGILFLLRHATEDRQGTQGI

SEQ ID NO: 105441 - protein, 229 aa, Setaria italica
  Transcript Sequence Number=SeqID_39467
  Gene Ontology: Cellular component=intracellular
  Homolog annotation: Hit_ID=B4FSV8; Match level="QueryCoverage=100%, HitCoverage=67%, E-value=1e-106, Identity=82%"; Hit description =Oligosaccharide transporter
  Pfam annotation: Domain name=DUF2055; Domain location=83-220; Score= -34.1; E_value=0.0046; Accession=PF10219.1; Description=Predicted membrane protein (DUF2055)
  Pfam annotation: Domain name=OST3_OST6; Domain location=1-222; Score =86.7; E_value=8.2e-23; Accession=PF04756.5; Description=OST3  OST6 family
  Pfam module annotation: Pfam domain module=DUF2055::OST3_OST6; Domain location=83-220::1-222
FADIEFAESLLPSFGRSVFVLPHVRLVRPEHASLGGSEQMDQSHFSRLADSMAEFIESRTGLEIGPIVRPPLLSRNQIILLGILFLISIPFMIKRIIDGETLLHDRRVWMAGALFVYFFSVSGGMYGIIRHTPMFLTDRSDPNKLVFFYQGSGMQLGAEGFAVGFLYTLVGLMIAGVTHLLVRVESLQTQRFAMLAVMAIGWWAVRKVIYLDNWKTGYSIHTFWPSSWR

SEQ ID NO: 105442 - protein, 162 aa, Setaria italica
  Transcript Sequence Number=SeqID_39468
  Gene Ontology: Mol. function=binding
  Homolog annotation: Hit_ID=Q9LFX3; Match level="QueryCoverage=97%, HitCoverage=33%, E-value=5e-36, Identity=43%"; Hit description =T7N9.21
SIWHVEWLLDLLILWALSITGELKSAQNMLESLKSRVSSMDKDRQQVMQKALQLAEAVYQFGNEEHKTVFDTLGPDFDALGYKMIGASDEQVDVFNEVWYVVLISAGETSKAIDVLGKQIRKRDGAPFLWRLLAKAYSLDGRGADASVASEKADALQAAYSY

SEQ ID NO: 105443 - protein, 102 aa, Setaria italica
  Transcript Sequence Number=SeqID_39469
  Gene Ontology: Mol. function=DNA binding; Cellular component=nucleus; Biological process=regulation of transcription, DNA-dependent
  Homolog annotation: Hit_ID=Q7XWP5; Match level="QueryCoverage=79%, HitCoverage=15%, E-value=5e-25, Identity=61%"; Hit description =OSJNBa0072D08.3 protein
FSFLCTLLAHLQLLAIVDFHPSGLPEGWVKELVFRKTKEGLIRRDPYYTDPASSYTFRTLKSALCFVETGKISKRAFIQRISVHDLYSFDKSADLVIVLLMF

SEQ ID NO: 105444 - protein, 124 aa, Setaria italica
  misc_feature (76)..(76): Xaa can be any naturally occurring amino acid
  Transcript Sequence Number=SeqID_39470
  Gene Ontology: Mol. function=DNA binding; Cellular component=nucleus; Biological process=regulation of transcription, DNA-dependent
  Homolog annotation: Hit_ID=Q7XSE1; Match level="QueryCoverage=75%, HitCoverage=27%, E-value=3e-27, Identity=58%"; Hit description =OSJNBa0040D17.1 protein
FSFLCTLLAHLQLLAIVDFHPSGLPEGWVKELVFRKTKEGLIRRDPYYTDPASSYTFRTLKSALCFVETGKISKRXFIQRISVHDLYSFDKSADLHESLRSRLIINETPYENNDKCRNLRLFII

SEQ ID NO: 105445 - protein, 338 aa, Setaria italica
  Transcript Sequence Number=SeqID_39471
  Gene Ontology: Mol. function=DNA binding; Cellular component=nucleus; Biological process=regulation of transcription, DNA-dependent
  Homolog annotation: Hit_ID=Q7XWP5; Match level="QueryCoverage=92%, HitCoverage=60%, E-value=1e-91, Identity=52%"; Hit description =OSJNBa0072D08.3 protein
  Pfam annotation: Domain name=MBD; Domain location=20-103; Score=1.6; E_value=0.03; Accession=PF01429.11; Description=Methyl-CpG binding domain
MGDEDKAKHQIALIEEEKNIEALSKPPDWLPDGWIMEVYRGEDGTINRYYTSPISGYTFNMKSEVLDYLFSQTDERILESKESGAENTFQKEHKWLPKGWVMEIRAGGEKMDKMYKFYVYPKTGVRLLSKQDVLLYINEATVSKCDTNGQCNTSSEANLLAIVDFHPSGLPEGWVKELVFRKTKEGLIRRDPYYTDPASSYTFRTLKSALCFVETGKISKRAFIQRISVHDLYSFDKSADLHESLRSRLIINETPYAKATRSSRPRGTPQIEYDQIINNPQDGDTSGSDSPYEPEEENIRSRKAKGKEATNSRTINRSTGRPPQLRIKEEPTDDQDVD

SEQ ID NO: 105446 - protein, 494 aa, Setaria italica
  Transcript Sequence Number=SeqID_39472
  Gene Ontology: Mol. function=hydrogen ion transmembrane transporter activity; Cellular component=integral to membrane; Biological process=proton transport
  Homolog annotation: Hit_ID=Q06572; Match level="QueryCoverage=99%, HitCoverage=64%, E-value=0.0, Identity=92%"; Hit description =Pyrophosphate-energized vacuolar membrane proton pump
  Pfam annotation: Domain name=BCCT; Domain location=93-412; Score= -440.0; E_value=0.035; Accession=PF02028.9; Description=BCCT family transporter
  Pfam annotation: Domain name=H_PPase; Domain location=1-480; Score =803.9; E_value=1e-238; Accession=PF03030.8; Description=Inorganic H+ pyrophosphatase
  Pfam module annotation: Pfam domain module=BCCT::H_PPase; Domain location=93-412::1-480
NPAVIADNVGDNVGDIAGMGSDLFGSYAESSCAALVVASISSFGVNHDFTAMCYPLLVSSVGIIVCLITTLFATDIFEIKAVKEIEPALKKQLIISTALMTVGIALISWLALPAKFTIFNFGEQKQVTNWGLFLCVAIGLWAGLIIGYVTEYYTSNAYGPVQDVADACRTGAATNVIFGLALGYKSVIIPIFAIAVGIYISFTIAAMYGIAVAALGMLSTIATGLSIDAYGPISDNAGGIAEMAGMSHRIRERTDALDAAGNTTAAIGKGFAIGSAALVSLALFGAFVSRAGVKVVDVLSPKVIIGLVVGAMLPYWFSAMTMKSVGRAALEMVEEVRRQFNTIPGLMEGTGKPDYANCVKISTDASIKQMIPPGALVMLTPLVVGTFFGVETLSGVLAGALVSGVQVAISASNTGGAWDNAKKYIEAGASEHARALGPKGSDCHKAAVIGDTIGDPLKDTSGPSLNILIKLMAVESLVFAPFFATHGGILFKLF

SEQ ID NO: 105447 - protein, 232 aa, Setaria italica
  Transcript Sequence Number=SeqID_39473
IPELVLTACWWRRCSCRCSRRVGTVALVWATVVLLGGFSTMLVRLDFWLTTAIVFVETARIVGYNSAPEAKFFVDVPASAFFGRNILQIGSATGFVGLITMGPALIALAPIFAASACMTLSIWRLLSIDGYGGSSTESSNANLKPALILFYALVLSQGVLFLMWFVVAMSRSAQAKKLRQYFKNEEMITNRFIASTLDTCVEKGVVNTLNRTVITFAEELLQSEQSGDHGVA

SEQ ID NO: 105448 - protein, 58 aa, Setaria italica
  Transcript Sequence Number=SeqID_39474
QRRTGHLEYESGSDTHIQAQATYPVFQLKISFDQTIFFQFGRLNPSWIPTTMSISKKH

SEQ ID NO: 105449 - protein, 158 aa, Setaria italica
  Transcript Sequence Number=SeqID_39475
  Gene Ontology: Mol. function=electron carrier activity; Biological process=oxidation reduction
  Homolog annotation: Hit_ID=Q8LRA4; Match level="QueryCoverage=98%, HitCoverage=30%, E-value=3e-52, Identity=62%"; Hit description =Putative cytochrome P450-dependent fatty acid hydroxylase
FDLDELREMHYVHAAITESMRLYPPVPVNSLRAETDDVLPDGTAVQAGWFVAYNSYGMGRMESVWGRDAREFRPERWLSPADGTFRPDSPFRYVAFHAGPRVCLGKEMAYIQMKSIVACVLEELDVAVDGAYRPRQVASLTLRMADGLPVTVKPRRNC

SEQ ID NO: 105450 - protein, 127 aa, Setaria italica
  Transcript Sequence Number=SeqID_39476
  Pfam annotation: Domain name=Methyltransf_16; Domain location=12-127; Score=-62.6; E_value=0.032; Accession=PF10294.1; Description=Putative methyltransferase
MRFTASPVVELPVGGAVLAFEQDNDSFEVGTSVWPSSLVIVKFVERCLGDPALPFADVLRFPGTRAVELGSGCGPAGLGLSRLGLTDLVLTDIAAVLPALRRNLRRNRLHLPRAPRLAQLHWNCPAH

SEQ ID NO: 105451 - protein, 46 aa, Setaria italica
  Transcript Sequence Number=SeqID_39477
TLNYEALYLERYFTLNYQALLCMVSMQSCLYCSASHLRNLLFINSS

SEQ ID NO: 105452 - protein, 227 aa, Setaria italica
  Transcript Sequence Number=SeqID_39478
SLQSENARLREELEKERAEKTVAVETRRILEAERLQRESDVTQSTARMLEMIQACTGQNQALGVTNARLREARILEGRLQTESEIRQKMEAVQGLVDSLIAAQRLLIQDYQALKSEISEKNEEHATLLYDINVLETEKTCLEYQVDYLTKSLAERTARISERFDTYLRRSQASEAENARLREELDNERAKRAFDRTRALEARLRRESEIAQSIEAALSQLNKGLPGS

SEQ ID NO: 105453 - protein, 70 aa, Setaria italica
  Transcript Sequence Number=SeqID_39479
SSSCVLVERPDQDLGQTRQLRAKEKGHFWDLLNHHQVRTSGNEYHGPLRDWDHLSPPSPCWEVTYLSCSV

SEQ ID NO: 105454 - protein, 77 aa, Setaria italica
  Transcript Sequence Number=SeqID_39480
NLLFCITSHLKHQSIRPSVILFFSPTCISLVYLQLFQSHILFFSHSDRPNTPVYIFACFAPFFAPWLLASLVFHLES

SEQ ID NO: 105455 - protein, 65 aa, Setaria italica
  misc_feature (60)..(60): Xaa can be any naturally occurring amino acid
  Transcript Sequence Number=SeqID_39481
  Gene Ontology: Mol. function=electron carrier activity; Cellular component=integral to membrane; Biological process=oxidation reduction
  Homolog annotation: Hit_ID=Q9FVM8; Match level="QueryCoverage=76%, HitCoverage=9%, E-value=1e-18, Identity=84%"; Hit description =Cytochrome P450
MEAGAWAVVAAAVAVYLAWFWRMSRGLSGPRVWPLVGSLPGLVRHAEDMHEWIAANLRRXRGTYQ

SEQ ID NO: 105456 - protein, 46 aa, Setaria italica
  Transcript Sequence Number=SeqID_39482
QKMSLTLFMKHGLRMEVRPRDLGPVVDELRATGEYDAAARATAACA

SEQ ID NO: 105457 - protein, 235 aa, Setaria italica
  misc_feature (31)..(31): Xaa can be any naturally occurring amino acid
  Transcript Sequence Number=SeqID_39483
  Gene Ontology: Mol. function=electron carrier activity; Cellular component=integral to membrane; Biological process=oxidation reduction
  Homolog annotation: Hit_ID=Q9FVM8; Match level="QueryCoverage=100%, HitCoverage=43%, E-value=1e-116, Identity=88%"; Hit description =Cytochrome P450
GVARRGGLVTVTCDPRNLEHVLKARFDNYPXGPFWHAVFRDLLGDGIFNSDGETWVAQRKTAALEFTTRTLRTAMSRWVSRSIHLRLLPILDEAANEKTHVDLQDLLLRLTFDNICGLAFGKDPETLAPGLPENAFASAFDRATEATLNRFIFPECLWRCKKWLGLGMETTLARSVAHVDEYLAAVIRARKLELAGNGKCDTAAAAAHDDLLSRFMRKGSYSDESLQHVALNFIL

SEQ ID NO: 105458 - protein, 389 aa, Setaria italica
  misc_feature (277)..(277): Xaa can be any naturally occurring amino acid
  Transcript Sequence Number=SeqID_39484
  Gene Ontology: Mol. function=electron carrier activity; Cellular component=integral to membrane; Biological process=oxidation reduction
  Homolog annotation: Hit_ID=Q9FVM8; Match level="QueryCoverage=100%, HitCoverage=71%, E-value=0.0, Identity=85%"; Hit description =Cytochrome P450
  Pfam annotation: Domain name=p450; Domain location=27-389; Score= -114.5; E_value=3.9e-06; Accession=PF00067.14; Description=Cytochrome P450
MEVGTWAVVVAVVAAYMAWFWRLSRGLSGPRVWPVLGSLPGLVQHAEDMHEWIVGNLRRTGGTYQTCIFAVPGVARRGGLVTVTCDPRNLEHVLKARFDNYPKGPFWHGVFRDLLGDGIFNSDGETWVAQRKTAALEFTTRTLRTAMSRWVSRSIHGRLLPILGDATADGRSVDLQDLLLRLTFDNICGLAFGKDPETLARGLPENDFASAFDRATEATLNRFIFPECVWRCKKWLGLGMETTLARSVHHVDRYLSAVIKARKLELTGGKKGGDAPXPAATPHDDLLSRFMRKGTYSDESLQHVALNFILAGRDTSSVALSWFFWLVSTHPAVERKIVRELCAVLAASRGADDPALWLAAPFDFEELDRLVYLKAALSETLRLYPSVPE

SEQ ID NO: 105459 - protein, 297 aa, Setaria italica
  Transcript Sequence Number=SeqID_39485
  Gene Ontology: Mol. function=electron carrier activity; Cellular component=integral to membrane; Biological process=oxidation reduction
  Homolog annotation: Hit_ID=Q9FVM8; Match level="QueryCoverage=94%, HitCoverage=51%, E-value=1e-146, Identity=90%"; Hit description =Cytochrome P450
  Pfam annotation: Domain name=p450; Domain location=1-272; Score= -128.2; E_value=1.8e-05; Accession=PF00067.14; Description=Cytochrome P450
ETTLARSVAHVDEYLAAVIRARKLELAGNGKCDTAAAAAHDDLLSRFMRKGSYSDESLQHVALNFILAGRDTSSVALSWFFWLVSTHPDVERKVVRELCSALAASRGSHDPSLWLASPFTFEELDRLVYLKAALSETLRLYPSVPEDSKHVVADDYLPDGTFVPAGSSITYSIYSAGRMKTVWGEDCLEFRPERWLSADGTRFEPHDSYRFVAFNAGPRICLGKDLAYLQMKNIAGSVLLRHRLAVAPGHRVEQKMSLTLFMKHGLRMEVRPRDLAPVIDELRTADAAARPATAPCA

SEQ ID NO: 105460 - protein, 70 aa, Setaria italica
  Transcript Sequence Number=SeqID_39486
LKCNIDFNVVELNSMDELKLQTILDQASLLLLALGKIKSGKPNNSEARSNVCSEDRKVNMAVNSDGGHQI

SEQ ID NO: 105461 - protein, 68 aa, Setaria italica
  Transcript Sequence Number=SeqID_39487
FRILPYMMNIISKLWIYLQMKLNVIVTLIGHEYSLFHFIFRMVYCIEVSLLIVAILLVLCIHVYDREW

SEQ ID NO: 105462 - protein, 80 aa, Setaria italica
  Transcript Sequence Number=SeqID_39488
SNPRGNESGKATASPTLYIGYAHKSLSRSLFEDPPECKPSAAAGMSAAAAAARWKDRKGVPHLRLRREVAGDGQQLQEQR

SEQ ID NO: 105463 - protein, 203 aa, Setaria italica
  Transcript Sequence Number=SeqID_39489
  Gene Ontology: Cellular component=vacuole
  Homolog annotation: Hit_ID=Q9SRS0; Match level="QueryCoverage=62%, HitCoverage=79%, E-value=9e-19, Identity=37%"; Hit description =F21O3.17 protein
  Pfam annotation: Domain name=DUF538; Domain location=44-157; Score =169.6; E_value=8.9e-48; Accession=PF04398.4; Description=Protein of unknown function, DUF538
LPPLPSPLAALPILCLLLLAAPLPALSRDAPRDAVSGAPRAGSTIHQLLKDHGLPGGLLPRGVKSYTLDESSGLLEARLSAPCYAKYDNGDLAYFDNVVRGNLSKGALRGVEGLSQEELFVWLPVKGILVAGEQPGVIVFDIGYAHKSLSRSLFEDPPECKPSAAAGMSAAAAAARWKDRKGVPHLRLRREVAGDGQQLQEQR

SEQ ID NO: 105464 - protein, 263 aa, Setaria italica
  Transcript Sequence Number=SeqID_39490
  Homolog annotation: Hit_ID=B6UHI1; Match level="QueryCoverage=74%, HitCoverage=69%, E-value=8e-45, Identity=50%"; Hit description =Harpin-induced protein
  Pfam annotation: Domain name=Hin1; Domain location=77-216; Score =122.8; E_value=1.2e-33; Accession=PF07320.5; Description=Harpin -induced protein 1 (Hin1)
  Subcellular localization annotation: CTP_CleavageSite=65; ConfidenceScore=5.51e-01
MSSNGKPTPQPPAAAGNGTGGPPKMYQRPIYRPQQGGAKRRRGGRSCPFSCCCCFFWTVLVILLLAFIAAVVGGAFYLLYRPHRPAFTLSVAHVTKLSLSSSATAPALTDAIDVTLTAKNPNKKLVYFYDDFTVTAATAANAVPLGEASVPGFAHEAGNITVIKATVSASALAIDPTASSDIKKSGEFPITLDLETKAGVKVGGLKTKKIGIQVHCEGIKVTAPAPPPLAKKKKLAKAAAKAPAPAAAAKAPATAAAADAPEP

SEQ ID NO: 105465 - protein, 108 aa, Setaria italica
  Transcript Sequence Number=SeqID_39491
AVQVQTQKTTYNSIFYLQQRKCAIADRLQEARTVNLIKSGWSHLLHRFQVSTDSSETDIHIIWSILLAAGLAFTLGIGLSFMDSLYAVWFAGLILSCTFTHHTAVPQT

SEQ ID NO: 105466 - protein, 215 aa, Setaria italica
  misc_feature (17)..(17): Xaa can be any naturally occurring amino acid
  Transcript Sequence Number=SeqID_39492
  Homolog annotation: Hit_ID=UPI0001A7B04F; Match level="QueryCoverage =73%, HitCoverage=12%, E-value=1e-26, Identity=40%"; Hit description =REF4 (REDUCED EPIDERMAL FLUORESCENCE 4)
ALLLALLSTRVIPHRFXRPMEYRLYLELLKRHGFNFHYQMKAANFRKIMDLIDGNLSLSKIFGVSTCHPGVFVVHFVLCILWQLVDVVLDDEGLLELTPEKKAQWPTRPEDMSTFEGTFTEQRTEKIEKLQKMNTLTTVELIEHLLRDKVITRILSLARENMHSHWGTFTSRLHLLATNSSTLQNSAISLEPFQQLILGDCNVYGELNIICVKGF

SEQ ID NO: 105467 - protein, 173 aa, Setaria italica
  misc_feature (141)..(141): Xaa can be any naturally occurring amino acid
  Transcript Sequence Number=SeqID_39493
  Gene Ontology: Mol. function=binding; Cellular component=chloroplast; Biological process=regulation of transcription, DNA-dependent
  Homolog annotation: Hit_ID=B9S1X9; Match level="QueryCoverage=98%, HitCoverage=67%, E-value=2e-65, Identity=47%"; Hit description =Pentatricopeptide repeat-containing protein, putative
  Pfam annotation: Domain name=PPR; Domain location=123-158; Score =12.1; E_value=0.33; Accession=PF01535.12; Description=PPR repeat
  Pfam annotation: Domain name=PPR; Domain location=18-52; Score=6.6; E_ value=1.5; Accession=PF01535.12; Description=PPR repeat
  Pfam annotation: Domain name=PPR; Domain location=53-87; Score=25.9; E_value=0.00016; Accession=PF01535.12; Description=PPR repeat
  Pfam annotation: Domain name=PPR; Domain location=88-122; Score=33.1; E_value=1.1e-06; Accession=PF01535.12; Description=PPR repeat
  Pfam module annotation: Pfam domain module=PPR::PPR::PPR::PPR; Domain location=123-158::18-52::53-87::88-122
IKKLFDGMKNRGFKESGAVYAVLVDIYGQYGYFRDARECIAALKAENTQLSARIFCVLANAYAQQGLCEQTVNVLQLMEEEGFEPNLVMLNLLINAFGTAGRHLEALAVFQHIKDSGMSPDVVTYTTLMKTFMRAKKFEKXVSEVYKDMERDGCTPDRKAREMLHDASVILEQ

SEQ ID NO: 105468 - protein, 57 aa, Setaria italica
  Transcript Sequence Number=SeqID_39494
VAVGTKRPIPILLRTHLKATGSILNIGDVFIKSAKQQKGFTKIEHYLPQRTKKLHNT

SEQ ID NO: 105469 - protein, 187 aa, Setaria italica
  misc_feature (115)..(115): Xaa can be any naturally occurring amino acid
  misc_feature (134)..(134): Xaa can be any naturally occurring amino acid
  Transcript Sequence Number=SeqID_39495
  Gene Ontology: Mol. function=hydrolase activity, acting on acid anhydrides, catalyzing transmembrane movement of substances; Cellular component=integral to membrane; Biological process=calcium ion transport
  Homolog annotation: Hit_ID=Q7EZ84; Match level="QueryCoverage=98%, HitCoverage=17%, E-value=6e-57, Identity=59%"; Hit description =Putative calcium-transporting ATPase 8, plasma membrane-type
  Pfam annotation: Domain name=Cation_ATPase_N; Domain location=84-163; Score=22.7; E_value=2.1e-05; Accession=PF00690.18; Description=Cation transporterATPase, N-terminus
LNASRHFRYTLDLELEEEKENLKRMIRTHAQVIRAVFLFKEAGQKNLGESYTSIKLETLSQRFRVDLKKLTMLNRDHDAIIFQEVGGVRGLSDLLKSSLDKGVSPDEDELLLRRXFFGANTYPHKKRRSIWRFXFEACQDLTLVILMVPAAISLSLGMATEAGVKDGWYDGGSIFFAVFLVIFVTVP

SEQ ID NO: 105470 - protein, 178 aa, Setaria italica
  misc_feature (155)..(155): Xaa can be any naturally occurring amino acid
  Transcript Sequence Number=SeqID_39496
  Homolog annotation: Hit_ID=B9RAI4; Match level="QueryCoverage=78%, HitCoverage=28%, E-value=2e-26, Identity=46%"; Hit description=WD -repeat protein, putative
  Pfam annotation: Domain name=WD40; Domain location=102-142; Score =0.1; E_value=39; Accession=PF00400.24; Description=WD domain, G-beta repeat
  Pfam annotation: Domain name=WD40; Domain location=45-83; Score=35.2; E_value=2.6e-07; Accession=PF00400.24; Description=WD domain, G-beta repeat
  Pfam module annotation: Pfam domain module=WD40::WD40; Domain location=102-142::45-83
LIRYQETNKSCIGEGIGPITCSRDGIYLVGGAHSGNAYIWEVATGALLKCWRAHKSCISCLSFSQDSSLIISGSEEGTVHVWCMISLFQAEGPQAREAVNYCLDFSDTVEHEASITGILTILGGPCPMLITSSLDSSCKISLLLSGRLLGMLTLXVQITTTVIDPSEQLLICGSSDAA

SEQ ID NO: 105471 - protein, 106 aa, Setaria italica
  misc_feature (31)..(31): Xaa can be any naturally occurring amino acid
  Transcript Sequence Number=SeqID_39497
  Gene Ontology: Mol. function=aspartic-type endopeptidase activity; Biological process=DNA integration
  Homolog annotation: Hit_ID=Q8H851; Match level="QueryCoverage=91%, HitCoverage=4%, E-value=8e-15, Identity=38%"; Hit description =Putative Zea mays retrotransposon Opie-2
SSSTAAPYFDGSDYRYWKTRMRAHLNSRGAXFWEITQDVTYVIPATRVTQDERDKYHANSKAVDILFASLSRAEFDRVEDLSLAHEIWSRLQKVYQRNSQVKARLF

SEQ ID NO: 105472 - protein, 168 aa, Setaria italica
  Transcript Sequence Number=SeqID_39498
  Gene Ontology: Mol. function=methyltransferase activity; Cellular component=nucleus; Biological process=chromatin modification
  Homolog annotation: Hit_ID=Q6ZJS9; Match level="QueryCoverage=94%, HitCoverage=17%, E-value=2e-63, Identity=76%"; Hit description =Putative histone-lysine N-methyltransferase
  Pfam annotation: Domain name=YDG_SRA; Domain location=51-168; Score =135.8; E_value=1.4e-37; Accession=PF02182.9; Description=YDGSRA domain
ARSKVKMMCKRFRFICRATVQFVEQRSLKVSRIDLVADKVIKKLPGFTQHDPIIGNVPGVEIGDEFVYRVELALVGLHRPYQGGIDITRDENGVPVAISIVASGGYPDELSSSGELIYTGSGGKLAGKKYGEDQKLKRGNLGLKNCIQTMTPVRVIHGFKSLSREEVK

SEQ ID NO: 105473 - protein, 468 aa, Setaria italica
  Transcript Sequence Number=SeqID_39499
  Gene Ontology: Mol. function=sequence-specific DNA binding; Cellular component=intracellular; Biological process=regulation of transcription, DNA-dependent
  Homolog annotation: Hit_ID=Q5Z8C9; Match level="QueryCoverage=46%, HitCoverage=65%, E-value=2e-42, Identity=45%"; Hit description=Hap5 protein-like
  Pfam annotation: Domain name=CBFD_NFYB_HMF; Domain location=43-107; Score=29.9; E_value=1.1e-05; Accession=PF00808.15; Description =Histone-like transcription factor (CBFNF-Y) and archaeal histone
  Pfam annotation: Domain name=Histone; Domain location=37-110; Score =13.1; E_value=0.0045; Accession=PF00125.16; Description=Core histone H2AH2BH3H4
  Pfam module annotation: Pfam domain module=CBFD_NFYB_HMF::Histone; Domain location=43-107::37-110
MDHRIEIRSSPRTPMPLSQQEMIDDFWRKRQIEIEAIQDFGDRAIPMTRIKKVICDEKGKMMMTFDTPSFLTKACEIFVQEIAFRAWMCANSNQRSIILDSDITEAIASTQSYDFLNDFLNAHQDEHHSCPYPKPTKKRHDRLLTNLPSSSCHLPPHQNQLPQFSHKFTRYPPLVHIPPLVVPQTNGPRVPLSLASLPHEASSVIATTGTPAPIVSGIIPPTNYMANGLGSFGNTINNIAASSGVMNHLKELPRALANIPNTYCYMNMVASASVYGVDSASSSNVAAQDSGIAFHCPYIPQITLQLPSPLQTTISSAHTTTNITIENYIHVGVAATKSTIHASSKTNGNGDIDPNAIGVGDDQHQHEEEANTSLEVNGVHGSLNAQAVAATSIGNDINWDEFDMLDDSLLSVVGKDIVMDEEPGPLPNTASNDDLLLASNMSDLEGFSHEPYLLDDIISSAGTSKRCT

SEQ ID NO: 105474 - protein, 146 aa, Setaria italica
  Transcript Sequence Number=SeqID_39500
MNGFSVRSWFGFLSGRCIFAEGFIYTCSDEGLAAFELFYDDTSYWLGLPIMLDFSWKYICGNRRFLCFDSICKCEIGDTIVFCVVQGYEEAPPSTSSHTLAATTVQVKLVETARGTKVPVRVDHVDIFLSSIVEEGWILTNYAFAL

SEQ ID NO: 105475 - protein, 45 aa, Setaria italica
  Transcript Sequence Number=SeqID_39501
HYYYLLNVTERFIYGSWINDHVVTVVLSLFDSICFWFRVSFNLGR

SEQ ID NO: 105476 - protein, 92 aa, Setaria italica
  misc_feature (1)..(26): Xaa can be any naturally occurring amino acid
  Transcript Sequence Number=SeqID_39502
XXXXXXXXXXXXXXXXXXXXXXXXXXFFCALLLAFTTLIELVRQKIGDMPNQGTPHSLWHDTNMKEPPAIKRAGAERQVPEYCHYSNTEYKI

SEQ ID NO: 105477 - protein, 44 aa, Setaria italica
  misc_feature (39)..(39): Xaa can be any naturally occurring amino acid
  misc_feature (42)..(42): Xaa can be any naturally occurring amino acid
  Transcript Sequence Number=SeqID_39503
SIRVCTMIFASQGFQWRILLEVIMLGPCHNVCSLFATPXPTXST

SEQ ID NO: 105478 - protein, 117 aa, Setaria italica
  Transcript Sequence Number=SeqID_39504
RARRQVGDAGSSKCCCEQKGGGEWNRDCKQHVMSSITMLNCSSACAETMMHHACVIVMCHAYFFSLVRCADSRSKSERRHKRGRLPMTENRTKQTLECECTYHVCMRLKIMRSTAVE

SEQ ID NO: 105479 - protein, 70 aa, Setaria italica
  Transcript Sequence Number=SeqID_39505
MVRSVFDDGKPMNRSGVRLLIGPDACQRTCDQVRFKAICRGLAKLPGVSTPRQLLLASMRVAAQKAKEAK

SEQ ID NO: 105480 - protein, 218 aa, Setaria italica
  Transcript Sequence Number=SeqID_39506
  Gene Ontology: Mol. function=helicase activity; Cellular component =mitochondrion
  Homolog annotation: Hit_ID=B9RS99; Match level="QueryCoverage=95%, HitCoverage=36%, E-value=8e-53, Identity=49%"; Hit description =Pentatricopeptide repeat-containing protein, putative
  Pfam annotation: Domain name=PPR; Domain location=27-61; Score=19.3; E_value=0.016; Accession=PF01535.12; Description=PPR repeat
  Pfam annotation: Domain name=PPR; Domain location=62-96; Score=25.3; E_value=0.00025; Accession=PF01535.12; Description=PPR repeat
  Pfam annotation: Domain name=PPR; Domain location=97-131; Score=16.9; E_value=0.083; Accession=PF01535.12; Description=PPR repeat
  Pfam module annotation: Pfam domain module=PPR::PPR::PPR; Domain location=27-61::62-96::97-131
YCKHGDLAGASRVLKAMLGRGISPTARTYNYFFMVFARNHSVELGMNLYSKMVSNDYAPDRLTYHLLVKMFCEANRLELTLQMLQEMRNSGFEADLATSTMLIHLLCRRHQFEEAFAEFEHMFERGIVPQYITYRMLKKELKRLGLVKLVQKLTDLMRAVPHSTKLPGSYRDKEGDDAIEKKKSILQKAQAVSDVLKDRKDLKKGHKIQKYLERKLSN

SEQ ID NO: 105481 - protein, 425 aa, Setaria italica
  Transcript Sequence Number=SeqID_39507
  Gene Ontology: Mol. function=receptor activity; Cellular component =cytoplasm; Biological process=transport
  Homolog annotation: Hit_ID=B9S5Q0; Match level="QueryCoverage=100%, HitCoverage=42%, E-value=1e-149, Identity=58%"; Hit description =Exportin-T, putative
KLVPYLDTILQNLQDVLSQFTSMDWANKDVKFPSSEDGSQIFEAVGLLIGIEEVSPEKQAQCLTALLNPLCHQIESLVMDAKVQGLEESSPRAISLQQIIVALNMVSKGFNERLVMANRPAIGVMFKKTLDVVLQVLVSFPNVKPLRSKVISFLHRMIEILGIPVLPYIPIALRQLLLDNEAKDMVEFLVLVNQIICKFKSSASAVLEEVFPTIASHLSVILSQDAFSAGPASNTEEMRELQELQRTLYTFLHAMATHDLSTILLTPSCMQYLDTIMHLLLFTSCKHKDILLRKGCVQIFVNLVKDWCTNSEDKVTGFREFMIEKFATDCCLYSVLDKSFDLGDANSLVLFGEIAVAQKIMYERFGDVFIQKFIETGLTKVCCPPDLAKQYREKLQGNDIKAFRSFYQSLIEKLRPQGNGSLVFR

SEQ ID NO: 105482 - protein, 181 aa, Setaria italica
  Transcript Sequence Number=SeqID_39508
AASSVSDDDHDDHHDDDDDHHDHDHDGHHDDHGDSHDDDDDDDDDDDGDYDECSVECTHDCIDYIPGICYRHCVAHSCFYLPPYSYRRASCLRGCGYRCYRHGRHHHHHHHDDDDDDDDDDHHHDGPKPSPPKPGPTPKPPKPGPAPPKPPVQVLNPGMPPMNHPPMKEKPAPPNTTRKTR

SEQ ID NO: 105483 - protein, 284 aa, Setaria italica
  Transcript Sequence Number=SeqID_39509
MARSKKAAMLAGLLAVAALCSAVGWEDHDHHMYHRCYRSCMRKCDDDFDDDDIDAFTNGIRPLAASSVSDDDHDDHHDDDDDHHDHDHDGHHDDHGDSHDDDDDDDDDDDGDYDECSVECTHDCIDYIPGICYRHCVAHSCFYLPPYSYRRASCLRGCGYRCYRHGRHHHHHHHDDDDDDDDDDHHHDGPKPSPPKPGPTPKPPKPGPAPPKPPVQVLNPGMPPMNHPPMKEKPAPPNTLKLVRPKPPKPAPRTPKPPPRPPSPPVPMPAPGTPKPPGNPGPRS

SEQ ID NO: 105484 - protein, 202 aa, Setaria italica
  misc_feature (9)..(9): Xaa can be any naturally occurring amino acid
  misc_feature (25)..(25): Xaa can be any naturally occurring amino acid
  misc_feature (152)..(152): Xaa can be any naturally occurring amino acid
  Transcript Sequence Number=SeqID_39510
  Gene Ontology: Mol. function=diacylglycerol kinase activity; Cellular component=integral to membrane; Biological process=activation of protein kinase C activity
  Homolog annotation: Hit_ID=Q10JC6; Match level="QueryCoverage=90%, HitCoverage=29%, E-value=5e-78, Identity=75%"; Hit description =Diacylglycerol kinase 1, putative
  Pfam annotation: Domain name=C1_1; Domain location=63-124; Score =43.7; E_value=7.4e-10; Accession=PF00130.14; Description=Phorbol estersdiacylglycerol binding do
GLKCCVCFXNLFSPAQPLGQMMTSXNMVHRCDVCGVAAHIICSPNSQKDCKCVSMFGSKHVIHQWTVLWTDVADQSEEGQYCCYCEELCSESFLGGPPIYCCMWCQRSVHIDCQSAMAAETGDICDLGPYKRLILSPLFVRTISKPGGILTXITQGANEFASTVRVHLGSRGKKVKHHKRLPSDSVQGDSNDDSSSDTTLNL

SEQ ID NO: 105485 - protein, 72 aa, Setaria italica
  Transcript Sequence Number=SeqID_39511
FMFHTTLQKECFEMYNSVKIDRTVPMLWYPFEHRHTAYVLTLYFIQAHHSNTQLFRCLCFKVMKELILQRRA

SEQ ID NO: 105486 - protein, 58 aa, Setaria italica
  misc_feature (1)..(15): Xaa can be any naturally occurring amino acid
  Transcript Sequence Number=SeqID_39512
XXXXXXXXXXXXXXXFFFLVLSILLHFGKEIFGNFWSCSNAIILRSKYPIRLANTTNS

SEQ ID NO: 105487 - protein, 113 aa, Setaria italica
  Transcript Sequence Number=SeqID_39513
  Gene Ontology: Mol. function=electron carrier activity; Cellular component=peroxisome; Biological process=metabolic process
  Homolog annotation: Hit_ID=B9ST74; Match level="QueryCoverage=83%, HitCoverage=25%, E-value=1e-36, Identity=78%"; Hit description=(S)-2- hydroxy-acid oxidase, putative
  Pfam annotation: Domain name=FMN_dh; Domain location=3-112; Score= -136.9; E_value=1.1e-06; Accession=PF01070.10; Description=FMN -dependent dehydrogenase
CCVFVLCSLNCGLQDVEWLKSITSLPILLKGIVTAEDARKAVEAGVAGVIVSNHGARQLDYAPATITVLEEVVKAVAGAVPVLVDGGIRRGTDVFKALALGAKAVMVRSLAGQ

SEQ ID NO: 105488 - protein, 83 aa, Setaria italica
  Transcript Sequence Number=SeqID_39514
  Gene Ontology: Mol. function=electron carrier activity; Cellular component=peroxisome; Biological process=metabolic process
  Homolog annotation: Hit_ID=B9ST75; Match level="QueryCoverage=69%, HitCoverage=15%, E-value=5e-21, Identity=84%"; Hit description=(S)-2- hydroxy-acid oxidase, putative
EEVASSCDAIRFYQLYVYKRRDVSATLVRRAESLGFKAIVLTVDTPVLGRREADIRNKYTMLVILLNFPEHSFEICSFKNHSF

SEQ ID NO: 105489 - protein, 55 aa, Setaria italica
  misc_feature (23)..(23): Xaa can be any naturally occurring amino acid
  Transcript Sequence Number=SeqID_39515
  Gene Ontology: Mol. function=electron carrier activity; Biological process=metabolic process
  Homolog annotation: Hit_ID=B9ST75; Match level="QueryCoverage=78%, HitCoverage=11%, E-value=1e-10, Identity=67%"; Hit description=(S)-2- hydroxy-acid oxidase, putative
MEDNLPVNVREYQELAKKALPKXHYDYINGGAEDEYTLRENIAAYGRILYYSPHQ

SEQ ID NO: 105490 - protein, 367 aa, Setaria italica
  Transcript Sequence Number=SeqID_39516
  Gene Ontology: Mol. function=electron carrier activity; Cellular component=peroxisome; Biological process=metabolic process
  Homolog annotation: Hit_ID=B9ST75; Match level="QueryCoverage=98%, HitCoverage=98%, E-value=1e-147, Identity=70%"; Hit description=(S) -2-hydroxy-acid oxidase, putative
  Pfam annotation: Domain name=DHO_dh; Domain location=62-336; Score= -143.5; E_value=0.095; Accession=PF01180.13; Description =Dihydroorotate dehydrogenase
  Pfam annotation: Domain name=FMN_dh; Domain location=16-358; Score =620.7; E_value=1.5e-183; Accession=PF01070.10; Description=FMN -dependent dehydrogenase
  Pfam annotation: Domain name=IMPDH; Domain location=47-363; Score= -219.2; E_value=0.0031; Accession=PF00478.17; Description=IMP dehydrogenase  GMP reductase domain
  Pfam annotation: Domain name=ThiG; Domain location=170-321; Score= -195.5; E_value=0.043; Accession=PF05690.6; Description=Thiazole biosynthesis protein ThiG
  Pfam module annotation: Pfam domain module=DHO_dh::FMN_dh::IMPDH::ThiG ; Domain location=62-336::16-358::47-363::170-321
MEDNLPVNVREYQELAKKALPKMHYDYINGGAEDEYTLRENIAAYGRILLRPRVLIDVSKIDMSTTLLGYNMPSPIMVAPTGSHKLANPEGEVATSRAAAACNTIMVLSFSSSCKIEEVASSCDAIRFYQLYVYKRRDVSATLVRRAESLGFKAIVLTVDTPVLGRREADIRNKMIAPRLENLEGLMSFDDDLDTEGGSKLERFAHETLDPSLSWKDVEWLKSITSLPILLKGIVTAEDARKAVEVGAAGVIVSNHGARQLDYAPATISALEEVVKAVAGAVPVLVDGGIRRGTDVFKALALGAKAVMVGRPVFYGLAARGEAGARHVIEMLNRELELAMALCGCRSVGEVTRRHVLTEGDRIRALL

SEQ ID NO: 105491 - protein, 88 aa, Setaria italica
  Transcript Sequence Number=SeqID_39517
  Subcellular localization annotation: CTP_CleavageSite=60; ConfidenceScore=5.41e-01
HEIHRMPVFPHHSSPFSSSRFTLASNNPVHPQPNMYQPAMIPHVSFPCWLAATLPMLCLFCAPGPSSLFILILLFLDAPFMRYASDLA

SEQ ID NO: 105492 - protein, 65 aa, Setaria italica
  Transcript Sequence Number=SeqID_39518
  Subcellular localization annotation: CTP_CleavageSite=43; ConfidenceScore=5.29e-01
MSLCCGSTAAGRGFLLPSILLSRRHLPRHLLLNLRTTATVAPTAAAATPLISSLSAPQQRQVAVY

SEQ ID NO: 105493 - protein, 116 aa, Setaria italica
  misc_feature (8)..(8): Xaa can be any naturally occurring amino acid
  Transcript Sequence Number=SeqID_39519
  Gene Ontology: Mol. function=protein tyrosine kinase activity; Biological process=protein amino acid phosphorylation
  Homolog annotation: Hit_ID=B4FMJ5; Match level="QueryCoverage=93%, HitCoverage=50%, E-value=2e-20, Identity=49%"; Hit description =BRASSINOSTEROID INSENSITIVE 1-associated receptor kinase 1
  Pfam annotation: Domain name=LRR_1; Domain location=24-46; Score=3.6; E_value=63; Accession=PF00560.25; Description=Leucine Rich Repeat
  Pfam annotation: Domain name=LRR_1; Domain location=48-70; Score=7.9; E_value=9.5; Accession=PF00560.25; Description=Leucine Rich Repeat
  Pfam annotation: Domain name=LRR_1; Domain location=72-94; Score =14.0; E_value=0.63; Accession=PF00560.25; Description=Leucine Rich Repeat
  Pfam annotation: Domain name=LRR_1; Domain location=96-112; Score =0.1; E_value=2.9e+02; Accession=PF00560.25; Description=Leucine Rich Repeat
  Pfam module annotation: Pfam domain module=LRR_1::LRR_1::LRR_1::LRR _1; Domain location=24-46::48-70::72-94::96-112
LKSWDEGXNSPWSWFGVECSDDGLVTTLNLANLGLKGVLPPEIGKLVHMKSLILHNNSFYGIIPTEIGHLQDIKMLDLGYNNFSGSIPSELQNILSLEFLFLKGNRLSGGFTGWIT

SEQ ID NO: 105494 - protein, 278 aa, Setaria italica
  misc_feature (62)..(62): Xaa can be any naturally occurring amino acid
  misc_feature (103)..(103): Xaa can be any naturally occurring amino acid
  Transcript Sequence Number=SeqID_39520
  Gene Ontology: Mol. function=rRNA N-glycosylase activity; Cellular component=integral to membrane; Biological process=negative regulation of translation
  Homolog annotation: Hit_ID=Q7X788; Match level="QueryCoverage=98%, HitCoverage=32%, E-value=6e-13, Identity=27%"; Hit description =OSJNBa0006M15.11 protein
MIGQMEKDSIMESGRDNKAIISLDSLTKLIPSYLMGIGRLRWWCEKYGLRADMSNVFKTNLXFFTTPPGGTFYFTIEYESRAITLSLYGRNLYINRVLREPMXTFEIKERNEKRKVICQEKKIKIRPFKKNYIFLAPKGDVINVRLGLFALLEAFEVLHKCCGETQGVKQAVSAFAVHLCEAGRLQSVLKDVCEISLQRTMETLDSRSPNLFWINKYDNCGGQEMKRVSCMKEGKTPPVLKHYGNDKVTEAQILNQIRIFPRDVYDEGFFEHEPMPLE

SEQ ID NO: 105495 - protein, 72 aa, Setaria italica
  Transcript Sequence Number=SeqID_39521
  Subcellular localization annotation: CTP_CleavageSite=30; ConfidenceScore=5.20e-01
RSCLMAVVLVVAMAVLPPPAPVHGKQDATCFQMKGCTANLCLSVCTSNNLGTVATCFNTPPDMALNNCCCEF

SEQ ID NO: 105496 - protein, 166 aa, Setaria italica
  Transcript Sequence Number=SeqID_39522
  Gene Ontology: Mol. function=double-stranded RNA binding; Cellular component=intracellular
  Homolog annotation: Hit_ID=Q5N8Z0; Match level="QueryCoverage=93%, HitCoverage=30%, E-value=3e-23, Identity=43%"; Hit description =Putative dsRNA-binding protein ODB1
TTFQGEPGNTKKQAEMNAARVAFQHFKDRDKGSACSAVPGGSCMQQGTKNLFSGQNIKILSSKQQGTENLFSGQKIKILEPEVPVVSTATHGKDNDFDAINHDARSAGSANRLPVAATTQSIDENAQSVKLEIDKLSLPEPSTEVEAMNSSPEVNKLTPFRAKHGH

SEQ ID NO: 105497 - protein, 494 aa, Setaria italica
  Transcript Sequence Number=SeqID_39523
  Gene Ontology: Mol. function=serine-type endopeptidase activity; Cellular component=extracellular region; Biological process=negative regulation of catalytic activity
  Homolog annotation: Hit_ID=B6UDX1; Match level="QueryCoverage=96%, HitCoverage=61%, E-value=0.0, Identity=90%"; Hit description =Subtilisin-like protease
  Pfam annotation: Domain name=PA; Domain location=95-195; Score=107.6; E_value=4.4e-29; Accession=PF02225.14; Description=PA domain
  Pfam annotation: Domain name=Peptidase_S8; Domain location=67-338; Score=-67.1; E_value=0.004; Accession=PF00082.14; Description =Subtilase family
  Pfam module annotation: Pfam domain module=PA::Peptidase_S8; Domain location=95-195::67-338
FVRCLLPILRLRRSVFLPPYYRDSLAIASFGAMQMGVFVACSGGNAGPDPISLTNLSPWITTVGASTMDRDFPATVTLGNGANITGVSLYKGRQNLSSKEQYPLVYMGGNSSIPDPMSLCLEGTLKPHEVAGKIVICDRGISPRVQKGQVVKNAGGVGMILANTPANGEELVADSHLLPAVAVGESEGVAAKKYSKAAPKPTATLSFDGTKLGIRPSPVVAAFSSRGPNFLTLEILKPDVIAPGVNILAAWSGDASPSSLSTDRRRVGFNILSGTSMSCPHVAGVAALIKASHPDWSPAKIKSALMTTAYVHDNTYRSLKDAATGRASTPFDHGAGHIHPLRALNPGLVYDIGQDDYLEFLCVENLTPMQLRAFTKNSSRTCKHTFTSPGDLNYPAISAVFAEQPSAALTVRRTATNVGPPTSTYHVKVSEFKGANIVVEPSTLHFTSSNQKLTYKVTMTTKAAQKTPEFGALSWSDGVHIVRSPLILTWLPPM

SEQ ID NO: 105498 - protein, 37 aa, Setaria italica
  Transcript Sequence Number=SeqID_39524
  Gene Ontology: Mol. function=DNA binding; Cellular component=nucleus; Biological process=regulation of transcription
  Homolog annotation: Hit_ID=Q8S3Z0; Match level="QueryCoverage=100%, HitCoverage=18%, E-value=5e-14, Identity=94%"; Hit description =Typical P-type R2R3 Myb protein (Fragment)
SCRLRWLNYLRPDIRHGGFTDEEDAVIVSLYTQLGSK

SEQ ID NO: 105499 - protein, 256 aa, Setaria italica
  Transcript Sequence Number=SeqID_39525
  Gene Ontology: Mol. function=DNA binding; Cellular component=nucleus; Biological process=regulation of transcription, DNA-dependent
  Homolog annotation: Hit_ID=Q8S3Z0; Match level="QueryCoverage=70%, HitCoverage=87%, E-value=6e-66, Identity=70%"; Hit description =Typical P-type R2R3 Myb protein (Fragment)
  Pfam annotation: Domain name=Myb_DNA-bind_2; Domain location=13-70; Score=0.5; E_value=0.0045; Accession=PF08914.3; Description=Rap1 Myb domain
  Pfam annotation: Domain name=Myb_DNA-binding; Domain location=14-62; Score=49.1; E_value=1.7e-11; Accession=PF00249.23; Description=Myb -like DNA-binding domain
  Pfam annotation: Domain name=Myb_DNA-binding; Domain location=68-113; Score=37.6; E_value=5.1e-08; Accession=PF00249.23; Description=Myb -like DNA-binding domain
  Pfam module annotation: Pfam domain module=Myb_DNA-bind_2::Myb_DNA -binding::Myb_DNA-binding; Domain location=13-70::14-62::68-113
MGRTPCCDRAAVKRGPWSPEEDEALRSYVQRHGSGGNWISMPKKAGLKRCGKSCRLRWLNYLRPDIRHGGFTDEEDAVIVSLYTQLGSKWSLIASQLEGRTDNDVKNYWNTKLKKRLLAAAATADVVSTRSPPPVLRLAAAPGPTPASSLFPSLAIPTVKTETYTCDDFLAPTAFRDDDPFAVAGGSADAAAADGSTSASAASSASNWSADNGAVGDGEGSYLLDFCTGSGIGGADGHLQLPGGYYYPLDPTLSLV

SEQ ID NO: 105500 - protein, 101 aa, Setaria italica
  Transcript Sequence Number=SeqID_39526
FYKETNWKFLSLLAHLFISGDLHLLYFWILSGYFHLQFEWETDRACFQVLYFIHVCDIFHAHFRLSEMLPVLYLMSFQGVLICLLPMLLYVYNTNGLMVNA

SEQ ID NO: 105501 - protein, 327 aa, Setaria italica
  Transcript Sequence Number=SeqID_39527
  Gene Ontology: Mol. function=nucleic acid binding; Cellular component= nucleus; Biological process=negative regulation of transcription
  Homolog annotation: Hit_ID=Q6H7U1; Match level="QueryCoverage=100%, HitCoverage=15%, E-value=1e-164, Identity=87%"; Hit description =Putative SNF2 domain-containing protein
  Pfam annotation: Domain name=HEAT; Domain location=135-170; Score =30.3; E_value=7.7e-06; Accession=PF02985.14; Description=HEAT repeat
  Pfam annotation: Domain name=HEAT; Domain location=214-250; Score =22.0; E_value=0.0024; Accession=PF02985.14; Description=HEAT repeat
  Pfam module annotation: Pfam domain module=HEAT::HEAT; Domain location=135-170::214-250
SETPQAAIINSMQVVEDQNLLSIGKRFGSHRSRGHTASGSEERYLNHLFISRRGSELAFKHLCEKFGPSLFEKLPKLWDCLTEFLKPVKSKDGLKDDTSIAQLGRSYEDKDPQSLINNIQVVRSITPHLAESLRPQLLSLLPCILGCVRHPHVAVRLAAARCITSMAKSLADDVMVLVIENVIPMLSDLSSVCARQGAGMLLSLLVQGLAVELVPYSPFLVVPLLKCMSDPDGSVRQTVTHSFAALVPLLPLSKGASLPGGLSERLSSSAEDVQFLEQLLDNSQIDDFKLNIDLSVELRRYQQEGINWLAFLRRFKLHGILCDDMGL

SEQ ID NO: 105502 - protein, 143 aa, Setaria italica
  Transcript Sequence Number=SeqID_39528
MDPKSNGEWTASEIMMMKSIMAWHNTSSSYTSNMNNKHTNIVDELQAWFPWKEKRQVTDLYANLMVEMMPTNNNQCAASSSNPVTHNFAMLLEDPAIDNINVLRSFDTEEMGDMRQAKEAPRKQPAPRKEKQFWTPDEHRQFL

SEQ ID NO: 105503 - protein, 318 aa, Setaria italica
  Transcript Sequence Number=SeqID_39529
  Gene Ontology: Mol. function=serine-type endopeptidase activity; Cellular component=extracellular region; Biological process=negative regulation of catalytic activity
  Homolog annotation: Hit_ID=B6UDX1; Match level="QueryCoverage=100%, HitCoverage=40%, E-value=1e-134, Identity=76%"; Hit description =Subtilisin-like protease
  Pfam annotation: Domain name=Inhibitor_I9; Domain location=33-119; Score=88.0; E_value=3.3e-23; Accession=PF05922.8; Description =Peptidase inhibitor I9
MGSGSTRWRALPLCLALAVALQACLSACAPAPKTYIVQMAASEMPSSFDFHHEWYASTVKSVSSVQLEGEEDDPFARIVYNYETAFHGFAAKLDEDEAERMADADGVVAVLPDTVLQLHTTRSPDFLGISPEISNSIWSAGLADHDVVVGVLDTGIWPESPSFSDKGLGPVPAKWKGLCQTGRGFTTASCNRKVIGARIFYNGYEASSGPINETTELKSPRDQDGHGTHTAATAAGAPVPDANLFGYASGVARGMAPRARVAAYKVCWAGGCFSSDILAAVDRAVADGVDVLSISLGGGSSPYYRDSLAIASFGAMQM

SEQ ID NO: 105504 - protein, 162 aa, Setaria italica
  Transcript Sequence Number=SeqID_39530
  Gene Ontology: Mol. function=binding
  Homolog annotation: Hit_ID=Q2R9P0; Match level="QueryCoverage=100%, HitCoverage=7%, E-value=1e-89, Identity=92%"; Hit description =Armadillo/beta-catenin-like repeat family protein, expressed
  Pfam annotation: Domain name=C2; Domain location=43-123; Score=66.7; E_value=8.4e-17; Accession=PF00168.22; Description=C2 domain
DIAKVHSLISAEAIPVLQMLMKTCPPSFHERADSLLHCLPGCLTVTIIRGNNLKQTMGGTNAFCCLQIGNGPPRQTKVVNHSICPAWNEGFTWLFDVAPKGQKLYIICKSKNTFGKSTLGRVTIQIDKVVTEGVYSGFFSLSHDGGKDGSRTLEIEIVWSNR

SEQ ID NO: 105505 - protein, 948 aa, Setaria italica
  misc_feature (874)..(874): Xaa can be any naturally occurring amino acid
  misc_feature (909)..(909): Xaa can be any naturally occurring amino acid
  Transcript Sequence Number=SeqID_39531
  Gene Ontology: Mol. function=binding
  Homolog annotation: Hit_ID=Q2R9P0; Match level="QueryCoverage=100%, HitCoverage=42%, E-value=0.0, Identity=88%"; Hit description =Armadillo/beta-catenin-like repeat family protein, expressed
  Pfam annotation: Domain name=Arm; Domain location=175-215; Score =10.4; E_value=0.59; Accession=PF00514.15; Description=Armadillobeta -catenin-like repeat
  Pfam annotation: Domain name=Arm; Domain location=258-298; Score=4.0; E_value=3.8; Accession=PF00514.15; Description=Armadillobeta-catenin -like repeat
  Pfam annotation: Domain name=Arm; Domain location=344-384; Score=2.4; E_value=6.1; Accession=PF00514.15; Description=Armadillobeta-catenin -like repeat
  Pfam annotation: Domain name=Arm; Domain location=385-425; Score =11.8; E_value=0.38; Accession=PF00514.15; Description=Armadillobeta -catenin-like repeat
  Pfam annotation: Domain name=Arm; Domain location=448-487; Score=0.2; E_value=12; Accession=PF00514.15; Description=Armadillobeta-catenin -like repeat
  Pfam annotation: Domain name=Arm; Domain location=508-549; Score =12.9; E_value=0.28; Accession=PF00514.15; Description=Armadillobeta -catenin-like repeat
  Pfam annotation: Domain name=Arm; Domain location=591-632; Score=6.2; E_value=2; Accession=PF00514.15; Description=Armadillobeta-catenin -like repeat
  Pfam annotation: Domain name=Arm; Domain location=6-47; Score=4.3; E _value=3.4; Accession=PF00514.15; Description=Armadillobeta-catenin -like repeat
  Pfam annotation: Domain name=Arm; Domain location=634-674; Score =13.1; E_value=0.26; Accession=PF00514.15; Description=Armadillobeta -catenin-like repeat
  Pfam annotation: Domain name=Arm; Domain location=91-129; Score=8.9; E_value=0.9; Accession=PF00514.15; Description=Armadillobeta-catenin- like repeat
  Pfam annotation: Domain name=C2; Domain location=809-902; Score=40.1; E_value=9e-09; Accession=PF00168.22; Description=C2 domain
  Pfam annotation: Domain name=HEAT; Domain location=181-217; Score =1.7; E_value=30; Accession=PF02985.14; Description=HEAT repeat
  Pfam annotation: Domain name=HEAT; Domain location=350-386; Score =8.3; E_value=4.8; Accession=PF02985.14; Description=HEAT repeat
  Pfam annotation: Domain name=HEAT; Domain location=725-761; Score =5.3; E_value=11; Accession=PF02985.14; Description=HEAT repeat
  Pfam annotation: Domain name=HEAT; Domain location=96-131; Score=3.5; E_value=19; Accession=PF02985.14; Description=HEAT repeat
  Pfam module annotation: Pfam domain module=Arm::Arm::Arm::Arm::Arm::Ar m::Arm::Arm::Arm::Arm::C2::HEAT::HEAT::HEAT::HEAT; Domain location =175-215::258-298::344-384::385-425::448-487::508-549::591-632::6 -47::634-674::...
  Pfam module annotation: Domain location=91-129::809-902::181-217::350- 386::725-761::96-131
QLAEGSETNKVAMAEAGALDALTKYLSLSPQDSTETTITNLLGILYSNPDLLYHESSRSTSNQLVAVLRLGSRSSRLSAVRTLQKLFDSENIRDTEVARQAIQPLLDMLESGTEMEQQAALGALIKLSAGNISKGSAMFDVESNTLENLYKILSFSSSLELKKDAAQLCYILFENSTIRASPIATECLQPLISLMTSGSSLAVEPAVCALNRLLEEEYNAEVAATGEVIDLLVSFVPGTNYQLSEACIGALIKLGKDRPNCKLDMVKAGIIEHALDMILDVPVSVSSSIAELLRILTNNSGIAKSSAAAKMVEPLFLLLRRPDVTMWDQHSALQALVNILEKPQSLAALKLTPSQIIEPLISFLESPSQAIQQLGTEVLSHLLEQEHFQQDITTKNAVVPLVQLAGIGILSLQQTAVKALENISQSWPKAVADAGGIFELSKVIVQDDPQPSQALWESAALVLCNVLRYNSDNYVKVSMAVLVRLLNSTTESTVTIALSALLVQEKSSSRCAVAMAEAGAVRALLELLKSHRCEESAARLLEALINNSRVRETKVAKYAIAPLSQYLLDPQSKNQSAKFLVTLALGDIFQHEALARASDSVSACRALVSLLEDQPTDDMTMVAICALQSLVMHSRTNRRAVAEAGGILVVQELLLSPNVDISGQAALLIKYLFSNHTLQEYVSNELIRSLTAALERELLSMSSINEVILRTIYVIFSNFKKVRFSEAATLCIPHLVCALKDGNESAQESVLDTLCLLKESWPQMNEDIAKAQSLISAEAIPVLQMLMKTCPPSFHERADSLLHCLPGCLTVTIIRGNNLKQTMGGTNAFCCLQIGNGPPRQTKVVNHSICPAWNEGFTWLFDFPNVFLLLHMMXASAPKGQKLYIICKSKNTFGKSTLGRVTIQIDKVXVTEGVYSGFFSLSHDGGKDGSRTLEIEIVWSNRPSNDSM

SEQ ID NO: 105506 - protein, 227 aa, Setaria italica
  Transcript Sequence Number=SeqID_39532
  Gene Ontology: Mol. function=cysteine-type peptidase activity; Biological process=proteolysis
  Homolog annotation: Hit_ID=B6TBN8; Match level="QueryCoverage=96%, HitCoverage=54%, E-value=6e-23, Identity=35%"; Hit description=F-box domain containing protein
CHGGLFRVVFIATDDDDELVKVSAYSSETGEWSVPVSLGDDCEAYVKHQQSATERSYYTPYVQPRWGAVIGDEIYFTLRRGNAIVKYDWSYNCLSMISPQSLVVYSSRISLMVTEDSSLGFACIGGSNLFLWSRKVNSQGAPEWVQCRVIDLEKIIPVADSSDERLVVGSAEGVGVIFISTGVGLFVIVYKSGRVRKVDVPGVYFSILPYMSFYTPDHCRLSSVAKD

SEQ ID NO: 105507 - protein, 129 aa, Setaria italica
  Transcript Sequence Number=SeqID_39533
  Subcellular localization annotation: CTP_CleavageSite=57; ConfidenceScore=5.28e-01
DCEKMRLSESTTTRVPTAHDVSVNGGTPQTQTQTQTRHSCWVPLSFCLGRRMCAVCRCRRHMGGRRGADAGRTLLDVARTLLCRIFSGGLAAGRHRTVGCTSVPWEDRCWNEPCSANEKIPMLNEKCKP

SEQ ID NO: 105508 - protein, 157 aa, Setaria italica
  Transcript Sequence Number=SeqID_39534
MASLTTMERLLLFHKLESDLFHRLVHELAQDPATMQWVIALWLWFESAGHHDFIRRVAALPGPVVLRFVEEAIACLRCLTNLGQGATADANDNRDRRLPCTNALLSKPIDDVGYFQGRREVLDDITHQYRSICLAICDAGNSSTSMPRNIGSVHASH

SEQ ID NO: 105509 - protein, 45 aa, Setaria italica
  Transcript Sequence Number=SeqID_39535
  Gene Ontology: Cellular component=chloroplast
  Homolog annotation: Hit_ID=B6TMX5; Match level="QueryCoverage=97%, HitCoverage=16%, E-value=1e-16, Identity=90%"; Hit description =Polyphosphoinositide binding protein
FVFQPMWQIVKPLLKSYASLVRFCDSETVRKEYFTEETVPHDFRS

SEQ ID NO: 105510 - protein, 212 aa, Setaria italica
  misc_feature (7)..(7): Xaa can be any naturally occurring amino acid
  Transcript Sequence Number=SeqID_39536
  Gene Ontology: Mol. function=transporter activity; Cellular component= chloroplast; Biological process=transport
  Homolog annotation: Hit_ID=B6TMX5; Match level="QueryCoverage=90%, HitCoverage=73%, E-value=1e-102, Identity=91%"; Hit description =Polyphosphoinositide binding protein
  Pfam annotation: Domain name=CRAL_TRIO; Domain location=50-196; Score= 12.9; E_value=2.8e-05; Accession=PF00650.12; Description=CRALTRIO domain
DDMILWXLKDRKFSVDESVSKLTKAIKWRQDFGVSELSEESVKDLYQTGKAYIHDSLDIYGRPVLVVVAAKHFPSTQDPIENEKLCAYLVEKAINRLPSGAENILGIFDLRGFRVENGDLQFLKFLIDVFYYYYPKRLGQVLFVDAPFVFQPMWQIVKPLLKSYASLVRFCDSETVRKEYFTEETVPHDFRQLGALIISSVRLLSRNGSGRS

SEQ ID NO: 105511 - protein, 179 aa, Setaria italica
  Transcript Sequence Number=SeqID_39537
  Subcellular localization annotation: CTP_CleavageSite=35; ConfidenceScore=5.10e-01
VPSQAAVDGNAASTGQELPAWRRKLRSLVPVDGVVARHIRTGEPVALSRRVVAAFLLMTVADFSDQYTDYQDELFGNEDGRLEFSGDNWAALWPGTGKPGLWVSAMSRMTALYNLIARDDQLLLREGGGGKNVEVSDDDMLVGEMVVPPVFEGCTRVLDPEEQKAARDLYWAAICGGGG

SEQ ID NO: 105512 - protein, 61 aa, Setaria italica
  Transcript Sequence Number=SeqID_39538
  Gene Ontology: Mol. function=oxidoreductase activity; Cellular component=extracellular region; Biological process=lignin catabolic process
  Homolog annotation: Hit_ID=Q339K6; Match level="QueryCoverage=72%, HitCoverage=7%, E-value=9e-14, Identity=79%"; Hit description =Laccase-15
ADNPGIWYMHCHFEFHVSMGMVALFIVEDGSTVDTFLPAPPADFPTCGHDHNVMSNEFYPI

SEQ ID NO: 105513 - protein, 59 aa, Setaria italica
  Transcript Sequence Number=SeqID_39539
VQSYRSSTSLTKNGKTIFIYKQNSHKQTHKIEREKTACGIHRWKYTPRTCFGQVVYHRQ

SEQ ID NO: 105514 - protein, 84 aa, Setaria italica
  Transcript Sequence Number=SeqID_39540
DHSDDVQVRCNKPYLKFQSCLSFSTDDYFSFSPLFSVLFVKEELLMSHLNDWVLNVPFSDQLQSMARMTGVCWSRAQCHDCRVL

SEQ ID NO: 105515 - protein, 74 aa, Setaria italica
  Transcript Sequence Number=SeqID_39541
WISALRRKGSGFSSQWLFLFTASRSEQSAEGKSDPNSKGQTWFSWTIDSLSLSLSSVALIHPCSPWIFDREYRT

SEQ ID NO: 105516 - protein, 90 aa, Setaria italica
  Transcript Sequence Number=SeqID_39542
EYVLILGTSEEKVLERVTAVLNFSQRVDFPAETVSQGYNRALHSLARIMGAKRKHWIRRHNQLRIRRTRYPVAALMEWNREVSVSPEGAR

SEQ ID NO: 105517 - protein, 121 aa, Setaria italica
  Transcript Sequence Number=SeqID_39543
  Gene Ontology: Mol. function=uracil DNA N-glycosylase activity; Cellular component=mitochondrion; Biological process=interspecies interaction between organisms
  Homolog annotation: Hit_ID=B6TTA0; Match level="QueryCoverage=90%, HitCoverage=35%, E-value=2e-53, Identity=92%"; Hit description =Uracil-DNA glycosylase
  Pfam annotation: Domain name=UDG; Domain location=2-110; Score=83.8; E_value=6.3e-22; Accession=PF03167.11; Description=Uracil DNA glycosylase superfamily
SYLLFHACGLCLWAVQEVRLLNTVLPVREHQANSHAKKGWEEFTDAVIKTISQKRSGLVFLLWGNSAQSKTRLIDETKHHILKSAHPSGLSANRGFFGCRHFSKTNQILEKLGLSAIDWQL

SEQ ID NO: 105518 - protein, 67 aa, Setaria italica
  Transcript Sequence Number=SeqID_39544
  Gene Ontology: Mol. function=hydrolase activity
  Homolog annotation: Hit_ID=B6UDV1; Match level="QueryCoverage=98%, HitCoverage=20%, E-value=8e-21, Identity=67%"; Hit description =Catalytic/ hydrolase
VLLIWGDHDQIFPLEKAFAVKRCLGESVRMEIFEKTGHVPQMEDPARFNKLILDFLLASQKPPSIQQ

SEQ ID NO: 105519 - protein, 113 aa, Setaria italica
  misc_feature (19)..(19): Xaa can be any naturally occurring amino acid
  Transcript Sequence Number=SeqID_39545
  Gene Ontology: Mol. function=hydrolase activity
  Homolog annotation: Hit_ID=B6UDV1; Match level="QueryCoverage=59%, HitCoverage=20%, E-value=5e-17, Identity=55%"; Hit description =Catalytic/ hydrolase
SSVGLLLVVFFLSYRRQAXTLLPDFVLRQAVQQLFMDKRDGKIELMKAITVGTDEFKLTPLPQDVLLIWGDHDQIFPLEKAFAVKRSSSKLGLTLFLDLKAFPGLLEAPIRSA

SEQ ID NO: 105520 - protein, 56 aa, Setaria italica
  Transcript Sequence Number=SeqID_39546
ACQCPRYFPSCISWYDNCMKTIIVNNIYHGYISILVPPILNVALNTLNVPLPIRFL

SEQ ID NO: 105521 - protein, 154 aa, Setaria italica
  Transcript Sequence Number=SeqID_39547
  Homolog annotation: Hit_ID=Q8S615; Match level="QueryCoverage=88%, HitCoverage=13%, E-value=5e-40, Identity=63%"; Hit description =Putative polyprotein
FNYGASANVRTAGDKIIENLLPLHVAVENTCLHKYLEDSLLPFQDYPDRRDYVYKLIQLLCLPEMKIFLDTTRLLAKKTDNLLDELWNYVKDGKLVQTAVLLLAGQEQIRQVGSSKKRKGFSEPDGFDTIMTCLMKCSVALKEKEGIRMSWRRL

SEQ ID NO: 105522 - protein, 109 aa, Setaria italica
  Transcript Sequence Number=SeqID_39548
NKQVVVVMVQNEVREEPESTEEEGGSTRRLYLSRHRHYLRRSSPVKRKGKNYTGSPANKHGHANYSSTASPSKAMAPRLRCAVVSARNPRRRRGSRRRRPPPTRAARRG

SEQ ID NO: 105523 - protein, 356 aa, Setaria italica
  Transcript Sequence Number=SeqID_39549
  Gene Ontology: Mol. function=protein serine/threonine kinase activity; Cellular component=spliceosome; Biological process=protein amino acid phosphorylation
  Homolog annotation: Hit_ID=Q2QLI7; Match level="QueryCoverage=99%, HitCoverage=38%, E-value=1e-154, Identity=74%"; Hit description =Protein kinase domain containing protein, expressed
  Pfam annotation: Domain name=Pkinase; Domain location=48-354; Score =144.6; E_value=3e-40; Accession=PF00069.17; Description=Protein kinase domain
  Pfam annotation: Domain name=Pkinase_Tyr; Domain location=48-277; Score=-100.7; E_value=5e-07; Accession=PF07714.9; Description =Protein tyrosine kinase
  Pfam module annotation: Pfam domain module=Pkinase::Pkinase_Tyr; Domain location=48-354::48-277
YFGESPIGAQELGKKRSFLIKENAHCDNWDDPGGYYTYHCGEVLHGRYEIMAGHGMGVFSNVVRAKDLKAGKGDSSEVAIKIIRNIPVMYKAGKQEISILEKLASADPKDRRHCVRFISSFMYRNHLCLIFESLHMNLRGLLKKFGSDVGLKLTAVRTYSKQLFIALKHLKSCNVLHCDIKPDNVLVNEAKTKLKLCDFGSAMPTGTNEITPYLVSRFYRAPEIILGLPYNHPLDMWSVGCSLFELYTGKLLFPGKTNNDMLRLHMESKGALPKKMLRKGTFAKEHFDQDFKYFHEKDPVTKMTVKRHPVMNIKRQDVSSVVSSLPGEDPKMLFNFNDLLKRILVLDPEKRLKVGN

SEQ ID NO: 105524 - protein, 238 aa, Setaria italica
  misc_feature (140)..(140): Xaa can be any naturally occurring amino acid
  Transcript Sequence Number=SeqID_39550
  Gene Ontology: Mol. function=magnesium ion binding; Biological process=metabolic process
  Homolog annotation: Hit_ID=B6SYF3; Match level="QueryCoverage=93%, HitCoverage=40%, E-value=1e-65, Identity=53%"; Hit description =Terpene synthase 7
  Pfam annotation: Domain name=Terpene_synth_C; Domain location=1-235; Score=124.9; E_value=2.6e-34; Accession=PF03936.8; Description =Terpene synthase family, metal binding domain
DLYDSVKLTYCRDRIVESYFYSFGVFHGEESSAARIILTKVFGLLVLIDDTFDVRATFEESQMLDDALQRWDESTVSLLPQYLRMFYIKTLSNFNEIEDTLEPHEKYRMDYVKKEYKLQSKNSIQQAKWFNENCTPSFKXHLDVSLMATGLPLLFFTALMSARQVISNEAFEWALDMPDMFYANIEVGRFLNDIASYKQGKCEKDVASTVECYMREYGTTGEEAVAAITFDCNFVLFF

SEQ ID NO: 105525 - protein, 100 aa, Setaria italica
  Transcript Sequence Number=SeqID_39551
  Gene Ontology: Mol. function=zinc ion binding; Cellular component =intracellular
  Homolog annotation: Hit_ID=Q9MAT3; Match level="QueryCoverage=66%, HitCoverage=15%, E-value=2e-18, Identity=60%"; Hit description =F13M7.16 protein
AGFSGASRSMGLATARATRALHFSGNSTIEGAINWLSEHQEDADIDEMPLVPANSKTEDNKPSLTPEEMKIKAQELRKRMIELRRLEKEEEKRAREKIRQ

SEQ ID NO: 105526 - protein, 419 aa, Setaria italica
  Transcript Sequence Number=SeqID_39552
  Gene Ontology: Mol. function=zinc ion binding; Cellular component =intracellular
  Homolog annotation: Hit_ID=Q9MAT3; Match level="QueryCoverage=100%, HitCoverage=100%, E-value=1e-130, Identity=57%"; Hit description =F13M7.16 protein
  Pfam annotation: Domain name=Merozoite_SPAM; Domain location=35-341; Score=-125.7; E_value=0.07; Accession=PF07133.3; Description =Merozoite surface protein (SPAM)
  Pfam annotation: Domain name=PUB; Domain location=322-407; Score =121.0; E_value=3.9e-33; Accession=PF09409.2; Description=PUB domain
  Pfam annotation: Domain name=UBA; Domain location=118-155; Score =35.0; E_value=3e-07; Accession=PF00627.23; Description=UBATS-N domain
  Pfam annotation: Domain name=zf-C2H2; Domain location=43-67; Score =17.1; E_value=0.074; Accession=PF00096.18; Description=Zinc finger, C2H2 type
  Pfam annotation: Domain name=zf-C2H2; Domain location=6-30; Score =5.4; E_value=3.1; Accession=PF00096.18; Description=Zinc finger, C2H2 type
  Pfam module annotation: Pfam domain module=Merozoite_SPAM::PUB::UBA::z f-C2H2::zf-C2H2; Domain location=35-341::322-407::118-155::43-67::6-30
MAGLSLRCGDCGAQLRSVEEAQAHAEATNHANFVESTEAVLNLVCSDCGKPCRSQTEVDLHTKRTGHKNFADKTAEAAKPIDLEAPLKPASSSDATDVDAPASASASEEPQEMVVPEVNKEMLADLEAMGFATARATRALHFSGNSTIEGAINWLSEHQEDADIDEMPLVPANSKTEDNKPSLTPEEMKIKAQELRERARKKKEEEERRMEREREKERIRIGKELLEAKRIEEQNERKRMIELRRLEKEEEKRAREKIRQKLEEDKAERRRKLGLPPEDPAASKPSAPPPVEEKKSALPVRPATKAEQMRDCLRNLKQQNKDDDAKVKRAFQTLLTYIGNVAKNPDEEKFRKIRLTNATFQERVGNLHGGIEFLELCGFEKLEGNEFLFLARDKVDKAILNTAGAELNSAITNPFFGVL

SEQ ID NO: 105527 - protein, 79 aa, Setaria italica
  Transcript Sequence Number=SeqID_39553
  Gene Ontology: Mol. function=transferase activity, transferring groups other than amino-acyl groups; Cellular component=membrane; Biological process=fatty acid biosynthetic process
  Homolog annotation: Hit_ID=Q8H7Z0; Match level="QueryCoverage=100%, HitCoverage=15%, E-value=3e-25, Identity=74%"; Hit description=Fatty acid elongase, putative, expressed
  Pfam annotation: Domain name=FAE1_CUT1_RppA; Domain location=1-79; Score=-127.3; E_value=2.1e-07; Accession=PF08392.4; Description =FAE1Type III polyketide synthase-like
ESEAVVFGVVDDLLARTGVRAEDIGVVIVNSSCFSPTPSFTSLVVNRYGLRHDVVTHNLSGMGCSAGIIAIDLAKHLLQ

SEQ ID NO: 105528 - protein, 191 aa, Setaria italica
  misc_feature (17)..(17): Xaa can be any naturally occurring amino acid
  misc_feature (184)..(184): Xaa can be any naturally occurring amino acid
  Transcript Sequence Number=SeqID_39554
  Gene Ontology: Mol. function=electron carrier activity; Cellular component=endoplasmic reticulum membrane; Biological process =oxidation reduction
  Homolog annotation: Hit_ID=Q0Z7U8; Match level="QueryCoverage=100%, HitCoverage=36%, E-value=1e-64, Identity=71%"; Hit description =Flavonoid 3'-hydroxylase
  Pfam annotation: Domain name=p450; Domain location=1-191; Score= -198.8; E_value=0.046; Accession=PF00067.14; Description=Cytochrome P450
VELMQLAGVFNVGTSFXALAWLDPQGVVGRMKRLHRRYDDMMDRIIREREAAGGDGNDLLGVLLTRMREHRPLADGEDGTINETDIKALLLNLFTAGTDTTSSTVEWALAELIRHPDVLAKAQQELDAVVGRGRLVSESDLPRLTYLTAVIKETFRLHPSTPLSLPRVAAEDCEVGGYLVPAGXTTLLVNV

SEQ ID NO: 105529 - protein, 137 aa, Setaria italica
  misc_feature (28)..(28): Xaa can be any naturally occurring amino acid
  Transcript Sequence Number=SeqID_39555
  Gene Ontology: Mol. function=flavin-containing monooxygenase activity; Cellular component=intrinsic to endoplasmic reticulum membrane; Biological process=oxidation reduction
  Homolog annotation: Hit_ID=Q93WI6; Match level="QueryCoverage=84%, HitCoverage=26%, E-value=3e-41, Identity=69%"; Hit description =P0560B06.15 protein
MVSSSKKKVCVVGAGVSGLASARELLRXGHAVTVMEQSGGVGGQWLYDPMTDAGDPLGIAGVHSGVYASLRLNAPRDSMGFSDFPFYPRHDGTGDSRRYPCHGEFLRYIRHFCDAFGLMDAVRLNTKVLHVGMAARG

SEQ ID NO: 105530 - protein, 222 aa, Setaria italica
  Transcript Sequence Number=SeqID_39556
  Gene Ontology: Mol. function=flavin-containing monooxygenase activity; Cellular component=intrinsic to endoplasmic reticulum membrane; Biological process=metabolic process
  Homolog annotation: Hit_ID=Q5ZC98; Match level="QueryCoverage=55%, HitCoverage=27%, E-value=3e-41, Identity=72%"; Hit description =Flavin containing monooxygenase 4-like protein
MFSEEEEEDDEKEQNAERERECLDSCATPLAASTWNEPGLRRDGRGTRATTRHGVGVQNLALYACVSGRVAARIVPATTMVSTKTVCVVGAGVSGLISARELRREGHDVTVMEQSAGVGGQWLYDPGTDAGDPLGIAGVHSGVYASLRLIIPREVTGFSGFPFYPKGDGGSGDARRYPCHGEFLRYIRDFCDAFGIMDVVRFNTRVVHVGVAPPDDGGAAAG

SEQ ID NO: 105531 - protein, 77 aa, Setaria italica
  Transcript Sequence Number=SeqID_39557
DFTYMLLSAYCCTDPFSWLLELSNNMKMASSDNFITVQLFHCFCYELPFKKEHYDSFKCSLLKFKQALRLIPHYYSH

SEQ ID NO: 105532 - protein, 85 aa, Setaria italica
  Transcript Sequence Number=SeqID_39558
  Gene Ontology: Mol. function=hydrolase activity, hydrolyzing O -glycosyl compounds; Cellular component=extracellular region; Biological process=carbohydrate metabolic process
  Homolog annotation: Hit_ID=B6UD65; Match level="QueryCoverage=87%, HitCoverage=12%, E-value=4e-32, Identity=86%"; Hit description=Beta -fructofuranosidase, insoluble isoenzyme 2
CAWLLLLQLTGASHVVYNYKELETEAATANVPPSIVDPLLRTGYHFQPPKNWINDPNAPMYYNGWYHFFYQYNPKGAVWENIVVG

SEQ ID NO: 105533 - protein, 60 aa, Setaria italica
  Transcript Sequence Number=SeqID_39559
  Gene Ontology: Mol. function=phosphogluconate dehydrogenase (decarboxylating) activity; Biological process=pentose-phosphate shunt
  Homolog annotation: Hit_ID=C1UXZ5; Match level="QueryCoverage=96%, HitCoverage=19%, E-value=8e-10, Identity=56%"; Hit description=Beta -hydroxyacid dehydrogenase, 3-hydroxyisobutyrate dehydrogenase
KDLGICLSECQAMGLSLPGLALAQQLYVSLMAHGEGGLGTQALILAIERLNNTSLEKKPE

SEQ ID NO: 105534 - protein, 430 aa, Setaria italica
  Transcript Sequence Number=SeqID_39560
  Gene Ontology: Mol. function=iron ion binding; Cellular component =integral to membrane; Biological process=iron ion transport
  Homolog annotation: Hit_ID=Q6H3Z3; Match level="QueryCoverage=99%, HitCoverage=63%, E-value=0.0, Identity=70%"; Hit description=Iron -phytosiderophore transporter YSL15
  Pfam annotation: Domain name=OPT; Domain location=1-428; Score=170.1; E_value=6.4e-48; Accession=PF03169.7; Description=OPT oligopeptide transporter protein
TATAVLINGFHTPQGDKNAEKQVRSFLKYFGISFLWSFFQWFYTGGSVCGFAHFPTFGLQAWKQSFFFDFSMTYVGAGMICPHLVNLSTLLGAMLSWGILWPLISKRKGDWYPADVPESSMTSLYGYKSFLCIALIMGDGIYHFVKVLGITAKSMHERSKLRRSNSRVADLDKAAAIDELRRDEVFNRDSIPAWLAYGGYALMSVVAVVTIPMMFRQVRWYYVVVAYALAPVLGFSNSYGAGLTDINMGYSYGKLALFVLAAWAGREDGVVAGLVGCGLVKELVLISADLMHDFKTAHLTLTSPRSMLAAQAVGTAMGCVVTPLTFLLFYRAFDVGDPDGYWKAPYALIYRNMALLGAQGFSALPRHCLPLSVGFFALAVLANVARDILPPRYGRFVPLPTAMAVPFLVGASFAVDMVVGTVVVFAWQPG

SEQ ID NO: 105535 - protein, 220 aa, Setaria italica
  Transcript Sequence Number=SeqID_39561
  Gene Ontology: Mol. function=protein serine/threonine kinase activity; Biological process=protein amino acid phosphorylation
  Homolog annotation: Hit_ID=B9RWX1; Match level="QueryCoverage=89%, HitCoverage=24%, E-value=8e-95, Identity=80%"; Hit description=ATP binding protein, putative
  Pfam annotation: Domain name=Pkinase; Domain location=5-210; Score =0.0; E_value=1.7e-08; Accession=PF00069.17; Description=Protein kinase domain
  Pfam annotation: Domain name=Pkinase_Tyr; Domain location=2-217; Score=-66.9; E_value=2.8e-09; Accession=PF07714.9; Description =Protein tyrosine kinase
  Pfam module annotation: Pfam domain module=Pkinase::Pkinase_Tyr; Domain location=5-210::2-217
FLVFYLFSFTLTFKLTLSPVVCIRHPNMVLLLGACPEYGCLVYEYMDNGSLEDRLYRRGGTPPIPWSQRFRIAAEIATALLFLHQTKPEPLVHRDLKPANILLDRNYVSKISDVGLARLVPPAVADSVTQYRLTATAGTFCYIDPEYQQTGKLGVKSDIYSLGVLLLQVVTARPPMGLTHHVEKAIDAGTFHQMLDITVKDWPVDEALGFAKLASLSCPR

SEQ ID NO: 105536 - protein, 69 aa, Setaria italica
  Transcript Sequence Number=SeqID_39562
VYDEQAWGSCLLHTSNMAHCWLQGGSDLARSTPTLGHACYDEQAWGHACYIHQTFFSLVRKIDITGIML

SEQ ID NO: 105537 - protein, 110 aa, Setaria italica
  Transcript Sequence Number=SeqID_39563
  Homolog annotation: Hit_ID=Q9XGD8; Match level="QueryCoverage=74%, HitCoverage=75%, E-value=3e-10, Identity=41%"; Hit description=BETL4 protein
MFYWKMAVAILLVCAISPPQVVTGTCTETQKARVMFYCHTFTKKGSTGNVIHIHSDCCVAVRLVPNSDMKCVVSMLTDKEKEEHDEERILSLESLCEYHPPPSPPSSLST

SEQ ID NO: 105538 - protein, 90 aa, Setaria italica
  Transcript Sequence Number=SeqID_39564
SLNHPPQLRDEEPDTRPPAPNSNNPRATAVSKRIRGKPRRIESARNQAINDLPGDGAGDSAGKGSRRADGDQDNLTRPETKEIQTQTNPR

SEQ ID NO: 105539 - protein, 55 aa, Setaria italica
  misc_feature (18)..(18): Xaa can be any naturally occurring amino acid
  Transcript Sequence Number=SeqID_39565
  Gene Ontology: Mol. function=sequence-specific DNA binding; Cellular component=nucleus
  Homolog annotation: Hit_ID=Q84V76; Match level="QueryCoverage=100%, HitCoverage=24%, E-value=2e-09, Identity=63%"; Hit description=M21 protein (Fragment)
KQVPQVPTAGTAVVAADXRNVLTEDGQSSESVMTALHSGSSNDNDDGSDISLKLS

SEQ ID NO: 105540 - protein, 126 aa, Setaria italica
  misc_feature (31)..(31): Xaa can be any naturally occurring amino acid
  Transcript Sequence Number=SeqID_39566
  Gene Ontology: Mol. function=sequence-specific DNA binding; Cellular component=nucleus; Biological process=regulation of transcription, DNA-dependent
  Homolog annotation: Hit_ID=Q84V76; Match level="QueryCoverage=100%, HitCoverage=56%, E-value=6e-44, Identity=73%"; Hit description=M21 protein (Fragment)
  Pfam annotation: Domain name=K-box; Domain location=1-74; Score=19.8; E_value=1.1e-05; Accession=PF01486.9; Description=K-box region
QLAEASRGLRQMRGEELEGLSVDELHQMERXLEAGLHRVLSTKDQLFMEQISELQQKGAQLEGENMRLKKQVPQVPTAGTAVVAADTENVLTEDGQSSESVMTALHSGSSNDNDDGSDISLKLSLP

SEQ ID NO: 105541 - protein, 220 aa, Setaria italica
  Transcript Sequence Number=SeqID_39567
  Gene Ontology: Mol. function=sequence-specific DNA binding; Cellular component=nucleus; Biological process=regulation of transcription, DNA-dependent
  Homolog annotation: Hit_ID=Q84V76; Match level="QueryCoverage=85%, HitCoverage=83%, E-value=8e-90, Identity=86%"; Hit description=M21 protein (Fragment)
  Pfam annotation: Domain name=K-box; Domain location=66-170; Score =50.1; E_value=8.5e-12; Accession=PF01486.9; Description=K-box region
  Pfam annotation: Domain name=SRF-TF; Domain location=6-56; Score =97.1; E_value=6e-26; Accession=PF00319.10; Description=SRF-type transcription factor (DNA-binding and dimerisation domain)
  Pfam module annotation: Pfam domain module=K-box::SRF-TF; Domain location=66-170::6-56
MAREIRRIENAAARQVTFSKRRRGLFKKAEELAVLCDADVALIVFSATGKLSQFASSSMNDIIDKYSTHSKNLGKSNQQPPIDLNVEQSKYSGLNEQLAEASRGLRQMRGEELEGLSVDELHQMERKLEAGLHRVLSTKDQLFMEQISELQQKGAQLEGENMRLKKQVPQVPTAGTAVVAADTENVLTEDGQSSESVMTALHGRRPYFQGNDSFKDISEP

SEQ ID NO: 105542 - protein, 89 aa, Setaria italica
  Transcript Sequence Number=SeqID_39568
  Homolog annotation: Hit_ID=Q8W337; Match level="QueryCoverage=100%, HitCoverage=17%, E-value=8e-45, Identity=94%"; Hit description =Eukaryotic membrane protein family protein, expressed
  Pfam annotation: Domain name=DUF747; Domain location=1-83; Score= -193.5; E_value=0.059; Accession=PF05346.3; Description=Eukaryotic membrane protein (cytomegalovirus gH-receptor) family
ILNDKPDDRQKDLTFIPLAPACVVIRVLTPVYATLLPAGPFIWRVFWILLWSVLTYFMLAIFKILVGLILRCLANWYVNLRLKRKQHVD

SEQ ID NO: 105543 - protein, 97 aa, Setaria italica
  Transcript Sequence Number=SeqID_39569
  Gene Ontology: Mol. function=catalytic activity; Biological process =cellular metabolic process
  Homolog annotation: Hit_ID=B6TDM4; Match level="QueryCoverage=92%, HitCoverage=27%, E-value=2e-14, Identity=50%"; Hit description =Dihydroflavonol-4-reductase
MASVEGKGEDGAGHGLTGASGFIGSTLVRHLLDRGYNVHAGVLNPDDKAETDHLLALAAGAGEGRLSIFRCDLFDGAALLDAARGCPGVFPILRPSP

SEQ ID NO: 105544 - protein, 153 aa, Setaria italica
  Transcript Sequence Number=SeqID_39570
  Gene Ontology: Mol. function=coproporphyrinogen oxidase activity; Cellular component=cytoplasm; Biological process=porphyrin biosynthetic process
  Homolog annotation: Hit_ID=B6UAC6; Match level="QueryCoverage=100%, HitCoverage=32%, E-value=9e-78, Identity=92%"; Hit description =Oxygen-independent coproporphyrinogen III oxidase-like protein sll1917
  Pfam annotation: Domain name=HemN_C; Domain location=1-122; Score =20.4; E_value=1e-05; Accession=PF06969.8; Description=HemN C -terminal region
RPFYAFGLGSASYINGVRYSRPRRMKEYAEWVQELEDGTWSHKSRSSDMKDMALDVVMLSLRTAWGLDLQSFSKSFGKSLALSLCNTFKPFVESGLVIAMDMERQALPHIDFELDLQNEGDFGSRVAFIRLSDPDGFLLSNELISLAFGIISP

SEQ ID NO: 105545 - protein, 58 aa, Setaria italica
  Transcript Sequence Number=SeqID_39571
MSMSKRLVFNCLYLFYITFLMYRKGCIIDMISVLMDILPLPGNCFPLDTFLLLLLYLV

SEQ ID NO: 105546 - protein, 189 aa, Setaria italica
  Transcript Sequence Number=SeqID_39572
  Gene Ontology: Mol. function=structural constituent of ribosome; Cellular component=ribonucleoprotein complex; Biological process =translation
  Homolog annotation: Hit_ID=B6TQC6; Match level="QueryCoverage=76%, HitCoverage=64%, E-value=3e-69, Identity=87%"; Hit description=30S ribosomal protein S9
  Pfam annotation: Domain name=Ribosomal_S9; Domain location=68-189; Score=169.3; E_value=1.1e-47; Accession=PF00380.11; Description =Ribosomal protein S9S16
HPCTSRRAVSLALRASAAEPAEADLPAEEVVAVEEEAEEDALSGVALRKYVKQRLPGGFAAQRITATGRRKTAIARVVLQEGTGKVFINFRDAKEYLQGNPMWMEYCKVPLVTLGFENNYDVFVKVHGGGLSGQAQAICLGVARALVKISTANKVPLRSEGLLTRDTRIVERKKAGLKKARKRPQFSKR

SEQ ID NO: 105547 - protein, 150 aa, Setaria italica
  misc_feature (36)..(36): Xaa can be any naturally occurring amino acid
  Transcript Sequence Number=SeqID_39573
MAATEEGAESSAAGEREHVSFARGGPVFVPFMVGPXSTAPGFMHSALQELQSLEAELGDPGDEFDGELCIDELRVLTQEELVEHALQEAMEDDSNSSTPPQPEEQTCDEGMSANPTPRNEALTSSPSAERENSRLPIEDTAVISHEPESR

SEQ ID NO: 105548 - protein, 209 aa, Setaria italica
  Transcript Sequence Number=SeqID_39574
  Gene Ontology: Mol. function=oxidoreductase activity; Biological process=oxidation reduction
  Homolog annotation: Hit_ID=B9R992; Match level="QueryCoverage=100%, HitCoverage=66%, E-value=5e-79, Identity=62%"; Hit description =Flavonol synthase/flavanone 3-hydroxylase, putative
  Pfam annotation: Domain name=2OG-FeII_Oxy; Domain location=57-153; Score=100.9; E_value=4.2e-27; Accession=PF03171.12; Description=2OG -Fe(II) oxygenase superfamily
PKLGFNEYPAEPAGFSEALEECYAKLTELGLLIQDILNECMGLPPGFLRDYNGDRSFDFMAALRYFPATEEESNGISAHEDGNCITFVIQDGVGGLEVLKDGDWVPAEPVHGSIIVNIADVIQVLSNNKLKSATHRVVRKPVHRHSFAFFFNIHGDKWIEPLPEFTAKIGEAPRYRGFVYSEYQQLRMRNKTHPPARPEDVVHITHYAI

SEQ ID NO: 105549 - protein, 120 aa, Setaria italica
  Transcript Sequence Number=SeqID_39575
GKRFSFLTERRLDSRSFAAKTDSCFFPIHPCAWTQIAECTTGNRKFAECPRHSANAQKHSATHLPSVTLGETDSANSPSANRGFAECHTSGTRRSFAKSQKTLGKHILKKIKKQKLRPPP

SEQ ID NO: 105550 - protein, 324 aa, Setaria italica
  Transcript Sequence Number=SeqID_39576
  Gene Ontology: Mol. function=endonuclease activity; Cellular component=intracellular; Biological process=DNA repair
  Homolog annotation: Hit_ID=B6SHI7; Match level="QueryCoverage=100%, HitCoverage=61%, E-value=1e-173, Identity=88%"; Hit description =Apurinic endonuclease-redox protein
  Pfam annotation: Domain name=Exo_endo_phos; Domain location=79-324; Score=149.8; E_value=8.2e-42; Accession=PF03372.15; Description =EndonucleaseExonucleasephosphatase family
SIESTTLEENSVRNVKINKTSIQKETLVVQGAVPKAGLGANDDSEPWTVLVHKKPQAGWIPYNPKTMRPPPLSKDTRALKILSWNVNGLKALLKSRGFSVQQLAEREDFDVLCLQETKMQEKDVEVIKDTLLDGYTNSFWTCSVSKLGYSGTAIISRVKPLSIKYGLGVPDHDNEGRVVTVEFDDFYLLTAYVPNSGDGLRRLTYRVTEWDPSLGNYMKELEKSKPVILTGDLNCAHQEIDIHDPAGNRKSAGFTNEERESFETNFLSKGFVDTFRKQHPNVVGYSYWGYRHNGRKTNKGWRLDYFLVSESIAEKVHDSYILPD

SEQ ID NO: 105551 - protein, 127 aa, Setaria italica
  Transcript Sequence Number=SeqID_39577
MSSGQYGLGSAMAESHHDHGGNYGPVVGALFFIAIVTAGSLAVARYCVGAQAFYRTGYDLDAYVQRKFAVCLGTGRGKPPCAHPVKKKACHDLQPEAAEEVEASEPPRKRRKRRAPAPPQIRRVEKQ

SEQ ID NO: 105552 - protein, 198 aa, Setaria italica
  Transcript Sequence Number=SeqID_39578
  Gene Ontology: Mol. function=binding
  Homolog annotation: Hit_ID=Q2R3K8; Match level="QueryCoverage=100%, HitCoverage=41%, E-value=7e-58, Identity=61%"; Hit description =Armadillo/beta-catenin-like repeat family protein, expressed
FLDASRGDEPGLAPALGLLRNMASFRYIAEIAVSAQFAAHVAAALGSDRSPTRTEAALALAELCGNSAGKSRHEVEDAVPRLVWMLEAKAVSERDAAARALAALLAASGACRKLFRKDERGIANAVQLLDPAGARGVDRRYPVTVLLAVAQSRRCRKQMVAAGACGFLQGLMTAEVDGAKKLAECLGKGKMLGVFPRT

SEQ ID NO: 105553 - protein, 179 aa, Setaria italica
  misc_feature (16)..(16): Xaa can be any naturally occurring amino acid
  Transcript Sequence Number=SeqID_39579
  Gene Ontology: Mol. function=peptidase activity
  Homolog annotation: Hit_ID=B6U3W2; Match level="QueryCoverage=100%, HitCoverage=78%, E-value=4e-91, Identity=86%"; Hit description =Cysteine-type peptidase
  Pfam annotation: Domain name=OTU; Domain location=46-158; Score =130.6; E_value=5e-36; Accession=PF02338.11; Description=OTU-like cysteine protease
RLSHLGSIPYTPELMXKIPNVDNATLDHERLLERLGTYGLAEFQIEGDGNCQFRALADQIFRNPDYHKHVRKAVMKQLKEFRKQYESYVPMEYKVYLKRMKRSGEWGDHLTLQAAADRFGAKICLLTSFRDTCLIEIVPRDLTPTKELWLSFWCEVHYNSLYGIDDLLTRKTKKKHWLF

SEQ ID NO: 105554 - protein, 74 aa, Setaria italica
  Transcript Sequence Number=SeqID_39580
RLLSGMSKQVLASGKSRTKYVHDSLFSQCILMALCQDLRCLSNWSTWCMDVLVPVGFKLLCSHANMTSSRFASV

SEQ ID NO: 105555 - protein, 99 aa, Setaria italica
  Transcript Sequence Number=SeqID_39581
  Gene Ontology: Mol. function=transferase activity
  Homolog annotation: Hit_ID=Q6MWD7; Match level="QueryCoverage=98%, HitCoverage=39%, E-value=7e-41, Identity=58%"; Hit description =B1358B12.18 protein
  Pfam annotation: Domain name=PPR; Domain location=10-44; Score=42.5; E_value=1.7e-09; Accession=PF01535.12; Description=PPR repeat
  Pfam annotation: Domain name=PPR; Domain location=45-78; Score=4.6; E_ value=2.5; Accession=PF01535.12; Description=PPR repeat
  Pfam module annotation: Pfam domain module=PPR::PPR; Domain location =10-44::45-78
QNKGRKLGVVTYNVVMNGLCRLGQMKNADMLLNAMLNIGVAPDDITYNILLDGHCKYGKVRDAEELKNAKGMVSDFGAYTSLINEVVKKKPTKSYHDNR

SEQ ID NO: 105556 - protein, 73 aa, Setaria italica
  Transcript Sequence Number=SeqID_39582
FVLTSLSIGSSLCKHCYVLLPAPGWGNPYVMPITFLTLQGQGTVGWAGCKLGKFVGWSVKVRLIFVECLSFSA

SEQ ID NO: 105557 - protein, 487 aa, Setaria italica
  Transcript Sequence Number=SeqID_39583
  Gene Ontology: Cellular component=peroxisome
  Homolog annotation: Hit_ID=B6TK69; Match level="QueryCoverage=94%, HitCoverage=94%, E-value=0.0, Identity=71%"; Hit description=Peroxin Pex14
  Pfam annotation: Domain name=Pex14_N; Domain location=38-168; Score =45.6; E_value=2e-10; Accession=PF04695.5; Description=Peroxisomal membrane anchor protein (Pex14p) conserved region
MASTTGSGQQQSPSPAAADADPGAGAEKLVFEAPPQPVREDYVQNAVKFLSHPKVKGSPVVYRRSFLEKKGLTTQEIDEAFRRVPDPQPSATTATASQPQQQANSQNQSTGVQTYAPVQSVLPGTAGPVVLRTQPRFSWYQAFLAAGLLLGFGASAAVFIKKLFIPRLKSWIRSVVAEGDEIQGNQPKAKIDEETAEAVKASASAVSAIAKTNQQLLASKDEEKKILSTLTQALDSQARELKSLSESLNHSRESINITREDRFSQYRPLEEHAPPAIRNGPVNSSWRASQQTNMYGASNGDFGSGRSSFAPAPIEPTAGSFSRSYAETMSTAQRGDRSSGSKPWEMQQYSQQRPGYGSNSQLSDDGSYTDAQDNYPPSYHQNGKAPDFQADEPRPLTYNTGIEERPPPQRRWMPPQPPGVVMPEAAAAIRQPKTLPKQPSSDASEAAGEMQVNGASSASAVVTEVPVNGAGASDAGRSEIEEQSVTI

SEQ ID NO: 105558 - protein, 199 aa, Setaria italica
  Transcript Sequence Number=SeqID_39584
  Gene Ontology: Mol. function=nucleotide binding; Biological process =defense response
  Homolog annotation: Hit_ID=Q6WSR3; Match level="QueryCoverage=88%, HitCoverage=15%, E-value=1e-45, Identity=49%"; Hit description =Resistance protein T10rga2-1A
  Pfam annotation: Domain name=NB-ARC; Domain location=1-154; Score= -52.1; E_value=4.3e-06; Accession=PF00931.14; Description=NB-ARC domain
AVIVVTTRDYKLARHCSRDGNVLKVEFLQDNYAFELFKRKVFKKDDEPFSSSPDLMDEAKLILKKCGGLPLAISVIGSFLSDKPKTRLEWRKLNSKLGISEPLQTMRNILVRSYNDLPYHLKSCFLYMAIFPEDYNIKRKRLIRLWVAEGYSREMQNLTAEEVGDEYFAELLDRSMIIPVNQVTKVNPIRQLGKIFTIV

SEQ ID NO: 105559 - protein, 167 aa, Setaria italica
  misc_feature (61)..(61): Xaa can be any naturally occurring amino acid
  misc_feature (154)..(154): Xaa can be any naturally occurring amino acid
  Transcript Sequence Number=SeqID_39585
  Gene Ontology: Mol. function=aspartic-type endopeptidase activity; Cellular component=chromatin; Biological process=RNA-dependent DNA replication
  Homolog annotation: Hit_ID=Q65XD2; Match level="QueryCoverage=94%, HitCoverage=13%, E-value=2e-32, Identity=43%"; Hit description =Putative polyprotein
  Pfam annotation: Domain name=Retrotrans_gag; Domain location=99-167; Score=11.7; E_value=0.0043; Accession=PF03732.9; Description =Retrotransposon gag protein
MLLRRIRSRPDGHRRDTFHRDVGGGILGSCPLRPVTGTFPDSTSFPFESSPGTRDLGPNHXPLPKLEFPRFDGDNPRLWRDRCDMFFEVYPVSPQLKTRFAALNFKGTAAAWLQTLERRGRIVDWEVFCEAVFDRFDRNQYQAQLRRLDVLRQXGSVAEYLEKFEEL

SEQ ID NO: 105560 - protein, 74 aa, Setaria italica
  Transcript Sequence Number=SeqID_39586
  Gene Ontology: Mol. function=nucleic acid binding
  Homolog annotation: Hit_ID=Q2HTD6; Match level="QueryCoverage=43%, HitCoverage=5%, E-value=4e-10, Identity=90%"; Hit description=RNA -binding region RNP-1 (RNA recognition motif); Calcium-binding EF-hand
LGDPYGAYGGGGPAYNQPMIYGRGPAPAGMRMVPMVLPDGRLGYVLQQPGGMPPPPHLRRGGRPAGVVARGGEG

SEQ ID NO: 105561 - protein, 107 aa, Setaria italica
  Transcript Sequence Number=SeqID_39587
QARVVDDYTMSQTILKEIASGDPSGMLVVVTGASHVMYGPRGIGVPARISKKMQKKKQVVVLLDPERQSIRREGEIPVADFLWYSAAKPCSRNCFDRAEIARVMNAA

SEQ ID NO: 105562 - protein, 429 aa, Setaria italica
  Transcript Sequence Number=SeqID_39588
  Gene Ontology: Mol. function=nucleic acid binding; Cellular component= ribonucleoprotein complex
  Homolog annotation: Hit_ID=O23093; Match level="QueryCoverage=78%, HitCoverage=70%, E-value=1e-106, Identity=53%"; Hit description=A _TM018A10.14 protein
  Pfam annotation: Domain name=RRM_1; Domain location=149-223; Score =45.0; E_value=2.9e-10; Accession=PF00076.14; Description=RNA recognition motif. (a.k.a. RRM, RBD, o
  Pfam annotation: Domain name=RRM_1; Domain location=245-314; Score =63.3; E_value=9.3e-16; Accession=PF00076.14; Description=RNA recognition motif. (a.k.a. RRM, RBD, o
  Pfam annotation: Domain name=RRM_1; Domain location=69-139; Score =103.5; E_value=7.4e-28; Accession=PF00076.14; Description=RNA recognition motif. (a.k.a. RRM, RBD, o
  Pfam module annotation: Pfam domain module=RRM_1::RRM_1::RRM_1; Domain location=149-223::245-314::69-139
MAWQQSTIRNQLQGFHLLSLYFVSQDQEVPQLVFDDMDKEEGAGDGPEDEEEKRKWEELLALPPHGSEVFIGGLPRDITEEDLRELCEPLGEIYEVRLTKDKETKENKGFAFVTFTDKDAAQRAIEDLQDREYKGRTLRCSLSQAKHRLFVGNVPKGLSEEELRNIIKGKGPGVVNIEMFKDQHDPNRNRGFLFVEYYNHACADYARQNLSSPNFKVDGSQLTVSWAEPKGSTDASSAASQVKTIYVKNLPENASKEKIKELFDKHGEVTKIVLPPAKAGHKRDFGFVHFAERSSALKAVKGSEKYEIDGQVLEVSMAKPLADKKPDHSHRPGGGPNYPLPPYGGGYMGDPYGAYGGGGPAYNQPMIYGRGPAPAGMRMVPMVLPDGRLGYVLQQPGGMPPPPPPRRGGDRRDGARGGEGSHSRRYRPY

SEQ ID NO: 105563 - protein, 93 aa, Setaria italica
  misc_feature (50)..(50): Xaa can be any naturally occurring amino acid
  Transcript Sequence Number=SeqID_39589
  Gene Ontology: Mol. function=RNA-directed RNA polymerase activity
  Homolog annotation: Hit_ID=Q5QMN4; Match level="QueryCoverage=76%, HitCoverage=6%, E-value=5e-15, Identity=52%"; Hit description =Probable RNA-dependent RNA polymerase 4
KTALRSVTWRTRKNRTVPRLQVAEEFEVSLRSRSDLFDEACAICQVVYEXRRPATKVGKCGFAWKVAGRALCELYILKHGGERVTCLRSVLED

SEQ ID NO: 105564 - protein, 52 aa, Setaria italica
  Transcript Sequence Number=SeqID_39590
TVVEKDRAQSVRPAICSTVLYYKHPCTMNNRTGKSAELTPYHQGRRGTKTSV

SEQ ID NO: 105565 - protein, 160 aa, Setaria italica
  misc_feature (119)..(119): Xaa can be any naturally occurring amino acid
  misc_feature (149)..(149): Xaa can be any naturally occurring amino acid
  Transcript Sequence Number=SeqID_39591
  Gene Ontology: Mol. function=chromatin binding; Cellular component =chromatin; Biological process=chromatin assembly or disassembly
  Homolog annotation: Hit_ID=A6N1Q0; Match level="QueryCoverage=83%, HitCoverage=62%, E-value=1e-24, Identity=51%"; Hit description =Chromdomain-containing protein (Fragment)
  Subcellular localization annotation: CTP_CleavageSite=49; ConfidenceScore=5.04e-01
VFFVYLLLLALLLLVLQGSSGVVSVGFPSQGAPLSVSLTDQQDEHQLANGSSKVESSVRPPPSQGGQITGAKKRKSGCVRRFKQDEVAPQEQGDIRDRATDKPGNEYVDSTEGETGDKXGDDSASHIHNPKIIKIIKPVRYFATVVDGXQQVAISFKALR

SEQ ID NO: 105566 - protein, 41 aa, Setaria italica
  Transcript Sequence Number=SeqID_39592
  Gene Ontology: Mol. function=chromatin binding; Cellular component =chromatin; Biological process=chromatin assembly or disassembly
MINRSDGKEVLVDDKLLKAKEPLVLIEYYEQHLRYNPTSTH

SEQ ID NO: 105567 - protein, 380 aa, Setaria italica
  Transcript Sequence Number=SeqID_39593
  Gene Ontology: Mol. function=chromatin binding; Cellular component =chromatin; Biological process=chromatin assembly or disassembly
  Homolog annotation: Hit_ID=Q339W7; Match level="QueryCoverage=85%, HitCoverage=76%, E-value=6e-75, Identity=51%"; Hit description =Probable chromo domain-containing protein LHP1
  Pfam annotation: Domain name=Chromo; Domain location=63-113; Score =86.4; E_value=1e-22; Accession=PF00385.16; Description='chromo' (CHRromatin Organisation MOdifier)
GDLAEALEEDEEEAEEQTEGEEEEGEEEEQTEEGEGEEDEAEAEAETPAQDAVDPPKLAEGYFEIEAIRRRRLRKGQLQYLVKWRGWPESANTWEPLENLKACSDIVDAFDKRSRSPRSSRKRKRKAATTSTSDPNPSRGKRGRPPRSEARSMTGHHAPEPKKMPCRTSSRRASNNGNKSLFGGLEASVNVLGQRVVQEGSSGVVSVGFPSQGAPLSVSLTDQQDEHQLANGSSKVESSVRPPPSQGGQITGAKKRKSGCVRRFKQDEVAPQEQGDIRDRATDKPGNEYVDSTEGETGDKNKGDDSASHIHNPKIIKIIKPVRYFATVVDGVQQVAISFKALRSDGKEVLVDDKLLKAKEPLVLIEYYEQHLRYNPTSTH

SEQ ID NO: 105568 - protein, 97 aa, Setaria italica
  Transcript Sequence Number=SeqID_39594
  Subcellular localization annotation: CTP_CleavageSite=53; ConfidenceScore=5.09e-01
DGAPEHGGNSLKTRVTGSVSVFGRFLRLAMFLISFSFLLLSFCFLVPWRDRCKDMIVVDDGEGERGVKPCACGARVSRVRSSMFGEVRLMLVVCGAS

SEQ ID NO: 105569 - protein, 180 aa, Setaria italica
  misc_feature (18)..(18): Xaa can be any naturally occurring amino acid
  Transcript Sequence Number=SeqID_39595
LTDSDIAVVDDLGDIFKXYPFCHLALTFRNNKGQPLNSGFVAIRGTRDGITKAVEFFKQVLEAYSLKYMKASRMLGDQLALAWVVKSHLPSAFRKFSKHEAFTGEVNGASVLFLPCAVYNWTPPEGAGQFHGMPLDVKVVHFKGSRKRLMLEAWNFYNSTSKLSDMLCLILRSGRTKYDF

SEQ ID NO: 105570 - protein, 203 aa, Setaria italica
  misc_feature (29)..(29): Xaa can be any naturally occurring amino acid
  misc_feature (162)..(162): Xaa can be any naturally occurring amino acid
  Transcript Sequence Number=SeqID_39596
MLQRIKSYIAFLEQKLLELDRVEGFNHFXLTDSDIAVVDDLGDIFKKYPFCHLALTFRNNKGQPLNSGFVAIRGTRDGITKAVEFFKQVLEAYSLKYMKASRMLGDQLALAWVVKSHLPSAFRKFSKHEAFTGEVNGASVLFLPCAVYNWTPPEGAGQFHGXVHFKGSRKRLMLEAWNFYNSTSKLSDMLCLILRSGRTKYDF

SEQ ID NO: 105571 - protein, 368 aa, Setaria italica
  misc_feature (356)..(356): Xaa can be any naturally occurring amino acid
  Transcript Sequence Number=SeqID_39597
  Gene Ontology: Mol. function=electron carrier activity; Biological process=oxidation reduction
  Homolog annotation: Hit_ID=B6SU71; Match level="QueryCoverage=97%, HitCoverage=68%, E-value=1e-144, Identity=67%"; Hit description =Cytochrome P450 CYP72A124
  Pfam annotation: Domain name=p450; Domain location=1-360; Score=66.2; E_value=1.2e-16; Accession=PF00067.14; Description=Cytochrome P450
LTYNHAFHLEKLKRMLPAFAACSSELIRRWEDSVGSDGMQEIDVWPEFQNLTGDVISRAAFGSSFSEGRRIFQLQSEQAQNASQMASKMHIPAYRFLPTRLNKRMQANAREVEELLKGIIKKRERAMKEGLNNDDLLGLLLESNTKESHEIGSAKPIMTTEDIIGELKLFYFAGQETTAVLLTWTMVVLSIHPEWQDRAREEVLRIFGKNQLDSEGINQLKIVTMILHEVLRLYPPLLILARETYLETELGGVKYPPGVTFALPIACIHHNPEVWGEDVDEFRPERFKEGVSKASKDAPAFFPFGWGPRICVGQNFALLEAKMGLTMILQHFSFELSPSYTHAPCAISSLQPQYGXQIKLTRNSNVLP

SEQ ID NO: 105572 - protein, 121 aa, Setaria italica
  Transcript Sequence Number=SeqID_39598
  Gene Ontology: Mol. function=ATP binding; Cellular component=nucleus
  Homolog annotation: Hit_ID=Q9M9N3; Match level="QueryCoverage=82%, HitCoverage=12%, E-value=2e-29, Identity=61%"; Hit description =T17B22.17 protein
MGSCAGEEEEWPGGVTGRDAEVGALVWVRRRNGSWWPGRILGMDELPENTVIPPRSAGTPIKLLGRPDGSIDWYNLEKSKRVKSFRCGEYDECIQKAKALARHQKKTQTEGRYVRREDAII

SEQ ID NO: 105573 - protein, 62 aa, Setaria italica
  Transcript Sequence Number=SeqID_39599
SDSLRTDEVVWPTTQNMHLTNNSCTHRLIPHQKLTKGKALARASPCEDPHGEETIASSFFTQ

SEQ ID NO: 105574 - protein, 81 aa, Setaria italica
  Transcript Sequence Number=SeqID_39600
MQMMISSSSLLSILVIERVDERVGLSCLISLLSLILVSSACERVLDDMRLWVILNFVPCIAIPAILFLFPPKYTHSRFWFL

SEQ ID NO: 105575 - protein, 230 aa, Setaria italica
  Transcript Sequence Number=SeqID_39601
  Homolog annotation: Hit_ID=B6T2L1; Match level="QueryCoverage=98%, HitCoverage=76%, E-value=8e-40, Identity=39%"; Hit description =Membrane protein
RLRHSPALHLFADMRNLLGVPNTLNVLTAYPLLLAGVPGLILCLCGSGCFGVSLRWEALGWFLFYAGNAAAAFGSAYYHLKPDDDRLIWDRLPMMISSSSLLSILVIERVDERVGLSCLISLLSLILVSSACERVLDDMRLWVILNFVPCIAIPAILFLFPPKYTHSRFWFLATGFYLLARFEGLADRKVYSVNRYFISGHSLEHLCFAMVTLILTVMLSFRNIKISRDS

SEQ ID NO: 105576 - protein, 80 aa, Setaria italica
  Transcript Sequence Number=SeqID_39602
CTAAILMPNLVFKITGMAAVAQVQLYTSCHCINLLRMNVSLAGLQLCMKLLDLQHSWNCYRELTGLQEAARSSAFPKPLS

SEQ ID NO: 105577 - protein, 89 aa, Setaria italica
  Transcript Sequence Number=SeqID_39603
  Gene Ontology: Mol. function=protein dimerization activity; Cellular component=nucleus; Biological process=regulation of transcription, DNA-dependent
  Homolog annotation: Hit_ID=Q2QM84; Match level="QueryCoverage=73%, HitCoverage=7%, E-value=2e-17, Identity=68%"; Hit description=Auxin response factor 25
MSLLVILLSCGFEMYPTAFPLRLKRPWASGLPCQWRRSDEFARYSSLMWLRDGNRGAQSLNFQCSSSHLLVSIWLQTQQWIIYSRLKPW

SEQ ID NO: 105578 - protein, 564 aa, Setaria italica
  Transcript Sequence Number=SeqID_39604
  Gene Ontology: Mol. function=protein dimerization activity; Cellular component=nucleus; Biological process=regulation of transcription, DNA-dependent
  Homolog annotation: Hit_ID=Q2QM84; Match level="QueryCoverage=100%, HitCoverage=62%, E-value=1e-112, Identity=69%"; Hit description =Auxin response factor 25
  Pfam annotation: Domain name=AUX_IAA; Domain location=310-522; Score=- 95.6; E_value=0.014; Accession=PF02309.8; Description=AUXIAA family
WRSVKVGWDESTAGDKQPRVSLWEIEPLTTFPMYPTAFPLRLKRPWASGLPMFNGGRSDEFARYSSLMWLRDGNRGAQSLNFQGFGVSPWLQPRIDYPLLGLKPDTYQQMAAAALEEIRGGDHLKQTSSLLPVQQAQNLNGGLDPLYGNPVLQQMQFQSQQPPLQAVQQGYGQNTGNSGFLQSQLQQLQLQKQQESAPQQQQQTQQVLQQQSHQDMQQHLSSNCHDITNVASSMSEAGSASQSQSSLLPVSSFYQQNMFEGNSSPGLHLQNSFQNFSSQEASNLLNLPRSGQLMASEGWPSKRLAVEPLANLEAQSVQHKLEKVSHQSNVSHISGTLAPLSARDGSSAQALGTNVQSHLLSSSFAIHDGMTTVRSGGVGSGTDAITIASLRYSDVNLLPENSLATSSCLGESGTFNSLDDVCGVNPSQGGTFVKVYKSGSLGRSLDITRFSSYYELRSELERLFGLEGQLEDPVRSGWQLVFVDRENDILLVGDDPWQEFVNSVWCIKILSPQDVQQMVRGGDDLLSTPGATMLQSSVACDDYSAGHSMQNLTGSIAPVVPLDY

SEQ ID NO: 105579 - protein, 304 aa, Setaria italica
  Transcript Sequence Number=SeqID_39605
  Homolog annotation: Hit_ID=Q9XIQ9; Match level="QueryCoverage=95%, HitCoverage=96%, E-value=2e-21, Identity=23%"; Hit description =F13O11.17 protein
MASMTTMEKLLLFHKLESDLFHRLVHDLAQDPAAMRWVIALWLWLESVGHHNFIRRVAALPGPVVLRFVEEAVACLRCLAGQCQAATADVEDGRGKRLPCTNALLTEPIDDAGYFQSHREILDGVTHYYRSVCLAVCNVNNSTTCMPNNTAGVPVAPPMVSSPIHTTPRVAPLPLNPMAASFPLNPMATPWIPMQSPLMEAPWIPMQSPLPDDYRSLFITFSKGYPISREDIMEFFDSVFGPCVETVMVEKVAPGQQPVYGRVILRSAAMIPVVLDGRQTAKFMIKGKHLWARIYIPSSRLSYP

SEQ ID NO: 105580 - protein, 97 aa, Setaria italica
  Transcript Sequence Number=SeqID_39606
  Subcellular localization annotation: CTP_CleavageSite=44; ConfidenceScore=5.34e-01
YASDFGSADFYPFYSTMSPLSIVTVPNFKRKKSFRTCEDAFVLACSVITGPDLVEEFLAADIWCVDLTLKVPLITLRNGERCRYPFLKNEFRAPYKS

SEQ ID NO: 105581 - protein, 107 aa, Setaria italica
  misc_feature (9)..(9): Xaa can be any naturally occurring amino acid
  Transcript Sequence Number=SeqID_39607
  Gene Ontology: Mol. function=phosphogluconate dehydrogenase (decarboxylating) activity; Biological process=D-gluconate metabolic process
  Homolog annotation: Hit_ID=Q6A799; Match level="QueryCoverage=82%, HitCoverage=18%, E-value=3e-45, Identity=100%"; Hit description=6 -phosphogluconate dehydrogenase, decarboxylating
  Pfam annotation: Domain name=6PGD; Domain location=1-106; Score= -100.5; E_value=6.1e-10; Accession=PF00393.11; Description=6 -phosphogluconate dehydrogenase, C-terminal domain
ISEAVFARXSVSSAVPLRTVGQHVLAGPEHTITVEDRQTFLTDVRDALWSAKVVAYAQGLDEIRTAAAEYNWEVDMGQIASIWRDGCIIRARLLQRIRDEYAARSVL

SEQ ID NO: 105582 - protein, 128 aa, Setaria italica
  misc_feature (120)..(120): Xaa can be any naturally occurring amino acid
  Transcript Sequence Number=SeqID_39608
  Gene Ontology: Mol. function=sequence-specific DNA binding; Cellular component=intracellular; Biological process=regulation of transcription, DNA-dependent
  Homolog annotation: Hit_ID=B5L584; Match level="QueryCoverage=74%, HitCoverage=41%, E-value=5e-37, Identity=71%"; Hit description=Leafy cotyledon 1 transcription factor
  Pfam annotation: Domain name=CBFD_NFYB_HMF; Domain location=33-98; Score=111.0; E_value=4.1e-30; Accession=PF00808.15; Description =Histone-like transcription factor (CBFNF-Y) and archaeal histone
  Pfam annotation: Domain name=Histone; Domain location=30-101; Score =5.3; E_value=0.027; Accession=PF00125.16; Description=Core histone H2AH2BH3H4
  Pfam module annotation: Pfam domain module=CBFD_NFYB_HMF::Histone; Domain location=33-98::30-101
MPTEPTAVAKEAAATELPPVPSTEPPVIREQDRLMPVANVSRIMRRGLPPHAKISDDAKEVIQDCVSEFISFVTGEANERCHTEHRKTVTAEDLVWALDRLGFDDYVGPLNAFLQRMREXRGGGDGGR

SEQ ID NO: 105583 - protein, 321 aa, Setaria italica
  Transcript Sequence Number=SeqID_39609
  Gene Ontology: Mol. function=protein serine/threonine kinase activity; Biological process=protein amino acid phosphorylation
  Homolog annotation: Hit_ID=B9RMV5; Match level="QueryCoverage=92%, HitCoverage=44%, E-value=2e-42, Identity=36%"; Hit description =Serine/threonine-protein kinase, putative
KRRPESVESKKSEVFDSWEWIEREYVLVPMNCTSMEMYSSVEKSAKDDTCTRNAGYDRTTGKGSVQNQNRDFIHRVIGVQNHGCTLVPVSQESANAEDRRAKPPDCFTRLHMLNQYVLVLTELAREKLSKGLYLEALSIELVLLAIWKEALDACSLFMDASDDGNFSESSPEHFLPKSDHSSLNVARGLDFSRPASVRSWVESGFMKAYDRAEKISHILRKSYDNTEMPDAMDVIFQTALEYGKSGAANEVLGHRSRSTALYSKSIILLTFILQEAPMLPLNPPFSISPSEQQRIHSYIANLKSHLCTAQVAGQQQRSAHN

SEQ ID NO: 105584 - protein, 65 aa, Setaria italica
  Transcript Sequence Number=SeqID_39610
MGSKDDAPTWADQWGSGDDGSSNGKADDSKKTVAGNVKAAASEGFVKAKAAALVGASKVKSGTSS

SEQ ID NO: 105585 - protein, 100 aa, Setaria italica
  Transcript Sequence Number=SeqID_39611
CRSPLIVSLRHVSDIITHIIHMWFSGADGEYLNLQKFFCSENLLPFCSAAMNIPYLSWLFIIAPCIYLLMWELQFRIESNQIIASCWLSLVSSLTYNLQL

SEQ ID NO: 105586 - protein, 38 aa, Setaria italica
  misc_feature (33)..(33): Xaa can be any naturally occurring amino acid
  Transcript Sequence Number=SeqID_39612
  Gene Ontology: Cellular component=nucleus; Biological process=rRNA processing
  Homolog annotation: Hit_ID=Q6Z3V6; Match level="QueryCoverage=100%, HitCoverage=5%, E-value=1e-14, Identity=94%"; Hit description =Putative transducin / WD-40 repeat protein
LRGHSSSDGRGVLDCKFHPKQPWLFTAGADSVXRLYCD

SEQ ID NO: 105587 - protein, 75 aa, Setaria italica
  Transcript Sequence Number=SeqID_39613
  Gene Ontology: Cellular component=nucleus; Biological process=rRNA processing
  Homolog annotation: Hit_ID=Q6Z3V6; Match level="QueryCoverage=100%, HitCoverage=11%, E-value=2e-33, Identity=93%"; Hit description =Putative transducin / WD-40 repeat protein
  Pfam annotation: Domain name=BOP1NT; Domain location=1-75; Score= -123.7; E_value=0.0001; Accession=PF08145.4; Description=BOP1NT (NUC169) domain
KDEEHIGYDIDGRKIKKRDREGRIEAYLRNADDAKNWRKIYDEYNDEEVQITKEEAKIISRLLKGRTPHANVDPY

SEQ ID NO: 105588 - protein, 68 aa, Setaria italica
  Transcript Sequence Number=SeqID_39614
  Gene Ontology: Cellular component=nucleus; Biological process =regulation of transcription, DNA-dependent
  Homolog annotation: Hit_ID=B9HLV3; Match level="QueryCoverage=97%, HitCoverage=4%, E-value=4e-25, Identity=81%"; Hit description=SIN3 component, histone deacetylase complex
KRVEELIEKMQDNSVKPESPIRIDEHLTPLNLRCIERLYGDHGLDVMDVLRKNASVALPVILTRLKLC

SEQ ID NO: 105589 - protein, 36 aa, Setaria italica
  misc_feature (20)..(20): Xaa can be any naturally occurring amino acid
  Transcript Sequence Number=SeqID_39615
LDGIMMIHHKAVSNVDWHFXKGDYFTTVVPSDILYE

SEQ ID NO: 105590 - protein, 117 aa, Setaria italica
  misc_feature (94)..(94): Xaa can be any naturally occurring amino acid
  Transcript Sequence Number=SeqID_39616
  Gene Ontology: Cellular component=nucleus; Biological process =regulation of transcription, DNA-dependent
  Homolog annotation: Hit_ID=Q1EPA1; Match level="QueryCoverage=77%, HitCoverage=6%, E-value=5e-35, Identity=74%"; Hit description=Paired amphipathic helix repeat-containing protein / transcription regulator- related
MIREDFSSRSCKAVGTCLASGLTECRKRVPTALHDRDEKSSRIFYGNDSFYVLFRLHQILYERLLSAKNNSFTAEKKWRTSKDTNPPNLYAKFXTALYNLLDGSSDNTKFEDDCRAI

SEQ ID NO: 105591 - protein, 237 aa, Setaria italica
  misc_feature (15)..(15): Xaa can be any naturally occurring amino acid
  misc_feature (47)..(47): Xaa can be any naturally occurring amino acid
  misc_feature (167)..(167): Xaa can be any naturally occurring amino acid
  Transcript Sequence Number=SeqID_39617
  Gene Ontology: Mol. function=ribonucleoprotein binding; Cellular component=nucleus; Biological process=rRNA processing
  Homolog annotation: Hit_ID=Q6Z3V6; Match level="QueryCoverage=99%, HitCoverage=36%, E-value=1e-106, Identity=78%"; Hit description =Putative transducin / WD-40 repeat protein
  Pfam annotation: Domain name=BOP1NT; Domain location=1-104; Score =3.5; E_value=2.5e-13; Accession=PF08145.4; Description=BOP1NT (NUC169) domain
  Pfam annotation: Domain name=WD40; Domain location=105-143; Score =48.5; E_value=2.6e-11; Accession=PF00400.24; Description=WD domain, G-beta repeat
  Pfam module annotation: Pfam domain module=BOP1NT::WD40; Domain location=1-104::105-143
SYIPAPKPNLPGHEXSYNPSVEYIPTQEEIDSYQLMYEEDRPKFIPXRFESLRSVPAYEKALREGFDRCLDLYLCPRTRKKRINIDPESLKPKLPSKKDLRPYPKTCYLEFKGHEGPVKSVSVEMTGQWLASGSSDGTIRVWEVETGRCLKVWNVGGDVCHIACNPXPDRPILAAIVEHDLLLINAGVGSEEVQIRAKELLQIGEMVPQDDTDGKKPAVRWMKHEKLDGITLIHHKA

SEQ ID NO: 105592 - protein, 627 aa, Setaria italica
  Transcript Sequence Number=SeqID_39618
  Gene Ontology: Mol. function=ribonucleoprotein binding; Cellular component=nucleus; Biological process=rRNA processing
  Homolog annotation: Hit_ID=Q6Z3V6; Match level="QueryCoverage=98%, HitCoverage=90%, E-value=0.0, Identity=83%"; Hit description =Putative transducin / WD-40 repeat protein
  Pfam annotation: Domain name=BOP1NT; Domain location=27-283; Score =532.9; E_value=4e-157; Accession=PF08145.4; Description=BOP1NT (NUC169) domain
  Pfam annotation: Domain name=WD40; Domain location=284-322; Score =45.9; E_value=1.6e-10; Accession=PF00400.24; Description=WD domain, G-beta repeat
  Pfam annotation: Domain name=WD40; Domain location=490-528; Score =19.8; E_value=0.012; Accession=PF00400.24; Description=WD domain, G -beta repeat
  Pfam annotation: Domain name=WD40; Domain location=533-571; Score =21.5; E_value=0.0034; Accession=PF00400.24; Description=WD domain, G- beta repeat
  Pfam annotation: Domain name=WD40; Domain location=584-626; Score =17.4; E_value=0.059; Accession=PF00400.24; Description=WD domain, G -beta repeat
  Pfam module annotation: Pfam domain module=BOP1NT::WD40::WD40::WD40::W D40; Domain location=27-283::284-322::490-528::533-571::584-626
AAAEESDSSEDEVAPRNTVGDVPLEWYKEEEHIGYDIDGRKIKKRDREGRIEAYLRNADDAKNWRKIYDEYNDEEVQITKEEAKIISRLLKGKTPHANVDPYPDYVDWFEYEDKGHPLSSAPEPKRRFVPSKWEQKKVVKLVRAIRNGWIKFDKPKEESNLYLLWGDENDTAENKRHGLSYIPAPKPNLPGHEESYNPSVEYIPTQEEIDSYQLMYEEDRPKFIPKRFESLRSVPAYEKALREGFDRCLDLYLCPRARKKRINIDPESLKPKLPSKKDLRPYPKTCYLEFKGHTSRVKSISVEITGQWLASGSCDGTIRVWEVETGRCVKVWNVGGDVHHIAWNPSPDRPILAAIVGHDLLLINAEVGSEEAQMKAKELLKIGEMAPQDDTDDKKPAVRWMKHEKLDGIMMIHHKAVSNVDWHCKGDYFTTVVPSGDTRAVLLHQLTKKHSHHPFRKLPGLPVAATFHPSQKMFFVATKKFVQVYDLQKAQLVKKLESGLREISSISIHPGGDNVIVGSKDGKLCWFDTDLSTRPYKTMKVHSKDITNVTFHRKYPLFASSSEDCTAYVCHGMVYSDLNQNPLIVPLEILRGHSSSDGQGVLDCKFHPKQPWLFTAGADSVIRLYCD

SEQ ID NO: 105593 - protein, 1056 aa, Setaria italica
  Transcript Sequence Number=SeqID_39619
  Gene Ontology: Mol. function=protein binding; Cellular component =nucleus; Biological process=regulation of transcription, DNA -dependent
  Homolog annotation: Hit_ID=Q1EPA1; Match level="QueryCoverage=99%, HitCoverage=77%, E-value=0.0, Identity=53%"; Hit description=Paired amphipathic helix repeat-containing protein / transcription regulator-related
  Pfam annotation: Domain name=HDAC_interact; Domain location=133-232; Score=216.0; E_value=9.5e-62; Accession=PF08295.4; Description =Histone deacetylase (HDAC) interacting
  Pfam annotation: Domain name=PAH; Domain location=1-47; Score=50.6; E_ value=6.2e-12; Accession=PF02671.13; Description=Paired amphipathic helix repeat
  Pfam module annotation: Pfam domain module=HDAC_interact::PAH; Domain location=133-232::1-47
PEAYREFLNCLHIYSQEIITRSELKRLVKEPLQHYPDLVNGFSEFLEHCENIDGFLEGILKERQTSRTVKTVEREGDKEGHGDPEKERYKERGRPEKVSPFNSKEGASNKATAFPSKEKYNLCKPISELDLSNCQRCTPSYRLLPENHPMPPASNLTDIGAEVLNDLWVSVTSGSEDYSFKHMRKNQYEESLFRCEDDRFELDMLLESVNAAIKRVEELVEKMDKSLKPDSSIHIDEHLTSLNMRCIERLYGDHGLDVVDVLRKNADVALPVILTRLKQKQEEWSRCQSDFNKVWAEIYAKNYHKSLDHRSFYFKQQDAKNLNAKVLLAEIKEINEKKRKGDDVLLAVAAGNRRPIVPNMSFEYVDSDIHEDLYQIIKYSCGELCSSSDQVDKVMRIWTTFLEPILGVQHRDYGTEDTGMVKAKSRIRKVGLAFGETRNNASTNGTVAVKPANGDENILKEHVQPSRAIFVNEATGDAQDDSHEAEEAFGRGEDLPNAERHRRVRNTSPAADKVAALTAQNISTKGSVGNTDLSPSEKNQGRANMDLVAGSTSSTGAKAVVEFKGGNETIPFIGNREAGRITSLYRVGVNPFNEYSGSHNNLKPEREEGELSPNGDFEEENFGIFQVEASNGTSKLKEGSASRPLQGRHKEVVKFTSENHADADDEADESAQRSTEDSENASEAGEDASGSEYGGGEEFSREDHEEEEDDMDPDTKAQSEGGAEITEAQDLDVGISLPFSERLHSTVKPLYKYVAATLQNHEDKVTSVFYGNDSFYVLFRLHQILYERILSAKTNSSTSEKKWKASKDANSPNQYSKFISALYSLLDGSSDSTKFEDDCRSIIGTQSYVLFTLDKLIFKVVKQLQVIASDEMDNKLLQLYLYEKSRSPGRFLDLVYHENARVLLHDESIYRFECHSNPTRLSVQLMEYGNEKPEVTAVSYDPTFSQYLYNDYLPSSSDTKLADDVFLRRNKRKQGRNDDSPASLKTMDNVMFSNGLECKISCKTSKVSYVLDTEDFLFRVRKRRRAPSSGTMPAKANFVKAYTVKSQEFHRFLSRP

SEQ ID NO: 105594 - protein, 1442 aa, Setaria italica
  Transcript Sequence Number=SeqID_39620
  Gene Ontology: Cellular component=nucleus; Biological process =regulation of transcription, DNA-dependent
  Homolog annotation: Hit_ID=Q1EPA1; Match level="QueryCoverage=95%, HitCoverage=99%, E-value=0.0, Identity=56%"; Hit description=Paired amphipathic helix repeat-containing protein / transcription regulator-related
  Pfam annotation: Domain name=HDAC_interact; Domain location=512-612; Score=243.5; E_value=5.2e-70; Accession=PF08295.4; Description =Histone deacetylase (HDAC) interacting
  Pfam annotation: Domain name=PAH; Domain location=168-214; Score =66.9; E_value=7.4e-17; Accession=PF02671.13; Description=Paired amphipathic helix repeat
  Pfam annotation: Domain name=PAH; Domain location=376-422; Score =52.1; E_value=2.1e-12; Accession=PF02671.13; Description=Paired amphipathic helix repeat
  Pfam annotation: Domain name=PAH; Domain location=88-134; Score=69.3; E_value=1.4e-17; Accession=PF02671.13; Description=Paired amphipathic helix repeat
  Pfam module annotation: Pfam domain module=HDAC_interact::PAH::PAH::PA H; Domain location=512-612::168-214::376-422::88-134
MKRGARDDALMGSQLKRPNLARSDPAAQPQHMPLPGSASAAAPPPQAGAAPPAQSQQAAGAASANQKLTTNDALVYLKAVKDKFQDKREKYEEFLEVMRDFKSERIDTNGVIIRVKTLFNGYPELILGFNAFLPKGYAIKLQEEKKPVDFVEAINFVNKIKNRFQHDEQVYKAFLDILNMYRKDNKSIQDVYQEVAQLFAEHKDLLEEFQHFLPDTSVAPQAVASSRGGLVKREDRGSLVPPANRTLHGDKRDRAYLSHADRDFSVDRPDVEHDRQRRRLDKEKERKVERDRRDYEREDKDGEHDSRELEIGQRKRKPFPRKMEDTAGAETHQGGPSENHGIHSISASSYDDKDALKSVYTHEFHFCEKVKEKLEHDAYQEFLKCLHIYSQEIITRSELKNLVNDILQHYPELMEGFNEFLEHCENIDGFLAGVFNKRPTARIKTEDKEKDRERDREDRDRDREKEREKERERLDKGSTFNSKEGASHKPSMFSGKEKYNLSKPISELDLSNCQRCTPSYRLLPKNYPMPPASNRTDLGASVLNDHWVSVTSGSEDYSFKHMRKNQYEESLFRCEDDRFELDMLLESVNAATKRVEELIEKMQDNSVKPESPIRIDEHLTPLNLRCIERLYGDHGLDVMDVLRKNASVALPVILTRLKQKQEEWSRCRSDFNKVWAEIYAKNYHKSLDHRSFYFKQQDTKNLSTKSLLTEIKEINEKKRKEDDVLLAIAAGNRRPIVPNISFEYVDSEIHEDLHKIIKYSCGEVCNSSDQLDKVMRIWTTFLEPILGVQPRTHGSEDPDLVKAKSRTAKTGLASVGESNTGAGIVAKQGNGDESEQGPSSRARLANGVATDTQNGFHDADRTARRGEEPSNSALNGRLHSAAPAADETPSISAQNMASTERSAENLPAVRIEQQKANLELTPGVNASKSSHDAVETVGEGGRGGNETLPSVEGGETGRPGSSVNGTNEGNKGRLNNEGSAAHNTSKVEREEGELSPNGDFEEDHFVPFEDGASKAKEGSTSKPFQGRPGEVVPSSEAAGENDADADDEGEESAQRSTEDSENASEAGEDASGSESGDGEECSREDHDEEEEDMDHDDQDAKAESEGEAEGTTETHDVEGGLSLPHSERFLHSVKPLAKHVPTALHDRDEKSSRIFYGNDSFYVLFRLHQILYERLLSAKTNSFTAEKKWRTSKDTNPPNLYAKFMTALYNLLDGSSDNTKFEDDCRAIIGTQSYVLFTLDKLIYKVVKQLQAIATDEMDNKLLQLYLYEKSRSSGRFFDLVYHENARVLLHDESIYRFESCSNPTRLSIQLMEYGHEKPEVTAVSIDPNFSSYLFSEYLCSMSDKKLSEGVYLGRNKRKHSNNDEPSDSLKAMDGIKVVNGLECKISCKTSKVSYVLDTEDFLFRLRKRRKVLRGGNVPDRLQISKISAAKVQRFNRFLSKP

SEQ ID NO: 105595 - protein, 221 aa, Setaria italica
  Transcript Sequence Number=SeqID_39621
  Gene Ontology: Mol. function=ribonucleoprotein binding; Cellular component=nucleus; Biological process=rRNA processing
  Homolog annotation: Hit_ID=Q6Z3V6; Match level="QueryCoverage=78%, HitCoverage=26%, E-value=3e-95, Identity=94%"; Hit description =Putative transducin / WD-40 repeat protein
  Pfam annotation: Domain name=WD40; Domain location=127-165; Score =28.3; E_value=3.2e-05; Accession=PF00400.24; Description=WD domain, G-beta repeat
  Pfam annotation: Domain name=WD40; Domain location=182-220; Score =17.5; E_value=0.054; Accession=PF00400.24; Description=WD domain, G -beta repeat
  Pfam annotation: Domain name=WD40; Domain location=84-122; Score =19.8; E_value=0.012; Accession=PF00400.24; Description=WD domain, G -beta repeat
  Pfam module annotation: Pfam domain module=WD40::WD40::WD40; Domain location=127-165::182-220::84-122
SKYKNSRNWHFKGDYFTTVVPIVHLNSFVRNTKAVLLHQLSKKHSHHPFRKLPGLPVAATFHPSEKMFFVATKKFIQVYDLQKAQLVKKLESGLREISSISIHPGGDNVIVGSKDGKLCWFDTDLSTRPYKTLKTHSKDITSVTFHRKYPLFASSSEDCTAYVCHGMVYSDLNQNPLIVPLEILRGHSSSDGRGVLDCKFHPKQPWLFTAGADSVIRLYCD

SEQ ID NO: 105596 - protein, 57 aa, Setaria italica
  Transcript Sequence Number=SeqID_39622
RLEVHEKELYRATEALRMQSRTFKVSLFGLVQLIMLCLSLKVFFAWVPAPFDEVVPT

SEQ ID NO: 105597 - protein, 96 aa, Setaria italica
  Transcript Sequence Number=SeqID_39623
  Subcellular localization annotation: CTP_CleavageSite=65; ConfidenceScore=5.25e-01
TVLLGFRGRVLIVTRNVVRVWGGFYSRVSGAGPRKLHPTPTRPVAIPSASPSAGPASSPLSVPPSSDLKPPRRTHLHTPSTEVRHPLLLVTGSPPS

SEQ ID NO: 105598 - protein, 59 aa, Setaria italica
  misc_feature (32)..(32): Xaa can be any naturally occurring amino acid
  Transcript Sequence Number=SeqID_39624
TNVYSSCQITLRFSLQGELFRNYQLIMHKGHXYLLALHCLALATELMKYLSIFSTIVFA

SEQ ID NO: 105599 - protein, 57 aa, Setaria italica
  Transcript Sequence Number=SeqID_39625
  Gene Ontology: Mol. function=transferase activity
  Homolog annotation: Hit_ID=Q5ZCH7; Match level="QueryCoverage=63%, HitCoverage=6%, E-value=2e-10, Identity=77%"; Hit description=O -acetyltransferase-like
RSVMAMKFVACFLVVILVWEVPGVFDIVWSPFTFLLGQCPCKTFSAVDITCVFPSKR

SEQ ID NO: 105600 - protein, 109 aa, Setaria italica
  Transcript Sequence Number=SeqID_39626
  Gene Ontology: Mol. function=transferase activity
MAEAVASAGGLAVAAASTSVTPGQVSAILGFLWVFAAWAYAEVLFHRKNAASIKTRHSDVNLAVMDNSSVKGEDQTLLLEEGGQAVAVKPAYASFTSQILRLFFMDQML

SEQ ID NO: 105601 - protein, 545 aa, Setaria italica
  Transcript Sequence Number=SeqID_39627
  Gene Ontology: Mol. function=transferase activity
  Homolog annotation: Hit_ID=B9S163; Match level="QueryCoverage=90%, HitCoverage=85%, E-value=0.0, Identity=72%"; Hit description=O -acetyltransferase, putative
  Pfam annotation: Domain name=Cas1p; Domain location=120-357; Score =513.7; E_value=2.4e-151; Accession=PF07779.4; Description=Cas1p-like protein
MPIAPCLLFFKDFIILLRDTHVALNETTITFYKESYWSLCLFIFVSRHSDVNLAVMDNSSVKGEDQTLLLEEGGQAVAVKPAYASFTSQILRLFFMDQMLLLENRLTLRAISEFGGYLLYFYICDRTDLLGESAKNYSRDLFLFLYFLLIIVAAMTSFKVHQDKSAFTGKSILYLNRHQTEEWKGWMQVLFLMYHYFNAKEIYNAIRVFIAAYVWMTGFGNFSYYYVRKDFSLGRFAQMMWRLNFFVIFCCIVLNNDYTLYYICPMHTLFTLMVYGALGILNKYNEIRSVMAMKFVACFLVVILVWEVPGVFDIVWSPFTFLLGYTDPSKPDLPRLHEWQFRSGLDRYIWIVGMIYAYYHPTVEKWMEKLEETELRTKLYIKGSIVTVSLTAGYLWYEYIYKLDKITYNKLHPYTSWIPITVYICLRNFTQEFRSFSLTLFAWLGKITLETYISQFHIWLRSRVPNGQPKWLLAIIPNYPLLNFMLTTAIYVAVSHRLFELTNTLKVAFVPSRDNKRLSYNFVAGIVISVALYLVSFVLVGIAGY

SEQ ID NO: 105602 - protein, 145 aa, Setaria italica
  Transcript Sequence Number=SeqID_39628
  Gene Ontology: Mol. function=metal ion binding; Cellular component =nucleus; Biological process=regulation of transcription from RNA polymerase II promoter
  Homolog annotation: Hit_ID=Q94DE2; Match level="QueryCoverage=100%, HitCoverage=100%, E-value=3e-77, Identity=95%"; Hit description =Protein BUD31 homolog 1
  Pfam annotation: Domain name=G10; Domain location=1-143; Score=383.3; E_value=4.1e-112; Accession=PF01125.9; Description=G10 protein
MPKIKTSRVSYPEGWELIEPTIRELDAKMREAENDPHDGKRKCEALWPIFRISHQRSRYIYDLYYRRKEISQKLYEFCLDQGYADRNLIAKWKKPGYERLCCLRCIQTRDHNFATTCVCRVPKHLREEQVIECVHCGCKGCASGD

SEQ ID NO: 105603 - protein, 60 aa, Setaria italica
  Transcript Sequence Number=SeqID_39629
  Gene Ontology: Mol. function=metal ion binding; Cellular component =nucleus; Biological process=nuclear mRNA splicing, via spliceosome
  Homolog annotation: Hit_ID=Q94DE2; Match level="QueryCoverage=86%, HitCoverage=35%, E-value=8e-23, Identity=94%"; Hit description =Protein BUD31 homolog 1
  Pfam annotation: Domain name=G10; Domain location=1-58; Score=6.2; E _value=5.8e-07; Accession=PF01125.9; Description=G10 protein
MHFAFALLQPGYERLCCLRCIQTRDHNFATTCVCRVPKHLREEQVIECVHCGCKGCASGD

SEQ ID NO: 105604 - protein, 100 aa, Setaria italica
  Transcript Sequence Number=SeqID_39630
  Gene Ontology: Mol. function=tRNA dihydrouridine synthase activity; Cellular component=cytoplasm; Biological process=metabolic process
  Homolog annotation: Hit_ID=Q7XT07; Match level="QueryCoverage=96%, HitCoverage=14%, E-value=3e-50, Identity=95%"; Hit description=tRNA -dihydrouridine synthase 3-like
VLGSNWGSDSKGVETTRHFLLEWLSYTCRYIPVGLLDVIPQRLNWRPPSYCGRDDLETLMASDSAADWIRISEMLLGKVPEGFTFAPKHKSNAYDRAENG

SEQ ID NO: 105605 - protein, 680 aa, Setaria italica
  Transcript Sequence Number=SeqID_39631
  Gene Ontology: Mol. function=tRNA dihydrouridine synthase activity; Biological process=metabolic process
  Homolog annotation: Hit_ID=Q7XT07; Match level="QueryCoverage=95%, HitCoverage=95%, E-value=0.0, Identity=77%"; Hit description=tRNA -dihydrouridine synthase 3-like
  Pfam annotation: Domain name=Dus; Domain location=330-624; Score =174.0; E_value=4.2e-49; Accession=PF01207.9; Description =Dihydrouridine synthase (Dus)
  Pfam annotation: Domain name=zf-CCCH; Domain location=126-154; Score =1.2; E_value=1.1; Accession=PF00642.16; Description=Zinc finger C-x8- C-x5-C-x3-H type (and similar)
  Pfam annotation: Domain name=zf-CCCH; Domain location=87-116; Score =12.3; E_value=0.036; Accession=PF00642.16; Description=Zinc finger C- x8-C-x5-C-x3-H type (and similar)
  Pfam module annotation: Pfam domain module=Dus::zf-CCCH::zf-CCCH; Domain location=330-624::126-154::87-116
  Subcellular localization annotation: CTP_CleavageSite=33; ConfidenceScore=5.16e-01
MATTAPATDPPDSSPAVTTDASPPPRPTPEELVARAVAPVKPAFLRPPHRREVPKEEGKAGGGGAVVTGEKKSKRQLKRERQQEQKSTSHLCIGVGKSGNVDSCKYGTSCRFSHDINAYLAQKPGDLEGTCPFTTLGQLCPYGLTCRFLGTHKDNLAPQNHSDGNHERNPLSKDIQKLLWKNNYKFPKATAQIKLLGLKDGNKNKAKTANDDNPDETCELNGDGKTESLLVNVEPDPTLCKAIDNSEGEPLVVNSVQCVEPRPLKKSKVEVDGTQDDGTGIHGNEAESEDLNLSNGSKVSSNNQSSCRVDLITTPHLREKKIIDFREKLYLAPLTTVGNLPFRRLCKTLGADITCGEMAMCTNLLQGQASEWALLRRHPSEDLFGVQICGPYPDTVARTVELVDNECSVDFIDINMGCPIDIVVNKGAGSSLLTKPMRIKSIVQAASTVTEKPLTVKVRTAFFEGRNRADSIVSDIYDWGASAITIHGRSRQQRYSKLADWDYIYQCAQKAPDCLHVIGNGDVFSFTDWNKHVSDSSKISTCMIARGALIKPWLFTEIKEQRHWDITSGERLNILKDFVQFGLEHWGSDSKGVETTRHFLLEWLSYTCRYIPVGLLDVIPQRLNWRPPSYCGRDDLETLMASDSAADWIRISEMLLGKVPEGFTFAPKHKSNAYDRAENG

SEQ ID NO: 105606 - protein, 93 aa, Setaria italica
  Transcript Sequence Number=SeqID_39632
  Subcellular localization annotation: CTP_CleavageSite=52; ConfidenceScore=5.51e-01
MATATASGSTYCCNTLLHLPRPTHFRRISPPPTHRLELSLSLSLAARFATCRAAAVESGTARFGSRARASSGPPPPPVFETVEEEEEEREWSD

SEQ ID NO: 105607 - protein, 52 aa, Setaria italica
  Transcript Sequence Number=SeqID_39633
SLGPQHKIEMIGRSSSMDRSVAISENLKEIEIKCEVVDEEVHKVFKFLCSII

SEQ ID NO: 105608 - protein, 56 aa, Setaria italica
  Transcript Sequence Number=SeqID_39634
GFLSLQGPQHKIEMIGRSSSMDRSVAISENLKEIEIKCEVVDEEVHKVFKFLCSII

SEQ ID NO: 105609 - protein, 85 aa, Setaria italica
  Transcript Sequence Number=SeqID_39635
  Gene Ontology: Mol. function=diphosphate-fructose-6-phosphate 1 -phosphotransferase activity; Cellular component=6-phosphofructokinase complex; Biological process=glycolysis
  Homolog annotation: Hit_ID=A1E381; Match level="QueryCoverage=94%, HitCoverage=37%, E-value=7e-37, Identity=93%"; Hit description =Pyrophosphate-fructose-6-phosphate1-phosphotransferase beta subunit (Fragment)
LLLPECALQTHPNIALIGEEVAEKKQTLKNVTDYITDIVCKRAELGYNYGVILIPEGLIDFIPEVQKLIAELNEILAHDTVDEAG

SEQ ID NO: 105610 - protein, 36 aa, Setaria italica
  Transcript Sequence Number=SeqID_39636
PKDVSHPPNKRIWPGQLFLALAVYKKLCKVINIEVV

SEQ ID NO: 105611 - protein, 57 aa, Setaria italica
  Transcript Sequence Number=SeqID_39637
SCYRGMMLDFGDICNSYRLMVASYVLPRRPPPWPSYSQHRMGIIALFRYGVYVSSSL

SEQ ID NO: 105612 - protein, 82 aa, Setaria italica
  Transcript Sequence Number=SeqID_39638
QMAWVSVARGAANRQNGIESERIWGWHLQMPNRAHFLYHIPVPWADLVEGGGGSMVEEDWCRADMMKSIARQSSWWMWLGYL

SEQ ID NO: 105613 - protein, 92 aa, Setaria italica
  Transcript Sequence Number=SeqID_39639
PDYRSVAFFFDFANFGTNYKSHLTLNFCIYDSIGALPSYKHRTNHVHENRWKSHVTNGQKGCCAVSFARRSLIVRRRRRASDLISRRDSPGL

SEQ ID NO: 105614 - protein, 68 aa, Setaria italica
  Transcript Sequence Number=SeqID_39640
DPTLCRRFQNWVCPFTFLEKRDGNKKLEIKISQRSSIQITQPELFYSVNWHCNDIKKQQLNNTKHTVF

SEQ ID NO: 105615 - protein, 57 aa, Setaria italica
  Transcript Sequence Number=SeqID_39641
KRSVLLNLASLVLNLTNYSLSESDIVVVYKPNIEIPRSAHLYTNNSQINNSILSTGN

SEQ ID NO: 105616 - protein, 149 aa, Setaria italica
  misc_feature (93)..(93): Xaa can be any naturally occurring amino acid
  misc_feature (106)..(106): Xaa can be any naturally occurring amino acid
  Transcript Sequence Number=SeqID_39642
  Gene Ontology: Mol. function=nucleic acid binding; Biological process= proteolysis
  Homolog annotation: Hit_ID=Q8W0U1; Match level="QueryCoverage=100%, HitCoverage=40%, E-value=2e-29, Identity=47%"; Hit description =Putative copia polyprotein
TVHKICSKLHFCNQPFDDVEMIEKTLPTFLPANRILQQQYHCHNYTKYSNLIYYLLQAEKHDELLTKNHQLRPVGAAPLPEVHFNAQNNNKQXVARNSKRISSENXKKQNYQKGKDSNKGKVTFKKHTHHDNSQVCQRCGCHNHTTRKC

SEQ ID NO: 105617 - protein, 86 aa, Setaria italica
  Transcript Sequence Number=SeqID_39643
  Gene Ontology: Mol. function=drug transporter activity; Cellular component=membrane; Biological process=multidrug transport
  Homolog annotation: Hit_ID=Q10A00; Match level="QueryCoverage=59%, HitCoverage=10%, E-value=2e-12, Identity=82%"; Hit description=MATE efflux family protein, expressed
CHLRGMGLWFGILCGVAVQMLLLLCITLCTNWNKEALKAKDRVFSSTIPVDHMITSGCTDQENASSVVGKDARRTIEVTKDCTAPN

SEQ ID NO: 105618 - protein, 70 aa, Setaria italica
  Transcript Sequence Number=SeqID_39644
PTLNAPETVQVPPAAAPNHSSSTSQHSSDDQDPSTVDLGVDLPVAGGGGSSDQDWGLDGVCQWSNMSRIC

SEQ ID NO: 105619 - protein, 73 aa, Setaria italica
  Transcript Sequence Number=SeqID_39645
SIDIHTKKCTIRSKHTHVYFKKQNTASIHEALAGLLSVTTPPPRVVLNQICNIINFLCVFQTFVQLESCTVYS

SEQ ID NO: 105620 - protein, 323 aa, Setaria italica
  Transcript Sequence Number=SeqID_39646
  Gene Ontology: Mol. function=peptidase activity; Cellular component =membrane
  Homolog annotation: Hit_ID=O81060; Match level="QueryCoverage=81%, HitCoverage=14%, E-value=4e-57, Identity=46%"; Hit description =Similar to late embryogenesis abundant proteins
  Subcellular localization annotation: CTP_CleavageSite=13; ConfidenceScore=5.43e-01
YNSQLSTISLETSAATCSKSFARPLSSWLVSVKFGSTYGKHVVQAVATAVQQSQHLRIILPVGVIVGVTLACLRNYFHVDVSKHDDHMKANVKSNILSEDLIVQDISRANIQDSGEANTDNNIENAREDNHQEVTRTKGQGMMVGAVTAALGASALVAHHQENKDENNDGKDEIQNAKHEETTQEKGQNNLMRSFTEKALSVAAPVVPTKGDGEVDHERIVAVLAELGQKGGILRFVGKFALLWGGIRGAMSLTDRLISFLRISERPLYQRIMGFSLMVLVLWSPVVIPLLPTLVQSWTISASTGIIGYACIVGLYVSINRIT

SEQ ID NO: 105621 - protein, 78 aa, Setaria italica
  Transcript Sequence Number=SeqID_39647
  Subcellular localization annotation: CTP_CleavageSite=20; ConfidenceScore=5.14e-01
SCHNVTVLACCKSVPLAWLSSSSIRGVPSESLLRPRRRRLLGRSEFWYKERLYNLNHNRNVPLIPSYHELDLFFQKKK

SEQ ID NO: 105622 - protein, 161 aa, Setaria italica
  Transcript Sequence Number=SeqID_39648
  Gene Ontology: Mol. function=protein dimerization activity; Cellular component=nucleus; Biological process=regulation of transcription, DNA-dependent
  Homolog annotation: Hit_ID=A4ZGR5; Match level="QueryCoverage=65%, HitCoverage=62%, E-value=1e-45, Identity=86%"; Hit description =Transcription factor bZIP48 (Fragment)
  Pfam annotation: Domain name=bZIP_1; Domain location=29-92; Score =31.2; E_value=4.1e-06; Accession=PF00170.13; Description=bZIP transcription factor
  Pfam annotation: Domain name=bZIP_2; Domain location=29-83; Score =33.7; E_value=7.4e-07; Accession=PF07716.7; Description=Basic region leucine zipper
  Pfam module annotation: Pfam domain module=bZIP_1::bZIP_2; Domain location=29-92::29-83
AQLMDLGDAEDGMAAASSPASARAAADGVADPKRVKRILANRQSAQRSRVRKLQYISELERSVTSLQMEVSALSPRVAFLDHQRSLLTVGNSHLKQRIAALAQDKIFKDAHQEALKKEIERLRQLFHQQQIKATTGGADIAAAASMQARQELLACEGAAIR

SEQ ID NO: 105623 - protein, 95 aa, Setaria italica
  Transcript Sequence Number=SeqID_39649
DIFLSKNMLRHVCACICETTMKMLSRELLLYLVKNVQCTVAFSTMLHSFLPFKISPFLISPKKCNVTHFSLYFLSNFRAEFRIWIPSNLFLSKKK

SEQ ID NO: 105624 - protein, 124 aa, Setaria italica
  Transcript Sequence Number=SeqID_39650
  Subcellular localization annotation: CTP_CleavageSite=74; ConfidenceScore=5.43e-01
LPKQQQEVLLEMAAQGLTATAAPVKLGRPFSRSYSSSPARGAPRLLSPAHSNSVHALRACASTCSRGVAAGRLSAAATTATTAATPLAPAGGGEEIMDQWPPVPQGAGGGPSRVAWKPGGVAGE

SEQ ID NO: 105625 - protein, 231 aa, Setaria italica
  Transcript Sequence Number=SeqID_39651
  Gene Ontology: Cellular component=exocyst; Biological process=vesicle docking during exocytosis
  Homolog annotation: Hit_ID=B9SJM9; Match level="QueryCoverage=98%, HitCoverage=28%, E-value=4e-78, Identity=60%"; Hit description=Sec15, putative
  Pfam annotation: Domain name=Sec15; Domain location=2-225; Score= -142.7; E_value=0.027; Accession=PF04091.4; Description=Exocyst complex subunit Sec15-like
VVILEKPHSGLTAKAVLKATQNAAYNGLITLVNSKVDEFMLQLTSINWTVEEAPEHANDYMNEVVIYLHEVVSSGQQIVPRDALYKVVSGALSHIADSIITVLLSDRVKRFNANAAAGIDIDLKMLEGFADDTYHSTGLSELRKETSFKDCLVEIRQLINLLLSNQPESFMNPVTREKNYGSLDHKKVAIICDKFKDAPDSLFGSLSSRATVQSARKKSLDVLKRRLKDFS

SEQ ID NO: 105626 - protein, 125 aa, Setaria italica
  Transcript Sequence Number=SeqID_39652
  Gene Ontology: Mol. function=hydrolase activity; Biological process =metabolic process
  Homolog annotation: Hit_ID=B9RDG4; Match level="QueryCoverage=82%, HitCoverage=29%, E-value=3e-13, Identity=39%"; Hit description =Gibberellin receptor GID1, putative
PLPANDLLWELALPVGADRDHEYCNPESMLARVGAARLRRLPPCLVLGRRKDPPRDRTRTLVNALRKAGVAVEASLDGAGYHAMELFKANCAAEFTAQVSDFVRRHSTAGSSAAAGDVVVGMSKL

SEQ ID NO: 105627 - protein, 61 aa, Setaria italica
  Transcript Sequence Number=SeqID_39653
AASRPGISDVVAALSFLADPAYYPPEGMQTEQPREKSSRPPVASVGRVVSEVRADDETKER

SEQ ID NO: 105628 - protein, 74 aa, Setaria italica
  Transcript Sequence Number=SeqID_39654
MHKISGYKKYDVSKPMHIRAALERHLKHGPMVAVFWISANYDECMKNGAVYRFIHIRGKVRISHEVCVVNFGIE

SEQ ID NO: 105629 - protein, 77 aa, Setaria italica
  Transcript Sequence Number=SeqID_39655
PRLERTHSGDATGRCLGHAGGDDEYWVLARKLATVTQHRQSRARDERLTGSIPPAEVSPQRVQRAPFKLDGGCYEQL

SEQ ID NO: 105630 - protein, 133 aa, Setaria italica
  Transcript Sequence Number=SeqID_39656
  Gene Ontology: Mol. function=electron carrier activity; Biological process=oxidation reduction
  Homolog annotation: Hit_ID=Q6ATT7; Match level="QueryCoverage=96%, HitCoverage=25%, E-value=3e-48, Identity=64%"; Hit description =Cytochrome P450, putative
PRKCRETCRVMGYDVPKGTVVFVNMWAICRDPKYWDDPEEFKPERFENSHLDYKGTCYEFLPFGAGRRICPGINLGVANVELALASLIYHFDWKLPAGMKPEDIDVMEVPGLIARKKTSLILHPVTRIHPVNA

SEQ ID NO: 105631 - protein, 132 aa, Setaria italica
  Transcript Sequence Number=SeqID_39657
  Subcellular localization annotation: CTP_CleavageSite=55; ConfidenceScore=5.37e-01
LCLPCPVVFRAAAPISGHLACGRYLQASRVRACHRRRAGPASSGPSSSPRMQNTKTMSTWNSGSEQGMGVFHICGYSQHIKTAAGERKKILVSSTFRAGGHHWAIFFRPDGFSDKSVAGIVIASKHVKLRAS

SEQ ID NO: 105632 - protein, 108 aa, Setaria italica
  misc_feature (1)..(35): Xaa can be any naturally occurring amino acid
  Transcript Sequence Number=SeqID_39658
XXXXXXXXXXXXXXXXXXXXXXXXXXXXXXXXXXXIFWQLIKLWIRNQTPQENTILQQLQHLMKITWCTKNQQVFHLQMLHHTSYTEKNKLLILSYKSRQWIAGSHPL

SEQ ID NO: 105633 - protein, 402 aa, Setaria italica
  misc_feature (11)..(11): Xaa can be any naturally occurring amino acid
  misc_feature (17)..(17): Xaa can be any naturally occurring amino acid
  Transcript Sequence Number=SeqID_39659
  Gene Ontology: Mol. function=DNA-directed RNA polymerase activity; Cellular component=nucleus; Biological process=transcription
  Homolog annotation: Hit_ID=A3BQ32; Match level="QueryCoverage=100%, HitCoverage=31%, E-value=1e-165, Identity=72%"; Hit description=DNA -directed RNA polymerase
  Pfam annotation: Domain name=RNA_pol_Rpb2_3; Domain location=98-163; Score=43.4; E_value=9.1e-10; Accession=PF04565.8; Description=RNA polymerase Rpb2, domain 3
  Pfam annotation: Domain name=RNA_pol_Rpb2_4; Domain location=198-260; Score=91.9; E_value=2.3e-24; Accession=PF04566.5; Description=RNA polymerase Rpb2, domain 4
  Pfam annotation: Domain name=RNA_pol_Rpb2_5; Domain location=274-322; Score=23.7; E_value=0.00062; Accession=PF04567.9; Description=RNA polymerase Rpb2, domain 5
  Pfam module annotation: Pfam domain module=RNA_pol_Rpb2_3::RNA_pol _Rpb2_4::RNA_pol_Rpb2_5; Domain location=98-163::198-260::274-322
LLMAYSGNRKXSDNKDXFRNKRLDLACQLLRRELWLHINSIQRRMVKLMQRDLSSDGNLQDLRRYVDASIVTNGLNRAFSTGSWRHPYKSERCSGVVATLRRANPLQMMSDLRKTRQWFAYSGTTGDARYPNPSYWGKLCFLSTPDGEKCGFVKNLAVTAKVSSAVKKQLCIDTFVSCGMKKLDDKIRLQDISGKDRIFLNGNLLGVCADPGDLVSRLRSLRRSKLIEPQVEIKRDRHHKEIRVFSDPGRILRPLLVVENLRRITRPKAGLYSFQELMHQNIIELIGVEVEEDIRCAPGIRHLFTREKEEGPSDYTHCELDPSFLLGLSCSLIPFANHDNARRVLMQAEKLSQQAIGYLPTNSRSRFDTLSQIFYPQRPLFKTVVADCLGKPDYSFGRKGDF

SEQ ID NO: 105634 - protein, 96 aa, Setaria italica
  Transcript Sequence Number=SeqID_39660
QAQLIAYFWHILHTSNMTHTDILPFRLRCKIGPETLGYLLVWTPASMPWLPRSSQPSRLPTKPGLLLRVLPLPARPSRLSFSRVEHVLVIPGLLHG

SEQ ID NO: 105635 - protein, 184 aa, Setaria italica
  misc_feature (11)..(11): Xaa can be any naturally occurring amino acid
  misc_feature (69)..(69): Xaa can be any naturally occurring amino acid
  Transcript Sequence Number=SeqID_39661
  Gene Ontology: Mol. function=transporter activity; Cellular component= membrane; Biological process=oligopeptide transport
  Homolog annotation: Hit_ID=B6SWZ7; Match level="QueryCoverage=98%, HitCoverage=30%, E-value=1e-78, Identity=82%"; Hit description =Peptide transporter PTR2
  Subcellular localization annotation: CTP_CleavageSite=91; ConfidenceScore=5.07e-01
VALHDAAIIPXARRATGRPGGLTQLQRMGVGRFLVVLALGTAALVERRRLRQAPSAPMSILWQVPQFVXLVAGSDVFCGIAQLEFFYGEAPAAMRSICSAFSFLALSLGFYVNSLVVTLVAAVTGRPGWLAPDLNAGHLDYYFWLWTVISVANLLLYMVLAARYTPKQVAAAAVEPGGSSSSSD

SEQ ID NO: 105636 - protein, 159 aa, Setaria italica
  Transcript Sequence Number=SeqID_39662
  Subcellular localization annotation: CTP_CleavageSite=91; ConfidenceScore=5.69e-01
PTATRSKLRSSPSPSALARFLAAGRGLPPSLRIYSRSQPFPVRPPLLPNNQNSGMASRILHARAGASVAARSVRAHGRPILTPSTAYPTLMADAGSCAGTIPAIQGLRHYGTPSNHQNVAELNEALGKVERRLDALEGKCDVGHKPSMKVTIKMLEAWT

SEQ ID NO: 105637 - protein, 76 aa, Setaria italica
  Transcript Sequence Number=SeqID_39663
DGTEVVFCSLCCLCTSPNNVVPPIFGEVHKQHKEQNTTSVPSDDDLLRCLAIRRRGFRPRRHRSPVEDPWGPCRRR

SEQ ID NO: 105638 - protein, 105 aa, Setaria italica
  Transcript Sequence Number=SeqID_39664
  Gene Ontology: Cellular component=integral to membrane
  Homolog annotation: Hit_ID=C0H751; Match level="QueryCoverage=60%, HitCoverage=23%, E-value=3e-13, Identity=65%"; Hit description=60S ribosomal protein L12
  Subcellular localization annotation: CTP_CleavageSite=85; ConfidenceScore=5.31e-01
LMTSAAAEGTTETLACRFWTVSLTVTRRPFQSLAVSLAMSSPIFLGERPSGPILGARDEAAPTSPPVTRTNTSTTCDGSSLGGMAAGEGVAAAGARMISKVNDLQ

SEQ ID NO: 105639 - protein, 95 aa, Setaria italica
  misc_feature (83)..(83): Xaa can be any naturally occurring amino acid
  Transcript Sequence Number=SeqID_39665
  Gene Ontology: Cellular component=integral to membrane
  Homolog annotation: Hit_ID=C0H751; Match level="QueryCoverage=63%, HitCoverage=22%, E-value=2e-10, Identity=63%"; Hit description=60S ribosomal protein L12
  Subcellular localization annotation: CTP_CleavageSite=84; ConfidenceScore=5.19e-01
AAAEGTTETLAWRFWTVSLTVTRRPFQSLAVSLAMSSPIFFGERPSGPILGASDDAAPTSPPVTRTKTSTTCDGSSFGGMAAXAAARVWVGFGRG

SEQ ID NO: 105640 - protein, 41 aa, Setaria italica
  Transcript Sequence Number=SeqID_39666
MSSLQAEGISTSPSSISCCRSLGSLPSTVHPTLTQVPRISL

SEQ ID NO: 105641 - protein, 173 aa, Setaria italica
  misc_feature (14)..(14): Xaa can be any naturally occurring amino acid
  Transcript Sequence Number=SeqID_39667
  Gene Ontology: Cellular component=integral to membrane
  Homolog annotation: Hit_ID=C0H751; Match level="QueryCoverage=58%, HitCoverage=37%, E-value=3e-11, Identity=46%"; Hit description=60S ribosomal protein L12
  Subcellular localization annotation: CTP_CleavageSite=39; ConfidenceScore=5.58e-01
AEGISTSPSSISCXRSLGSLPSTVQPTLTQVPRISLTVPANSLAMDLDLMVLAISMTSSREMLPLCLMFLTFFLSLSGSLSALMTSAAAEGTTETLAWRFWTVSLTVTRRPFQSLAVSLAMSSPIFLGERPSGPILGARDEAAPTSPPVTRTNTSTTCDGFVVFGSVYWFFVR

SEQ ID NO: 105642 - protein, 172 aa, Setaria italica
  misc_feature (158)..(158): Xaa can be any naturally occurring amino acid
  Transcript Sequence Number=SeqID_39668
  Gene Ontology: Cellular component=integral to membrane
  Homolog annotation: Hit_ID=C0H751; Match level="QueryCoverage=59%, HitCoverage=37%, E-value=7e-12, Identity=45%"; Hit description=60S ribosomal protein L12
  Subcellular localization annotation: CTP_CleavageSite=39; ConfidenceScore=5.54e-01
ADGISTSPSSISCCRSLGSLPSTVHPTLTQVPRISLTVPANSLAMDLDLMVLAISMTSSRLMLPLCLMFLTFFLSLSGSLSALMTSAAAEGTTETLAWRFWTVSLTVTRRPFQSLAVSLAMSSPIFFGERPSGPILGASDDAAPTSPPVTRTKTSTTXEGSNLGGMAAACSS

SEQ ID NO: 105643 - protein, 180 aa, Setaria italica
  Transcript Sequence Number=SeqID_39669
  Gene Ontology: Mol. function=sequence-specific DNA binding; Cellular component=nucleus; Biological process=regulation of transcription, DNA-dependent
  Homolog annotation: Hit_ID=B6U600; Match level="QueryCoverage=92%, HitCoverage=54%, E-value=2e-29, Identity=49%"; Hit description =WRKY25-superfamily of TFs having WRKY and zinc finger domains
MAVDLMSCGSAYEHLAFQEAAAAGLRSLELLASSLSPRAAGRAESPPLGEIADQAVSRFRRVINLLDRTGHARFRRAPAVSPAAETTPPASPRPAPPAVAAPPQKNSLTLDFTKPSPAAATKQAAAPAVSATSTSFLSSVTAGGEGSVSKGGSLAVSSGKPPLPKRKHPAASPHNAAPGA

SEQ ID NO: 105644 - protein, 155 aa, Setaria italica
  Transcript Sequence Number=SeqID_39670
  Gene Ontology: Mol. function=two-component response regulator activity; Cellular component=nucleus; Biological process=two -component signal transduction system (phosphorelay)
  Homolog annotation: Hit_ID=Q7XKS9; Match level="QueryCoverage=84%, HitCoverage=35%, E-value=7e-28, Identity=46%"; Hit description =OSJNBa0038P21.2 protein
QVIMMSNETTMDIMKRCIKLGACFLVNKPIDAHTIHNMWRHIDFGNSRMHNIKKSLQGNGEEQDVSYWKESAKTKKGYICWNDYLHRKFLHALEILGEGAASPRNIEILMNVEGVNRKHISSHLQKYRKRMEAGKLNSALDATKCRTSASKSESA

SEQ ID NO: 105645 - protein, 62 aa, Setaria italica
  Transcript Sequence Number=SeqID_39671
GQVLLVAFLGIKGRSDGYVHDGYLALIISVILCVYIYILDFPVHSCIRKDLAYPMSCAEVET

SEQ ID NO: 105646 - protein, 85 aa, Setaria italica
  Transcript Sequence Number=SeqID_39672
  Subcellular localization annotation: CTP_CleavageSite=48; ConfidenceScore=5.16e-01
MPRASFGTALVACLVGKRGIIPPNGPRQAHISEPRQTQNTGFSTAYARSGVGATTHFLVTRSCGTWFQTRPRSLANSIAPNQTVR

SEQ ID NO: 105647 - protein, 131 aa, Setaria italica
  misc_feature (115)..(115): Xaa can be any naturally occurring amino acid
  misc_feature (120)..(120): Xaa can be any naturally occurring amino acid
  Transcript Sequence Number=SeqID_39673
  Gene Ontology: Mol. function=calmodulin binding; Cellular component =integral to membrane; Biological process=cell death
  Homolog annotation: Hit_ID=Q94CG7; Match level="QueryCoverage=77%, HitCoverage=20%, E-value=9e-36, Identity=75%"; Hit description=MLO -like protein 1
  Pfam annotation: Domain name=Mlo; Domain location=5-131; Score= -314.5; E_value=0.00025; Accession=PF03094.7; Description=Mlo family
MAAEGEAAALEYTPTWIVAAVCSIIVLLSLVAERFLHYIGKKLKKKNQKPLYEALLKVKEELMLLGFISLLLTVFQGMIQRTCIPAGWTDHMLPCQRLDVKAGEINATKEHFVLXGIIGXIRRRLLSEGGA

SEQ ID NO: 105648 - protein, 90 aa, Setaria italica
  Transcript Sequence Number=SeqID_39674
LPCTSDVCNWRSAILFFSAKANILVGVLTGSSEALHCFKTLAMHDCRPASAACADEDTPAIFFSQRPRTLEAKACTAPTTSASDILAMLV

SEQ ID NO: 105649 - protein, 174 aa, Setaria italica
  misc_feature (121)..(121): Xaa can be any naturally occurring amino acid
  misc_feature (166)..(166): Xaa can be any naturally occurring amino acid
  Transcript Sequence Number=SeqID_39675
  Gene Ontology: Mol. function=DNA binding; Cellular component =cytoplasm; Biological process=regulation of transcription, DNA -dependent
  Homolog annotation: Hit_ID=B9RVD7; Match level="QueryCoverage=91%, HitCoverage=19%, E-value=2e-43, Identity=53%"; Hit description=WD -repeat protein, putative
  Pfam annotation: Domain name=WD40; Domain location=11-50; Score=47.4; E_value=5.6e-11; Accession=PF00400.24; Description=WD domain, G-beta repeat
NNVVLYDRDTGEEVSTLKGDHEQPVCSLCWSPNGRYLASAGLDRQVLIWDVKSRQDIERQKFDERICSLAWKPDGNSLLLIDVMGRVGIWESVIPSTMKSPTEGIPDLNSTKVPLFDDDDXEDDDEKPCTSGGLEDDIDESLCDSTPFSHKRMKRKSTFDGDSEDXDLIHQLES

SEQ ID NO: 105650 - protein, 187 aa, Setaria italica
  misc_feature (162)..(162): Xaa can be any naturally occurring amino acid
  Transcript Sequence Number=SeqID_39676
  Homolog annotation: Hit_ID=B9RVD7; Match level="QueryCoverage=92%, HitCoverage=22%, E-value=6e-50, Identity=54%"; Hit description=WD -repeat protein, putative
TKVRNLRKDDIDESLCDSTPFSHKRMKRKSTFDGDSEDEDLIHQLESSKRLKDKHKDKKEDAGKARGDSATSGRLVTARMQAAFQPGSTPPQPGMRNFLAYNMLGSITTIENEGHSHVEVDFHDTGRGPRVPSMTDYFGFTMAAMNESGSVFANPCKVDKNXSTLMYRPFGSWAGNSEWSMRFEGKK

SEQ ID NO: 105651 - protein, 166 aa, Setaria italica
  misc_feature (18)..(18): Xaa can be any naturally occurring amino acid
  misc_feature (64)..(64): Xaa can be any naturally occurring amino acid
  Transcript Sequence Number=SeqID_39677
  Gene Ontology: Mol. function=transporter activity; Cellular component= membrane; Biological process=oligopeptide transport
  Homolog annotation: Hit_ID=B6U6P2; Match level="QueryCoverage=90%, HitCoverage=28%, E-value=1e-42, Identity=55%"; Hit description =Peptide transporter PTR2
GSLGLGGFVGLVFVVWVXTQGWDLGFVLSALVALLGAIVLLAGLPFYRHQKPTGSPLTRILQVXVAAFRKRNLSVPDDLMEMHQATQGTGTSIEVLERTSGFKFLDKAAVDDGDTRRWSLCTVTQVEEAKIILRMLPIFLSSVLGYLPIPLLLTFTVQQGGTMDTR

SEQ ID NO: 105652 - protein, 209 aa, Setaria italica
  Transcript Sequence Number=SeqID_39678
CCRGRDWCWNSVPRAVPCPIGPRSPARFDSIRLVPAGGSLLPPPGVASAPHKLGAGVSGRYPLLLDLIRSPAAAPPPPSLLPADPGAISTRAPGSLDDSDRSGTKRAKASSPHRGSCGGGSMAGEKAPRAFSIEELPGHLVGEVLTSGRLAAADLARLEGTCRALRPLAEYAASKLCAARAAFAAMGPAARRGAAGEVPGKLEEGAQVP

SEQ ID NO: 105653 - protein, 158 aa, Setaria italica
  misc_feature (47)..(47): Xaa can be any naturally occurring amino acid
  Transcript Sequence Number=SeqID_39679
  Pfam annotation: Domain name=PMEI; Domain location=4-138; Score=13.7; E_value=0.0012; Accession=PF04043.7; Description=Plant invertasepectin methylesterase inhibitor
TRCASRRSAGRPGEAVPGVSTPRQLLLASMRVAAQKAKEAKARVEAXTGPRSHEGGPMVSIISTCRKGYDDVAQSLEETRALIEAQGTQFVGFNSKVSDALTSASDCDTAFEDFPDIPSPFAAVQKNVFRVVDNVLNIAVVVQQAEAQLPNAHVPQAH

SEQ ID NO: 105654 - protein, 258 aa, Setaria italica
  misc_feature (68)..(68): Xaa can be any naturally occurring amino acid
  Transcript Sequence Number=SeqID_39680
  Gene Ontology: Mol. function=oxidoreductase activity, acting on the CH-OH group of donors, NAD or NADP as acceptor; Cellular component =endoplasmic reticulum membrane; Biological process=isoprenoid biosynthetic process
  Homolog annotation: Hit_ID=Q0DY59; Match level="QueryCoverage=100%, HitCoverage=48%, E-value=1e-111, Identity=78%"; Hit description=3 -hydroxy-3-methylglutaryl-coenzyme A reductase 1
  Pfam annotation: Domain name=HMG-CoA_red; Domain location=1-248; Score=463.0; E_value=4.3e-136; Accession=PF00368.10; Description =Hydroxymethylglutaryl-coenzyme A reductase
NRSSRFGRLQGIRCALGGRNLYIRFTCSTGDAMGMNMVSKGVENVLGYLQNDFPDMNLISLSGNYCSXKKPTAVNWIEGRGKSVVCEATIKGGVVQNVLKTTVQKLIELNIIKNLAGSALAGALGGFNAHASNIVTALFIATGQDPAQNVESSQCITMLEAVNDGDDLHISVTMPSIEVGTIGGGTCLASQAACLNLLGVRGPNRDSPGANAKVLATIVAGSVLAGELSLLAALSAGQLVKSHMKYNRSSKGVASAAS

SEQ ID NO: 105655 - protein, 74 aa, Setaria italica
  misc_feature (9)..(9): Xaa can be any naturally occurring amino acid
  Transcript Sequence Number=SeqID_39681
LHQFAPLRXCIPLHFLSVYHSHRAFNYLIIAFMSSLSGSRYEPKFLVEQYNAQKLFRIKWYGKSLVSSELLFPG

SEQ ID NO: 105656 - protein, 130 aa, Setaria italica
  Transcript Sequence Number=SeqID_39682
  Homolog annotation: Hit_ID=Q5N7R8; Match level="QueryCoverage=100%, HitCoverage=28%, E-value=2e-25, Identity=56%"; Hit description =Myosin heavy chain-like
ANEEHVLVELARIEAEREHREIDAQRRAEAERFAGEVAAARAKVEALREEVGRAREMEEKLAATNADVEVLQFEMELVRAMERNNNAKSGDVAEAEARRKKEEAQDMALLQAAEAELDGAKKELESIKGG

SEQ ID NO: 105657 - protein, 59 aa, Setaria italica
  Transcript Sequence Number=SeqID_39683
TTLGREIMQVVQVRRHELFAYYWVCGSVKCQRYSFCHYAKPQVEDCIWLLVLNILKFKH

SEQ ID NO: 105658 - protein, 143 aa, Setaria italica
  Transcript Sequence Number=SeqID_39684
  Gene Ontology: Mol. function=steroid hormone receptor activity; Cellular component=nucleus; Biological process=regulation of transcription, DNA-dependent
  Homolog annotation: Hit_ID=Q2HU72; Match level="QueryCoverage=69%, HitCoverage=18%, E-value=8e-19, Identity=51%"; Hit description =Steroid nuclear receptor, ligand-binding
NGTIKDQIKAENFTEEEEAYLEKQVLLISDPKRVKENLIRLPSLSEQKQAEIGAFARRLQGITKSISRYPTAKRRFDVLVKSLSEELARTMGGSQSANGSQVRKTRSGIVRMLSQSSLGKTTGIRGDDHEAQITGDVKQLNRI

SEQ ID NO: 105659 - protein, 430 aa, Setaria italica
  Transcript Sequence Number=SeqID_39685
  Gene Ontology: Mol. function=3'-5' exonuclease activity; Cellular component=intracellular; Biological process=nucleobase, nucleoside, nucleotide and nucleic acid metabolic process
  Homolog annotation: Hit_ID=B9RFH0; Match level="QueryCoverage=99%, HitCoverage=75%, E-value=1e-121, Identity=53%"; Hit description=3-5 exonuclease, putative
  Pfam annotation: Domain name=3_5_exonuc; Domain location=223-402; Score=29.7; E_value=4.4e-07; Accession=PF01612.12; Description=3'-5' exonuclease
DILDSVVPHENRIFVKLLETFEIELRDMAYALYGSELDDDLVKAREHLRQYVKCFMESESNAIAVALITRFSIKCCDESFLIKLIESNQLDIAEECATFMGKEMISLVIQKYLDMQMLKSANKLVKEHDLTEEFPDVSYLYKESLVKKLAEKGCWDIAEIRAKKETKLMEYLVYLAMEAGYMEKVDELCQRYSLEGYFHSLVPEKVFCGSDYLDLKKLDVEEIVWVDETNGLLNATSCIEGFKIIGMDCEWRPNFEKNSKPSKVSIIQIASDKIAFIFDLIKLYEDNPKVLDSCFRRIMCSSNILKLGYDIQCDLHQLTQSYGQLECFQSYERLLDMQKLFKWVTGGLSGLSKEILGLGLNKTRRNSNWEQRPLSQKQKEYAALDAVVLVHIFHEHIRRQPQFGVSEGCKAEWKSHVVSVVNSARRPLRF

SEQ ID NO: 105660 - protein, 236 aa, Setaria italica
  Transcript Sequence Number=SeqID_39686
  Gene Ontology: Mol. function=ATP binding
  Homolog annotation: Hit_ID=B9RAZ5; Match level="QueryCoverage=93%, HitCoverage=31%, E-value=2e-63, Identity=54%"; Hit description=Zinc finger protein, putative
  Pfam annotation: Domain name=HATPase_c; Domain location=79-177; Score= 9.6; E_value=0.0081; Accession=PF02518.18; Description=Histidine kinase-, DNA gyrase B-, and HSP90-like ATPase
MQEDVHFRNSAEATTSLSRTQEGSHRVTGFLNTSYAPTVEPFSRQFWKAGEYGVATEAAINTGQNCLRIHPKFLHSNATSHKWAFGAIAELLDNAIDEVNNGATFVKIDKMKHSPDGDYALVIEDNGGGMSPESLRHCMSFGFSQKCTTASIGRYGNGFKTSTMRLGADAIVFTCTKDNRRMTRSVGLLSYTFLTRTKCNDIFVPAVDYEFDASSSTFKRIMNCGRKNIISSNLST

SEQ ID NO: 105661 - protein, 49 aa, Setaria italica
  Transcript Sequence Number=SeqID_39687
GREATTIHYFCNFTMLQCSSGFTEIWRVFMKPFTPIPLIHPLILPLYCL

SEQ ID NO: 105662 - protein, 104 aa, Setaria italica
  Transcript Sequence Number=SeqID_39688
VDKHEDLARKESRGNTRAVSWWSCYLDEHEHITRSQSSEHITETCCDEVKQQHICAFLSWDQKKGAIKKVKSTHQAKQSEAHPPLPSISCTSEQTKGNRPVQKG

SEQ ID NO: 105663 - protein, 213 aa, Setaria italica
  Transcript Sequence Number=SeqID_39689
  Gene Ontology: Mol. function=pyruvate decarboxylase activity
  Homolog annotation: Hit_ID=Q0DHF6; Match level="QueryCoverage=100%, HitCoverage=35%, E-value=1e-121, Identity=94%"; Hit description =Pyruvate decarboxylase isozyme 1
  Pfam annotation: Domain name=TPP_enzyme_C; Domain location=44-184; Score=31.3; E_value=6.2e-09; Accession=PF02775.13; Description =Thiamine pyrophosphate enzyme, C-term
VPDRDPPNGKPDEPLRVNILFKHIKGMLSGDTAVVAETGDSWFNCQKLRLPEGCGYEFQMQYGSIGWSVGATLGYAQAAKDKRVIACIGDGSFQVTAQDVSTMLRCGQRSVIFLINNGGYTIEVEIHDGPYNVIKNWDYTGLVDAIHNSDGNCWTKKVRTEEELKEAIATATGAKKDCLCFIEVIVHKDDTSKELLEWGSRVSAANSRPPNPQ

SEQ ID NO: 105664 - protein, 60 aa, Setaria italica
  Transcript Sequence Number=SeqID_39690
TKIMLYQYNLLRDQPLPKTSEQISKWVAKENAPCYFHQLFLCVTLLAVHFFHTCQNISPA

SEQ ID NO: 105665 - protein, 59 aa, Setaria italica
  Transcript Sequence Number=SeqID_39691
  Gene Ontology: Mol. function=DNA-directed RNA polymerase activity; Cellular component=nucleus; Biological process=regulation of transcription
  Homolog annotation: Hit_ID=Q53LH8; Match level="QueryCoverage=98%, HitCoverage=78%, E-value=4e-22, Identity=89%"; Hit description=DNA -directed RNA polymerase II 8.2 kDa polypeptide, putative, expressed
  Pfam annotation: Domain name=RNA_pol_N; Domain location=1-45; Score =47.7; E_value=4.4e-11; Accession=PF01194.9; Description=RNA polymerases N  8 kDa subunit
LSWDLYLDLLQADYTEGDALDALNLVRYCCRRMLMTHVDLIEKLLNYNTLEKTEDGAAS

SEQ ID NO: 105666 - protein, 124 aa, Setaria italica
  Transcript Sequence Number=SeqID_39692
DSYFYAGCFHDEVPFYPHGAVPPSPELPFGLIASPGEPEPPFAPTAAALQNQNYSVSGPELLLQSMGAGATHVSGGDAHVHTQVFDDTLSGRMGGGLDQDQTMGEEGEDEPRQQRRQEPAGATV

SEQ ID NO: 105667 - protein, 57 aa, Setaria italica
  Transcript Sequence Number=SeqID_39693
SQSDTPRIKHGPSVQFFSLSCFQNFGYDYHKFFSLYILNLASQIINGRCYARYKLVV

SEQ ID NO: 105668 - protein, 366 aa, Setaria italica
  Transcript Sequence Number=SeqID_39694
  Homolog annotation: Hit_ID=Q9S7X5; Match level="QueryCoverage=27%, HitCoverage=21%, E-value=1e-10, Identity=38%"; Hit description =F17A17.7 protein
MKTKKTVKGSSCKKGKLTDGPISKDASEMDPCYKLFLEHLSKDGNTYVLDVPNGDHGMPVSVRYEEDDTSYGNTNGKNGPNSPNGSLHKSWGVPNGKQPGVKAVKATSGNVDHSFSPKRSLVKQKKSSSVDESYELFLRLVKFKDGFMVIEPEPGVTIVYEREEDMPAGYDELRTGTSTNEPEPLMSPLENMEEDYTTYGCEYGLTQANKIASEHEMDGPSSENIDGQDVICTDERGLVLYTEPSDSNACEDEQAAPLAISCSGSSTFDENLNAVLSQPYDQNEYEELWRKATDRKPVSRQRHLRSASKGYVTGAIGLSYLDHYPDLAVQINSADCDERLSLLRKFFFWLENLCHEGAYMPWISKA

SEQ ID NO: 105669 - protein, 687 aa, Setaria italica
  misc_feature (239)..(239): Xaa can be any naturally occurring amino acid
  Transcript Sequence Number=SeqID_39695
MPDNSVKLHEMSSLLMVIRSIQHRVSAKNQNSVRMGDDKNSLKIGTELLQNDSSLSVVVVDGLSSGLSGGLDAHDRQESAHVLVPDSDSLLALAPAESSLSASNFHDINTNKGTAQDGRQIIQGNIKEMINRWEMNNFDLKTVVREALQSGRLPLAVLQLQLLRQRELVSNEDSEDAFSEVHEIGRSIVYDLLMKGKTELAVATLERLGDDVESDLRQLMQGTVRRSLRLQIADEMKSXFIRSSEWKMLETITLIERFYPSSSFWDTYFVRENVIRDAAKIVTLPGEDKPALSLHIRNQPLIECGDVDGTVLGSWVNIDDYTDSKESSGSNISDGYWACAAVWSDAWDQRTVDRILLDQPYHVHAHIPWESQFEYFVGHNDAGKVCELLDMIPNSVLLEGIIRVNVDSLQAADNTVSDLTVPDYNMYICDSEELEPVCMEIPHVKVFRSLYNHESTSYIRMLIQQELAKKHIFVKEYWKSTTEIIPLLARAGMLIKVGPRKEYSTTFSASEMPDDANFQGREGALHKLVIRFCVQYNLPYLLELYLDNCNLAPEKDCIPLLKDAAGDCKWAQWLLFSRIKGLEYEASFSNARWNLSQKMINSSNLTAIEIDEMLYTVDDMAERIGEMSALATLMYASAPIQKSICTGSVNRSRGLPSQCTLENLGPCLQLTFPRYTVKPFYSVFGFG

SEQ ID NO: 105670 - protein, 46 aa, Setaria italica
  Transcript Sequence Number=SeqID_39696
LYLFPLLSIDQFCPMVMNLSRLKWSGKSSQSHLRNVDDASNGRAAF

SEQ ID NO: 105671 - protein, 105 aa, Setaria italica
  misc_feature (72)..(72): Xaa can be any naturally occurring amino acid
  Transcript Sequence Number=SeqID_39697
  Subcellular localization annotation: CTP_CleavageSite=46; ConfidenceScore=5.40e-01
VWFVGCQNDQAGKRTSFVDDSSSTCSSDSVPSVILNGSGGAWTNVRSSSNRYISLVFSPIILLLGIYHAALXFRGNNRRNKDTDTRAGLGQGGPNSVYNGFVGSG

SEQ ID NO: 105672 - protein, 200 aa, Setaria italica
  Transcript Sequence Number=SeqID_39698
  Subcellular localization annotation: CTP_CleavageSite=17; ConfidenceScore=5.43e-01
QATSSSSISNSSDCAPSSSNIRSEIAKLNLNGRSRSRQLLSEISTRFTPYQPQGLVADEFPHLDIINDLLDEEQSERRRVLRPGFAQQFSMPNDASTPDYGLFGEPYLLDQSEPYFDDEPPRFYSPLSSAPRGLRDRSYSHFDLPSYSNSSQFDDLMMNQWQYSSDISMTSFMSDASGYTYQPQDFPVNGVSRYPSLIRA

SEQ ID NO: 105673 - protein, 1119 aa, Setaria italica
  misc_feature (1021)..(1021): Xaa can be any naturally occurring amino acid
  Transcript Sequence Number=SeqID_39699
  Gene Ontology: Mol. function=ubiquitin thiolesterase activity; Cellular component=nucleus; Biological process=ubiquitin-dependent protein catabolic process
  Homolog annotation: Hit_ID=P93826; Match level="QueryCoverage=36%, HitCoverage=35%, E-value=6e-96, Identity=50%"; Hit description =F19P19.26
  Pfam annotation: Domain name=MATH; Domain location=76-193; Score =106.6; E_value=8.7e-29; Accession=PF00917.18; Description=MATH domain
MAGTLIEDNAGDGRSSSTEEMPSDQQSHSGDSLAEWRSSEQVENGTPSTSPAYSDTDDDDCGPRPSELYGKFTWRIDNFSQINKRELRSNSFDVGGFKWYILIYPQGCDVCNHLSLFLCVANHDKLLPGWSHFAQFTIAVINRDPKKSKYSDTLHRFWKKEHDWGWKKFMELSKLNDGFVVEDVLTIKAQVQVIREKADRPFRCLDGQYRRELIRVYLSNVEQICRRFIDERRSKLSRLIEDKLRWSSFSAFWLAMDPSVRRHMTREKTDTILKVLVKHFFIEKEVTSTLVIDSLYSGLKALEYQSKNKKGIPKLTETDARSTPMVLIDQDMFVLADDVIVLLERAALDTLPHQPLPTKDDKSSQNRTKDGSSGEEFNKDSIERDDRRLIELGWKTLELFALAHIFSRIEVAYQEAVALKRQEELIREEEAAGLAEIELKAKRSAAEKEKRAKKKQAKQKKNSRKSNKGKNGKSDIKEILMDSSPSDDRILDDFSGQAEEMSSNADNPEEVSDMSDNRDDNSDALHVDIEERESSPVNWETDASETQATVPGSGEVQNDQAGKRTSFVDDSSSTCSSDSVPSVILNGSGGAWTNVRSSSNRGNNRRNKDTDTRAGLGQGGPNSVYNGFVGSGSNASVNSKDARHESEDDKVVSQRKQHAQRHVDVMSPSKSRMAESSFSSVSPAKKQPNVSQQSTNSSNYRASQASGAVTGTTTAGVSPTPAAQSLSNKGPLSSPATHHEKSFPIASRPLQVPIQSKSEAQKQASLDGSATTQAVTVSRPLSAPQVPAGKQSTPVTSTSQSVPLLSRSMSAVGRLGNEPSANAPSFIPRSRTYRNAMMQTSSAGGSSFTHQPGSSEQGVAHSQPIFTSQPSILSSETLSGKEETSLKPGFTFGTVKPESLNQYQCREQSSQQATSSSSISNSSDCAPSSSNIRSEIAKLNLNGRSRSRQLLSEISTRFTPYQPQGLVADEFPHLDIINDLLDEEQSERRRVLRPGFAQQFSMPNDASTPDYGLTVPNVNPXSNLLDQSEPYFDDEPPRFYSPLSSAPRGLRDRSYSHFDLPSYSNSSQFDDLMMNQWQYSSDISMTSFMSDASGYTYQPQDFPVNGVSRYPSYRPANGH

SEQ ID NO: 105674 - protein, 270 aa, Setaria italica
  Transcript Sequence Number=SeqID_39700
  Gene Ontology: Mol. function=aspartic-type endopeptidase activity; Biological process=proteolysis
  Homolog annotation: Hit_ID=B6TY60; Match level="QueryCoverage=79%, HitCoverage=50%, E-value=7e-66, Identity=59%"; Hit description =Aspartic proteinase Asp1
  Subcellular localization annotation: CTP_CleavageSite=48; ConfidenceScore=5.50e-01
MGVISKGSVASSHYYSRTQSSSTAMAARWTMLAGLLLLLPLLQSASSSSSMVFKLDGNVYPAGHFYVTMNIADPSKPYFLSVDTGSDLTWLECAASNGACERCNKVPHPHYRPGPPSYKVVPCTDPLCDTRHQDLGTTKHCTEPFQCDYTLTYADGSSIGALMTDKFSLPMVKPPNDHPHLAIGCGYDQGVNAGKVTTVDGILGLGPNSVSLVSQLKNHKIITKNVIGHCLSTKGGGFLFFGEESVPSSNVTWVPMAPRTPGKPYSLLTG

SEQ ID NO: 105675 - protein, 233 aa, Setaria italica
  misc_feature (204)..(204): Xaa can be any naturally occurring amino acid
  Transcript Sequence Number=SeqID_39701
  Gene Ontology: Mol. function=RNA-directed DNA polymerase activity
  Homolog annotation: Hit_ID=Q94GP2; Match level="QueryCoverage=94%, HitCoverage=19%, E-value=1e-103, Identity=53%"; Hit description =Putative reverse transcriptase
  Pfam annotation: Domain name=PPR; Domain location=123-157; Score=7.9; E_value=1; Accession=PF01535.12; Description=PPR repeat
  Pfam annotation: Domain name=PPR; Domain location=158-192; Score =25.2; E_value=0.00027; Accession=PF01535.12; Description=PPR repeat
  Pfam annotation: Domain name=PPR; Domain location=18-52; Score=35.6; E_value=2e-07; Accession=PF01535.12; Description=PPR repeat
  Pfam annotation: Domain name=PPR; Domain location=53-87; Score=33.1; E_value=1.1e-06; Accession=PF01535.12; Description=PPR repeat
  Pfam annotation: Domain name=PPR; Domain location=88-122; Score=29.5; E_value=1.4e-05; Accession=PF01535.12; Description=PPR repeat
  Pfam module annotation: Pfam domain module=PPR::PPR::PPR::PPR::PPR; Domain location=123-157::158-192::18-52::53-87::88-122
VDNILDEMRRKGCPPNIITYTIVMHALGKAGRTQEALDTFKKVKQDACTPDASFYNSLIYILGRAGRFQEANFVITEMRRTGISPNLTTFNTLISAACDHSQAENALKQLVQMEEQSCKPDIKTYIPLLKLCCRRQWVKTLLFLICHMFRKDITPDFSTYTLLVSWLCRNGRLAQSCLFLEEMVLKGFAPKQETFDLVLDKLEXMNMHSAIRKIQLLRKQVADNRCKNIERRF

SEQ ID NO: 105676 - protein, 87 aa, Setaria italica
  misc_feature (23)..(23): Xaa can be any naturally occurring amino acid
  Transcript Sequence Number=SeqID_39702
CKPFRDIYYLVTSAAYEPGYWYXLEFLRNFIQHMRMDKPDQDIAVSGIMIGYHLEIYVPPFILFVLNNCDMNSLFLSSSWNRFEESQ

SEQ ID NO: 105677 - protein, 123 aa, Setaria italica
  Transcript Sequence Number=SeqID_39703
  Gene Ontology: Mol. function=voltage-gated anion channel activity; Cellular component=mitochondrial outer membrane; Biological process =anion transport
  Homolog annotation: Hit_ID=Q9SPD7; Match level="QueryCoverage=97%, HitCoverage=43%, E-value=6e-54, Identity=87%"; Hit description=Outer mitochondrial membrane protein porin
  Pfam annotation: Domain name=Porin_3; Domain location=1-119; Score= -47.6; E_value=0.00038; Accession=PF01459.14; Description=Eukaryotic porin
AELQYLHHHAGVAASVGLNANPVVNLSGVFGTKTIAVGADASFDTSSGDLTKYNAGLSYNAGDFVAAATLNNKGDSLAASYYHLVNSTTAVGGELTHSFSSNENTLTFGTQHALDPLTTCCKV

SEQ ID NO: 105678 - protein, 60 aa, Setaria italica
  Transcript Sequence Number=SeqID_39704
EDGKTLTEHNCNLHPVMYKFRNLYVAKIANLFHYIINFLLPLQGSVSQDYVYKVSQSFFQ

SEQ ID NO: 105679 - protein, 72 aa, Setaria italica
  misc_feature (69)..(69): Xaa can be any naturally occurring amino acid
  Transcript Sequence Number=SeqID_39705
IILSDLYTALTWKSETERQVCIKQSYVSYYWILTDLAAMKKLLPMVIHCRHLITNIHILIHHMSFHCPXLQH

SEQ ID NO: 105680 - protein, 104 aa, Setaria italica
  Transcript Sequence Number=SeqID_39706
  Homolog annotation: Hit_ID=Q6ZCP9; Match level="QueryCoverage=60%, HitCoverage=9%, E-value=7e-25, Identity=82%"; Hit description =Pentatricopeptide (PPR) repeat-containing protein-like
MERYKLAAAKRAERHFAGGRTIEHLVERLRDLQDEMQAPYHRILELNRETLAWMMAIDTCFLLDFLEGYHRDETTDMVSSAANWINATVRDAMMIENQLPLCLL

SEQ ID NO: 105681 - protein, 182 aa, Setaria italica
  misc_feature (132)..(132): Xaa can be any naturally occurring amino acid
  misc_feature (152)..(152): Xaa can be any naturally occurring amino acid
  misc_feature (160)..(160): Xaa can be any naturally occurring amino acid
  Transcript Sequence Number=SeqID_39707
LDDAGNCLGGGRPEQKPGAGVRARACAPVDCRKNACSAGPSYTPSPKKHAPAPPTPVPPTPVAKPQTPPNPPAPISSPPVMPAPAPAPVPPPVKSSPPPVPVSSPPPPAPVSSPPPPVKSPPPLAPVSSPPXPVKSPPPPAPVSSPPPPVEXSPPPSAPXVRFTTSTSKITSPPAPVSSPPP

SEQ ID NO: 105682 - protein, 74 aa, Setaria italica
  Transcript Sequence Number=SeqID_39708
LQHTHQSPVTAQLQMEQGNHTSSGSYSYYSAAAPAASLPFDAADGTDDMLLQLDSFLLGTNAIDAEDSSYWLSS

SEQ ID NO: 105683 - protein, 78 aa, Setaria italica
  Transcript Sequence Number=SeqID_39709
GGGRWSWISGFGWSAGGPGDWEPDVPAPRRSAAEAALGVVYELMCLIALSNCTQFAVRRLAGLLAARVAALRFVPTVC

SEQ ID NO: 105684 - protein, 94 aa, Setaria italica
  Transcript Sequence Number=SeqID_39710
  Gene Ontology: Mol. function=mannose-6-phosphate isomerase activity
  Homolog annotation: Hit_ID=Q6ABL0; Match level="QueryCoverage=100%, HitCoverage=23%, E-value=4e-48, Identity=98%"; Hit description =Mannose-6-phosphate isomerase
GEYAQQISPGVGVYHTTFPEFRLWGLEGHNDVLDLPATELGRILLVTEGQLVAYCGTDDCELSRGQSVWLPAGDEVKVTGQGRGFLASAGVGDS

SEQ ID NO: 105685 - protein, 87 aa, Setaria italica
  Transcript Sequence Number=SeqID_39711
  Gene Ontology: Mol. function=nucleotide binding; Cellular component =plasma membrane; Biological process=small GTPase mediated signal transduction
  Homolog annotation: Hit_ID=Q8W4C8; Match level="QueryCoverage=91%, HitCoverage=43%, E-value=2e-39, Identity=97%"; Hit description=ADP -ribosylation factor-like protein
  Pfam annotation: Domain name=Arf; Domain location=7-85; Score=-86.0; E_value=0.0059; Accession=PF00025.13; Description=ADP-ribosylation factor family
MGLWDSLLNWLRSLFFKQEMELSLVGLQNAGKTSLVNAVATGGYSEDMIPTVGFNMRKVTKGNVTIKLWDLGGQRRFRTMCWRVVLL

SEQ ID NO: 105686 - protein, 200 aa, Setaria italica
  Transcript Sequence Number=SeqID_39712
  Gene Ontology: Mol. function=nucleotide binding; Cellular component =plasma membrane; Biological process=small GTPase mediated signal transduction
  Homolog annotation: Hit_ID=Q8W4C8; Match level="QueryCoverage=85%, HitCoverage=92%, E-value=9e-90, Identity=91%"; Hit description=ADP -ribosylation factor-like protein
  Pfam annotation: Domain name=Arf; Domain location=20-196; Score =126.8; E_value=7e-35; Accession=PF00025.13; Description=ADP -ribosylation factor family
  Pfam annotation: Domain name=GTP_EFTU; Domain location=33-198; Score=- 79.3; E_value=0.0037; Accession=PF00009.19; Description=Elongation factor Tu GTP binding domain
  Pfam annotation: Domain name=MMR_HSR1; Domain location=36-148; Score =26.7; E_value=3.4e-06; Accession=PF01926.15; Description=GTPase of unknown function
  Pfam annotation: Domain name=Miro; Domain location=37-148; Score =30.1; E_value=8.8e-06; Accession=PF08477.5; Description=Miro-like protein
  Pfam annotation: Domain name=Ras; Domain location=40-198; Score= -12.1; E_value=2e-08; Accession=PF00071.14; Description=Ras family
  Pfam annotation: Domain name=SRPRB; Domain location=33-172; Score= -73.8; E_value=0.039; Accession=PF09439.2; Description=Signal recognition particle receptor beta su
  Pfam module annotation: Pfam domain module=Arf::GTP_EFTU::MMR _HSR1::Miro::Ras::SRPRB; Domain location=20-196::33-198::36-148::37 -148::40-198::33-172
LSSSILLALKQYILNHYNPTHSSNVLVFSLFFKQEMELSLVGLQNAGKTSLVNAVATGGYSEDMIPTVGFNMRKVTKGNVTIKLWDLGGQRRFRTMWERYCRGVSAILYVVDAADRDSVPIAKSELHDLLMKQSLAGIPLLVLGNKIDKSEALSKQALVDQLGLESIQDREVCCYMISCKDSVNIDVVIDWLIKHSRTAK

SEQ ID NO: 105687 - protein, 117 aa, Setaria italica
  Transcript Sequence Number=SeqID_39713
  Homolog annotation: Hit_ID=B9RAZ9; Match level="QueryCoverage=82%, HitCoverage=28%, E-value=4e-24, Identity=56%"; Hit description =Nucleotide binding protein, putative
LGSCYLGGNADAVEFCPHRPFRHVLAAATYTLQEQEQVRAGTISLFSVDAGAEDESQRLRLLHTVDTAGVFDMKWSPVSPLLAQADAHGRLALRRLEQEDGSDTGIAFTDVCAEDIS

SEQ ID NO: 105688 - protein, 214 aa, Setaria italica
  misc_feature (210)..(210): Xaa can be any naturally occurring amino acid
  Transcript Sequence Number=SeqID_39714
  Homolog annotation: Hit_ID=A2Q4J6; Match level="QueryCoverage=100%, HitCoverage=28%, E-value=2e-71, Identity=46%"; Hit description =Tetratricopeptide-like helical
  Pfam annotation: Domain name=PPR; Domain location=17-51; Score=43.8; E_value=6.6e-10; Accession=PF01535.12; Description=PPR repeat
  Pfam annotation: Domain name=PPR; Domain location=52-86; Score=15.5; E_value=0.13; Accession=PF01535.12; Description=PPR repeat
  Pfam annotation: Domain name=PPR; Domain location=88-122; Score=7.1; E_value=1.3; Accession=PF01535.12; Description=PPR repeat
  Pfam module annotation: Pfam domain module=PPR::PPR::PPR; Domain location=17-51::52-86::88-122
LAEAMLCLYHMPRRSTGTWNAIIAGLGVHGHGAKALDLFSEMQQEGIKPDHVTFVSLLAACSHAGLVDQGRSFFDSMQTVYRIVPIAKHYACMVDMLGRAGQLDEAFEFIQGMPIKPDSAVWGALLGACRIHGNVEMGKLASQNLCELDPENVGYYVLMSNMYAKIGKWDGVDAVRSLVRRQNLQKTPGWSSMEVKGSVSVFYSGTQTEXHPQH

SEQ ID NO: 105689 - protein, 50 aa, Setaria italica
  Transcript Sequence Number=SeqID_39715
EIASLTLSKKRLSPVLFHLLKTPISLPRVLIYFAIRTVHCKHNVKFSKLN

SEQ ID NO: 105690 - protein, 122 aa, Setaria italica
  Transcript Sequence Number=SeqID_39716
  Gene Ontology: Mol. function=ubiquitin-protein ligase activity; Cellular component=intracellular; Biological process=ubiquitin -dependent protein catabolic process
LLLLSPCALGEAAAVALVCVRANGGEAEGAPQFTCKLWAEAASSNESMTMMSSMVGSSSLSAGFSAADQDMFLVVPPEILHDVSGEAPFVMVRIDRAGAAAAAAAASANSTNPPARSSRRTQ

SEQ ID NO: 105691 - protein, 64 aa, Setaria italica
  Transcript Sequence Number=SeqID_39717
LKTTSVVGITLHITTDFLAKVWHNRLTNFFVKNYSPKIMKDLARIYLNTDFFIPLVLGHQIGLY

SEQ ID NO: 105692 - protein, 51 aa, Setaria italica
  misc_feature (1)..(21): Xaa can be any naturally occurring amino acid
  Transcript Sequence Number=SeqID_39718
XXXXXXXXXXXXXXXXXXXXXLKAQNLSYVFRITICIQDNHMFVLSSMYLE

SEQ ID NO: 105693 - protein, 88 aa, Setaria italica
  Transcript Sequence Number=SeqID_39719
HIKPKKPARIFTLLDNPAGNRATSRDVTRAPPIAHMIPRGPTWWLVDASTSPRYRIPPSVRNPAVNILPAYPKPRCTGPHTSVSHLPS

SEQ ID NO: 105694 - protein, 79 aa, Setaria italica
  Transcript Sequence Number=SeqID_39720
  Gene Ontology: Mol. function=protein serine/threonine kinase activity; Biological process=protein amino acid phosphorylation
  Homolog annotation: Hit_ID=Q94CG0; Match level="QueryCoverage=74%, HitCoverage=13%, E-value=2e-10, Identity=59%"; Hit description=CBL -interacting serine/threonine-protein kinase 21
ILNVAQVKLQDSRLLERSIPDLTLLAEVIEVTPVHCIVEVSKSTGDLRAYREFCRSLSSLLNGEQQPGSSSDLEVNKSE

SEQ ID NO: 105695 - protein, 265 aa, Setaria italica
  misc_feature (29)..(29): Xaa can be any naturally occurring amino acid
  Transcript Sequence Number=SeqID_39721
  Gene Ontology: Cellular component=anchored to membrane
  Homolog annotation: Hit_ID=B6ST53; Match level="QueryCoverage=56%, HitCoverage=56%, E-value=2e-78, Identity=93%"; Hit description =Fasciclin-like arabinogalactan protein 7
  Pfam annotation: Domain name=Fasciclin; Domain location=62-194; Score= 97.7; E_value=3.9e-26; Accession=PF02469.14; Description=Fasciclin domain
  Subcellular localization annotation: CTP_CleavageSite=31; ConfidenceScore=5.23e-01
MMGSKAAIFATAVLAVLFSAPALAQKSSXPPAPAPVSLPPSPAPAPAPHYVDLAELLSVAGPFHTFLNYLEKTNVIETFQGQANNTKVGITIFVPKDSAFAALKKSTFSNLTSDQLKTLLLYHAFPNFYSLAEFRNLSSLNPVNTFAGSPYTLNLTDDMGSIYVQSMWSRPKIASSVYATKPVAIYALNKVLLPMQLFSKDPPLAPAPAPAPESGASDAPSPAAGKAGGLNGGKDDSTSTAYKAGAVSVATSLLLAAAGCLMLLW

SEQ ID NO: 105696 - protein, 92 aa, Setaria italica
  misc_feature (48)..(48): Xaa can be any naturally occurring amino acid
  Transcript Sequence Number=SeqID_39722
  Gene Ontology: Mol. function=hydrolase activity
  Homolog annotation: Hit_ID=B9RL97; Match level="QueryCoverage=70%, HitCoverage=14%, E-value=3e-16, Identity=58%"; Hit description =Catalytic, putative
MKERRILIYSFRIPLRGGRDKMLEEDPEGKTHTDLFLQDPLRGGRDKXMLEEISSVIHTGDPNASAHHLVVPVARRLVPEFMLKLAGRVSPF

SEQ ID NO: 105697 - protein, 80 aa, Setaria italica
  Transcript Sequence Number=SeqID_39723
  Gene Ontology: Mol. function=hydrolase activity
  Homolog annotation: Hit_ID=Q9M899; Match level="QueryCoverage=98%, HitCoverage=21%, E-value=8e-20, Identity=58%"; Hit description =F16B3.4 protein
VDALQEHGAKADLFLYEGKTHTVTLLQDPLRGGRDKMLEEIASVIHSEDPNASAHHLVVPVARRLVPEFMLKLAGRVSPF

SEQ ID NO: 105698 - protein, 82 aa, Setaria italica
  Transcript Sequence Number=SeqID_39724
  Subcellular localization annotation: CTP_CleavageSite=40; ConfidenceScore=5.49e-01
AWNFNYVGFMKTEPRFKTNKKPPQQTLLSALRCRFHKSVLACSVQKTLGPSMRTKYYTTNTVHLLHLTSQPKRASEPTPLQN

SEQ ID NO: 105699 - protein, 133 aa, Setaria italica
  Transcript Sequence Number=SeqID_39725
  Gene Ontology: Mol. function=protein serine/threonine phosphatase activity; Cellular component=protein serine/threonine phosphatase complex; Biological process=protein amino acid dephosphorylation
  Homolog annotation: Hit_ID=Q5SN75; Match level="QueryCoverage=90%, HitCoverage=30%, E-value=1e-50, Identity=80%"; Hit description =Probable protein phosphatase 2C 8
GGRVINWNGYRVLGVLATSRSIGDYYLKPYVSAEPEVTVVDRTDQDEFLILASDGLWDVVSNEVACKIARNCLSGRAASKFPESVAGRTAADAAALLTELAMSRGSKDNISVVVVELQRLKRSGGGGGGAGAA

SEQ ID NO: 105700 - protein, 152 aa, Setaria italica
  misc_feature (128)..(128): Xaa can be any naturally occurring amino acid
  Transcript Sequence Number=SeqID_39726
  Homolog annotation: Hit_ID=Q6YUC2; Match level="QueryCoverage=98%, HitCoverage=42%, E-value=7e-11, Identity=36%"; Hit description=F-box protein family-like
LLDDVSFVENGERTFEALIAKCPSLRSLILLFPSIGSDHMHEGNYSDWTIRAPNLKHFIISAWQDYGWRIDDLPLIEEARVHLEGPELPRILPGLSKVKNLSVEITDDTIVERLSYFMNLKDLSLHTXSYTKSSTVLSMFCILRNAPGWEHS

SEQ ID NO: 105701 - protein, 66 aa, Setaria italica
  Transcript Sequence Number=SeqID_39727
  Subcellular localization annotation: CTP_CleavageSite=10; ConfidenceScore=5.05e-01
NRVFFAFSCQGSASVSNSTKNFTAGSRFEGESDAPTNAVLPPFQIAYHFNISKCIDLTMYLAIVHI

SEQ ID NO: 105702 - protein, 56 aa, Setaria italica
  Transcript Sequence Number=SeqID_39728
  Subcellular localization annotation: CTP_CleavageSite=41; ConfidenceScore=5.12e-01
DNRPFSSATTSLGRSWRQQQQYKTRTYRQVHLNHTTHTSFRSLAKRRTHKALISHL

SEQ ID NO: 105703 - protein, 84 aa, Setaria italica
  Transcript Sequence Number=SeqID_39729
  Subcellular localization annotation: CTP_CleavageSite=28; ConfidenceScore=5.44e-01
TLSRKTSRSTFRTYVSSFRSCKVHIKVSCHKIAVVTFLRNTKPRPLTSPNLTTHFQFLLYSMDLYTFVKKSILKYSLHFYLFIC

SEQ ID NO: 105704 - protein, 69 aa, Setaria italica
  Transcript Sequence Number=SeqID_39730
FTASNPKEPSSLPSNPPQNYQHKATFSKSVQHHLTDISWFPHGMWLPLLQKASINLTLFTTGAYLIAFD

SEQ ID NO: 105705 - protein, 61 aa, Setaria italica
  Transcript Sequence Number=SeqID_39731
LRRVQDHDERLKEHACLIVDRCRLFIYIVHSFVRSFVVIIKLAAMCIFDYGFDYSAVSAPL

SEQ ID NO: 105706 - protein, 55 aa, Setaria italica
  Transcript Sequence Number=SeqID_39732
RGQHQHVQVTWTMPSTSLLFCPNEFSVTLFHILCFAVHYGPCRCILPPSLRLIHG

SEQ ID NO: 105707 - protein, 56 aa, Setaria italica
  Transcript Sequence Number=SeqID_39733
LMQLLLVFLCPTLVRRCRDEGQVLEELDWPSDGTAWKVTAANCMLLLLVSCTVRDF

SEQ ID NO: 105708 - protein, 190 aa, Setaria italica
  Transcript Sequence Number=SeqID_39734
  Gene Ontology: Mol. function=ubiquitin thiolesterase activity; Cellular component=integral to membrane; Biological process =ubiquitin-dependent protein catabolic process
MGSRFPSHQLSNGLYVSGRPEQPKEKAPTICSNVMPYTGGDIKKSGELGKMFDLHVEKSRKSGPLGNAPSRNTSFGGAASNSGPVSNSGGRSNYSGSLSSSVPGAGGSARAKSNSGPLNKHGEPTKRSSGPQSGGVTPMARQNSGPLPPVLPTTGLITSGPISSGPLNPSGAPRKVSGPLDSASSMKMRA

SEQ ID NO: 105709 - protein, 366 aa, Setaria italica
  misc_feature (57)..(57): Xaa can be any naturally occurring amino acid
  Transcript Sequence Number=SeqID_39735
  Gene Ontology: Mol. function=transferase activity, transferring phosphorus-containing groups; Cellular component=membrane; Biological process=two-component signal transduction system (phosphorelay)
  Homolog annotation: Hit_ID=Q2ACC1; Match level="QueryCoverage=90%, HitCoverage=34%, E-value=1e-161, Identity=82%"; Hit description =Histidine kinase
  Pfam annotation: Domain name=Response_reg; Domain location=223-355; Score=111.4; E_value=3.1e-30; Accession=PF00072.16; Description =Response regulator receiver domain
VAWITSAVIARTGKWYSANVEPSIEANLFFLLHWLSCTFTFSATLRSSYKDASADSXKSLSEALPTAFKGMKAILVDGRPVRSAVTRYHLKRLGIIVQVVNNMSAGLKALSGQNGSTISREKATMLFIESDFWRPETDVQLLNRLREHKNGQLPDAPKAVLLVTSEADKDKYGFIFDIVMCKPLRASTIASCIQQLLKVEMPERKENQNRPSFLRSLLVGKNILIVDDNKVNLRVAAAALKKYGAKVHCVESGKDAISLLQPPHCFDACFMDVQMPEMDGFEATRQIRQMEMKANEERKNKLASIEGSTFAEYHLPVLAMTADVIQATYEECLKSGMNGYVSKPFDEEQLYQAVSRYVVGTAESVV

SEQ ID NO: 105710 - protein, 134 aa, Setaria italica
  Transcript Sequence Number=SeqID_39736
  Gene Ontology: Mol. function=transition metal ion binding; Cellular component=endoplasmic reticulum membrane; Biological process =electron transport chain
  Homolog annotation: Hit_ID=B6SNI9; Match level="QueryCoverage=100%, HitCoverage=100%, E-value=2e-66, Identity=90%"; Hit description =Cytochrome b5
  Pfam annotation: Domain name=Cyt-b5; Domain location=7-81; Score =101.8; E_value=2.4e-27; Accession=PF00173.20; Description=Cytochrome b5-like HemeSteroid binding doma
MADEKKVFGFEEVAKHNVTKDCWIIIAGKVYDVTPFMDEHPGGDEVLLAVTGKDATADFEDIGHSDSAREMMEKYHIGQIDASTIPAKRTYVNPQQVPRNVDNDSDLLIKILQFLVPILILGLAFGIRQYTKSE

SEQ ID NO: 105711 - protein, 69 aa, Setaria italica
  Transcript Sequence Number=SeqID_39737
AWRMPMGIQVGLGRGHGGGKFTRHMRSLDTTSLISNFLLLVAPSAIIFSCFCKYRDVCTFLLERKIFST

SEQ ID NO: 105712 - protein, 124 aa, Setaria italica
  misc_feature (53)..(53): Xaa can be any naturally occurring amino acid
  Transcript Sequence Number=SeqID_39738
  Gene Ontology: Mol. function=sequence-specific DNA binding; Cellular component=nucleus; Biological process=regulation of transcription, DNA-dependent
  Homolog annotation: Hit_ID=B6U7T4; Match level="QueryCoverage=92%, HitCoverage=28%, E-value=2e-38, Identity=71%"; Hit description =WRKY68-superfamily of TFs having WRKY and zinc finger domains
  Pfam annotation: Domain name=Plant_zn_clust; Domain location=6-29; Score=15.8; E_value=0.018; Accession=PF10533.1; Description=Plant zinc cluster domain
  Pfam annotation: Domain name=WRKY; Domain location=31-122; Score =98.3; E_value=2.6e-26; Accession=PF03106.7; Description=WRKY DNA -binding domain
  Pfam module annotation: Pfam domain module=Plant_zn_clust::WRKY; Domain location=6-29::31-122
MDWIFGYFCRKNRVKRTIRVPAISSKIADIPPDEYSWRKYGQKPIKGSPYPRXIPLPKLHHSRDSPQIILIEQGSDEFYPSPRGYYKCSTVRGCPARKHVERATDDPAMLVVTYEGEHRHTPGA

SEQ ID NO: 105713 - protein, 228 aa, Setaria italica
  Transcript Sequence Number=SeqID_39739
  Gene Ontology: Mol. function=sequence-specific DNA binding; Cellular component=nucleus; Biological process=regulation of transcription, DNA-dependent
  Homolog annotation: Hit_ID=B6U7T4; Match level="QueryCoverage=70%, HitCoverage=54%, E-value=1e-73, Identity=85%"; Hit description =WRKY68-superfamily of TFs having WRKY and zinc finger domains
  Pfam annotation: Domain name=Plant_zn_clust; Domain location=94-137; Score=77.8; E_value=3.9e-20; Accession=PF10533.1; Description=Plant zinc cluster domain
  Pfam annotation: Domain name=WRKY; Domain location=139-199; Score =138.0; E_value=3e-38; Accession=PF03106.7; Description=WRKY DNA -binding domain
  Pfam module annotation: Pfam domain module=Plant_zn_clust::WRKY; Domain location=94-137::139-199
  Subcellular localization annotation: CTP_CleavageSite=12; ConfidenceScore=5.51e-01
ESPAPVASAPVVAAPAAPPAPLPHVAPVSVAQPAPAPQPQSLTLDFTKPNLTMSAATSVTSTSFFSSVTAGEGSVSKGRSLMSAGKPPLSGHKRKPCAGAHSEATANGGSRCHCSKRRKNRVKRTIRVPAISSKIADIPPDEYSWRKYGQKPIKGSPYPRGYYKCSTVRGCPARKHVERATDDPAMLVVTYEGEHRHTPGAAGPSPLATASPVAAAVAASVSAGNGHA

SEQ ID NO: 105714 - protein, 149 aa, Setaria italica
  misc_feature (46)..(46): Xaa can be any naturally occurring amino acid
  Transcript Sequence Number=SeqID_39740
  Gene Ontology: Mol. function=protein serine/threonine kinase activity; Cellular component=integral to membrane; Biological process=protein amino acid phosphorylation
  Homolog annotation: Hit_ID=B9RLU0; Match level="QueryCoverage=88%, HitCoverage=11%, E-value=6e-49, Identity=71%"; Hit description =Brassinosteroid LRR receptor kinase, putative
  Pfam annotation: Domain name=Pkinase; Domain location=4-149; Score= -78.5; E_value=0.00081; Accession=PF00069.17; Description=Protein kinase domain
  Pfam annotation: Domain name=Pkinase_Tyr; Domain location=2-149; Score=-110.4; E_value=2.2e-06; Accession=PF07714.9; Description =Protein tyrosine kinase
  Pfam module annotation: Pfam domain module=Pkinase::Pkinase_Tyr; Domain location=4-149::2-149
DDLVIGRGGYGVVYRGVLPDGRTVAVKRLARPRDGDCEREFRAEMXEVLAGPGWGSAWPHPNLVTLYGWCLSGSAKILVYEYLDGGNLEALIPDTAAFGWARRLDTAIGVARALVFLHHECRPAVVHRDVKASNVLLDRDGRAKVTDFG

SEQ ID NO: 105715 - protein, 78 aa, Setaria italica
  Transcript Sequence Number=SeqID_39741
IVPHSKYTDCSIPNREYKIRKARKMESDNMVVEIGNNQTISYLVQKRKIGQGCCDDLHSCRQERRKKKLRAQSKKYIG

SEQ ID NO: 105716 - protein, 156 aa, Setaria italica
  misc_feature (24)..(24): Xaa can be any naturally occurring amino acid
  misc_feature (54)..(54): Xaa can be any naturally occurring amino acid
  misc_feature (92)..(92): Xaa can be any naturally occurring amino acid
  Transcript Sequence Number=SeqID_39742
  Gene Ontology: Mol. function=nucleic acid binding; Cellular component= membrane
  Homolog annotation: Hit_ID=Q2R3I4; Match level="QueryCoverage=92%, HitCoverage=19%, E-value=3e-22, Identity=37%"; Hit description =Transposable element protein, putative, MuDR
HFYRPRQPRTCYIDYNGTIDCLRXSHVTWQLYSRNGVEEMELSPMCKMDEEYWXFYLPLICFYIVEYHLPNRVMRQFGKLQTCPPEIDRRKXRGAKNWEEKHIHAINAWNLQANNRDYGGTVLRDGLFNQYLDWLKQNTHLKLKVAMDTANIEDLS

SEQ ID NO: 105717 - protein, 172 aa, Setaria italica
  misc_feature (123)..(123): Xaa can be any naturally occurring amino acid
  Transcript Sequence Number=SeqID_39743
  Gene Ontology: Mol. function=galactinol-raffinose galactosyltransferas e activity; Cellular component=cytoplasm
  Homolog annotation: Hit_ID=Q8RW08; Match level="QueryCoverage=100%, HitCoverage=19%, E-value=2e-79, Identity=69%"; Hit description =Stachyose synthase
  Pfam annotation: Domain name=Raffinose_syn; Domain location=1-172; Score=-386.5; E_value=1.6e-06; Accession=PF05691.4; Description =Raffinose synthase or seed imbibition protein Sip1
WFEDPNGDPMGVYWLQGAHMVNCAYNSLWMGQFIRPDWDMFQSDHACAAFHAASRAICGGPVYVSDSLGGHDFELLRRLVFPDGTVPRCLHYALPTRDCLFKNPLFDQQTVLKIWNLNKFGGXIGAFNCQGAGWDPAEHRVRGYSHCYKPVSGEVRTADVEWTQREDTSSMA

SEQ ID NO: 105718 - protein, 61 aa, Setaria italica
  Transcript Sequence Number=SeqID_39744
TSRNARALLQVLTCSHFIIRLFLICWFHFTICWCVVPSNPLFASVVVEDMCGWFDAICLLS

SEQ ID NO: 105719 - protein, 141 aa, Setaria italica
  misc_feature (110)..(110): Xaa can be any naturally occurring amino acid
  Transcript Sequence Number=SeqID_39745
  Gene Ontology: Mol. function=binding; Cellular component=phagocytic vesicle; Biological process=interspecies interaction between organisms
  Homolog annotation: Hit_ID=B6SVF1; Match level="QueryCoverage=96%, HitCoverage=24%, E-value=4e-52, Identity=75%"; Hit description=TPR domain containing protein
  Pfam annotation: Domain name=TPR_1; Domain location=31-65; Score =27.0; E_value=7.5e-05; Accession=PF00515.20; Description =Tetratricopeptide repeat
  Pfam annotation: Domain name=TPR_1; Domain location=5-30; Score=7.6; E_value=0.73; Accession=PF00515.20; Description=Tetratricopeptide repeat
  Pfam annotation: Domain name=TPR_2; Domain location=31-65; Score =25.2; E_value=0.00026; Accession=PF07719.9; Description =Tetratricopeptide repeat
  Pfam module annotation: Pfam domain module=TPR_1::TPR_1::TPR_2; Domain location=31-65::5-30::31-65
NKGLAAYTLLNMNKEAIEDCLRSIEIDPNYSKAYSRLGSAYFALGNYQDALYKGYLKAAELDPSNENVWQNIEVTKKKLAEQQVPPEEQVLSVETTYAFQMEFEMSPTNXNTHAHQAQGSHPMFTSNGIPFNLFPPGSSPS

SEQ ID NO: 105720 - protein, 93 aa, Setaria italica
  Transcript Sequence Number=SeqID_39746
  Homolog annotation: Hit_ID=B6SVF1; Match level="QueryCoverage=100%, HitCoverage=19%, E-value=6e-15, Identity=54%"; Hit description=TPR domain containing protein
  Subcellular localization annotation: CTP_CleavageSite=26; ConfidenceScore=5.59e-01
NTHAHQAQGSHPMFTSNGIPFNLFPPGSSPSPEFFANFINRGSDLGQPPSGHSISINLNDIFGQANVNASGQGSSQTGNSNPPPASVPTGAAV

SEQ ID NO: 105721 - protein, 471 aa, Setaria italica
  Transcript Sequence Number=SeqID_39747
  Gene Ontology: Mol. function=binding; Cellular component=cytoplasm; Biological process=interspecies interaction between organisms
  Homolog annotation: Hit_ID=B6SVF1; Match level="QueryCoverage=100%, HitCoverage=100%, E-value=0.0, Identity=78%"; Hit description=TPR domain containing protein
  Pfam annotation: Domain name=TPR_1; Domain location=185-218; Score =17.6; E_value=0.046; Accession=PF00515.20; Description =Tetratricopeptide repeat
  Pfam annotation: Domain name=TPR_1; Domain location=219-252; Score =39.2; E_value=1.6e-08; Accession=PF00515.20; Description =Tetratricopeptide repeat
  Pfam annotation: Domain name=TPR_1; Domain location=253-287; Score =27.0; E_value=7.5e-05; Accession=PF00515.20; Description =Tetratricopeptide repeat
  Pfam annotation: Domain name=TPR_2; Domain location=185-218; Score =9.7; E_value=2.1; Accession=PF07719.9; Description=Tetratricopeptide repeat
  Pfam annotation: Domain name=TPR_2; Domain location=219-252; Score =25.7; E_value=0.00019; Accession=PF07719.9; Description =Tetratricopeptide repeat
  Pfam annotation: Domain name=TPR_2; Domain location=253-287; Score =25.2; E_value=0.00026; Accession=PF07719.9; Description =Tetratricopeptide repeat
  Pfam module annotation: Pfam domain module=TPR_1::TPR_1::TPR_1::TPR _2::TPR_2::TPR_2; Domain location=185-218::219-252::253-287::185 -218::219-252::253-287
MGNMTRSDSPVSRRIVLSFLDFLNSVELAPGADPEALEVARDCLESIFSVNSSAAGEEIQPGLLLELFSSLEANERDKPRPGLVSQSVSNKPSQSASTSNIEEDSNKCTTSNSGSQVEDTFDLDHSGDELFAKVYAALDEINFFKTSSAGAEDPGQLSKATQYFNEAVLSMQKSGRKKASLVDLAESFKSRGNEFMRSNQHLKAVEQYTCAMALSRKNAIYYCNRAAAYTLLNMNKEAIEDCLRSIEIDPNYSKAYSRLGSAYFALGNYQDALYKGYLKAAELDPSNENVWQNIEVTKKKLAEQQVPPEEQNTHAHQAQGSHPMFTSNGIPFNLFPPGSSPSPEFFANFINRGSDLGQPPSGHSISINLNDIFGQANVNASGQGSSQTGNSNPPPASVPTGAAVPPFAFSGSGNEGNQAHEASSGQEREHGEPGIHINLTGPEQAAEALRTVMQMFGPQMGPHEGTPRGPG

SEQ ID NO: 105722 - protein, 183 aa, Setaria italica
  misc_feature (12)..(12): Xaa can be any naturally occurring amino acid
  Transcript Sequence Number=SeqID_39748
  Gene Ontology: Mol. function=DNA-directed DNA polymerase activity; Cellular component=intracellular
RRRGRSMVSPGXPAGRRQEYSQSSGVGIQDNRALKFGVCVNFNVQSSGAQEWAAESKRLSSIRTSNSTYSGSSHLGPAIIHHEHLEDFKSSNQSSPHSVRQRMAPNSLANRHASVEPAKRHMINRAAAAVSALASVVKDDTKPIKRPNESEVEAHWPNGSKFHASLPKISEVETSLPFDDKAT

SEQ ID NO: 105723 - protein, 90 aa, Setaria italica
  Transcript Sequence Number=SeqID_39749
RAARPWIVFRRGQVEAVNMANDLRAMPSVLNVCAKEGELMKGREIHGRMVRFLAFDSDIAVGNALVDMYAKCGRVDIAWCSCCVSPGQCC

SEQ ID NO: 105724 - protein, 125 aa, Setaria italica
  misc_feature (111)..(111): Xaa can be any naturally occurring amino acid
  Transcript Sequence Number=SeqID_39750
  Gene Ontology: Mol. function=protein serine/threonine kinase activity; Biological process=protein amino acid phosphorylation
  Homolog annotation: Hit_ID=Q2QZL9; Match level="QueryCoverage=96%, HitCoverage=19%, E-value=2e-48, Identity=72%"; Hit description =Protein kinase domain containing protein, expressed
  Pfam annotation: Domain name=Pkinase_Tyr; Domain location=40-121; Score=-175.2; E_value=0.045; Accession=PF07714.9; Description =Protein tyrosine kinase
MDRLKVNVHQDEELELGIEGSNSMFTFFSFSQVLEARKNFSVENKLGQGGFGPVYKGKFPDGLEIAIKRLASHSGQGFREFKNEVRLIAKLQHRNLVRLLGCCSQGRKKFXVYEYLPNKSLDFLS

SEQ ID NO: 105725 - protein, 148 aa, Setaria italica
  Transcript Sequence Number=SeqID_39751
  Gene Ontology: Mol. function=protein serine/threonine kinase activity; Biological process=protein amino acid phosphorylation
  Homolog annotation: Hit_ID=B9SXQ3; Match level="QueryCoverage=81%, HitCoverage=31%, E-value=2e-51, Identity=79%"; Hit description=ATP binding protein, putative
  Pfam annotation: Domain name=Pkinase; Domain location=1-128; Score= -89.8; E_value=0.0038; Accession=PF00069.17; Description=Protein kinase domain
  Pfam annotation: Domain name=Pkinase_Tyr; Domain location=1-127; Score=-154.9; E_value=0.002; Accession=PF07714.9; Description =Protein tyrosine kinase
  Pfam module annotation: Pfam domain module=Pkinase::Pkinase_Tyr; Domain location=1-128::1-127
IQRLEIAIDVAHALTYLHLYAEKTIIHRDVKSSNILLTDSYRAKVSDFGFARSGPSDTEKTHISTIVKGTAGYLDPEYLRTYQLTPKSDVFSFGILLVEILSARRPVELKRTPEERITIRWVCVRNFFCFLYRHNLYTRCQIDTKMEH

SEQ ID NO: 105726 - protein, 61 aa, Setaria italica
  misc_feature (21)..(21): Xaa can be any naturally occurring amino acid
  misc_feature (40)..(40): Xaa can be any naturally occurring amino acid
  Transcript Sequence Number=SeqID_39752
  Gene Ontology: Mol. function=protein serine/threonine kinase activity; Biological process=protein amino acid phosphorylation
  Homolog annotation: Hit_ID=B9SXQ3; Match level="QueryCoverage=90%, HitCoverage=13%, E-value=8e-19, Identity=83%"; Hit description=ATP binding protein, putative
GNERIIITEYVPNGTLREHLXIGQHGRVLDFNQRLEIAIXDVAHALTYLHLYAEKTSWLHA

SEQ ID NO: 105727 - protein, 531 aa, Setaria italica
  Transcript Sequence Number=SeqID_39753
  Gene Ontology: Mol. function=protein serine/threonine kinase activity; Biological process=protein amino acid phosphorylation
  Homolog annotation: Hit_ID=B9SXQ3; Match level="QueryCoverage=69%, HitCoverage=95%, E-value=1e-137, Identity=63%"; Hit description=ATP binding protein, putative
  Pfam annotation: Domain name=APH; Domain location=248-425; Score= -15.2; E_value=0.027; Accession=PF01636.15; Description =Phosphotransferase enzyme family
  Pfam annotation: Domain name=Pkinase; Domain location=245-517; Score =129.3; E_value=1.2e-35; Accession=PF00069.17; Description=Protein kinase domain
  Pfam annotation: Domain name=Pkinase_Tyr; Domain location=245-517; Score=116.3; E_value=1e-31; Accession=PF07714.9; Description=Protein tyrosine kinase
  Pfam module annotation: Pfam domain module=APH::Pkinase::Pkinase_Tyr; Domain location=248-425::245-517::245-517
MSPSALLPALAVFLLCCWPLALASVAETALSRVACGDDQVAVLDASDGLLNLSVNGVLVQDRVLACQKLRLYFGSGCLRCGEVSDGWRGAVKQYCGEGSESSQATSHQNVPRKLLRRPTENGSRNNSGPCGSLGLHENNQDNGDSSENDDHFLAMPGVILLCCGLMLPCFHAERKEASRHDTATIQRNAIESVSSYEVSMSSEKVPPTPHRIPPSPSRFAPSPQVARVGSVNLSIQQILRATQNFSPSFKLGEGGFGMVYRAVLPDGTVVAVKRAKKDQFAGPRDEFSNEVDLLAKIDHRNLVRLLGFTDKGNERIIITEYVPNGTLREHLDGQHGRVLDFNQRLEIAIDVAHALTYLHLYAEKTIIHRDVKSSNILLTDSYRAKVSDFGFARSGPSDTEKTHISTKVKGTAGYLDPEYLRTYQLTPKSDVFSFGILLVEILSARRPVELKRTPEERITIRWTFKKFNEGNMREILDPLLEDHVDDEVLEKLLSLAFQCAAPTRDDRPTMKEVGEQLWEIRKEYGKSIRKV

SEQ ID NO: 105728 - protein, 71 aa, Setaria italica
  Transcript Sequence Number=SeqID_39754
  Gene Ontology: Mol. function=protein serine/threonine kinase activity; Biological process=protein amino acid phosphorylation
  Homolog annotation: Hit_ID=B9SXQ3; Match level="QueryCoverage=90%, HitCoverage=16%, E-value=1e-15, Identity=59%"; Hit description=ATP binding protein, putative
MQTFKKFNEGNMREILDPLLEDHVDDEVLEKLLSLAFQCAAPTRDDRPTMKEVGEQLWEIRKEYGKSIRKV

SEQ ID NO: 105729 - protein, 142 aa, Setaria italica
  Transcript Sequence Number=SeqID_39755
  Gene Ontology: Mol. function=protein serine/threonine kinase activity; Biological process=protein amino acid phosphorylation
  Homolog annotation: Hit_ID=Q5W239; Match level="QueryCoverage=38%, HitCoverage=9%, E-value=6e-19, Identity=85%"; Hit description =Ser/Thr receptor-like kinase
MQHFKSLIFSCKKQTMGRLTFDLHTCRFACQTHCRYAAIENFTIMIKSFVATTQILCYHVPIITTILFSKQVIWSRDTSIPSDCADSSFVFFNSATTSVATFIVLVATALYRSLKKRYNEAIHLKVEMFLKTYGTSKPTRYT

SEQ ID NO: 105730 - protein, 81 aa, Setaria italica
  Transcript Sequence Number=SeqID_39756
  Subcellular localization annotation: CTP_CleavageSite=51; ConfidenceScore=5.52e-01
SLPSTPCGPLASSLLVVFFFFFCRKQLVVRFHYFPGRSLLQKMFEGAGMVSAGAASRLFSQQKNGWLPGRASTALQIAGDK

SEQ ID NO: 105731 - protein, 57 aa, Setaria italica
  Transcript Sequence Number=SeqID_39757
ERATITYITFLVQEIVLLNLILLSSPSFPLQTRYDTLCCHELIAHGVALIAFNTLFT

SEQ ID NO: 105732 - protein, 92 aa, Setaria italica
  Transcript Sequence Number=SeqID_39758
ESNYHLYFCRVVLKEFEDGFSNLILLSWILQHNHLGLSMIFIYFVLDTTHVLVILSISYLYPIVVAYNSGIKVLTSGGWDYCGHWVPPRRPC

SEQ ID NO: 105733 - protein, 93 aa, Setaria italica
  Transcript Sequence Number=SeqID_39759
FCKGCLFYSSVLRSRARGPVCVGVTRALPQVSERMIGEIELEAIQEGRNLSDFKYACVGYSVYLDDKETSMGVPEKKAMHSYLVCVGVELISR

SEQ ID NO: 105734 - protein, 55 aa, Setaria italica
  Transcript Sequence Number=SeqID_39760
MIDFLNYVSVSERMIGEIELEAIQEGRNLSDFKYACVGYSVYLDDKETSMGVRDS

SEQ ID NO: 105735 - protein, 170 aa, Setaria italica
  Transcript Sequence Number=SeqID_39761
  Gene Ontology: Mol. function=nucleoside-triphosphatase activity; Biological process=defense response
  Homolog annotation: Hit_ID=Q69KF7; Match level="QueryCoverage=71%, HitCoverage=10%, E-value=4e-17, Identity=43%"; Hit description =Pollen signalling protein with adenylyl cyclase activity-like
LTSLHIDHVDSLETIQNIPALKELEVRENIKLKMISNLGNLEDLKVVDCLLLDVVQDVPSLRTVHSNERNSTKLPQWLQPGKPFMLRRLEIVGTEELLDRCSSASAPYWPVIQNADHVFAYLPNDDFYFSYAKSSSYFHKSARSLARSSLYSSPSFSMSVVSQAEEVIPA

SEQ ID NO: 105736 - protein, 65 aa, Setaria italica
  Transcript Sequence Number=SeqID_39762
FRYGRNDIIKFVKGDNDDATDAVGRYGFHLEEKESCVYKLMLLACYKRKLKDDQSTIGYVNSMLY

SEQ ID NO: 105737 - protein, 180 aa, Setaria italica
  misc_feature (13)..(13): Xaa can be any naturally occurring amino acid
  Transcript Sequence Number=SeqID_39763
  Gene Ontology: Mol. function=binding; Cellular component=chloroplast
  Homolog annotation: Hit_ID=Q69NX2; Match level="QueryCoverage=99%, HitCoverage=14%, E-value=4e-71, Identity=70%"; Hit description =Putative fanconi anemia, complementation group D2
DESCTDNWSSHSXSAGNPDIPYVVISKSSTATAVCKEILGCYRKLLAFPDLLNQPNMSGLKQLLQNLQPTENFDDILSEFQPSLAPSNVDYLYCGACKMFEDIMDPVRSFSYLLSSDVLITMQSIVNSVVVLLDEPGESNRKNLQIGCSKAIIPFLRKRLGQSAHKLLTANLPSEDAENG

SEQ ID NO: 105738 - protein, 100 aa, Setaria italica
  Transcript Sequence Number=SeqID_39764
HKHRQVGLDHQHMPHHVIALNLTQQRISRLNWDINMYRAQLISNTLCPVGLEDRHKPQTTPTSWQPLNACRHGNSPTATIGPPPPQTSGADRLTKSRTRK

SEQ ID NO: 105739 - protein, 328 aa, Setaria italica
  Transcript Sequence Number=SeqID_39765
  Gene Ontology: Mol. function=starch synthase activity; Biological process=glucan biosynthetic process
  Homolog annotation: Hit_ID=B2Z9Y1; Match level="QueryCoverage=72%, HitCoverage=21%, E-value=1e-46, Identity=47%"; Hit description =Starch synthase IIIa
MVEVELSRNALTNMSLGEVEAVDEAAVEEDKFAVDLSGIELSIAAVCELDPKDEAKAKEDIFMAVESSDETSDVENEQWQYPALPSTSIEDKANNETHGSLKPQSMPLVRVQEQGKSIVGVPEQIQSIVVYRKPDQSIVASHRKDESIAVVPEQIQSVVGYSKPDQSIVGVPDQIKSIVGYSKAEQSVVHIPKEEQSVVGFPKQDLSIVGTTKESQTKKLDFPGSHHAFRTEGVEAKEGDYTPQKPDGDMLHAKSDVDDLLQKHKEDFSEEESETITSIEEQINTSMEEEQCIVTEEGIPEVEDEMETGEDRFLHQLSEEESSWAEDE

SEQ ID NO: 105740 - protein, 134 aa, Setaria italica
  Transcript Sequence Number=SeqID_39766
  Gene Ontology: Mol. function=ATP-dependent helicase activity
  Homolog annotation: Hit_ID=Q5K5B6; Match level="QueryCoverage=100%, HitCoverage=24%, E-value=1e-19, Identity=47%"; Hit description=DEAD -box ATP-dependent RNA helicase 57
  Subcellular localization annotation: CTP_CleavageSite=64; ConfidenceScore=5.30e-01
METSKLSSALFAGTHFNRKRFAADFARFHQGPTPSPAAPSALSPEKKRKRKSGKAKAKNNKKKRAEAAAASSSDVVEGFNVFKGLVGKNDELRSEKVVIGKDEDSVSVRRRKEIGEGNRRGLAVLRKRFDIHIA

SEQ ID NO: 105741 - protein, 76 aa, Setaria italica
  Transcript Sequence Number=SeqID_39767
FFFFTVTISHISYFNHIYILMYKSVYTHSILLVRIISPNKYSIYQYIFRGSVRLLGQYYLWLCQLSLSLPFLSPYL

SEQ ID NO: 105742 - protein, 625 aa, Setaria italica
  Transcript Sequence Number=SeqID_39768
  Gene Ontology: Mol. function=catalytic activity; Biological process =metabolic process
  Homolog annotation: Hit_ID=B9SM57; Match level="QueryCoverage=100%, HitCoverage=100%, E-value=0.0, Identity=68%"; Hit description=Acetyl- CoA synthetase, putative
  Pfam annotation: Domain name=AMP-binding; Domain location=110-540; Score=128.1; E_value=2.9e-35; Accession=PF00501.20; Description=AMP -binding enzyme
MEANGPKLLKSSYKDPISSFSHFYRFSVENQEVYWSMVLKQLALKFQQEPKAILSTSDRSKKGGTWLQGAVLNIAECCLLPCPSLKRTDDSTAIVWRDEGLDDHPVNRMSLKELRSQVIAVANALDTMFQKGDRIAIDMPMTCNAVIIYLAIVLGGFVVVSIADSFAPQEIGTRMGVSKAKAIFTQDFIIRGGKKVPLYSRVVQGTSSKAVVIPANGDYLGVTLRNGDMSWKDFLSRAAGRSSIYSPAYQSVDAITNILFSSGTTGEPKAIPWAQLSPIRCAADTWAHMDVRPEDIGCWPTNLGWVMGPIILYSCFLNGATLALYHGSPLGRDFCKFVQDAGVTVLGTVPSLVKSWKAANCAKGLDWTKIRVLGTTGEASDIDDNLWLTSRTSYKPIVECCGGTELASSYIQGSLLQPQVFGAFSGASMSTGFVILDEQGTPYPDDVPCAGEVGLFPLYFGATNWLLNADHNKVYFDGMPIYKGRQLRRHGDIIQRTVGGYYIVQGRADDTMNLGGIKTSSVEIERVCNRADEGLLETAAVSVKPAGGGPEHLAILAVLKDRSAQYDVNVLKSKFQRAIQKNLNPLFKVSYVKVVPEFPRTASNKLLRRVLRDQLKQELSNHSKL

SEQ ID NO: 105743 - protein, 203 aa, Setaria italica
  Transcript Sequence Number=SeqID_39769
  Homolog annotation: Hit_ID=Q1SN04; Match level="QueryCoverage=100%, HitCoverage=55%, E-value=2e-57, Identity=40%"; Hit description =Tetratricopeptide-like helical
  Pfam annotation: Domain name=PPR; Domain location=153-187; Score =11.0; E_value=0.44; Accession=PF01535.12; Description=PPR repeat
  Pfam annotation: Domain name=PPR; Domain location=16-50; Score=43.6; E_value=7.5e-10; Accession=PF01535.12; Description=PPR repeat
  Pfam annotation: Domain name=PPR; Domain location=51-84; Score=17.8; E_value=0.045; Accession=PF01535.12; Description=PPR repeat
  Pfam annotation: Domain name=PPR; Domain location=87-121; Score=15.6; E_value=0.13; Accession=PF01535.12; Description=PPR repeat
  Pfam module annotation: Pfam domain module=PPR::PPR::PPR::PPR; Domain location=153-187::16-50::51-84::87-121
GCRHWPFSGLPERGVVSWSAMIGGLAQHGQGKRSLELFHRMLDEGVAPNHITLTSVLSACNHAGLVDEAKKYFESMKEMFGIDRTEEHYSCMIDLLGRAGKLEDAMELVNNMPFEANAAVWGALLGASRVHQDPELGRLAAEKLFTLEPEKSGTHVLLANTYASAGMWDEVAKVRKLMKESNLKKEPAMSWVEMKDKVHTFQL

SEQ ID NO: 105744 - protein, 157 aa, Setaria italica
  misc_feature (13)..(13): Xaa can be any naturally occurring amino acid
  misc_feature (48)..(48): Xaa can be any naturally occurring amino acid
  Transcript Sequence Number=SeqID_39770
  Gene Ontology: Cellular component=nuclear chromosome
  Homolog annotation: Hit_ID=Q3BCU1; Match level="QueryCoverage=98%, HitCoverage=24%, E-value=8e-38, Identity=61%"; Hit description =Cohesion protein
DFIRSTKISDLMXCPPVALMSYLDKSSSELYYPKPLVQLWKECTAVNXQKTSSSAGQPPSSQEKQPRNSTPHEFPPQTEGEYEMETGPHPMDFTDGIEKLRGNVSAEYDRAYNTLHSDHSVTPGSPGLSRRSGSSSGGSGQGFIPLDPEVQLPSSGS

SEQ ID NO: 105745 - protein, 49 aa, Setaria italica
  Transcript Sequence Number=SeqID_39771
LIGIKSDYIFLKNILSMYISLLETSPKNLHQDSSHTSDNRNRVRLPVTG

SEQ ID NO: 105746 - protein, 180 aa, Setaria italica
  Transcript Sequence Number=SeqID_39772
  Gene Ontology: Mol. function=oxidoreductase activity, acting on CH-OH group of donors
  Homolog annotation: Hit_ID=Q8W5N7; Match level="QueryCoverage=93%, HitCoverage=22%, E-value=8e-53, Identity=61%"; Hit description =Putative alcohol oxidase
  Pfam annotation: Domain name=GMC_oxred_N; Domain location=98-180; Score=-93.4; E_value=0.034; Accession=PF00732.11; Description=GMC oxidoreductase
RRRRLSPSRPLDVGVVETRLLDDNALLRSLVGRGLTVKPVASDANHHVVQCDAVIVGSGCGGGVAAAVLASAGYKVVVVEKGDYFTASDYSSIEGPSMERLFERGGIFCTSNVTTMIFTGATVGGGSAVNWSASIRTPKEVTQEWAREHGLPVFASPGYAQAMDAVCARLSVTDGCREEG

SEQ ID NO: 105747 - protein, 131 aa, Setaria italica
  misc_feature (26)..(26): Xaa can be any naturally occurring amino acid
  misc_feature (33)..(33): Xaa can be any naturally occurring amino acid
  Transcript Sequence Number=SeqID_39773
  Homolog annotation: Hit_ID=Q7XV34; Match level="QueryCoverage=40%, HitCoverage=14%, E-value=2e-10, Identity=67%"; Hit description =OSJNBa0086B14.25 protein
SASRLDHAVEATVEVVISEVQGGFNXMRLGCFXSEFDEEIQLFDGTIGEPRCLTRYVIAVVIGTQMDMKFKVGAGSFRSSEHCCSFTAHNHGHDDQLIETDFALISVKVTWSVLPGGWSSDFMQALLKSWA

SEQ ID NO: 105748 - protein, 205 aa, Setaria italica
  Transcript Sequence Number=SeqID_39774
  Gene Ontology: Mol. function=nucleotide binding; Cellular component =endoplasmic reticulum lumen; Biological process=response to stress
  Homolog annotation: Hit_ID=B9S3M9; Match level="QueryCoverage=85%, HitCoverage=19%, E-value=9e-57, Identity=62%"; Hit description=Heat shock 70 kDa protein, putative
MAQPRTWGILLAVLVAAAVAVPPATAAVASIDLGSEWVKVAAVHLAPGRVPIAVAINEMSKRKSPALAALADGNRLAGEEAAGITARHPSKVFARARDLLAKPFPYVKTFAESLFLPYDLVPDTRGAAAVRGDDGQVYSVEEIVAMVLHYAAGLADAHVGAPVRDAVVAVPPYFGQAERRALTQAAQLAGINVLALINEHAGAAL

SEQ ID NO: 105749 - protein, 47 aa, Setaria italica
  Transcript Sequence Number=SeqID_39775
  Gene Ontology: Mol. function=potassium ion transmembrane transporter activity; Cellular component=membrane; Biological process=potassium ion transport
  Homolog annotation: Hit_ID=Q84MS4; Match level="QueryCoverage=100%, HitCoverage=5%, E-value=1e-15, Identity=82%"; Hit description =Potassium transporter 27
ARPHSSLLKKIVVNYLYSFLRKNSRNGEKMMSIPRRQVLKVGISYEI

SEQ ID NO: 105750 - protein, 85 aa, Setaria italica
  misc_feature (1)..(19): Xaa can be any naturally occurring amino acid
  Transcript Sequence Number=SeqID_39776
XXXXXXXXXXXXXXXXXXXVVMKSERQITPRSEFKFHNNFSIEQVNKDTDCTEEPHQLLLLYSIFEVESDKSKGNPEDSMTMMVN

SEQ ID NO: 105751 - protein, 124 aa, Setaria italica
  Transcript Sequence Number=SeqID_39777
  Gene Ontology: Mol. function=zinc ion binding; Cellular component =intracellular
  Homolog annotation: Hit_ID=B6TH99; Match level="QueryCoverage=68%, HitCoverage=24%, E-value=9e-30, Identity=75%"; Hit description=B-box zinc finger family protein
  Pfam annotation: Domain name=zf-B_box; Domain location=31-78; Score =48.2; E_value=3.2e-11; Accession=PF00643.16; Description=B-box zinc finger
ALCARCDRDVHAANRLAGKHRRLPLHPPAAASAPACDICQESHAYFFCVEDRALLCRSCDVVVHTANAFVSVHRRFLLTGVQVGLQPDAQDPEQPHPPTAAASAAPAPAAPLPTPLPPPAKKAP

SEQ ID NO: 105752 - protein, 199 aa, Setaria italica
  Transcript Sequence Number=SeqID_39778
  Gene Ontology: Mol. function=protein serine/threonine kinase activity; Biological process=protein amino acid phosphorylation
  Homolog annotation: Hit_ID=Q84ZH4; Match level="QueryCoverage=97%, HitCoverage=28%, E-value=3e-85, Identity=74%"; Hit description =Putative receptor kinase Lecrk
  Pfam annotation: Domain name=Pkinase; Domain location=2-167; Score= -83.4; E_value=0.0016; Accession=PF00069.17; Description=Protein kinase domain
  Pfam annotation: Domain name=Pkinase_Tyr; Domain location=1-167; Score=-160.9; E_value=0.005; Accession=PF07714.9; Description =Protein tyrosine kinase
  Pfam module annotation: Pfam domain module=Pkinase::Pkinase_Tyr; Domain location=2-167::1-167
KDIASGLLYLHEEWEKVVIHRDIKASNVLLDSGMNGRLGDFGLARLYNHGTDPQTTHVVGTIGYLAPELARTSKATPLTDVFAFGTFILEVTCGRRPIFQDASDKQVMLVDWVLEHWREGTLVDTVDANLRGDFIVSEACLVLELGLMCSHPFVNARPSMRQVVQYLSKEVPLPELIPTNMSFHMLALTQNQGFDSYIR

SEQ ID NO: 105753 - protein, 50 aa, Setaria italica
  Transcript Sequence Number=SeqID_39779
LDGKQIMINPSLANKLIVNVAPFSNHGLIRLKYLSHKLDCAISFVIKIMD

SEQ ID NO: 105754 - protein, 51 aa, Setaria italica
  Transcript Sequence Number=SeqID_39780
ACLIDPWSLCSTADRGRCVKTTVRVVLAGIRLHESGAAPPTTRLLSDRFNS

SEQ ID NO: 105755 - protein, 139 aa, Setaria italica
  Transcript Sequence Number=SeqID_39781
  Gene Ontology: Cellular component=chloroplast
  Homolog annotation: Hit_ID=B4W2T4; Match level="QueryCoverage=94%, HitCoverage=77%, E-value=2e-32, Identity=53%"; Hit description =Conserved domain protein
  Pfam annotation: Domain name=DUF1817; Domain location=1-131; Score =263.5; E_value=4.9e-76; Accession=PF08847.3; Description=Domain of unknown function (DUF1817)
AADARNLLDRTVGFTINYEREDEYDTRELSEFPDIRLWFVRLDAAYPWFPVVLDWRAGELARYAAMLVPHQMSMRLGVVFNPEALELFVMKKVFAVDAWLKQQNHPKPRLKTADMGRMLGYGIGDELFDLIEKYPVHRS

SEQ ID NO: 105756 - protein, 63 aa, Setaria italica
  Transcript Sequence Number=SeqID_39782
LHSWTETFNLIHYVSGYAILQLEVTRFSPLLIVVVSVSRVKKPGVLLLVWELYSAWESIDLRV

SEQ ID NO: 105757 - protein, 165 aa, Setaria italica
  Transcript Sequence Number=SeqID_39783
  Homolog annotation: Hit_ID=B9S0A4; Match level="QueryCoverage=95%, HitCoverage=12%, E-value=1e-20, Identity=41%"; Hit description =ATSMC2, putative
IDNVLQRKIHELENDKVELELHISRLEDEKIELSESISGMEAELTNLTSEYESCIVQMDDSRTLIIDLKDKVQWQQAELEAQKVELKQKHLAFQKRFSEVQEDSETLKRLNAKLQAKVDNLVEECSSLQALTADLKKQKLELHSCATQLEQELEHSKRRPQYFCK

SEQ ID NO: 105758 - protein, 102 aa, Setaria italica
  Transcript Sequence Number=SeqID_39784
RWMHAARPALWKGSMKSEPAQWAARLPIYVHSPVAFVKKKKKKEKKQGVRMKKIVPTSSIYLPIAITLIFFREVHSEYKSLFPRNGTGSIRNLQQGCALVVN

SEQ ID NO: 105759 - protein, 250 aa, Setaria italica
  misc_feature (82)..(82): Xaa can be any naturally occurring amino acid
  misc_feature (106)..(106): Xaa can be any naturally occurring amino acid
  Transcript Sequence Number=SeqID_39785
  Gene Ontology: Mol. function=protein serine/threonine kinase activity; Cellular component=plasma membrane; Biological process =protein amino acid phosphorylation
  Homolog annotation: Hit_ID=B9SRU2; Match level="QueryCoverage=99%, HitCoverage=28%, E-value=5e-57, Identity=49%"; Hit description =Kinase, putative
  Pfam annotation: Domain name=Pkinase; Domain location=4-235; Score= -84.7; E_value=0.0019; Accession=PF00069.17; Description=Protein kinase domain
  Pfam annotation: Domain name=Pkinase_Tyr; Domain location=1-235; Score=-46.3; E_value=1.2e-10; Accession=PF07714.9; Description =Protein tyrosine kinase
  Pfam module annotation: Pfam domain module=Pkinase::Pkinase_Tyr; Domain location=4-235::1-235
CLPWAVHRACEFFAEIETMSKIQHHHIVPLIGHCYKKNEMILVYEYMTRNSLTHSMYNIYKAFLTWKRRLEICIGVARALHXLHSLRIIHCNVATVDILLDLKWVXKISNLGLCKAGPSTDEMPVGGCLGMVDPDYQRIGRLTEKSDVYCFGAVMLEVLCGQPMVERVPPKEFNVWIYGKLQLMRAGKLHQVVDTCLFKTIADPRSCIKFVVIADKCVSDRGIDRPSMGDVISELECALQLQVSAEASGR

SEQ ID NO: 105760 - protein, 241 aa, Setaria italica
  Transcript Sequence Number=SeqID_39786
  Gene Ontology: Mol. function=inositol or phosphatidylinositol phosphatase activity
  Homolog annotation: Hit_ID=Q10RG0; Match level="QueryCoverage=100%, HitCoverage=35%, E-value=1e-128, Identity=92%"; Hit description=Type I inositol-1,4,5-trisphosphate 5-phosphatase CVP2, putative, expressed
  Pfam annotation: Domain name=Exo_endo_phos; Domain location=1-193; Score=62.9; E_value=1.2e-15; Accession=PF03372.15; Description =EndonucleaseExonucleasephosphatase family
RGLMGYLGNKGSISISMLLHQTSFCFVCSHLTSGQKDGDEHRRNSDVMEILRKTRFPRVCGQYERCPETILEHDRIIWLGDLNYRIALSYRSVKALVEMRNWKALLEKDQLRSEQRGGRVFPGWNEGRIYFPPTYKYSNNSDKYAGDDINHKEKKRTPAWCDRILWYGRGLSQLSYVRGESRFSDHRPVYSMFSAEVESINHSRIQKMSSWSSQLDMEELLPYSYGYTEINHYGYTDLNFF

SEQ ID NO: 105761 - protein, 150 aa, Setaria italica
  misc_feature (135)..(135): Xaa can be any naturally occurring amino acid
  misc_feature (139)..(139): Xaa can be any naturally occurring amino acid
  Transcript Sequence Number=SeqID_39787
MAEAAVRYLRDGRLDGEHAPALSVEGSLQCCPLAAGAMLHVAAALTSQAAAGKAQARGLVVVAFDRSPEVYLEFMRRRGLDANYLNRCVRILDCYSDPLGWKQKIQNQQHQENSTKQFSTNKENVAVFRNVKVVXKLMXSITELGGGFEG

SEQ ID NO: 105762 - protein, 128 aa, Setaria italica
  misc_feature (15)..(15): Xaa can be any naturally occurring amino acid
  Transcript Sequence Number=SeqID_39788
  Gene Ontology: Mol. function=carboxylesterase activity; Cellular component=cytoplasm; Biological process=fatty acid metabolic process
  Homolog annotation: Hit_ID=Q7XR64; Match level="QueryCoverage=100%, HitCoverage=56%, E-value=4e-52, Identity=80%"; Hit description =OSJNBa0043A12.21 protein
  Pfam annotation: Domain name=Abhydrolase_2; Domain location=1-120; Score=-45.7; E_value=0.00021; Accession=PF02230.8; Description =PhospholipaseCarboxylesterase
ADGIHPDNIFVCGFXSQGGALTLASVLLYPKKLGGGAVFSGWVPFGSSVTERISPEARKTPILWSHGIADRTVLFEAGQAGPPFLQKAGVSCEFKAYPDLGHSLSKEELLYLESWIKSHLSASQEKDN

SEQ ID NO: 105763 - protein, 75 aa, Setaria italica
  Transcript Sequence Number=SeqID_39789
PCPAQRSALGGPLHHQAHNPCEAAAHKLQALQQDCKPFCTPNSSKKKLHLQTIHMVMKNGAHLLLLSCLSYLFLK

SEQ ID NO: 105764 - protein, 213 aa, Setaria italica
  misc_feature (200)..(200): Xaa can be any naturally occurring amino acid
  Transcript Sequence Number=SeqID_39790
  Gene Ontology: Mol. function=translation initiation factor activity; Cellular component=eukaryotic translation initiation factor 3 complex; Biological process=translational initiation
  Homolog annotation: Hit_ID=B9T020; Match level="QueryCoverage=99%, HitCoverage=34%, E-value=5e-46, Identity=51%"; Hit description =Eukaryotic translation initiation factor 3 subunit, putative
  Pfam annotation: Domain name=eIF-3c_N; Domain location=1-213; Score= -283.8; E_value=1.6e-05; Accession=PF05470.4; Description=Eukaryotic translation initiation factor 3 s
KMNSSNSKALNSMKQNLKKNNKQYAELILKCRENPECFYKEGANDKGKDDSDDEYDSDPDVDINRLASDKREDNNHRYGQNEEPLNKITDKDNPMDKQFSKDPSEITWEIVDKKLKEIVASRGKKGTGRVERVDQLMFLSHVAKTPSQKLKVLCHVISAQFDINPSLLGHMPINVWKICANNILLVLDILQQYPNIVIDXLVEPAEKETCNGA

SEQ ID NO: 105765 - protein, 179 aa, Setaria italica
  Transcript Sequence Number=SeqID_39791
  Gene Ontology: Mol. function=hydrolase activity, hydrolyzing O -glycosyl compounds; Cellular component=anchored to membrane; Biological process=carbohydrate metabolic process
  Homolog annotation: Hit_ID=B6TL03; Match level="QueryCoverage=45%, HitCoverage=38%, E-value=2e-29, Identity=76%"; Hit description =Glucan endo-1,3-beta-glucosidase 4
  Pfam annotation: Domain name=X8; Domain location=107-179; Score=91.2; E_value=3.5e-24; Accession=PF07983.5; Description=X8 domain
GRVKVSSAVSAETLTAPAWSGVAGHVLRFLSSAGAPLFLKSPSSEASDAKADAAYGAMRALGVPGVPVIAADLGATGGVEAAPYYYYSYPGGKSSERGKRRSLATGTFCVALQNADPAALQAGLNWACGSGHADCSAIQPGGPCYSQNNLPALASYAYNDYYQKMSSTGATCSFNGTAT

SEQ ID NO: 105766 - protein, 226 aa, Setaria italica
  Transcript Sequence Number=SeqID_39792
  Gene Ontology: Mol. function=transferase activity; Cellular component= cytoplasm; Biological process=aromatic amino acid family metabolic process
  Homolog annotation: Hit_ID=B6TYS6; Match level="QueryCoverage=98%, HitCoverage=99%, E-value=1e-115, Identity=87%"; Hit description =Glutathione S-transferase zeta class
  Pfam annotation: Domain name=GST_C; Domain location=115-209; Score =22.7; E_value=0.00046; Accession=PF00043.17; Description=Glutathione S-transferase, C-terminal domain
  Pfam annotation: Domain name=GST_N; Domain location=11-86; Score =72.1; E_value=2e-18; Accession=PF02798.12; Description=Glutathione S- transferase, N-terminal domain
  Pfam module annotation: Pfam domain module=GST_C::GST_N; Domain location=115-209::11-86
MAEMEATATAGRPRLYSYWRSSCSHRVRIALNFKGVDYEYKAVNLLKGEQSDPEFVRLNPMKFVPALIDDDAVIGDSYAIALYLEDKYPNPPLLPQDPKKKALNHQIANIVSSGIQPLHNLSVLRFIEQKVGAGEGVLWTQQQIERGFTAIENLIQLKGCAGKYATGDEVQLADVFLAPQIFAAIERTKIDMSNYPTIARLHAEYMAHPAFQAALPGRQPDVPSSS

SEQ ID NO: 105767 - protein, 295 aa, Setaria italica
  misc_feature (154)..(154): Xaa can be any naturally occurring amino acid
  misc_feature (249)..(249): Xaa can be any naturally occurring amino acid
  Transcript Sequence Number=SeqID_39793
  Gene Ontology: Mol. function=nucleic acid binding; Cellular component= cytoplasm; Biological process=multicellular organismal development
  Homolog annotation: Hit_ID=Q69UP6; Match level="QueryCoverage=95%, HitCoverage=26%, E-value=6e-94, Identity=61%"; Hit description =Protein argonaute 18
  Pfam annotation: Domain name=Piwi; Domain location=93-295; Score =88.6; E_value=2.2e-23; Accession=PF02171.9; Description=Piwi domain
SKPRTSSLTPSVKKVVDGARVRNWVCINFCHDLHMNIVHKFCSDLVGWSCTTGLNMDNLRLPIFTARPDQVEADLRMRYQDARNKLGGQKIDLLLAILPEKNGSLYGNFKRICETEIGIMSQCCLGKFVTSARAPYFANVAIKINAKLGGRNTXFANPQQSLPVVSSEPTIIFGADVTHPAALDDTAPSIASVVASQDWPNVAKYNGVVRAQGHRQELIDGLEDIVKELLRAFEQGSRRRPKQLIFYRXDGVSEGQFKQVLEQEIPEIEKAWKALYNEKPQITFIVVQKRHHTRL

SEQ ID NO: 105768 - protein, 84 aa, Setaria italica
  Transcript Sequence Number=SeqID_39794
MVRTARLSSIPSGSEDNRAPPPPPPPPPSLEAILAAQTELLRHIVQGQQHQPQGGRGHQQPQIARYEDFLGTQPPLFHKTEDPL

SEQ ID NO: 105769 - protein, 116 aa, Setaria italica
  Transcript Sequence Number=SeqID_39795
  Gene Ontology: Mol. function=nucleic acid binding; Cellular component= cytoplasm; Biological process=multicellular organismal development
  Homolog annotation: Hit_ID=Q69UP6; Match level="QueryCoverage=97%, HitCoverage=10%, E-value=1e-28, Identity=52%"; Hit description =Protein argonaute 18
LTKLGSDQRPNYLPMEVCKIVPGQQYQKKLESQQVSKLMDSICLHPSVREGNICQVVKHNDYNGTERANEFGLEVDYQPTSVQARVLPAPTLRYYGTGSDSICNPNGGHWNMINKV

SEQ ID NO: 105770 - protein, 154 aa, Setaria italica
  Transcript Sequence Number=SeqID_39796
  Gene Ontology: Mol. function=electron carrier activity; Biological process=metabolic process
  Homolog annotation: Hit_ID=B6STR0; Match level="QueryCoverage=100%, HitCoverage=41%, E-value=2e-78, Identity=89%"; Hit description =Oxidoreductase
  Pfam annotation: Domain name=GFO_IDH_MocA_C; Domain location=10-123; Score=40.3; E_value=7.7e-09; Accession=PF02894.9; Description =Oxidoreductase family, C-terminal alphabeta domain
MHHPRTAKMRELVGDKDAIGDIKVINSVFGFRANEDFLQNDIRVKPDLDALGALGDVGWYCIRAILWAVDYELPRTVIALRDPVKNRAGVLLACGATLYWADGKTATFNCSFLTNLTMDITLVGTNGTLHVTDFVIPYEEKSAEFSVASKSSFA

SEQ ID NO: 105771 - protein, 184 aa, Setaria italica
  Transcript Sequence Number=SeqID_39797
  Gene Ontology: Mol. function=electron carrier activity; Biological process=metabolic process
  Homolog annotation: Hit_ID=B6STR0; Match level="QueryCoverage=84%, HitCoverage=42%, E-value=2e-81, Identity=90%"; Hit description =Oxidoreductase
  Pfam annotation: Domain name=GFO_IDH_MocA_C; Domain location=1-91; Score=10.8; E_value=0.084; Accession=PF02894.9; Description =Oxidoreductase family, C-terminal alphabeta domain
SSLVTFRYCPLGRRLRYALGALGDVGWYCIRAILWAVDYELPRTVIALRDPVKNRAGVLLACGATLYWADGKTATFNCSFLTNLTMDITLVGTNGTLHVTDFVIPYEEKSAEFSVASKSSFANLHIGWDPLPSKHVVATDLPQEALMVQELARLVQSIRDAGGKPEGKWPAITRKTQVGCLVLL

SEQ ID NO: 105772 - protein, 300 aa, Setaria italica
  Transcript Sequence Number=SeqID_39798
  Gene Ontology: Mol. function=hydrolase activity; Cellular component =cell wall
  Homolog annotation: Hit_ID=B6SZE9; Match level="QueryCoverage=100%, HitCoverage=78%, E-value=1e-147, Identity=83%"; Hit description =Catalytic/ hydrolase
  Pfam annotation: Domain name=Abhydrolase_1; Domain location=49-291; Score=22.0; E_value=9.4e-05; Accession=PF00561.12; Description =alphabeta hydrolase fold
MRDGRYLAYAESGVSRDRARFKVVYSHGFSGGRMDSPRASQELLEELGVYMVAFDRAGYGESDPDPRRSLRSAALDIEDLADALGLGEKFHLICSSLGTHAGWAAIRYIPHRLAGVAMMAPVVNYRWRGLPRGLARRLYRAQPAGDQWSLRVAYYAPWLLHWWMSQPWLPTSTVIDGSGSFPNELDEKNRVMALSNGMFHQRARLATQQGIQESFYRDMAVMFGRWPEFEPMDLEEPPFPVHVFQGDEDGVVPVQLQRHICRRLGWVNYHELPGVGHFQSAVPGLGDRIVSTLLTAPASA

SEQ ID NO: 105773 - protein, 134 aa, Setaria italica
  misc_feature (45)..(45): Xaa can be any naturally occurring amino acid
  misc_feature (85)..(85): Xaa can be any naturally occurring amino acid
  Transcript Sequence Number=SeqID_39799
  Gene Ontology: Mol. function=zinc ion binding; Cellular component =intracellular
  Homolog annotation: Hit_ID=B6TSS5; Match level="QueryCoverage=100%, HitCoverage=91%, E-value=1e-63, Identity=95%"; Hit description=Zinc finger protein
  Pfam annotation: Domain name=zf-RanBP; Domain location=110-134; Score= 13.3; E_value=0.028; Accession=PF00641.10; Description=Zn-finger in Ran binding protein and others
  Pfam annotation: Domain name=zf-RanBP; Domain location=54-82; Score =26.4; E_value=0.00012; Accession=PF00641.10; Description=Zn-finger in Ran binding protein and others
  Pfam annotation: Domain name=zf-RanBP; Domain location=6-35; Score =18.8; E_value=0.0054; Accession=PF00641.10; Description=Zn-finger in Ran binding protein and others
  Pfam module annotation: Pfam domain module=zf-RanBP::zf-RanBP::zf -RanBP; Domain location=110-134::54-82::6-35
MNIQRKPGDWNCKNCQHLNFSRRDYCQRCRDPRPDLQFSDGYSTXGVLTSLDIRPGDWYCSCGYHNFASRSSCFKCGTIVRDFPXGQGAAGAEGDFARGRDSAAVRAGWKAGDWICTRPGCNVHNFASRTECYR

SEQ ID NO: 105774 - protein, 163 aa, Setaria italica
  Transcript Sequence Number=SeqID_39800
  Gene Ontology: Cellular component=chloroplast
  Homolog annotation: Hit_ID=B9SEN6; Match level="QueryCoverage=100%, HitCoverage=85%, E-value=3e-31, Identity=36%"; Hit description =Pentatricopeptide repeat-containing protein, putative
  Pfam annotation: Domain name=PPR; Domain location=130-163; Score =19.0; E_value=0.02; Accession=PF01535.12; Description=PPR repeat
  Pfam annotation: Domain name=PPR; Domain location=60-94; Score=42.6; E_value=1.6e-09; Accession=PF01535.12; Description=PPR repeat
  Pfam annotation: Domain name=PPR; Domain location=95-129; Score=11.4; E_value=0.4; Accession=PF01535.12; Description=PPR repeat
  Pfam module annotation: Pfam domain module=PPR::PPR::PPR; Domain location=130-163::60-94::95-129
SACGHGQAVDRGRWVYDQLSEYGIEADVDIGNALISMYMKCGCMSDALEAFKVMPSRNTKSWNTLIDGFVQNQKHKEALTMFEEMLSNDFNPDAVTLVSVLSACTQLGYLQQGRNLHSYIKSRRISCDTILTNSLINMYAKCGDMVAAEVVFQAMKQRDVVSW

SEQ ID NO: 105775 - protein, 184 aa, Setaria italica
  Transcript Sequence Number=SeqID_39801
LAHESVRLWFKSCVNPSCFDRVLGFRREARGAVPVRSEGSQLGFLCAALCSIFSPRRSASAATSFLSLIDFACCNSGFRSVAVLVCRSSILAVQCLVLPTHQLACRSLHLSFHRFRRAAAAQALPFLYSHCSRDWLSAIFFVIHFSAVQSSSRVCLLLYRLAKAVAQLLRLFEQFLNESNFTRQ

SEQ ID NO: 105776 - protein, 331 aa, Setaria italica
  Transcript Sequence Number=SeqID_39802
  Gene Ontology: Mol. function=nucleotide binding; Cellular component =nucleus; Biological process=defense response
  Homolog annotation: Hit_ID=Q2QRC5; Match level="QueryCoverage=94%, HitCoverage=44%, E-value=8e-37, Identity=36%"; Hit description=NB -ARC domain containing protein
ICRRTLHLIPQCLDLSAISNLFLLRYLRARGFRNLKLPEKIGKLQNLMTLDLGDSEVVCAIPLDVTSLSSLRHLTVPRGAVLPDGIGKLITLRTLEEFDLGKNSMQNIKYLGELTNLMELQLRHEDSGIFQPLTHMERRKYEVLAVSLCKIGNSNLRSLVAHPGVSLGCVLNCSLTHPRCLRRLHLDSCCPTFPKWMAQAVRLTSLILEVEELCSEDVHVLAGLPCLTYLDLGAAKAPNRSIMIQINSNEFSCLKEFKFKYHILLLSFEPGAMPTLQSLDLTFSGGSVIGIEHLASLEEISVYLKALPCDLSKIRSEISDALDRHPRNHTV

SEQ ID NO: 105777 - protein, 61 aa, Setaria italica
  misc_feature (46)..(46): Xaa can be any naturally occurring amino acid
  misc_feature (50)..(50): Xaa can be any naturally occurring amino acid
  Transcript Sequence Number=SeqID_39803
FTTHAAFCFCKRMHCIKCNILSQCYLRCSEMKCSYPLLATKKKKKXKKKXKKKTKETRNRE

SEQ ID NO: 105778 - protein, 114 aa, Setaria italica
  Transcript Sequence Number=SeqID_39804
  Subcellular localization annotation: CTP_CleavageSite=57; ConfidenceScore=5.82e-01
KITSPPTPMSSPPPPANTLPPPTPVTSPPPPNKSPPPPAPVSSPPPPVKSPPPPAPVSSPLPPVISPPPPVPMSSPPPPVVPSPPPPPALEDVILPPILAQKYASPPPPQFQGY

SEQ ID NO: 105779 - protein, 124 aa, Setaria italica
  Transcript Sequence Number=SeqID_39805
  Gene Ontology: Cellular component=plasma membrane
  Homolog annotation: Hit_ID=Q94DT9; Match level="QueryCoverage=100%, HitCoverage=34%, E-value=2e-35, Identity=61%"; Hit description=Tubby- like F-box protein 2
  Pfam annotation: Domain name=Tub; Domain location=1-124; Score= -110.5; E_value=0.005; Accession=PF01167.10; Description=Tub family
TFHLYLSLTQALTGQGKFLLAARRNRCGFRMEYIISTQGDLSHGSHVGKLKSNFTRTKFTVYDWQPQYEGAKVSSSRCRRWLASKQINPLASSGIVDIGEVSYEYNLLKSRGPRRIHCSIQCPA

SEQ ID NO: 105780 - protein, 95 aa, Setaria italica
  Transcript Sequence Number=SeqID_39806
DSDSDEETAVPHSLMSDWVITTWSNSKMSTSWDDWIKDCEAKASHTTIQSKPKSKMLNSGLLSPEGANQVRALQNLWVSHPAPGINDDVVYLGNT

SEQ ID NO: 105781 - protein, 85 aa, Setaria italica
  Transcript Sequence Number=SeqID_39807
IIGGLDYLVLMNYYHLLIPLLAVLQFSLSLLGAADQCSLCLLATAVQVRTACAQKILWCSRFKKVASNDISTCFLVSMRCCTFAF

SEQ ID NO: 105782 - protein, 119 aa, Setaria italica
  misc_feature (58)..(58): Xaa can be any naturally occurring amino acid
  Transcript Sequence Number=SeqID_39808
VRALQNLWVSHPAPGINDDVVYLLARVRFRDPKAFVIALDARKNVLLGSAEFATERNXGDGVMYFPSNISKYIAPEARVLPITKGTALIKYCSCKLNPAPRYGSGSTKMSSKLMRIPDH

SEQ ID NO: 105783 - protein, 178 aa, Setaria italica
  Transcript Sequence Number=SeqID_39809
LIGSGGLVLLGGCGKSLRGIAVINQSLRFVHLEAIVSTTFKTLPTDSDSDEETAVPHSLMSDWVITTWSNSKMSTSWDDWIKDCEAKASHTTIQSKPKSKMLNSGLLSPEGANQVRALQNLWVSHPAPGINDDVVYLLARVRFRDPKAFVIALDARKNVLLGSAEFATEKKRGDGVKL

SEQ ID NO: 105784 - protein, 56 aa, Setaria italica
  Transcript Sequence Number=SeqID_39810
  Homolog annotation: Hit_ID=B6SXG0; Match level="QueryCoverage=100%, HitCoverage=47%, E-value=9e-15, Identity=89%"; Hit description=EARLY flowering 4 protein
LIRELNNNIRRVVDLYADLSSLFAASDGGRAASEGGSVGTVRQAGAGHKRIRSGLD

SEQ ID NO: 105785 - protein, 93 aa, Setaria italica
  Transcript Sequence Number=SeqID_39811
VLNKGQIFLIRAIYPLNLFHLLGGLIIKNPMLMASLGYKPNILEELCDVHQLVHRTHKRKCPSMVLSFNRRYSFLVRVGLKTRSHCTTGFIAS

SEQ ID NO: 105786 - protein, 65 aa, Setaria italica
  Transcript Sequence Number=SeqID_39812
  Subcellular localization annotation: CTP_CleavageSite=58; ConfidenceScore=5.53e-01
PVNNFIMQLGSKRRRSSAAFLTSGRSPLQAMQFTFTYCSKHKQMITRQLSLITTLLTVASNNKAT

SEQ ID NO: 105787 - protein, 187 aa, Setaria italica
  Transcript Sequence Number=SeqID_39813
  Homolog annotation: Hit_ID=B6TFP1; Match level="QueryCoverage=20%, HitCoverage=15%, E-value=1e-10, Identity=84%"; Hit description=RNA -binding protein 12
  Subcellular localization annotation: CTP_CleavageSite=17; ConfidenceScore=5.02e-01
MSSCIIVVVLAVAAAVMAAARPSEAARTTAAPAASSDADADALRFPGRPGSSRPRSPIFPGFPGARPSPPTSSSGTPSSRSSPAPVSGGVPSAPPCPRPAAPSVSGFPFVPGFPGLPGGGVGGSTPSSSPTECVTPLAALMTCGSFLTGSEQDTPTPQSECCSGLGAFREPPPPRRGTADPGPVPGR

SEQ ID NO: 105788 - protein, 46 aa, Setaria italica
  Transcript Sequence Number=SeqID_39814
  Homolog annotation: Hit_ID=B6TFP1; Match level="QueryCoverage=100%, HitCoverage=19%, E-value=2e-17, Identity=93%"; Hit description=RNA -binding protein 12
MMYLPIACGVVLPPQVLYICFTGQQTPPLVGRIPDVWEKPSAALSP

SEQ ID NO: 105789 - protein, 174 aa, Setaria italica
  Transcript Sequence Number=SeqID_39815
  Gene Ontology: Mol. function=lipid binding; Biological process=lipid transport
  Homolog annotation: Hit_ID=B6TFP1; Match level="QueryCoverage=68%, HitCoverage=50%, E-value=6e-55, Identity=85%"; Hit description=RNA -binding protein 12
  Pfam annotation: Domain name=Tryp_alpha_amyl; Domain location=56-148; Score=29.7; E_value=1.1e-05; Accession=PF00234.14; Description =Protease inhibitorseed storageLTP f
  Subcellular localization annotation: CTP_CleavageSite=60; ConfidenceScore=5.03e-01
QRRPASRAPELEVIAGASSARRAVGAALSQGSAVLGAGLPPGLPGGGSTPSSPTECVTPLAALMTCGSFLTGSEQDTPTPQSECCSGLGAFLNTTSAAGDGDRTLRCLCPVILGDVNKMLPKPLDPVRMMYLPIACGVVLPPQVLYICFTGQQTPPLVGRIPDVWEKPSAALSP

SEQ ID NO: 105790 - protein, 122 aa, Setaria italica
  misc_feature (113)..(113): Xaa can be any naturally occurring amino acid
  Transcript Sequence Number=SeqID_39816
  Gene Ontology: Mol. function=phosphotransferase activity, phosphate group as acceptor; Cellular component=cytosol; Biological process =nucleobase, nucleoside, nucleotide and nucleic acid metabolic process
  Homolog annotation: Hit_ID=Q08480; Match level="QueryCoverage=99%, HitCoverage=49%, E-value=8e-62, Identity=94%"; Hit description =Adenylate kinase B
  Pfam annotation: Domain name=ADK; Domain location=33-122; Score =111.2; E_value=3.4e-30; Accession=PF00406.14; Description=Adenylate kinase
MAANLEDVPSLDLMHELLRRMKCSSKPDKRLILIGPPGSGKGTQSPLIKDEYCLCHLATGDMLRAAVAAKTPLGIKAKEAMDKGELVSDDLVVGIIDEAMKKPSCQKGFILDXFPRTVTQAQ

SEQ ID NO: 105791 - protein, 61 aa, Setaria italica
  Transcript Sequence Number=SeqID_39817
  Gene Ontology: Mol. function=phosphotransferase activity, phosphate group as acceptor; Biological process=nucleobase, nucleoside, nucleotide and nucleic acid metabolic process
  Homolog annotation: Hit_ID=Q08480; Match level="QueryCoverage=60%, HitCoverage=16%, E-value=1e-09, Identity=75%"; Hit description =Adenylate kinase B
LNPAACCLTVLQQCFCELNNFYWTDCFHQVIDYYSKKGMVANLHAEKPPKEVTAEVQKALS

SEQ ID NO: 105792 - protein, 87 aa, Setaria italica
  Transcript Sequence Number=SeqID_39818
FKTTNKRWKTQKVHEDDYKYMRGASKLKDDSDKIKASPTKSLKDFMQNCSIVNYTKYIIAEKCQLRNRILVHLDNKKNIYKETSSIT

SEQ ID NO: 105793 - protein, 102 aa, Setaria italica
  Transcript Sequence Number=SeqID_39819
  Gene Ontology: Mol. function=phosphotransferase activity, phosphate group as acceptor; Cellular component=mitochondrial intermembrane space; Biological process=nucleobase, nucleoside, nucleotide and nucleic acid metabolic process
  Homolog annotation: Hit_ID=Q08480; Match level="QueryCoverage=97%, HitCoverage=40%, E-value=3e-50, Identity=94%"; Hit description =Adenylate kinase B
  Pfam annotation: Domain name=ADK; Domain location=1-80; Score=-71.6; E_value=0.0089; Accession=PF00406.14; Description=Adenylate kinase
  Pfam annotation: Domain name=ADK_lid; Domain location=16-51; Score =85.9; E_value=1.4e-22; Accession=PF05191.6; Description=Adenylate kinase, active site lid
  Pfam module annotation: Pfam domain module=ADK::ADK_lid; Domain location=1-80::16-51
QIRIDDAILEERITGRWIHPSSGRSYHTKFAPPKVPGVDDVTGEPLIQRKDDTAEVLKSRLEAFHRQTEPVIDYYSKKGMVANLHAEKPPKEVTAEVQKALS

SEQ ID NO: 105794 - protein, 275 aa, Setaria italica
  Transcript Sequence Number=SeqID_39820
  Gene Ontology: Mol. function=phosphotransferase activity, phosphate group as acceptor; Cellular component=mitochondrial intermembrane space; Biological process=nucleobase, nucleoside, nucleotide and nucleic acid metabolic process
  Homolog annotation: Hit_ID=Q08480; Match level="QueryCoverage=86%, HitCoverage=97%, E-value=1e-129, Identity=93%"; Hit description =Adenylate kinase B
  Pfam annotation: Domain name=ADK; Domain location=67-253; Score =339.1; E_value=8.3e-99; Accession=PF00406.14; Description=Adenylate kinase
  Pfam annotation: Domain name=ADK_lid; Domain location=189-224; Score =75.0; E_value=2.8e-19; Accession=PF05191.6; Description=Adenylate kinase, active site lid
  Pfam module annotation: Pfam domain module=ADK::ADK_lid; Domain location=67-253::189-224
KCVSASAQQSPNPIHPPSSDSPSSREARRELEAAMAANLEDVPSLDLMHELLRRMKCSSKPDKRLILIGPPGSGKGTQSPLIKDEYCLCHLATGDMLRAAVAAKTPLGVKAKEAMDKGELVSDDLVVGIIDEAMKKPSCQKGFILDGFPRTVVQAQKLDEMLAKQGTKVDKVLNFAIDDAILEERITGRWIHPASGRTYHTKFAPPKALGVDDVTGEPLIQRRDDTAEVLKSRLEAFHRQTEPVIDYYSKKGLVANLHAEKPPKEVTVEVQKALS

SEQ ID NO: 105795 - protein, 60 aa, Setaria italica
  Transcript Sequence Number=SeqID_39821
  Homolog annotation: Hit_ID=A7YJG7; Match level="QueryCoverage=96%, HitCoverage=7%, E-value=9e-14, Identity=65%"; Hit description=ELF3 protein
TVYSQQRVFAVQVFELHRLIKVQKLIAASPHLLIEGDPCLDKALAASKKKLAGGDAEKQH

SEQ ID NO: 105796 - protein, 147 aa, Setaria italica
  misc_feature (60)..(60): Xaa can be any naturally occurring amino acid
  Transcript Sequence Number=SeqID_39822
  Homolog annotation: Hit_ID=A7YJG7; Match level="QueryCoverage=71%, HitCoverage=16%, E-value=2e-28, Identity=57%"; Hit description=ELF3 protein
LSSSTKLRRGKGHINGVEHNDDLSDSSVESLPEMEISPDDVVSAIGPKHFWKARRAIVKXQKLIAASPHLLIEGDPCLDKALAASKKKLAGGDAEKQHQSAKYKDDVQQTLQQLEHSKDNTEADQPSPTQDDVVAVQHNNQAAATAA

SEQ ID NO: 105797 - protein, 685 aa, Setaria italica
  misc_feature (496)..(496): Xaa can be any naturally occurring amino acid
  Transcript Sequence Number=SeqID_39823
  Gene Ontology: Cellular component=nucleus; Biological process =regulation of transcription, DNA-dependent
  Homolog annotation: Hit_ID=A7YJG7; Match level="QueryCoverage=95%, HitCoverage=88%, E-value=0.0, Identity=58%"; Hit description=ELF3 protein
  Subcellular localization annotation: CTP_CleavageSite=47; ConfidenceScore=5.64e-01
PAPPWHAHRPAPGAATSAVPSTSASQAGGSDRPLFPSYCVPSTEPVRSSDHMNANSNGRAGNATRTESGRLSTHLKSKDTNAAGLTAECSSKHRENTTKNSSGKKLTNDDDFTVPSVLYSGIPPHSTQEKFTPFPTKSPYKSMPAMYKSSAKCSNTDRTHLEGMKVSDAISMGSPGIKEKEPTKVRIDLEIEERTSSFQTSKEKSGRLDPKVSSYRDKLNKYNVADKQSSEIASYQTRNRKENAGETQNPPEAEMAPSAKPYAGMEQNGNSDLLELGLRETGEKRKRSHHGVEHNDDLSDSSVESLPEMEISPDDVVSAIGPKHFWKARRAIVNQQRVFAVQVFELHRLIKVQKLIAASPHLLIEGDPCLDKALAASKKKLAGGDAEKQHQSAKYKDDVQQTLQQLEHSKDNTEADQPSPTQDDVVAVQHNNQAAATAAVNSNPPTMPTPSDNKQNSWCIPPPPNQWLVPVMSPSEGLVYKPYAGHCPPAGSFLAXPFYPSCAPVSLPSTAGDFMSSPYGIPMPHQPQHMGVPGPPPPMPPMYFPPFSMPVMNTAVSASAVEQVSHVAASRPNGHIEQHSRSSCNMSNLRSEALSADIWRFHASKDSELQGSSASSTFDRQQGEGRGPAQPFPSSSVGNGQPQPSSGSRENPGRVIRVVPHTSRTASESAARIFESIKMERQQND

SEQ ID NO: 105798 - protein, 342 aa, Setaria italica
  misc_feature (311)..(311): Xaa can be any naturally occurring amino acid
  Transcript Sequence Number=SeqID_39824
  Gene Ontology: Mol. function=protein dimerization activity; Cellular component=endoplasmic reticulum lumen; Biological process=proteolysis
  Homolog annotation: Hit_ID=B6T417; Match level="QueryCoverage=94%, HitCoverage=74%, E-value=1e-144, Identity=75%"; Hit description=IAA -amino acid hydrolase ILR1
  Pfam annotation: Domain name=M20_dimer; Domain location=126-228; Score=36.2; E_value=1.3e-07; Accession=PF07687.6; Description =Peptidase dimerisation domain
  Pfam annotation: Domain name=Peptidase_M20; Domain location=17-334; Score=204.7; E_value=2.5e-58; Accession=PF01546.20; Description =Peptidase family M20M25M40
  Pfam module annotation: Pfam domain module=M20_dimer::Peptidase_M20; Domain location=126-228::17-334
VVATIVGGGGAATPVVALRADMDALPLQELVDWEYKSQENGKMHACGHDAHTTMLLGAAKLLQDCKDDFKGTIKLVFQPAEEGYGGAYYILQEGSLDDVSAIFGLHVNPDVPLGVVSSRPGPFAATATRFLATVNGKGGHAAGPHQSIDPVVAASTAILSLQQIVAREIDPLQGTVVSITFVKGGEAYNVIPESVTFGGTLRSMTNEGLLYLKKRIEEIVEGQSVVHHCTATVDFMEDKMRPYPAVINDEVMYAHAKSVAQSFLGEENVKVSSPVMCSEDFGFYAQRMAGAFFNIGSHNKSTMTTVHPPHXPHFVLGEYVLPVGAAFHAAVAMEYLKKHASI

SEQ ID NO: 105799 - protein, 162 aa, Setaria italica
  misc_feature (142)..(142): Xaa can be any naturally occurring amino acid
  Transcript Sequence Number=SeqID_39825
  Gene Ontology: Mol. function=phosphoenolpyruvate carboxylase activity; Cellular component=cytoplasm; Biological process=carbon utilization by fixation of carbon dioxide
  Homolog annotation: Hit_ID=P29193; Match level="QueryCoverage=98%, HitCoverage=16%, E-value=3e-81, Identity=91%"; Hit description =Phosphoenolpyruvate carboxylase, housekeeping isozyme
RQESDRHTDVMDAITEYLGIGSYREWPEEKRQEWLLSELNGKRPLFGPDLPKSDEIADVLETFHVLAELPSDSFGAYVISMATAPSDVLAVELLQRECHVKRPLRVVPLFEKLADLEGAPAALARLFSVDWYRNRISGKPRXVMIGYSDSGKDAGSFSSSLV

SEQ ID NO: 105800 - protein, 72 aa, Setaria italica
  Transcript Sequence Number=SeqID_39826
IQALNSLERLIQFQKPDPATDRFNSSLENIVHWLTNTKTIFSSQLSREENGIRAIGTASLSNSVVEHFNQCV

SEQ ID NO: 105801 - protein, 99 aa, Setaria italica
  Transcript Sequence Number=SeqID_39827
  Subcellular localization annotation: CTP_CleavageSite=47; ConfidenceScore=5.68e-01
DPLTGEKAFSRNPTSVSKTKAKRTSNPSMRTHSTGWSSGANKIVRSRASLNSQRAQVELDPERIYWLPPYLLLLCLDVADRDADGAKRGDEGDETEHHK

SEQ ID NO: 105802 - protein, 48 aa, Setaria italica
  Transcript Sequence Number=SeqID_39828
KNPSTETTFFTSQRLQPSFLQFSALEKTQAPRQPFHKNLTTWISVHLG

SEQ ID NO: 105803 - protein, 242 aa, Setaria italica
  Transcript Sequence Number=SeqID_39829
  Gene Ontology: Mol. function=heat shock protein binding; Cellular component=nucleus; Biological process=protein folding
  Homolog annotation: Hit_ID=Q9SLR6; Match level="QueryCoverage=40%, HitCoverage=17%, E-value=8e-30, Identity=61%"; Hit description=AHM1
  Subcellular localization annotation: CTP_CleavageSite=27; ConfidenceScore=5.81e-01
LPPPVSPPPRPTPPPISPPPRRTPPLVASPSRATRRPVAPQTRSAPLPAAPSPVARPTPQPPVASQTQPNLPLPPAPQTPIPATVPAVLSGAAPSSTFWTVCSACCHIHQYDHQYETRKLRCRSCCQTFVAEAMAEPPPIVPGTDMYYCTWGFFPVGFPGCPGFERMANSQPRGPDQLNAPWLGGTDGMKGKTRDNAESGVPPVSAPEVEVPAVTPPAKPMRVKVGAKKRGRPKGSKNKKKL

SEQ ID NO: 105804 - protein, 176 aa, Setaria italica
  Transcript Sequence Number=SeqID_39830
  Gene Ontology: Mol. function=peptidyl-prolyl cis-trans isomerase activity; Biological process=protein folding
  Homolog annotation: Hit_ID=B6SH56; Match level="QueryCoverage=93%, HitCoverage=38%, E-value=8e-45, Identity=60%"; Hit description=FK506- binding protein 39 kDa
NRTVLPTFSQATLSNCDAAGRTVLQCNVGNKIPIKLCSLNPKLAEMCRLEIELEEVDDVVFSVIGQSSIHLSGYYVRASSRSNVGDDESESYGEDIGQSDTDEEHDANEDSYESDFIDDRDVIDVSDDEFSSPHGRKQKACEKKTCKAERRRHLKKKYQVDSTDDNDDGSPVMKPA

SEQ ID NO: 105805 - protein, 82 aa, Setaria italica
  Transcript Sequence Number=SeqID_39831
RDAFPKLRILRLQQFRTCSLTREVTFEQSTSPNMETIYIKNYLLTLGINGIENLPKLKEVYIEGSILAKQDMLKEEAGRHMN

SEQ ID NO: 105806 - protein, 72 aa, Setaria italica
  Transcript Sequence Number=SeqID_39832
RDDMLFSTAIQYSKTADRSCHQKTQKYLPACISVSLKNPGDSKSPLNGECTPVQTHYIVKYDCLVKLITLKL

SEQ ID NO: 105807 - protein, 65 aa, Setaria italica
  Transcript Sequence Number=SeqID_39833
FEQMSLHRAFPGTFCNVMVEHSYVPAATTNIMQLCYFFKISFCSVPLVFVFGTCRCQTSIVLGAV

SEQ ID NO: 105808 - protein, 198 aa, Setaria italica
  misc_feature (18)..(18): Xaa can be any naturally occurring amino acid
  misc_feature (22)..(22): Xaa can be any naturally occurring amino acid
  Transcript Sequence Number=SeqID_39834
  Gene Ontology: Mol. function=alpha-N-arabinofuranosidase activity; Biological process=L-arabinose metabolic process
  Homolog annotation: Hit_ID=Q2RAZ2; Match level="QueryCoverage=100%, HitCoverage=29%, E-value=7e-92, Identity=81%"; Hit description=Alpha- L-arabinofuranosidase C-terminus family protein, expressed
HAGAGGIWEELVSNRGFXEAGXPHTPSNIDPWSIIGDESSIYVTTDPVSCFTRNIVALRIEVLCDKCPTGGVGVYNPGFWGMNIEEGKTYNLVMYIRSPESVELTASLTCSRPSGALQNLASAYIQDIDVSNWTRVELKLLAQETCRTSRLDLTTSKRGVIWFDQVSLMPSDTYKGHGFRKELMYMLLDLKPRFLRFP

SEQ ID NO: 105809 - protein, 60 aa, Setaria italica
  Transcript Sequence Number=SeqID_39835
KVIDWQSKWYSFILSETNKLIISSSPFQHESMCTGLNIFYPTTMAEIMRVDGMFLCNDNT

SEQ ID NO: 105810 - protein, 157 aa, Setaria italica
  Transcript Sequence Number=SeqID_39836
  Gene Ontology: Mol. function=hydrolase activity, hydrolyzing O -glycosyl compounds; Cellular component=cell wall; Biological process= carbohydrate metabolic process
  Homolog annotation: Hit_ID=Q9ZTB8; Match level="QueryCoverage=95%, HitCoverage=45%, E-value=8e-53, Identity=64%"; Hit description =Tapetum specific protein
  Pfam annotation: Domain name=Glyco_hydro_10; Domain location=1-156; Score=-131.4; E_value=4.1e-05; Accession=PF00331.12; Description =Glycosyl hydrolase family 10
GDHWRTRLKWYSTEYHEGHEEYEVADRMLALAEKHNISVRGHNVFWDDQSHQMDWVTKLGEGKLKAAVAKRLKSVVSRYAGKVIHWDVVNENLHFRFFEDKLGKDASGEIFNEVAKLDGKPILFMNEYNTIEQPGDMAPLPTKYLAKLRQIQAYPGN

SEQ ID NO: 105811 - protein, 128 aa, Setaria italica
  Transcript Sequence Number=SeqID_39837
  Subcellular localization annotation: CTP_CleavageSite=19; ConfidenceScore=5.01e-01
TRFSFGPQAKGRKIISRSRYVLKKSKNKFSVKKYDGVLFSVNVCTFQWYFAEVAIFDATEPIFPKSFTIFLANLAYNICASTLPKYKDKKEGGTGATLPPTKWIKFNQSQLNDLDVERKMEMELRKEK

SEQ ID NO: 105812 - protein, 139 aa, Setaria italica
  Transcript Sequence Number=SeqID_39838
  Gene Ontology: Mol. function=aspartic-type endopeptidase activity; Biological process=proteolysis
  Homolog annotation: Hit_ID=B9SA53; Match level="QueryCoverage=92%, HitCoverage=28%, E-value=7e-13, Identity=33%"; Hit description =Aspartic proteinase nepenthesin-2, putative
GCVVDLGTPVTVMARAAYDVVEEAVWSDLERHGAERVGRRGYGLCVRASEAMKGRLQSLSLHFSGDEEAVLVVAPEQLFLMMDDEQGRIACLAVTPGRRTVIGALQQVDTRFVFDLKDSKLSFAPESCIRDTVPSKPFK

SEQ ID NO: 105813 - protein, 158 aa, Setaria italica
  Transcript Sequence Number=SeqID_39839
  Gene Ontology: Mol. function=kinase activity
  Homolog annotation: Hit_ID=Q10H44; Match level="QueryCoverage=92%, HitCoverage=26%, E-value=8e-14, Identity=46%"; Hit description=PfkB -type carbohydrate kinase family protein, putative, expressed
MASLLLPPRFTCSLPPYHRIRGQIHYKTDILGKNMAKPTVWLLNRTVYAASRTSQDVEGSSGEDSDGETSTKKKRAPRRGRKKATTETLEGEGEESQINSEQASPEETKKVKRRGRKKATTTASLEEGMDKAKEPKKRGRRKVKTTEESSDDEGDDRG

SEQ ID NO: 105814 - protein, 237 aa, Setaria italica
  Transcript Sequence Number=SeqID_39840
  Pfam annotation: Domain name=DnaJ; Domain location=34-97; Score=41.0; E_value=4.6e-09; Accession=PF00226.23; Description=DnaJ domain
FKFTYRYAASRRRQRESTADRDRAAMCGGSVRPCHYAVLGVATCASAANIDAAYHKKVEEWRLEGDSSTTQESRASFRRIKEAFEVLSDASRRASYDAGVSPAGFQLAKVLPSMNKLLADIGELRKGISNFTDRMKQDPKLSMEQMLAMLKEINKRNDDQPPAPAGRGRPPKRNGSPSPRPGAPVRKKLAARKARAKKSSGASSPTLSPPARGTKRPPSPGFYSPCACVLKKLHAEK

SEQ ID NO: 105815 - protein, 57 aa, Setaria italica
  Transcript Sequence Number=SeqID_39841
  Gene Ontology: Mol. function=small conjugating protein ligase activity; Cellular component=nucleus; Biological process=ubiquitin -dependent protein catabolic process
  Homolog annotation: Hit_ID=Q8W2X7; Match level="QueryCoverage=100%, HitCoverage=35%, E-value=6e-26, Identity=94%"; Hit description =Ubiquitin carrier protein
MSGGIARGRLAEERKAWRKNHPHGFVARPETLADGSANLMIWNCTIPGKQGTDWEGG

SEQ ID NO: 105816 - protein, 116 aa, Setaria italica
  misc_feature (24)..(24): Xaa can be any naturally occurring amino acid
  misc_feature (62)..(62): Xaa can be any naturally occurring amino acid
  Transcript Sequence Number=SeqID_39842
  Gene Ontology: Mol. function=small conjugating protein ligase activity; Biological process=ubiquitin-dependent protein catabolic process
  Homolog annotation: Hit_ID=Q8W2X7; Match level="QueryCoverage=96%, HitCoverage=52%, E-value=2e-28, Identity=61%"; Hit description =Ubiquitin carrier protein
  Pfam annotation: Domain name=UQ_con; Domain location=1-113; Score= -25.3; E_value=0.0027; Accession=PF00179.18; Description=Ubiquitin -conjugating enzyme
GILPLTLHFSEDYPSKPPNVQVPXGFFHPMSILRTVCLSILNEDSVSFADNFVGLCDATLDXFCGLTVPIFACQGWRPAITVKQILVGIQDLLDQPNPADPAQTDGYHLFIQVSQK

SEQ ID NO: 105817 - protein, 228 aa, Setaria italica
  misc_feature (148)..(148): Xaa can be any naturally occurring amino acid
  Transcript Sequence Number=SeqID_39843
  Gene Ontology: Mol. function=small conjugating protein ligase activity; Cellular component=nucleus; Biological process=ubiquitin -dependent protein catabolic process
  Homolog annotation: Hit_ID=Q8W2X7; Match level="QueryCoverage=70%, HitCoverage=100%, E-value=6e-69, Identity=78%"; Hit description =Ubiquitin carrier protein
  Pfam annotation: Domain name=RRM_1; Domain location=10-80; Score =98.0; E_value=3.2e-26; Accession=PF00076.14; Description=RNA recognition motif. (a.k.a. RRM, RBD, o
  Pfam annotation: Domain name=UQ_con; Domain location=77-221; Score =218.6; E_value=1.6e-62; Accession=PF00179.18; Description=Ubiquitin -conjugating enzyme
  Pfam module annotation: Pfam domain module=RRM_1::UQ_con; Domain location=10-80::77-221
MAASDVEYRCFVGGLAWATDDNSLHNAFSPFGEVLESKIILDRDTQRSRGFGFVTFASEQAMRDAIEGMNGKELDGRSITVNKAWRKNHPHGFVARPETLADGSANLMIWNCTIPGKQGTDWEGGYYPLTLHFSEDYPSKPPKCKFPXGFFHPNVYPSGTVCLSILNEDSGWRPAITVKQILVGIQDLLDQPNPADPAQTDGYHLFIQDPAEYKRRVRLQAKQYPALV

SEQ ID NO: 105818 - protein, 160 aa, Setaria italica
  Transcript Sequence Number=SeqID_39844
  Gene Ontology: Mol. function=small conjugating protein ligase activity; Cellular component=synaptonemal complex; Biological process=ubiquitin-dependent protein catabolic process
  Homolog annotation: Hit_ID=Q8W2X7; Match level="QueryCoverage=100%, HitCoverage=100%, E-value=4e-87, Identity=94%"; Hit description =Ubiquitin carrier protein
  Pfam annotation: Domain name=UQ_con; Domain location=9-153; Score =244.2; E_value=3.1e-70; Accession=PF00179.18; Description=Ubiquitin -conjugating enzyme
MSGGIARGRLAEERKAWRKNHPHGFVAKPETLPDGTVNLMIWHCTIPGKQGTDWEGGYYPLTLHFSEDYPSKPPKCKFPQGFFHPNVYPSGTVCLSILNEDSGWRPAITVKQILVGIQDLLDQPNPADPAQTDGYHLFIQDPTEYKRRVRLQAKQYPALV

SEQ ID NO: 105819 - protein, 108 aa, Setaria italica
  Transcript Sequence Number=SeqID_39845
  Subcellular localization annotation: CTP_CleavageSite=8; ConfidenceScore=5.14e-01
RRRRRSICVAAVASFVTRLTHSSLPSAASYEYWVNATAASPSASAAASSAAMPASPPAAPEPVVGLVKLPPPWPAGGTPPPMPRPPAGFLRHDTVKFVGSLCARRTSG

SEQ ID NO: 105820 - protein, 169 aa, Setaria italica
  Transcript Sequence Number=SeqID_39846
  Gene Ontology: Biological process=response to stress
  Homolog annotation: Hit_ID=Q6I5B2; Match level="QueryCoverage=100%, HitCoverage=69%, E-value=6e-49, Identity=60%"; Hit description=BURP domain-containing protein 6
  Pfam annotation: Domain name=BURP; Domain location=2-169; Score =162.0; E_value=1.8e-45; Accession=PF03181.7; Description=BURP domain
  Subcellular localization annotation: CTP_CleavageSite=71; ConfidenceScore=5.41e-01
LSLFSIPAGSPAAAAVRSTLAECEAPRFPGVAAQRCATSFESMVDFAASSLGTRGIRAGMTKLSREGATPRQAYVVESVVPLPVIGRDMVACHCMPYPYAVFGCHTTTAAVFTVALAGADGTRVEALTACHKDATPGIFGPTYKKLGVTPGTVAVCHFLPQDGKLWMRK

SEQ ID NO: 105821 - protein, 55 aa, Setaria italica
  Transcript Sequence Number=SeqID_39847
MCAEEPEDTEGLGFREEGIEEAAEFPLGQMERVCENTTSADFRQNKLSNFIPVVR

SEQ ID NO: 105822 - protein, 80 aa, Setaria italica
  Transcript Sequence Number=SeqID_39848
MCCGGDDGRECRPLGFLLGLPFAVLAVLVSIVGAIIWIIGLPISCICPCCLCVTLLLEAAVELVKAPLHVMTWFTSKIPC

SEQ ID NO: 105823 - protein, 115 aa, Setaria italica
  misc_feature (9)..(9): Xaa can be any naturally occurring amino acid
  Transcript Sequence Number=SeqID_39849
  Gene Ontology: Mol. function=sequence-specific DNA binding; Cellular component=nucleus; Biological process=regulation of transcription, DNA-dependent
  Homolog annotation: Hit_ID=Q2QYJ7; Match level="QueryCoverage=95%, HitCoverage=39%, E-value=8e-23, Identity=50%"; Hit description=WRKY DNA binding domain containing protein, expressed
LATKTVQQXETDGSGKVRLFNVDYYGQHICKKDGIIHPYVVETTSHSVPIVHDNQSSISTFVNNDVHGIQDESYENLFVVPDMPEYFTDFTDIEMARALEITSMNLPLISEDIWA

SEQ ID NO: 105824 - protein, 80 aa, Setaria italica
  Transcript Sequence Number=SeqID_39850
  Gene Ontology: Mol. function=hydrolase activity, acting on ester bonds; Biological process=lipid metabolic process
MASSPSGGGGGARLLFPVVVVAAAALAGAAPASACYTRLFSFGDSLADTGNYRFVCGDDSDPVLRLPYGETFFHRATGRF

SEQ ID NO: 105825 - protein, 64 aa, Setaria italica
  Transcript Sequence Number=SeqID_39851
VAGKPVQGFLVPTRGREHATVSFLMQYSTTWHVVEPLNDFSLGTFVGLSSLESWTHMAYYGGCG

SEQ ID NO: 105826 - protein, 64 aa, Setaria italica
  Transcript Sequence Number=SeqID_39852
IPFMILKWMVIILTPAYTFIGNSISLTSYKDRNVLYKCRNEQMNRFQITVRIQSSAAQNEHIVR

SEQ ID NO: 105827 - protein, 94 aa, Setaria italica
  misc_feature (12)..(12): Xaa can be any naturally occurring amino acid
  Transcript Sequence Number=SeqID_39853
  Gene Ontology: Mol. function=cysteine-type endopeptidase activity; Cellular component=vacuole; Biological process=proteolysis
  Homolog annotation: Hit_ID=B6UEY2; Match level="QueryCoverage=93%, HitCoverage=19%, E-value=1e-37, Identity=85%"; Hit description =Vacuolar processing enzyme, beta-isozyme
  Pfam annotation: Domain name=Peptidase_C13; Domain location=1-92; Score=-87.7; E_value=1.1e-05; Accession=PF01650.10; Description =Peptidase C13 family
KYLLKISWGTYXCPGMDPSPPPEYITCLGDLYSVSWMEDSQTHNLMKETIKDQYEVVKTRTSNLKKYKEGSHVMEYGDKTFTNEKLFLYQALCP

SEQ ID NO: 105828 - protein, 151 aa, Setaria italica
  Transcript Sequence Number=SeqID_39854
  Gene Ontology: Mol. function=cysteine-type endopeptidase activity; Cellular component=vacuole; Biological process=proteolysis
  Homolog annotation: Hit_ID=B6UEY2; Match level="QueryCoverage=90%, HitCoverage=29%, E-value=2e-72, Identity=94%"; Hit description =Vacuolar processing enzyme, beta-isozyme
  Pfam annotation: Domain name=Peptidase_C13; Domain location=1-145; Score=128.1; E_value=2.9e-35; Accession=PF01650.10; Description =Peptidase C13 family
TLPYLYAGDFIKVLKKKHASNSYSKMVIYVEACESGSIFEGLMPQDLNIYVTTASNPVENSWGTYCPGMDPSPPPEYITCLGDLYSVSWMEDSQTHNLMKETIKDQYEVVKTRTSNLKKYKEGSHVMEYGDKTFTNEKAFTFNTKVLEYLD

SEQ ID NO: 105829 - protein, 79 aa, Setaria italica
  Transcript Sequence Number=SeqID_39855
  Gene Ontology: Mol. function=cysteine-type endopeptidase activity; Cellular component=vacuole; Biological process=proteolysis
  Homolog annotation: Hit_ID=B6UEY2; Match level="QueryCoverage=94%, HitCoverage=16%, E-value=2e-33, Identity=88%"; Hit description =Vacuolar processing enzyme, beta-isozyme
FVGQVKTRTSNLKKYKEGSHVMEYGDKTFTNEKLFLYQGFDPANANAANTLLWPGPKGAVNQRDADLLFMWKRYEQLDG

SEQ ID NO: 105830 - protein, 140 aa, Setaria italica
  Transcript Sequence Number=SeqID_39856
  Gene Ontology: Mol. function=cysteine-type endopeptidase activity; Cellular component=vacuole; Biological process=proteolysis
  Homolog annotation: Hit_ID=B6UEY2; Match level="QueryCoverage=98%, HitCoverage=30%, E-value=2e-76, Identity=97%"; Hit description =Vacuolar processing enzyme, beta-isozyme
  Pfam annotation: Domain name=Peptidase_C13; Domain location=2-140; Score=147.1; E_value=5.3e-41; Accession=PF01650.10; Description =Peptidase C13 family
LENFFAVLLGNRSAITGGSKKVIDSKPNDHIFIYYSDHGGPGVLGMPNLPYLYAGDFIKVLKKKHASNSYSKMVIYVEACESGSIFEGLMPQDLNIYVTTASNPVENSWGTYCPGMDPSPPPEYITCLGDLYSVSWMEDR

SEQ ID NO: 105831 - protein, 482 aa, Setaria italica
  Transcript Sequence Number=SeqID_39857
  Gene Ontology: Mol. function=cysteine-type endopeptidase activity; Cellular component=vacuole; Biological process=proteolysis
  Homolog annotation: Hit_ID=B6UEY2; Match level="QueryCoverage=92%, HitCoverage=97%, E-value=0.0, Identity=90%"; Hit description =Vacuolar processing enzyme, beta-isozyme
  Pfam annotation: Domain name=Peptidase_C13; Domain location=58-330; Score=658.0; E_value=8.9e-195; Accession=PF01650.10; Description =Peptidase C13 family
MAAAAWLCGLLSLLAVAAAASVDGAEEEWEPLIRMPTEKGGNAAAAAPAAEEDEVGTRWAVLVAGSSGYGNYRHQADVCHAYQILLKGGVKEENIVVFMYDDIAHNILNPRPGVIINHPKGENVYPGVPKDYTGDQVTTENFFAVLLGNRSAITGGSKKVIDSKPNDHIFIYYSDHGGPGVLGMPNLPYLYAGDFIKVLKKKHASNSYSKMVIYVEACESGSIFEGLMPQDLNIYVTTASNPVENSWGTYCPGMDPSPPPEYITCLGDLYSVSWMEDSQTHNLMKETIKDQYEVVKTRTSNLKKYKEGSHVMEYGDKTFTNEKLFLYQGFDPANANAANTLLWPGPKGAVNQRDADLLFMWKRYEQLDGGSEEKLRALREIKETVQHRKHLDSSIDFIGRLVFGFENGPKMLEAVRASGQPLVDDWDCLKRMVRIFEAQCGSLTQYGMKYMRAFANICNSGISEAKMRESSISACGGYNSAR

SEQ ID NO: 105832 - protein, 256 aa, Setaria italica
  Transcript Sequence Number=SeqID_39858
  Gene Ontology: Mol. function=transcription regulator activity; Cellular component=histone methyltransferase complex; Biological process=transcription from RNA polymerase II promoter
  Homolog annotation: Hit_ID=B6U031; Match level="QueryCoverage=100%, HitCoverage=60%, E-value=1e-134, Identity=87%"; Hit description=SPRY domain containing protein
  Pfam annotation: Domain name=SPRY; Domain location=53-215; Score =44.6; E_value=4e-10; Accession=PF00622.20; Description=SPRY domain
TRLAAERNDDAASQPVLLSRFFKSERIEVSDDRLTAASTKGYRMVRATRGVAAGAWYFEVNVGHLGATGHTRLGWVTNKADLQTPVGYDAYGFGYRDIDGAKVHKAWRDKYADEGYGEGDVLGFYISLPDGERYEPKQRDLVEYKGMPFHVQVPKEEQKIADPVPGSEICYFKNGVCQGSAFKDIPGGRYYPAASMYTLPNEQNCVVKFNFGPDFEFYPQDFGDLPIPQPMSEVPYQAVEVKKEGPVENGIAEKTS

SEQ ID NO: 105833 - protein, 163 aa, Setaria italica
  Transcript Sequence Number=SeqID_39859
  Gene Ontology: Mol. function=translation elongation factor activity; Cellular component=cytoplasm; Biological process=translational elongation
  Homolog annotation: Hit_ID=C0SUJ6; Match level="QueryCoverage=98%, HitCoverage=45%, E-value=2e-85, Identity=95%"; Hit description =Elongation factor 1a (Fragment)
  Pfam annotation: Domain name=GTP_EFTU_D2; Domain location=1-49; Score= 13.0; E_value=0.021; Accession=PF03144.17; Description=Elongation factor Tu domain 2
  Pfam annotation: Domain name=GTP_EFTU_D3; Domain location=57-163; Score=192.3; E_value=1.4e-54; Accession=PF03143.9; Description =Elongation factor Tu C-terminal domain
  Pfam module annotation: Pfam domain module=GTP_EFTU_D2::GTP_EFTU_D3; Domain location=1-49::57-163
TFGPTGLTTEVKSVEMHHEALQEALPGDNVGFNVKNVAVKDLKRGVSVASNSKDDPAKEAASFTSQVIIMNHPGQIGNGYAPVLDCHTSHIAVKFAELITKIDRRSGKELEKEPKFLKNGDAGMVKMIPTKPMVVETFSEYPPLGRFAVRDMRQTVAVGVVLF

SEQ ID NO: 105834 - protein, 74 aa, Setaria italica
  Transcript Sequence Number=SeqID_39860
PPGVRWDSVAVACACCGACVCGHHAHLRPAAMGTGWSSSTHQEYSYLFEMDFLCFLSSKDAVRHQSMAEEGNAP

SEQ ID NO: 105835 - protein, 51 aa, Setaria italica
  Transcript Sequence Number=SeqID_39861
ARLFYLHLHCKHFDMPVNLRNILEAEGKNCALELKLLNDRYLLIFTVLQGF

SEQ ID NO: 105836 - protein, 79 aa, Setaria italica
  misc_feature (35)..(35): Xaa can be any naturally occurring amino acid
  Transcript Sequence Number=SeqID_39862
  Homolog annotation: Hit_ID=Q25AI8; Match level="QueryCoverage=59%, HitCoverage=6%, E-value=2e-09, Identity=69%"; Hit description =H0702G05.5 protein
GFTDTQSHQAAARKENQLQTMRAALGLDAEDAQKXAVESDAEPGDLVERKQGMSKRLAARPVGRLKRVGLAAASGQAAN

SEQ ID NO: 105837 - protein, 187 aa, Setaria italica
  misc_feature (18)..(18): Xaa can be any naturally occurring amino acid
  misc_feature (147)..(147): Xaa can be any naturally occurring amino acid
  Transcript Sequence Number=SeqID_39863
  Gene Ontology: Cellular component=spliceosome
  Homolog annotation: Hit_ID=Q25AI8; Match level="QueryCoverage=83%, HitCoverage=21%, E-value=5e-22, Identity=52%"; Hit description =H0702G05.5 protein
  Pfam annotation: Domain name=cwf21; Domain location=49-93; Score =73.1; E_value=1e-18; Accession=PF08312.4; Description=cwf21
  Subcellular localization annotation: CTP_CleavageSite=25; ConfidenceScore=5.15e-01
PRGGPGTSGHVQASKFLXKPRPSSSAAAAAGGYGTPNPPHTGSVLERTRKPNKDILEHDRKRQVELRLLVLRDALEEHGYTEAQIEERVGEARKAAEIEAAAEEGGPRSQGKGFTDTQSHQAAARKENQLQTMRAALGLDAEDAQKXAVESDAEPGDLVERKQGMSKRLAARPVGRVSMGVSFRYRL

SEQ ID NO: 105838 - protein, 29 aa, Setaria italica
  Transcript Sequence Number=SeqID_39864
EASGIAEENSSEESSEADQNDAPQQIEIE

SEQ ID NO: 105839 - protein, 125 aa, Setaria italica
  Transcript Sequence Number=SeqID_39865
  Gene Ontology: Mol. function=protein serine/threonine kinase activity; Biological process=protein amino acid phosphorylation
  Pfam annotation: Domain name=LRR_1; Domain location=24-46; Score =15.3; E_value=0.25; Accession=PF00560.25; Description=Leucine Rich Repeat
  Pfam annotation: Domain name=LRR_1; Domain location=48-71; Score =12.3; E_value=1.4; Accession=PF00560.25; Description=Leucine Rich Repeat
  Pfam annotation: Domain name=LRR_1; Domain location=73-95; Score =13.6; E_value=0.76; Accession=PF00560.25; Description=Leucine Rich Repeat
  Pfam annotation: Domain name=LRR_1; Domain location=97-119; Score =8.1; E_value=8.4; Accession=PF00560.25; Description=Leucine Rich Repeat
  Pfam module annotation: Pfam domain module=LRR_1::LRR_1::LRR_1::LRR _1; Domain location=24-46::48-71::73-95::97-119
LAILDLGGNMLHGKIPNSIGQLKRLEELHLENNNMTGELPSTLSNCTNIITIDLKGNNFSGELQKVNFSNLSNLEVLDLLYNNFTGTIPESIYSCSNLIALRLSGNNLHMQLSPRIGNLKSLVSW

SEQ ID NO: 105840 - protein, 60 aa, Setaria italica
  Transcript Sequence Number=SeqID_39866
  Gene Ontology: Mol. function=nucleoside-triphosphatase activity; Cellular component=mitochondrion; Biological process=protein catabolic process
  Homolog annotation: Hit_ID=Q8LQJ9; Match level="QueryCoverage=100%, HitCoverage=8%, E-value=3e-13, Identity=58%"; Hit description=Cell division protease ftsH homolog 4, mitochondrial
MAWRRVLTQIAKHRPTKAIYNELVASSPLGTLRTEVSAGARIRNLQERNQSSYIGSLARR

SEQ ID NO: 105841 - protein, 698 aa, Setaria italica
  Transcript Sequence Number=SeqID_39867
  Gene Ontology: Mol. function=nucleoside-triphosphatase activity; Cellular component=mitochondrion; Biological process=protein catabolic process
  Homolog annotation: Hit_ID=Q8LQJ8; Match level="QueryCoverage=92%, HitCoverage=90%, E-value=0.0, Identity=80%"; Hit description=Cell division protease ftsH homolog 5, mitochondrial
  Pfam annotation: Domain name=AAA; Domain location=246-430; Score =316.5; E_value=5.3e-92; Accession=PF00004.21; Description=ATPase family associated with various cellular activities (AAA)
  Pfam annotation: Domain name=AAA_2; Domain location=243-372; Score= -40.9; E_value=0.016; Accession=PF07724.6; Description=ATPase family associated with various
  Pfam annotation: Domain name=AAA_5; Domain location=246-377; Score =17.6; E_value=3.3e-05; Accession=PF07728.6; Description=ATPase family associated with various
  Pfam annotation: Domain name=FtsH_ext; Domain location=85-220; Score=- 4.0; E_value=0.021; Accession=PF06480.7; Description=FtsH Extracellular
  Pfam annotation: Domain name=Peptidase_M41; Domain location=437-638; Score=409.2; E_value=6.6e-120; Accession=PF01434.10; Description =Peptidase family M41
  Pfam module annotation: Pfam domain module=AAA::AAA_2::AAA_5::FtsH _ext::Peptidase_M41; Domain location=246-430::243-372::246-377::85 -220::437-638
SPKGVGLGYSVFFSSPLGTLRTEVSAGARIRNLQERNQSSYIGSLARRVRDLDAPSETSLLKEIYRSDPERVIQIFESQPSLHSNPAALSEYVKALVRVDRLDESTLLKTLQRGVAASTRGEESFGSIPALIGAGQATKDGVLGTANAPIHMVTAETGQFKDQLWRTFRSIALTFLLISGIGALIEDRGISKGLGLNEEVQPSIESNTKFSDVKGVDEAKSELEEIVHYLRDPKRFTRLGGKLPKGVLLVGPPGTGKTMLARAIAGEAGVPFFSCSGSEFEEMFVGVGARRVRDLFAAAKKRSPCIIFIDEIDAIGGSRNPKDQQYMKMTLNQLLVELDGFKQNEGIIVIAATNFPESLDKALVRPGRFDRHIVVPNPDVEGRRQILDSHMSKVLKGDDVDLMIIARGTPGFSGADLANLVNVAALKAAMDGAKAVTMNDLEYAKDRIMMGSERKSAVISDECRKLTAYHEGGHALVAIHTDGAHPVHKATIVPRGMALGMVAQLPEKDETSVSRKQMLANLDVCMGGRVAEELIFGDTEVTSGASSDFQQATATARAMVTKYGMSKQVGLVSYNYEDDGKSMSSETRLLIEQEVKNFLENAYNNAKTILTKHNKELHALANALLEHETLTGAQIKNILAQVNNKQQQEHAIEAPQKTPAAPASPASPAASAAAAAAAAAAAAQQAAAKAKGVAGIGS

SEQ ID NO: 105842 - protein, 91 aa, Setaria italica
  Transcript Sequence Number=SeqID_39868
ELVNLSCICLLSCLERIIAFQSPHRMSLGWILHIITVVQYVSSSRTHHRIRPLPSPVVAGSPRGNERTDWGGEDWAAAGVCPVDLRPLPRK

SEQ ID NO: 105843 - protein, 122 aa, Setaria italica
  Transcript Sequence Number=SeqID_39869
YRQRRSAFCHILIPAVSHLSNSSKHQQQEQSSANHTKVNPSRNILFLLPRISPFDVIQGHISDINNGLKHMHPKIETICKLKRNINNNASTNIYMEGPANISARTKHQLSVSFFATSIKAIT

SEQ ID NO: 105844 - protein, 176 aa, Setaria italica
  Transcript Sequence Number=SeqID_39870
  Gene Ontology: Mol. function=protein serine/threonine kinase activity; Cellular component=integral to membrane; Biological process=protein amino acid phosphorylation
  Homolog annotation: Hit_ID=Q8L7G3; Match level="QueryCoverage=95%, HitCoverage=25%, E-value=5e-39, Identity=44%"; Hit description =Cysteine-rich receptor-like protein kinase 7
  Pfam annotation: Domain name=Pkinase_Tyr; Domain location=1-152; Score=-162.9; E_value=0.0068; Accession=PF07714.9; Description =Protein tyrosine kinase
HGDLKPSNILLDLNLHPKISDFGLARTYSPGVEEEFADRIVGSIGFTAPECRERRIFSIKSDVYGFGALLLEIVSGRRCFSLASGESGDDHGFLNRKAWRLWRAGRLIKLFHSPLGNESERTEILRCIQIALLCVEEDPANRPTMQEVALMLSCHDVALPMPQRPAYLTVGKARAH

SEQ ID NO: 105845 - protein, 144 aa, Setaria italica
  Transcript Sequence Number=SeqID_39871
  Gene Ontology: Mol. function=ion channel activity; Cellular component= integral to membrane; Biological process=ion transport
  Homolog annotation: Hit_ID=B6U115; Match level="QueryCoverage=97%, HitCoverage=29%, E-value=4e-58, Identity=77%"; Hit description =Cyclic nucleotide-gated ion channel 2
VLVKSCCTLGPGNFSGDELLSWCLRRPFMERLPASSSTLATLESTEAFGLDAADVKYVTQHFRYTFTNDRVRRSARYYSPGWRTWAAVAVQLAWRRYRHRKTLTSLSFIRPRRPLSRCSSLGEEKLRLYTALLTSPKPNQDDLL

SEQ ID NO: 105846 - protein, 76 aa, Setaria italica
  Transcript Sequence Number=SeqID_39872
NSKSIHLAYPKVRVKLTYVEFNNLLSYLCSYSLEKCRKVFLISIFKWLYDLGCKHQCFLIQLRNILLLLLINLINL

SEQ ID NO: 105847 - protein, 257 aa, Setaria italica
  misc_feature (67)..(67): Xaa can be any naturally occurring amino acid
  misc_feature (218)..(218): Xaa can be any naturally occurring amino acid
  misc_feature (242)..(242): Xaa can be any naturally occurring amino acid
  Transcript Sequence Number=SeqID_39873
  Homolog annotation: Hit_ID=B6TZL7; Match level="QueryCoverage=59%, HitCoverage=43%, E-value=8e-17, Identity=38%"; Hit description=F-box domain containing protein
LLKDLELVDAHLSEIEDLEAIVRGSPLLDALMLSDAYILNNELAGCVIEAPNLRSLTIISVVVYGWXIWGLPRLDNATIDLDTYMYEGDLGEFLAGVAHARKLTLTTFYLPKMGDDTLLETLPYKFFNLRSLFLCTHFCGLYSILATFCLLRNAPSLEELEITINGDQEQETEANTEFQNIQWTNGMCGSLQVVTINDISCLSNEMCFIKLVLSKATXFRTMSIILDDEFSRSNENILSEFXTNRRASPHAPSLFAK

SEQ ID NO: 105848 - protein, 362 aa, Setaria italica
  Transcript Sequence Number=SeqID_39874
  Gene Ontology: Mol. function=fumarate hydratase activity; Cellular component=tricarboxylic acid cycle enzyme complex; Biological process=fumarate metabolic process
  Homolog annotation: Hit_ID=P93033; Match level="QueryCoverage=91%, HitCoverage=67%, E-value=1e-178, Identity=87%"; Hit description =Fumarate hydratase 1, mitochondrial
  Pfam annotation: Domain name=Lyase_1; Domain location=44-362; Score =535.7; E_value=5.7e-158; Accession=PF00206.12; Description=Lyase
  Subcellular localization annotation: CTP_CleavageSite=16; ConfidenceScore=5.03e-01
MAMALRRLAGVSGSPSAAAAALLLRPALTRPISTGFREERDTFGPIQVPNDKLWGAQTQRSLQNFDIGGERERMPVPIIRAFGVLKKCAAKVNMEYGLDPTIGKAIMQAAEEVAEGKLDDHFPLVIWQTGSGTQSNMNANEVIANRAAEILGHKRGGKFVHPNDHVNRSQSSNDTFPTVMHIAAAVEINSKFIPSLQQLHDSLHAKSVEFIDIIKIGRTHTQDATPLTLGQEFSGYTTQVKYGIDRINCTLPRMYQLAQGGTAVGTGLNTKKGFDVKIAAAVAEETNLPFVTAENKFEALAAHDAFVESSGAVNTISASLMKIANDIRLLGSGPRCGLGELILPENEPGSSIMPGKVNPTQC

SEQ ID NO: 105849 - protein, 160 aa, Setaria italica
  Transcript Sequence Number=SeqID_39875
  Gene Ontology: Mol. function=DNA primase activity; Biological process= DNA replication
  Homolog annotation: Hit_ID=UPI0001A7B343; Match level="QueryCoverage =95%, HitCoverage=24%, E-value=3e-54, Identity=62%"; Hit description =DNA primase
LRLLPNVFSYQDHRTGTRRFLVSTYDEFWRRYNDMDSKIRHHYEVIQEGSPCHIYFDLEFDTRLNKKRDADEMVDILVAVIFSALHDKYSIEAQEEWITELDSSTEEKFSRHLIIRIPNTAFKDNSHVGAFVSEVCSQIAAQRAANPNLDKLYITKESSY

SEQ ID NO: 105850 - protein, 80 aa, Setaria italica
  misc_feature (55)..(55): Xaa can be any naturally occurring amino acid
  Transcript Sequence Number=SeqID_39876
  Pfam annotation: Domain name=RALF; Domain location=15-80; Score=6.8; E_value=0.0046; Accession=PF05498.3; Description=Rapid ALkalinization Factor (RALF)
MEKVNSTARLAVVAVTLCLLLLAGPQEVEAAEWITYPSKMISCKVLGNCEKRAGXDDARSPNPVANRYTRGCSAIDRCRG

SEQ ID NO: 105851 - protein, 86 aa, Setaria italica
  Transcript Sequence Number=SeqID_39877
  Homolog annotation: Hit_ID=B6TCK6; Match level="QueryCoverage=75%, HitCoverage=12%, E-value=1e-26, Identity=93%"; Hit description =Nucleotide binding protein
EKTSEENVQLKQSLDEKTKALDLLIQEHQAVKAELEQALTKLKAAEDENQSLIDRWMLEKMKDAEAQRAPISCSSGKSMGGVLVTL

SEQ ID NO: 105852 - protein, 398 aa, Setaria italica
  Transcript Sequence Number=SeqID_39878
  Gene Ontology: Mol. function=protein binding; Cellular component=pre -autophagosomal structure membrane; Biological process=culmination during sorocarp development
  Homolog annotation: Hit_ID=B6TCK6; Match level="QueryCoverage=100%, HitCoverage=78%, E-value=0.0, Identity=91%"; Hit description =Nucleotide binding protein
  Pfam annotation: Domain name=WD40; Domain location=108-146; Score =30.9; E_value=5.3e-06; Accession=PF00400.24; Description=WD domain, G-beta repeat
  Pfam annotation: Domain name=WD40; Domain location=150-188; Score =17.5; E_value=0.055; Accession=PF00400.24; Description=WD domain, G -beta repeat
  Pfam annotation: Domain name=WD40; Domain location=192-231; Score =36.2; E_value=1.3e-07; Accession=PF00400.24; Description=WD domain, G-beta repeat
  Pfam annotation: Domain name=WD40; Domain location=235-271; Score =18.7; E_value=0.024; Accession=PF00400.24; Description=WD domain, G -beta repeat
  Pfam annotation: Domain name=WD40; Domain location=275-312; Score =25.1; E_value=0.00029; Accession=PF00400.24; Description=WD domain, G-beta repeat
  Pfam annotation: Domain name=WD40; Domain location=320-358; Score =13.1; E_value=1.1; Accession=PF00400.24; Description=WD domain, G -beta repeat
  Pfam annotation: Domain name=WD40; Domain location=362-398; Score =10.1; E_value=2.5; Accession=PF00400.24; Description=WD domain, G -beta repeat
  Pfam module annotation: Pfam domain module=WD40::WD40::WD40::WD40::WD4 0::WD40::WD40; Domain location=108-146::150-188::192-231::235 -271::275-312::320-358::362-398
VQLKQSLDRKNKALDLLIQEHQAVKAELEQALTKLKAAEDENQSLIDRWMLEKMKDAERLNEANSMYEEMVLKLKTAGVGAIQHNAQQEADGIIRRSEGGYMETPIPSTCTITIRAHDGGCGSLMFEHNSDKLISGGQDQTVKIWGAYTGALTSTLHGVLGSVNDLAVTNDNKFVVAACSSNKLFVWEVNGGRPRHTLTGHTKNVSSVDASWVKSFVVASSSNDRTIKIWDLQTGFCKSTIMSASNPNSLAFIDGDIICSGHRDGNLRLWDIRSGKCTTQIAAHLDVTSVCVSRSKNFILTSGRDNVHNLFDVRTLEVCGTFRATGNRVVGSWGKPCISPDENCIAAGSSDGSVYIWSRLKNDTPTILQEHSSSVLASAWCGLGPLATSDRNHIYIWS

SEQ ID NO: 105853 - protein, 120 aa, Setaria italica
  Transcript Sequence Number=SeqID_39879
  Gene Ontology: Mol. function=binding
  Homolog annotation: Hit_ID=Q9M7X4; Match level="QueryCoverage=91%, HitCoverage=12%, E-value=3e-25, Identity=50%"; Hit description =F3E22.19 protein
SLIEIFYERHLDYLVDVIASSCPPRSTANSVGAGRNAEGHRIKPEILLNVCELLCFCVVHHPYKIKCNFLMNNAIEKILALTRRREKFLVVAAVRFMRTIISRNFQICRNAITRRSCLYA

SEQ ID NO: 105854 - protein, 91 aa, Setaria italica
  Transcript Sequence Number=SeqID_39880
YQCAELGVVIVFTTWQSHYRLTSDLLRISCHRYIRGYHSDFMCSLPCLVVHNMVNRCIQPTQCTLQIRRLFCCYSDNCGLYLLAVIISCTP

SEQ ID NO: 105855 - protein, 95 aa, Setaria italica
  Transcript Sequence Number=SeqID_39881
  Gene Ontology: Mol. function=binding
MAEHERRDAEAGGDAAAATHTSNMQRVKVYRLADGGKWDDQGTGHVSIEYIEVSKEFCANMGDMYYFFYMALLSLIHHFINTSVYLIVPKDLFAS

SEQ ID NO: 105856 - protein, 87 aa, Setaria italica
  Transcript Sequence Number=SeqID_39882
  Gene Ontology: Mol. function=binding; Cellular component=nucleus; Biological process=phagocytosis, engulfment
  Homolog annotation: Hit_ID=Q9M7X4; Match level="QueryCoverage=100%, HitCoverage=10%, E-value=1e-23, Identity=58%"; Hit description =F3E22.19 protein
DEHLIRHVVKFNLLKPIIDAFVENGDKYNMLHSGVLELLEYIRKENIKALVIYVIESFWDQLAKFEHFGSIQAFKLKYQQYLESAEP

SEQ ID NO: 105857 - protein, 862 aa, Setaria italica
  Transcript Sequence Number=SeqID_39883
  Gene Ontology: Mol. function=binding; Cellular component=integral to membrane; Biological process=phagocytosis, engulfment
  Homolog annotation: Hit_ID=Q9M7X4; Match level="QueryCoverage=84%, HitCoverage=81%, E-value=0.0, Identity=57%"; Hit description =F3E22.19 protein
  Pfam annotation: Domain name=DUF625; Domain location=163-354; Score =375.9; E_value=7.2e-110; Accession=PF04802.7; Description=Protein of unknown function (DUF625)
MGNWNDQGTGHVSIEYIEGSKELGLTVLDEEDNETLLVHNITSDDIYRKQEETIISWRDHEAATDLALSFQEAAGCSYIWENICDIQRNLQFSNLGALEVGPRQSSESLEASRIMHSNDDSFRSANGEFRELPPVELSNLPFILKTVLEGGITDQIRVAELITQDRDFFPKLVDIFRTCEDLESLDDLHMIFKLVKGIILLNSPSIFDKIFSDELILDIIGALEYDPEVPRVQKHRAFLKDHVVFKEAIHIENVSVVSKIHQTYRIGYLKDVILPRILDDATLASLNTMIHTNNASVISLLKDDALFIRQLFARMRSSDISMESKRELVLFLHEFCTLSKSLPLVQQLRLFRDLSGEGVFEIISDVLQSHDRRIVSAGIDILILFLNQDPNLLRSYIVQQEGNSLLGLLVKGMVTELGEEMHCQFLEILRILMDSFTMSGAHRDVIIEIFYERHLDYLVDVIASSCPPRSTANSVGAGRNAEGHRIKPEILLNVCELLCFCVVHHPYKIKCNFLMNNAIEKILALTRRREKFLVVAAVRFMRTIISRNDEHLIRHVVKFNLLKPIIDAFVENGDKYNMLHSGVLELLEYIRKENIKALVIYVIESFWDQLAKFEHFGSIQAFKLKYQQYLESAEPRLSASVPDMRKKAEQRGLEKEEEDYFNEDSDEEDSGSGRRAKHAQNQHSKAKVPNGSEADNVEGASRPKSAGLVDYDDDDDEEFNPPPKEPARPSEDDVPLNIATVKRRPVNAVDGKHADGEVRKRQKIETRISCAKIAAVTSTSSKHTDLQNKHAPHSPASSTPSTEANGVLREHGTNSEEHQHSVENAEASCQAGGDCIKDVGSMSTEKAVNTTNPSDSEPYSVR

SEQ ID NO: 105858 - protein, 123 aa, Setaria italica
  Transcript Sequence Number=SeqID_39884
  Gene Ontology: Mol. function=protein serine/threonine kinase activity; Biological process=protein amino acid phosphorylation
  Homolog annotation: Hit_ID=Q7XL24; Match level="QueryCoverage=82%, HitCoverage=12%, E-value=6e-16, Identity=40%"; Hit description =OSJNBa0079M09.4 protein
LFNVLSMVMDFCDYPLACGDYGVCNNGQCSCPSFSHFRFQNDRLPGSGCIPVSNISCNHAHEHQLIPLNDVSYFSYSLFLSKAISGSSQTVCMQSCLLDCSCKVVRLRIMVLVVMVVTACCYR

SEQ ID NO: 105859 - protein, 96 aa, Setaria italica
  Transcript Sequence Number=SeqID_39885
FFTSTVPNDIFLNFNSTNSTNLNQIEAPHTEYVTAPVYAISRVDQAVSKQQCTHLIINRSEMQYASKNSDTHTHTHTHIALIHTYYYSWQSHELSA

SEQ ID NO: 105860 - protein, 44 aa, Setaria italica
  Transcript Sequence Number=SeqID_39886
MNSQVQCYTYHLIKWLVDGPLPHVCFSSTHSWVSQKSTYRCHLI

SEQ ID NO: 105861 - protein, 94 aa, Setaria italica
  Transcript Sequence Number=SeqID_39887
VLTFGFVARGRQDARRVSVPGCIFLVACVLLIPSLVMLMLGPAKGSWMERVGSMLCDIGLFLQCVTYCFVKFPAVLAELRATCAKLKRGTTGLY

SEQ ID NO: 105862 - protein, 249 aa, Setaria italica
  Transcript Sequence Number=SeqID_39888
  Gene Ontology: Mol. function=electron carrier activity; Cellular component=extracellular region; Biological process=response to oxidative stress
  Homolog annotation: Hit_ID=B6TU39; Match level="QueryCoverage=87%, HitCoverage=64%, E-value=2e-76, Identity=67%"; Hit description =Peroxidase 2
  Pfam annotation: Domain name=peroxidase; Domain location=48-247; Score=316.6; E_value=5e-92; Accession=PF00141.15; Description =Peroxidase
  Subcellular localization annotation: CTP_CleavageSite=53; ConfidenceScore=5.50e-01
MSASRSSQRFRHSKLSLFVALATVVAAARAQLSPTFYASSCPAALVTIKTAVRAAVLLDRRTAGSLLRLHFHDCFVQGCDASVLLDDTGNFTGEKGAGPNAGSLRGFGVIDTIKALLEALCPRTVSCADILAVAARDSVVALGGPSWTVPLGRRDSTTASLSTANTDLPSPASSLSTLLAAFARKGLSSTDMVALSGAHTMGQAQCQNYRGRIYNDTDINAAFAASLRAGCPAAGGGGASAPLDATSPN

SEQ ID NO: 105863 - protein, 219 aa, Setaria italica
  misc_feature (180)..(180): Xaa can be any naturally occurring amino acid
  misc_feature (194)..(194): Xaa can be any naturally occurring amino acid
  misc_feature (206)..(206): Xaa can be any naturally occurring amino acid
  Transcript Sequence Number=SeqID_39889
  Gene Ontology: Mol. function=hydrolase activity; Cellular component =intracellular
  Homolog annotation: Hit_ID=Q7F447; Match level="QueryCoverage=100%, HitCoverage=29%, E-value=2e-80, Identity=68%"; Hit description =P0696G06.7 protein
PQVSAVVFKDQFTYKSLYTNGSQRTLLTSLVGGFIWLFVELARVILVWFLLLVYTIYLVFLPWLFGHPITEDDNLTYMTRRGWILKRPNSGNEVVHTGIPDVMVIVLPHFCFVLLPTIVILAAMSAERTAYREHYLSWSGKKKDDYYQKSRRQIEHEKFWNGRWIRKFLCLLCLVVLWKXWKLCRALVKAYAMXPLLHSPVLFFFXIPALMGFAIYRTS

SEQ ID NO: 105864 - protein, 177 aa, Setaria italica
  Transcript Sequence Number=SeqID_39890
  Gene Ontology: Mol. function=hydrolase activity; Cellular component =nucleus; Biological process=metabolic process
  Homolog annotation: Hit_ID=B6TXN5; Match level="QueryCoverage=96%, HitCoverage=48%, E-value=2e-67, Identity=74%"; Hit description =Gibberellin receptor GID1L2
  Pfam annotation: Domain name=Abhydrolase_3; Domain location=1-148; Score=57.8; E_value=4.1e-14; Accession=PF07859.5; Description =alphabeta hydrolase fold
CFLAGDSAGGNIAHHVARCWTTASAAASPPPSNPIRLAGIILVQPYFGGEERTEAELRLDGKAPVVTMRGSDWAWRAFLPEGADRDHPAAHVTDDNADLAEGFPPVMVVVGGLDPLQDWQRRYAGVLQRKGKAVRVVEFPEAIHTFFLFPVLPDCGRLATEMKAFMDESNASELAAS

SEQ ID NO: 105865 - protein, 67 aa, Setaria italica
  Transcript Sequence Number=SeqID_39891
  Subcellular localization annotation: CTP_CleavageSite=39; ConfidenceScore=5.07e-01
RQRPRRRPSPNFFFIFPKHLRDEGEGHPQTSSSSSPSTSGMNLARSTPTPPYTNKQPLVHALIIGDN

SEQ ID NO: 105866 - protein, 74 aa, Setaria italica
  Transcript Sequence Number=SeqID_39892
TRMQFIQKPKLYVRNRGLRAKNIYNINQLRYHSSHGDSHFQIRQSHRALSRRKESSNHDTMRTRSGSQTTLQFC

SEQ ID NO: 105867 - protein, 215 aa, Setaria italica
  Transcript Sequence Number=SeqID_39893
  Gene Ontology: Mol. function=nucleoside-triphosphatase activity
  Homolog annotation: Hit_ID=B6THD1; Match level="QueryCoverage=87%, HitCoverage=38%, E-value=2e-64, Identity=76%"; Hit description=Cell Division Protein AAA ATPase family
  Pfam annotation: Domain name=AAA; Domain location=10-163; Score= -23.0; E_value=0.0026; Accession=PF00004.21; Description=ATPase family associated with various cellular activities (AAA)
LVSTTPKSVVVVEDIDCSLDLSDRNKKNKNGNNGADDETAAQLAAISPAAAAAMAVVGRESISLSGVLNFVDGLWSSCVGERLMVFTTNHPERLDPALLRPGRMDRKIELGYCTPPALRVLAKNYLGVGDEGCEDAGDDPDTVRDLMAEAEDLLAPAAGVRITPADIAEVFMGCDGTGAAAALRKLVGELRRRRDDYAAAAAVAPGESGEDTTDC

SEQ ID NO: 105868 - protein, 138 aa, Setaria italica
  Transcript Sequence Number=SeqID_39894
MAAVPVYSITRAEIDEFWRRKEVEEEERRLAADKEAARIKAKALKMEDYVLFEQMIREILEEGNTGGGATMGPAAAGSTEARIIGIKHWWTRSAYAYLNAPALSMDENGGSKHAITYIPQERCTMFFASTPCQPNSML

SEQ ID NO: 105869 - protein, 76 aa, Setaria italica
  Transcript Sequence Number=SeqID_39895
EKNLTYPSAYGYDRPPSSSTGCRWTRSAYAYLNAPALSMDENGGSKHAITYIPQERCTMFFASTPCQPNSTACAIF

SEQ ID NO: 105870 - protein, 69 aa, Setaria italica
  Transcript Sequence Number=SeqID_39896
RIHPLNFSEQKFFSSDEDCCAFWLVGCPRAIFSSILWSFASRRARDESSFTIFLEKTSPIFISIGMRNN

SEQ ID NO: 105871 - protein, 54 aa, Setaria italica
  Transcript Sequence Number=SeqID_39897
RTTLIHRRAVLGNSRSDANEKCFWNHPWCPGARGETLMLYTIVNSLMDFEGPCL

SEQ ID NO: 105872 - protein, 110 aa, Setaria italica
  Transcript Sequence Number=SeqID_39898
TTLICAILQATTSFCGRHFTLLNRDPATSICHLISAIPIQPACHFTAALLAQPTYHPTAAILVQPTRHLTAAILVQPTCCKPCSLLAIQPTSCEEPAAFWQQPIIGGAFF

SEQ ID NO: 105873 - protein, 83 aa, Setaria italica
  Transcript Sequence Number=SeqID_39899
TMQISAKFSSTILPTLIYISLLQVVLHLIDRCLKYLLPILMLTFFFCYQEIQLGCEAHGFILQSLEKVIPKLFEYLIFYSGIN

SEQ ID NO: 105874 - protein, 48 aa, Setaria italica
  Transcript Sequence Number=SeqID_39900
LLSQGRSIINEIQLGCEAHGFILQSLEKVIPKLFEYLIFYSASATLVY

SEQ ID NO: 105875 - protein, 81 aa, Setaria italica
  Transcript Sequence Number=SeqID_39901
QISAKFSSTILPTLIYISLLQVVLHLIDRCLKYLLPILMLTFFFCYQEIQLGCEAHGFILQSLEKVIPKLFEYLIFYSGIN

SEQ ID NO: 105876 - protein, 57 aa, Setaria italica
  Transcript Sequence Number=SeqID_39902
LIAPAIVAKPKAETGCILIPGRSSMASSATQHRAQPDATIGRPRVLVDCFTGSNCCS

SEQ ID NO: 105877 - protein, 115 aa, Setaria italica
  Transcript Sequence Number=SeqID_39903
TMQISAKFSSTILPTLIYISLLQVVLHLIDRCLKYLLPILMLTFFFCYQEIQLGCEAHGFILQSLEKVIPKLFEYLIFYSGDAPILIYLWLTHTLPLFMSVFFELPPCTHATYCT

SEQ ID NO: 105878 - protein, 98 aa, Setaria italica
  Transcript Sequence Number=SeqID_39904
VAEEAIDDLPGIKIHPVSAFGLATIAGAINHQWVQCSALHSYCLTTYGIKKERWLSLLHAALFREIQLGCEAHGFILQSLEKVIPKLFEYLIFYSGIN

SEQ ID NO: 105879 - protein, 55 aa, Setaria italica
  Transcript Sequence Number=SeqID_39905
KNGCSKFQIAWKLQRFFVQIFTILKKVFNSFVFPCSLLFQVLIRCMYQRARAQTD

SEQ ID NO: 105880 - protein, 271 aa, Setaria italica
  misc_feature (111)..(111): Xaa can be any naturally occurring amino acid
  Transcript Sequence Number=SeqID_39906
  Gene Ontology: Mol. function=unfolded protein binding; Cellular component=chloroplast; Biological process=cellular protein metabolic process
  Homolog annotation: Hit_ID=B9T7X8; Match level="QueryCoverage=99%, HitCoverage=53%, E-value=3e-92, Identity=61%"; Hit description =Rubisco subunit binding-protein alpha subunit, ruba, putative (Fragment)
  Pfam annotation: Domain name=Cpn60_TCP1; Domain location=23-271; Score=-128.4; E_value=2.1e-09; Accession=PF00118.16; Description=TCP- 1cpn60 chaperonin family
RDVKVISTGEACRRGLAAGIDKLADAVAVTLGPKGRNVVIDQDDVPKVINDGVTIAKAIELPNALEHAGASLLQEIASKTNSAVGDGTTTAIVLAREIINLGLLAVATGAXNPVALRRGIDKAVHELIKILKSKCIPVSTKEDIKAVASISSGNDEYVGNLIADALEKIGPDGIIKIESSSSIYTTVEVQEGMKIDKGYVSPHFITNHDKAIVEFENARVLLTDQRVNEVQEILPLLEKTTQLSVPLLIIAEDVSHTVYSTLVLSNPFSLL

SEQ ID NO: 105881 - protein, 157 aa, Setaria italica
  Transcript Sequence Number=SeqID_39907
  Gene Ontology: Mol. function=protein dimerization activity; Cellular component=nucleus; Biological process=regulation of transcription, DNA-dependent
  Homolog annotation: Hit_ID=B6TT61; Match level="QueryCoverage=98%, HitCoverage=67%, E-value=1e-28, Identity=45%"; Hit description=IAA16- auxin-responsive Aux/IAA family member
  Pfam annotation: Domain name=AUX_IAA; Domain location=2-157; Score= -34.2; E_value=6.1e-07; Accession=PF02309.8; Description=AUXIAA family
  Subcellular localization annotation: CTP_CleavageSite=61; ConfidenceScore=5.43e-01
VSVSVSGLEEKGSAGSAAAGAARAPKGSNGSKARAAAAAPVVGWPPVRAFRRNLASSSSKPASHEPSSQRGSDSTTGAAKAIEAGKKGLFVKINMDGVPIGRKVDLRAHAGYDTLSAAVDHLFRGLLAAQTSGGEQEVITGVLNGSGEYTLVYEDEE

SEQ ID NO: 105882 - protein, 32 aa, Setaria italica
  Transcript Sequence Number=SeqID_39908
STVDCHTAMKNRVDEQMSDESSVMSSGYVICK

SEQ ID NO: 105883 - protein, 150 aa, Setaria italica
  Transcript Sequence Number=SeqID_39909
  Gene Ontology: Mol. function=transporter activity; Cellular component= membrane; Biological process=oligopeptide transport
  Homolog annotation: Hit_ID=B4FQ14; Match level="QueryCoverage=90%, HitCoverage=22%, E-value=3e-47, Identity=63%"; Hit description =Peptide transporter PTR2
SVAADHGFLDDPAAVIPLSVFWLVPQFAIHGVAGAFSSVGHMEFLYDQAPESMRSTAAALFWLASSIGHYLGTVLVTAVQRATRSRGDWLQDNINRGRIDSYYWLVTCLMVLNLGYYIICFRFYTMKPLEMADEQDDHDKECELSSLHKM

SEQ ID NO: 105884 - protein, 94 aa, Setaria italica
  Transcript Sequence Number=SeqID_39910
  Subcellular localization annotation: CTP_CleavageSite=51; ConfidenceScore=5.50e-01
LPRNLTLLRPLEAAAAAPTSRKSGPAAAPATTSTPSSSKDDASSPPLPSTSAASPAAEGPAEGPADADQSGVATLSSGAIMASVAAAVATMIFY

SEQ ID NO: 105885 - protein, 114 aa, Setaria italica
  Transcript Sequence Number=SeqID_39911
LGGKFINPKELHNRMLSMSKRFSLTLDIEAIGKTKQYRVWTSKNFVLCKAALQNCDALDDHEYCSDFRPPVPSKESDSLNELLFEEDRHDKPVHDLLSSHEACVELLNYLNKIP

SEQ ID NO: 105886 - protein, 197 aa, Setaria italica
  Transcript Sequence Number=SeqID_39912
  Gene Ontology: Cellular component=integral to membrane
  Homolog annotation: Hit_ID=B4FMX3; Match level="QueryCoverage=92%, HitCoverage=53%, E-value=1e-74, Identity=77%"; Hit description =Membrane protein
  Pfam annotation: Domain name=Rhomboid; Domain location=63-197; Score =153.0; E_value=8.8e-43; Accession=PF01694.14; Description=Rhomboid family
VVIANVAMFVVVMFYNNCPRGGGDCVGRGFLRRFSFQPLKENPLLGPSAATLQKYGALDWYKVVRGNQAWRLESCTWLHAGLIHLLANMISLIFIGVRLEQQFGFWKVGLVYLVSGFGGSVLSVLFIRKGVSVGASGALFGLLGAMLSELITNWTIYTNRFAAMLNLVIIAAINLALGILPHVDNFAHIGGFATGFL

SEQ ID NO: 105887 - protein, 60 aa, Setaria italica
  Transcript Sequence Number=SeqID_39913
HGIWCNFDNSHQKFQHFLLAMTPYKTISVELRQKVNIARYRMFHYLSARIIHSPLTNGPR

SEQ ID NO: 105888 - protein, 165 aa, Setaria italica
  misc_feature (29)..(29): Xaa can be any naturally occurring amino acid
  Transcript Sequence Number=SeqID_39914
  Gene Ontology: Mol. function=binding; Cellular component=microtubule
  Homolog annotation: Hit_ID=Q84VS2; Match level="QueryCoverage=98%, HitCoverage=19%, E-value=4e-52, Identity=59%"; Hit description =Potyviral helper component protease-interacting protein 2
RVAIPELDGEALNDDNQGDERGPLWDAWXRAMDAVHVDDMDSAYAEVLSTGDAELLVKLMEQTGPVVDQLSNEVANEVLHAVGQFLVEESFYDVALTWLQQLTDLVMENGSDYLGIPLDAKQDLLLGLHEATAIELPDDWEGATPVQIMKQLASSWRIDLQQLVN

SEQ ID NO: 105889 - protein, 645 aa, Setaria italica
  Transcript Sequence Number=SeqID_39915
  Gene Ontology: Mol. function=binding; Cellular component=microtubule
  Homolog annotation: Hit_ID=Q84VS2; Match level="QueryCoverage=95%, HitCoverage=68%, E-value=1e-151, Identity=50%"; Hit description =Potyviral helper component protease-interacting protein 2
  Pfam annotation: Domain name=HEAT; Domain location=58-94; Score=20.7; E_value=0.0062; Accession=PF02985.14; Description=HEAT repeat
TYDQRTVGKGTGPGPGVIGMFGKLGPRICKLLGGQGVQAKAALLGVLGSLAQVGAISSQNMPQTLQSIRDCLENSDWATRKAAADTLCVLATHSGHLIGDGAAPTIAALEACRFDKVRPVRDSMIDAVQLWKKLTGEDANDGRNKDPADGEGKLDTKRSMQRSGKSESFEDSSPDSPSNNAKGSSIAEKAAVLLKKRSTLTDRELNPEFFQKLETRKTDGLAVEVVVPRKTLQSHLRSEEPEEDGDHVGPANSNGSAEDEANLTQMRASSNFQNIRDRWTNQRGNRNKDAKARASDVEDRGEPSAKDTMNIPGEGPFINNKTNWLAIQRQLSHLERQQTSLMNMLQDFMGGSHDSMVTLENRVRGLERVVEEMAREISLSSGRRGGGPALGFDSSPGRSSKYNGFHEYSNAKFGRSGDGRMGFAERYFSADGASGLRSPSWRPDSEQWDYAYSGSRSGMNARRGLDSVSSDNRMPRNERSNDQAGPRRGWDKGQGPFRFGEGPSARSAWRASKDEATLEAIRVAGEDNGSSRAAARVAIPELDGEALNDDNQGDERGPLWDAWTRAMDAVHVDDMDSAYAEVLSTGDAELLVKLMEQTGPVVDQLSNEVANEVLHAVGQFLVEESFYDVALTWLQQKPGFPFGLD

SEQ ID NO: 105890 - protein, 95 aa, Setaria italica
  Transcript Sequence Number=SeqID_39916
  Homolog annotation: Hit_ID=Q9XGD8; Match level="QueryCoverage=88%, HitCoverage=77%, E-value=7e-10, Identity=43%"; Hit description=BETL4 protein
MPGKIVLLLVVFAIVSPSHVMADCTQEQKAAILYDCRKYLSRMARRIVAPKTWDHCCRDVRAVPNRDMDCIRKLLTYTEVMRIVEIRITNLAYLC

SEQ ID NO: 105891 - protein, 56 aa, Setaria italica
  Transcript Sequence Number=SeqID_39917
TEGWLGTLAFLQRKVALTTFQLLLSWNSQSLKLSNSNPSTRSNHRHNHTKQTNKYN

SEQ ID NO: 105892 - protein, 335 aa, Setaria italica
  Transcript Sequence Number=SeqID_39918
MSYDQMLAPLFGAGRSAWRAAQQGGGGGDAVTRQILKCTRWQLEETTDFVTCPYHYYCDSSYPGDYSAAVGFLVAAFAAYCFLSTLAFTVLDLVRGNGGGGAPAAGVRGIKRKYLLPSGPFLLPLVLLALAKGQRVNAVFPLAQLGPALLLLLQASALAFRNEADGDIRYAVLEASTVSGVLHASLYLDAVVLPYYTGLEALRWSRFSGECASCLCRMEPLVVGGTAVQYRGLSKTALAIIFALCSRMVCRIYGEERLSAWTRSALEAVGWVFVAGDAVYLVGWVAAEGGVVGVAAYSLVAGLVFLSVFGKVYRFLAWVETRQSQWKSSLCHSVV

SEQ ID NO: 105893 - protein, 69 aa, Setaria italica
  Transcript Sequence Number=SeqID_39919
  Subcellular localization annotation: CTP_CleavageSite=30; ConfidenceScore=5.08e-01
ITAHVSSPSTKEKGTVKMKRGNKNSKASVLASQQETKMFGRIIWGCKSYLSGSRFLNYLTQECKVNRCS

SEQ ID NO: 105894 - protein, 156 aa, Setaria italica
  misc_feature (28)..(28): Xaa can be any naturally occurring amino acid
  Transcript Sequence Number=SeqID_39920
  Gene Ontology: Mol. function=RNA methyltransferase activity; Cellular component=cytoplasm; Biological process=RNA processing
  Homolog annotation: Hit_ID=B9T3S9; Match level="QueryCoverage=100%, HitCoverage=46%, E-value=5e-63, Identity=75%"; Hit description=rRNA methylase, putative
  Pfam annotation: Domain name=SpoU_methylase; Domain location=1-101; Score=53.1; E_value=1.1e-12; Accession=PF00588.11; Description=SpoU rRNA Methylase family
NRHVSMGAEKWLDIEIWNSPAECFSALXKKRGYRIATTCLGTDSVCVYDMDWSQPTAIVVGNELRGISDDALELSDLHCSVPMKGMVDSFNVSVAAGILMHHAVCDRFSRLGHHGDLLPEENRILLAEFYMRHRESTATIVHEYAKRKAENFMARL

SEQ ID NO: 105895 - protein, 58 aa, Setaria italica
  Transcript Sequence Number=SeqID_39921
  Subcellular localization annotation: CTP_CleavageSite=40; ConfidenceScore=5.11e-01
AARTELGALAARASCPVPGGGITPWWCRRFMSPAGCCVLRARAGSERSGRGSALNMQT

SEQ ID NO: 105896 - protein, 71 aa, Setaria italica
  Transcript Sequence Number=SeqID_39922
CNGYMSWAPSPCVAIDHPCHLATSSAIPPRSNRWLRLTLTGHHLRTTKHLSILFLVIYCDIIIFGIRCCHV

SEQ ID NO: 105897 - protein, 59 aa, Setaria italica
  Transcript Sequence Number=SeqID_39923
KQEKESARMILVAIVADSFLASPAARGGSCECTVWLAGCRRFLSGSTISAGLLIVSQKP

SEQ ID NO: 105898 - protein, 199 aa, Setaria italica
  misc_feature (11)..(11): Xaa can be any naturally occurring amino acid
  misc_feature (106)..(106): Xaa can be any naturally occurring amino acid
  misc_feature (121)..(121): Xaa can be any naturally occurring amino acid
  Transcript Sequence Number=SeqID_39924
  Gene Ontology: Mol. function=transporter activity; Cellular component= membrane; Biological process=transport
  Homolog annotation: Hit_ID=Q53RB3; Match level="QueryCoverage=100%, HitCoverage=18%, E-value=1e-77, Identity=66%"; Hit description =Natural resistance-associated macrophage protein, putative
SLRFCIMKLLXKLEGSGWLFGQNGGCDENLIDQVSEAERVSREKTSDDRDANAMCRGPNCGDYCIWQASLVVSFSVWCIHRVLDLSRVESRPELWGKYTYVLNRLXGIIEPAFSKPPEPLXGCACLTNAGTVGKPIPGSFTTAAEILEVIKGVEQAVSGRKGRIGTAAGDVAFPKGKENLASVLKRYKRRLSSKTLAGH

SEQ ID NO: 105899 - protein, 419 aa, Setaria italica
  misc_feature (21)..(21): Xaa can be any naturally occurring amino acid
  Transcript Sequence Number=SeqID_39925
  Gene Ontology: Mol. function=transporter activity; Cellular component= membrane; Biological process=transport
  Homolog annotation: Hit_ID=Q6JN48; Match level="QueryCoverage=100%, HitCoverage=33%, E-value=0.0, Identity=80%"; Hit description =Ethylene insensitive 2
CACCTTYVDSMMHSRNQNLLXSLGATPSQIAATSRIGSMMTERSYYDPSIVDGSESAGSSAYSKKYHSSPDISAIIAASRTALLNEAKMGGAIGPQSYLSRMASERSQYANSIARPAAPLAFDELSPPKLQSDIFSAQSSMSPSARSLWAKQPFEQLFGMSSAELSKGDFNLYGRSGGMAKDDFSYKESEMKLLQSLRFCIMKLLKLEGSGGLFKQSGGRDEDLIDRVAAAERLLLQGTTENQLLHGDLQQPSSDQADIQYMRTLPNCGEDCVWRASLVVSFGVWCIRRVLDMSQVESRPELWGKYTYVLNRLQGILDPAFSKPRSALTICACLQKDIRVLNGPAHSGLSAMGPIPMPIRGTFTTAAVVLEMIKDVETAVSGRKGRSGTAAGDVAFPKGKENLASVLKRYKRRLASKGQ

SEQ ID NO: 105900 - protein, 71 aa, Setaria italica
  Transcript Sequence Number=SeqID_39926
LNEMYQNDLIHNLPCQVVQAHKLKPLTNFRDAMVDGMNNDSTITTIRHFLSAHTNQYKAQCNRFELCKIFF

SEQ ID NO: 105901 - protein, 76 aa, Setaria italica
  Transcript Sequence Number=SeqID_39927
TALLTSFHAERSLEDLMELKAMAQELCDECTNLSSQCDQLEERVSVMGFHFSKKNFRIVFVDLGLNYNRIDLLGKK

SEQ ID NO: 105902 - protein, 1129 aa, Setaria italica
  Transcript Sequence Number=SeqID_39928
  Gene Ontology: Mol. function=phosphopantetheine binding
  Homolog annotation: Hit_ID=Q6ZI81; Match level="QueryCoverage=63%, HitCoverage=100%, E-value=0.0, Identity=55%"; Hit description =Putative T-complex protein 11
  Pfam annotation: Domain name=Tcp11; Domain location=645-1129; Score =247.5; E_value=3.1e-71; Accession=PF05794.5; Description=T-complex protein 11
MMGAREPVAMEIPAEEGAAARSPPRRIRRRLVEGARGGGAPASVEEIEARLREAELRRQQFHEWLACKARKKPRSPSWSSQEEDHGQRLEAKLLAAEQKRLSLLAKARNRLAKLDELRQAAKNDVEMRFEKEREELEIRVESRVRQAEENRLRLLHADMQKRAALKERTARSLVQKATSESKYMEQVRTAILQKRTAAEKKRLRLLEAEKMKAQARLLRIQKAAMTVCSQRETERKKLKEQLDSKLQRAKRQRAEYLKQRGSPRNSAHADYIKHADFFSIKLARCWRIFVKSRKTTLTLVEAYDALGINEKSVKSMPFENLAMSMESPTVLQTTKALLDRLERRLVISHSVASSSLENVDHLLKRVSSPPRRKVPPSREGRTRAVAKRSAKSSVASIRLPRYSLRVVLCAYMILAHPSAVLSGQGEREKQLMESAANFIKEFELLIKIILDGPGRSSDVTGQRKFRTQLANFDKAWCTYLYCFVVWKVKDARLLEEDLVRAACKLELSMMQTCKLTADGQSPNNLTHDMKAIQKQVTDDQKLLREKVQHLSGDAGIERMDSALSDTRSKFFEAKENGSPLAAPVANVFTPLSINSSGKTPSVVKENSRTNALGSSSVARSLLGASSSSSTSPVKQLTENEQMVNEMLHEDDSAFAGRSDSANTAEEEFQKKVRETMEKAFWDSVTDSIRGDMPDYSRLINLVKEVRDSLHELAPKEWKEEILENIDIEILSQVLGSGSQDAQYLGQILQYSLAMVRKLSAAAKEDEMKKSHDKLLSELAASSEVNDNGINSFVIAVIKGLRFILEEIKELQAEVSKARIQLMQPIIKGSAGVEYLQKAFTDRYGPPDNASASLPLTMQWISTSKNIVEEEWSEHSDCLSIIPSAGQAPALVPVLRAGHGTPVEQPSSSAAGASGQPECKGEKLDKLIRIGLLQLITSMEGLQMQSTPESLQINLLRLRSVQSQFQKVIAIATSMLVLRQVLMSENSEATPLELENAISELFKALEKILDSSPDAGTEEIVEAMISASASVGSPSEEKIQARRQMITRVFLKSLQPGDVVFKVVSRAVYCAFRGVVLGGSSPKGQKLADAAMRRIGAVKLVDRVVKAAEVLIKVATVSEKVHGPWYKALM

SEQ ID NO: 105903 - protein, 47 aa, Setaria italica
  Transcript Sequence Number=SeqID_39929
HMHFANVGPSLLHLSRTPNYPSTKLTIQRKLCARQKLNALVRIEKEK

SEQ ID NO: 105904 - protein, 94 aa, Setaria italica
  Transcript Sequence Number=SeqID_39930
  Gene Ontology: Mol. function=galactosyltransferase activity; Cellular component=membrane
VAVEQSNTGEKAGFDPVFEVEVRNTCGCAVRAVYLRSEGFASSVAVDPRLFRREGRDYLVGNGCRIEPNSAVRFRYAWDRAFRMTAAAVHDDCS

SEQ ID NO: 105905 - protein, 58 aa, Setaria italica
  Transcript Sequence Number=SeqID_39931
CSFAWFPLPLEFSVAGNITYGCYEGLLGYSIVRVVVYCCIALPILRSLANLVGSVNNT

SEQ ID NO: 105906 - protein, 46 aa, Setaria italica
  Transcript Sequence Number=SeqID_39932
DIKSNALDWGSFRLDLHSWITFFPLGFAEEYRSRLQFWTCMKRFTS

SEQ ID NO: 105907 - protein, 65 aa, Setaria italica
  Transcript Sequence Number=SeqID_39933
  Subcellular localization annotation: CTP_CleavageSite=35; ConfidenceScore=5.42e-01
ARLCECVDKRKALLVLFSYLVMLRASRPTPTTSFRRTRGVTRFISFLLLLFPTPTTSFGRTCGVT

SEQ ID NO: 105908 - protein, 75 aa, Setaria italica
  Transcript Sequence Number=SeqID_39934
KIVALKHMLLISTIQHTSTSVMRVSCKVAILLPISFLWHYPGHQDHFDNQNSYACLQSYPYKTLWNDAYKICCTI

SEQ ID NO: 105909 - protein, 182 aa, Setaria italica
  Transcript Sequence Number=SeqID_39935
  Gene Ontology: Mol. function=cysteine-type peptidase activity; Biological process=proteolysis
  Homolog annotation: Hit_ID=Q67VB7; Match level="QueryCoverage=87%, HitCoverage=34%, E-value=5e-35, Identity=56%"; Hit description =Ankyrin repeat protein-like
  Pfam annotation: Domain name=Ank; Domain location=120-152; Score =18.3; E_value=0.033; Accession=PF00023.22; Description=Ankyrin repeat
  Pfam annotation: Domain name=Ank; Domain location=15-47; Score=18.7; E_value=0.024; Accession=PF00023.22; Description=Ankyrin repeat
  Pfam annotation: Domain name=Ank; Domain location=49-79; Score=13.3; E_value=0.44; Accession=PF00023.22; Description=Ankyrin repeat
  Pfam annotation: Domain name=Ank; Domain location=86-118; Score=14.4; E_value=0.3; Accession=PF00023.22; Description=Ankyrin repeat
  Pfam module annotation: Pfam domain module=Ank::Ank::Ank::Ank; Domain location=120-152::15-47::49-79::86-118
SRAGAECCLKGVTAEGSSALHIAASCGYLELVKMVCARDISLIKARNNLLDTPLICAARAGHVDVANYLMDCAMDEQEDLRARNLDGETAMHEAVRNGHLHVLQGLMSRDSGLAGVADENGVSPLYLAVASNRADMVKVLIGKSSNPETSLCYSGPDGQTALHAAVYVSREIFESLQVVLEP

SEQ ID NO: 105910 - protein, 68 aa, Setaria italica
  Transcript Sequence Number=SeqID_39936
WRRRNRRLGSMGRKVRLKRWEYGPFSLGHMNYGPKLRICQNSLYKSIEKKKLEPEKWALDHMNRLSRI

SEQ ID NO: 105911 - protein, 182 aa, Setaria italica
  Transcript Sequence Number=SeqID_39937
  Homolog annotation: Hit_ID=B6T619; Match level="QueryCoverage=96%, HitCoverage=66%, E-value=2e-26, Identity=35%"; Hit description=FHA domain containing protein
ECCIQGVSYLPGSDPVKLNSQDLIEIAGKQFYFLLATRSFSTTPAPGAHALLPQTPTLILPGHPGTHDNDTEDQQLLEEERNAVSALVVLMSDICSPGEWVNMENLHLEILERFGENALVRRYLAREDASVSSTETEGRPWRSLLPLLRKHPEYFVMSTVTRGEVTSEYAALVSLVSMGNEP

SEQ ID NO: 105912 - protein, 46 aa, Setaria italica
  Transcript Sequence Number=SeqID_39938
FKAKSSWAEIYGAFFKPSSYLGQRAKSGIPLSASSSSLLDSTRSRM

SEQ ID NO: 105913 - protein, 88 aa, Setaria italica
  Transcript Sequence Number=SeqID_39939
  Gene Ontology: Mol. function=3-hydroxyacyl-CoA dehydrogenase activity; Cellular component=cytoskeleton; Biological process=fatty acid metabolic process
  Homolog annotation: Hit_ID=B6SXV4; Match level="QueryCoverage=77%, HitCoverage=9%, E-value=1e-29, Identity=86%"; Hit description =Peroxisomal fatty acid beta-oxidation multifunctional protein
LMDENVVIQASDLDIASVLGMGFPKYRGGLIFWADTVGAPYIHSRLIQWAEIYGAFFKPSSYLGQRAKSGIPLSASSSSLLDSTRSRM

SEQ ID NO: 105914 - protein, 47 aa, Setaria italica
  Transcript Sequence Number=SeqID_39940
FCTCHGVIDKLPDSFDLWLQFSSDFAILLFHYDGQVSEWDEFEWSKR

SEQ ID NO: 105915 - protein, 402 aa, Setaria italica
  Transcript Sequence Number=SeqID_39941
  Homolog annotation: Hit_ID=B4FSQ8; Match level="QueryCoverage=99%, HitCoverage=100%, E-value=0.0, Identity=81%"; Hit description=Lysine ketoglutarate reductase trans-splicing related 1
  Pfam annotation: Domain name=DUF707; Domain location=95-387; Score =755.3; E_value=4.6e-224; Accession=PF05212.4; Description=Protein of unknown function (DUF707)
  Subcellular localization annotation: CTP_CleavageSite=8; ConfidenceScore=5.05e-01
MAKLPVVACSAIRKPNESMRLIVVTTVGVVFGFFVGISFPTVSITKLHFPSSIVSYIKDRNSGLSTQAILNHAWTAARNARGNGSEPNSNDTLKIYVPTNPRGAESLAPGIVVPESDFHPHRLWGNPEEDLPFKPKYLVTFTVGISQKENINRAVKKFSSDFAILLFHYDGQVSEWDEFEWSKRAIHVSARKQAKWWYAKRFLHPDIVAAYEYIFIWDEDLGVNHFNGDEYIKLVKKYQLEISQPGLEPDKGLTWQMTKRRGDRQVHKVTEEREGWCSDPHVPPCAGFVEIMAPVFSRDAWRCVWHMIQNDLIHGWGLDFALRKCVEPAHEKIGVVDSQWIVHQVVPSLGNQGQSENGRAPWEGVRERCRKEWGIFQTRMAEAEKAYYEMMGVTPPNVTFVS

SEQ ID NO: 105916 - protein, 61 aa, Setaria italica
  Transcript Sequence Number=SeqID_39942
RIDIEVYLSCPILLNRKHSARQKLVLQSGVKVQARKDQSIPNSMLIHSIDCSQKSSHNYRQ

SEQ ID NO: 105917 - protein, 147 aa, Setaria italica
  misc_feature (110)..(110): Xaa can be any naturally occurring amino acid
  Transcript Sequence Number=SeqID_39943
  Gene Ontology: Cellular component=chloroplast
  Homolog annotation: Hit_ID=B9RZE4; Match level="QueryCoverage=94%, HitCoverage=28%, E-value=2e-21, Identity=35%"; Hit description =Pentatricopeptide repeat-containing protein, putative
  Pfam annotation: Domain name=PPR; Domain location=44-78; Score=42.3; E_value=1.9e-09; Accession=PF01535.12; Description=PPR repeat
  Pfam annotation: Domain name=PPR; Domain location=79-113; Score=12.8; E_value=0.27; Accession=PF01535.12; Description=PPR repeat
  Pfam annotation: Domain name=PPR; Domain location=9-43; Score=35.4; E_ value=2.3e-07; Accession=PF01535.12; Description=PPR repeat
  Pfam module annotation: Pfam domain module=PPR::PPR::PPR; Domain location=44-78::79-113::9-43
QIFLQDNVCTYSIRMAEYCDCRDVEKARGLWGEMVQEGIQPDVIVCNTMIGGYCRAGEVGMAEEMFKNMEMDGIDPSATTFEWLVRGHCMAGDAEAALLVRADMRRRGLXLASEVVEELLDALCQNGRVQDGLHVLREEMRREEFAP

SEQ ID NO: 105918 - protein, 67 aa, Setaria italica
  Transcript Sequence Number=SeqID_39944
MADFGDELFLDVGDDGFGDLSYVTLSQSIEEDLACPRNLLSPGGFDLGTLTPTPGSPFSFDSDPDLS

SEQ ID NO: 105919 - protein, 66 aa, Setaria italica
  Transcript Sequence Number=SeqID_39945
  Subcellular localization annotation: CTP_CleavageSite=13; ConfidenceScore=5.07e-01
DSAQYKRILVGYRAFNRRHDAGIGPQAPTHSSSQRLETTSVTQARSSTRHWQKPFGSKTSLVAKNC

SEQ ID NO: 105920 - protein, 138 aa, Setaria italica
  Transcript Sequence Number=SeqID_39946
  Homolog annotation: Hit_ID=B6U6Z6; Match level="QueryCoverage=93%, HitCoverage=16%, E-value=9e-50, Identity=77%"; Hit description =SCARECROW-like protein
AAAPAPAAAGQPDDSEAFSDIVLGYINRMLMAEDIDDKFEHYPEHSALLAAEKPFLEILADQPTSSGGSAVESPDGSSVTNSCNSFGSCSCGAAASDGFGAVPTPALDFPSAAFLQPPQLYQDLSPESSVVDAGGPWP

SEQ ID NO: 105921 - protein, 68 aa, Setaria italica
  Transcript Sequence Number=SeqID_39947
RKKEVESKCNVAQTDASQGLAKKLMLHWALLRVIKCEVKKSWPHNEISTSNRIGTSFSLLLSGRYSYK

SEQ ID NO: 105922 - protein, 78 aa, Setaria italica
  misc_feature (30)..(30): Xaa can be any naturally occurring amino acid
  Transcript Sequence Number=SeqID_39948
  Gene Ontology: Mol. function=transferase activity, transferring glycosyl groups
  Homolog annotation: Hit_ID=C4MF59; Match level="QueryCoverage=93%, HitCoverage=16%, E-value=2e-13, Identity=58%"; Hit description=UDP -glycosyltransferase UGT710F3
MLHFIACVTDAMRASSSGVVLNTFDAIEGXELAKIRQELSRPAFAVGPLHLLAPAAQQEEQHAPDRGCLAWPGRAVEG

SEQ ID NO: 105923 - protein, 70 aa, Setaria italica
  Transcript Sequence Number=SeqID_39949
  Pfam annotation: Domain name=Auxin_repressed; Domain location=7-70; Score=17.2; E_value=2.3e-06; Accession=PF05564.4; Description =Dormancyauxin associated protein
  Subcellular localization annotation: CTP_CleavageSite=39; ConfidenceScore=5.44e-01
MGLLDQLWDDTVAGPRPDSGLGKLRKYASFSPSSSSSVSAAAASPPAAEGASRAVPVPPVTRSITMLRPS

SEQ ID NO: 105924 - protein, 73 aa, Setaria italica
  Transcript Sequence Number=SeqID_39950
RYSVAIHDHWQTLAVLLHREHPCVLFLVPMAFVRKLSTLPCKLICSRKQLFFLKTFFKRSSRKQYFLTLLLQL

SEQ ID NO: 105925 - protein, 54 aa, Setaria italica
  Transcript Sequence Number=SeqID_39951
KAFQRHIISRLPHKYRNKCRSELTRHYLTWANLSSLLASFLSLLALLFARLASN

SEQ ID NO: 105926 - protein, 424 aa, Setaria italica
  Transcript Sequence Number=SeqID_39952
  Gene Ontology: Mol. function=tRNA dihydrouridine synthase activity; Cellular component=nucleus; Biological process=metabolic process
  Homolog annotation: Hit_ID=B9T4U6; Match level="QueryCoverage=82%, HitCoverage=81%, E-value=1e-164, Identity=76%"; Hit description=tRNA- dihydrouridine synthase, putative
  Pfam annotation: Domain name=Dus; Domain location=93-397; Score =274.7; E_value=2.1e-79; Accession=PF01207.9; Description =Dihydrouridine synthase (Dus)
MPLRRLAPHLPSPRRFLRSLNPSPAMSPAADAAHLATAADPDEDLCSSAAESAAAAAEEVAPARPLPRPPVSAEERIERAWSHWRRLGAPRLMVAPMVDNSELPFRMLCRRYGADAAYTPMLHSRIFSENEKYRSMEFTTCKEDRPLFVQFCANDPDILLQAAKMVEPYCDYVDINFGCPQRIARRGNYGAFLMDNLPLVKSLVQNLSANLHVPVSVKIRIFPRLEDTLAYAKMLEEAGASLVAVHGRTRDEKDGKKFRADWDAIKAVKDALRVPVLANGNIRHMEDVNNCLEHTGADGVLSAETLLENPALFAGFRTKEWKDDGDENGDSGLDQADLVIEYLKLCEQYPVPWRMVRSHVHKMLGDWFRVHPEVREELNKQNKLTFEWLHDMVLRLKELGGRVPLYRKESALQTTANGVAASNA

SEQ ID NO: 105927 - protein, 118 aa, Setaria italica
  misc_feature (107)..(107): Xaa can be any naturally occurring amino acid
  misc_feature (110)..(110): Xaa can be any naturally occurring amino acid
  Transcript Sequence Number=SeqID_39953
  Homolog annotation: Hit_ID=Q851R0; Match level="QueryCoverage=100%, HitCoverage=18%, E-value=3e-19, Identity=44%"; Hit description =Nodulin family protein, putative, expressed
IVVQKQVNFSHAAYGVSAAALLLVLFLPLAVVVKQEYKIQKELQESLREHPTVTVEKPAADLQMVAADEPAANESQLQSTTEQTEETSPPPSGCLGSCLRHMFSPPXQGXDYTILQAL

SEQ ID NO: 105928 - protein, 54 aa, Setaria italica
  Transcript Sequence Number=SeqID_39954
NVTFALYLLTSSLSLPHFLSFHKPLAPPHQLMLLHLLGGGLKFSPPISPPVWMG

SEQ ID NO: 105929 - protein, 127 aa, Setaria italica
  Transcript Sequence Number=SeqID_39955
  Gene Ontology: Mol. function=RNA binding
SEIDASGEEWDSGDDTDNFLGFNNDSGAPDDHPQRFKSTRNEKSRSSGRQNSIPGGFRSSNWTPGNSLAASDSTTFRDSNDDGLGTEDDDLWDSDYKGGETNSRAPKVNFPNFHSSSDEGSNDDFKH

SEQ ID NO: 105930 - protein, 92 aa, Setaria italica
  Transcript Sequence Number=SeqID_39956
  Gene Ontology: Mol. function=histone-lysine N-methyltransferase activity; Cellular component=nucleus; Biological process=ubiquitin -dependent protein catabolic process
  Homolog annotation: Hit_ID=B4FF77; Match level="QueryCoverage=52%, HitCoverage=9%, E-value=1e-19, Identity=89%"; Hit description =Ubiquitin carboxyl-terminal hydrolase
  Subcellular localization annotation: CTP_CleavageSite=52; ConfidenceScore=5.28e-01
SLYEYSLITFKLGGNNLTTCQFQANVDVASSSSSSPQQSPSSRSKLYGLSAVVEHYGKCGGGHYAVYRRVASNPDHDDPGQPLAGLAKRWFY

SEQ ID NO: 105931 - protein, 177 aa, Setaria italica
  misc_feature (172)..(172): Xaa can be any naturally occurring amino acid
  Transcript Sequence Number=SeqID_39957
  Gene Ontology: Mol. function=histone-lysine N-methyltransferase activity; Cellular component=nucleus; Biological process=ubiquitin -dependent protein catabolic process
  Homolog annotation: Hit_ID=B4FF77; Match level="QueryCoverage=98%, HitCoverage=32%, E-value=2e-65, Identity=74%"; Hit description =Ubiquitin carboxyl-terminal hydrolase
YKYKCPKILCIHLLRASVRFDGEPIKHKGHISFPLLLNLSPFAGGASSTGLGPGPLAVNMQRDGQQALHLYRQLNMQISLNANVDVASSSSSSPQQSPSSRSKLYGLSAVVEHYGKCGGGHYAVYRRVASNPDHDDPGQPLAGLAKRWFYISDGHVSEVSEDDVLGAKATLXFYERL

SEQ ID NO: 105932 - protein, 332 aa, Setaria italica
  misc_feature (105)..(105): Xaa can be any naturally occurring amino acid
  Transcript Sequence Number=SeqID_39958
  Gene Ontology: Mol. function=hydrolase activity; Cellular component =chloroplast; Biological process=meiosis
  Homolog annotation: Hit_ID=Q7XS73; Match level="QueryCoverage=98%, HitCoverage=27%, E-value=1e-126, Identity=70%"; Hit description =OSJNBa0020I02.9 protein
NLFWICMVNCSGILSLPQEEQIVCTLTAILRRNGNGELGMSSETFILVCSILIEILKSPHAHDIEKLPPFIEEASKYAISSTLSHEYDSMILIPHSLLLLKEALXFCLEGSKYNISSKKDLEDSIIETCGTILLHWLENAVVDGNDDESLAGILQIFQIILSRATDKKPLKFAELLASSSWFSLSFGFMGLFPTDHVKSVVYLVTSSIVDRVLGCNYGEAIRDAHIYLPSDPTELMYLLGQCSTEDFNLASCQCAILSILYACSFYNERLAADNQILASVEQYILLNGGNFPQEINCSVFLTLLVHLYAFVRGISYSCSIPHSPEAENTLFH

SEQ ID NO: 105933 - protein, 99 aa, Setaria italica
  Transcript Sequence Number=SeqID_39959
  Gene Ontology: Mol. function=hydrolase activity; Cellular component =plasma membrane
  Homolog annotation: Hit_ID=Q2RBB3; Match level="QueryCoverage=68%, HitCoverage=26%, E-value=2e-29, Identity=82%"; Hit description =Hydrolase, alpha/beta fold family protein, expressed
LVHGEGHGAWCWFKLRWLLEGSGYRVTCIDLAGGGVDPTDPNTVRSFKQYDKPLIDLISILPEGEKVCALLFLFARKLMLNYRVISWHIKSSNDLCYFE

SEQ ID NO: 105934 - protein, 231 aa, Setaria italica
  Transcript Sequence Number=SeqID_39960
MAMEDETREAADGTEVQVEAVDLGTVHFEAHPEVKLPSIMEIKNVGEAIDSTAGTLEIPEDQVLVEAPSELELPPEHKLNGEASSPNGHMDKEEKISNAQLHENDQEEAELEGTSAHQSNGINKEEVTDGLSHGESTTEHSSLLKHEKDEEPRDDRQDSEGVTVDDDLVQEDTLQPDNSIEQTDDGQRDQNQEPEKANEGTQPASIANNADIEEAEAPTGFQTPVEPHMDD

SEQ ID NO: 105935 - protein, 318 aa, Setaria italica
  misc_feature (58)..(58): Xaa can be any naturally occurring amino acid
  misc_feature (293)..(293): Xaa can be any naturally occurring amino acid
  Transcript Sequence Number=SeqID_39961
  Gene Ontology: Mol. function=sequence-specific DNA binding; Cellular component=nucleus
  Homolog annotation: Hit_ID=Q9LQJ8; Match level="QueryCoverage=82%, HitCoverage=14%, E-value=9e-58, Identity=47%"; Hit description =F28G4.7 protein
EAIHANGFIGAKMIRAKLLHKFLWVYVSCLPNWCSLFDCAKEGQHDQSCQLFSIAAAXKKMPLQLFLQVVGSSKIDSMVTKFSLGKTLSEIPTNVYNQLMDTHAKGRLSRLINILDKLKLIRLVNRHVEDSDVQSDALPTHSLELRPYIEEPSPRIVPSSHANVNHRPKMRHDFQLSKQECVDAYWETLKYCYLSAGLAEPSAFPGCCVPEVSHPRSWSSLRIMTTKQHLELQRLMNESEIGELSYKVCHIIAKELNLSVQQVLCASSKNRQISGTQNHRKFSSKSSAQKRKXRSADEISMKFIKQKVEARGSAEQSS

SEQ ID NO: 105936 - protein, 210 aa, Setaria italica
  misc_feature (52)..(52): Xaa can be any naturally occurring amino acid
  Transcript Sequence Number=SeqID_39962
  Gene Ontology: Mol. function=histone-lysine N-methyltransferase activity; Cellular component=nucleus; Biological process=chromatin modification
  Homolog annotation: Hit_ID=Q8L821; Match level="QueryCoverage=98%, HitCoverage=27%, E-value=1e-79, Identity=67%"; Hit description=SET domain-containing protein SET118
  Pfam annotation: Domain name=Metallothio_2; Domain location=12-79; Score=-10.8; E_value=0.0043; Accession=PF01439.10; Description =Metallothionein
  Pfam annotation: Domain name=Pre-SET; Domain location=1-82; Score= -4.4; E_value=0.0015; Accession=PF05033.8; Description=Pre-SET motif
  Pfam annotation: Domain name=SET; Domain location=84-209; Score=63.4; E_value=8.5e-16; Accession=PF00856.20; Description=SET domain
  Pfam module annotation: Pfam domain module=Metallothio_2::Pre -SET::SET; Domain location=12-79::1-82::84-209
LGVHIKIPIDRIGCNCSGDCSTSEHCLCAKRNGSELPYVSTKRKMLIGMILXHSSVGRLVEPKAVVYECGTNCTCHCNCVNRTSQQGLKLRLEVFKTESKGWGVRTWDTILPGALICEYTGVLRRTTEVEGLLENNYIFDIDCLQTIKGLDGREQRPGSELHIASLQSEHDSVASQAPEYCIDAGSVGNIARFINHSCQPNLFIQCVLSS

SEQ ID NO: 105937 - protein, 178 aa, Setaria italica
  Transcript Sequence Number=SeqID_39963
  Gene Ontology: Mol. function=hydrolase activity; Cellular component =chloroplast
  Homolog annotation: Hit_ID=B6T9Z2; Match level="QueryCoverage=88%, HitCoverage=92%, E-value=2e-66, Identity=82%"; Hit description=Nudix hydrolase 4
  Pfam annotation: Domain name=NUDIX; Domain location=22-157; Score =62.6; E_value=1.5e-15; Accession=PF00293.20; Description=NUDIX domain
MAAVMVARQGRELQRYSDSTGGRIVVGCVPYRASGGAGGEVEVLVISSQKKGPAGGVLIPKGGWELDESMDEAARREAAEEAGVVGETGPALGRWCYRSRSYDATYEGFVLPLRVTAELDRWPEMGARRREWVSPAEAIARCHHSWMREALQRFADTVEASSAAAAPVKAAAILGSAL

SEQ ID NO: 105938 - protein, 130 aa, Setaria italica
  Transcript Sequence Number=SeqID_39964
TPAGASTPLCCNWNRNWDCPGVAVSWACGGRFQRLHRPVSLSSSWIEGFVVKNYPGKKYMIKLARIYRDIMANLARRRDERRKCRSESSPHSLIWSVHGFVVCLCRCNRRLTSGRIPAASSHRLRRQRGT

SEQ ID NO: 105939 - protein, 219 aa, Setaria italica
  Transcript Sequence Number=SeqID_39965
  Gene Ontology: Mol. function=nucleoside-triphosphatase activity; Cellular component=membrane; Biological process=transport
  Homolog annotation: Hit_ID=Q0JLC5; Match level="QueryCoverage=100%, HitCoverage=15%, E-value=7e-87, Identity=72%"; Hit description =Pleiotropic drug resistance protein 3
  Pfam annotation: Domain name=ABC2_membrane; Domain location=1-161; Score=109.6; E_value=1e-29; Accession=PF01061.16; Description=ABC-2 type transporter
ALGSMYAAVLFLGVSNSISVQPVVAVERTVFYRERAAGMYSFFPYAFGQVVIELPYALVQATVYGVIVYAMIGFEWTAAKFFWYLFFMYFTLLYFTLYGMMCVGLTPNYNIASIVSTAFYNIWNLFSGFFIPRPRTPIWWRWYCWVCPIAWTLYGLVVSQYGDITTPMEDGRPVKVFLEDYFDFKHSWLGWAAAVVVAFSVLFAALFAFAIMKLNFQKR

SEQ ID NO: 105940 - protein, 271 aa, Setaria italica
  misc_feature (63)..(63): Xaa can be any naturally occurring amino acid
  Transcript Sequence Number=SeqID_39966
  Gene Ontology: Mol. function=catalytic activity; Cellular component =integral to membrane; Biological process=sphingolipid metabolic process
  Homolog annotation: Hit_ID=Q9HCG7-3; Match level="QueryCoverage=98%, HitCoverage=37%, E-value=2e-48, Identity=40%"; Hit description =Isoform 3 of Non-lysosomal glucosylceramidase
EMWGTMVQDGSFDRDNFNAGASMPSSLGDTVCAAVSASTWVEPHGRCTVVFALAWSSPKVKFXKGSTYYRRYTKFYGTSPRSAVNLVQDALMKYKHWEEAIDKWQTPILSDERLPEWYKITLFNELYFLVAGGTVWIDSESLVVDADNKSNSSLLEDSDSSLRDSSCNSTVPLIGFDPHEIDDKENVGKFLYLEGIEYFMWCTYDVHFYASFALLDLFPKIELSIQRDFARAVLREDNSRVRFLADGTWGIRKVIGAVAHDLGAHDPWHEL

SEQ ID NO: 105941 - protein, 61 aa, Setaria italica
  Transcript Sequence Number=SeqID_39967
MPFIVLFALLSSKALPQSNSGYGTLHSDIIYLHIFLALRYMCGPASAHMAHPALVLIKVCS

SEQ ID NO: 105942 - protein, 248 aa, Setaria italica
  Transcript Sequence Number=SeqID_39968
  Gene Ontology: Mol. function=helicase activity; Cellular component =chloroplast
  Homolog annotation: Hit_ID=B5RHT1; Match level="QueryCoverage=100%, HitCoverage=31%, E-value=1e-101, Identity=72%"; Hit description =Pentatricopeptide (PPR) repeat-containing protein
  Pfam annotation: Domain name=PPR; Domain location=103-137; Score =10.4; E_value=0.52; Accession=PF01535.12; Description=PPR repeat
  Pfam annotation: Domain name=PPR; Domain location=170-204; Score=2.8; E_value=4.1; Accession=PF01535.12; Description=PPR repeat
  Pfam annotation: Domain name=PPR; Domain location=33-67; Score=8.7; E_ value=0.83; Accession=PF01535.12; Description=PPR repeat
  Pfam annotation: Domain name=PPR; Domain location=68-102; Score=14.2; E_value=0.19; Accession=PF01535.12; Description=PPR repeat
  Pfam module annotation: Pfam domain module=PPR::PPR::PPR::PPR; Domain location=103-137::170-204::33-67::68-102
NSLIRGHAKEGVPEAAQEILAIMTRREVPTDPESHALLVDSFLKKNEAADAKTALDSMMQQGHLPSPALFKSVMEALFNGGRVQTASRVMKSMIEKGVTENMDLAHKILEALFMRGHVEEAIGRVNLMVENGCMPDLDKLLVGLCENDRVMEAQKLADFALDRDFNVSFSTYDRVLEALYTEEKTLPAYSMLCKIKNKGGVVNQKGCDALMESLKSEGYSKQADILSKILAENAPSTSKRGKRVAMGA

SEQ ID NO: 105943 - protein, 63 aa, Setaria italica
  Transcript Sequence Number=SeqID_39969
  Gene Ontology: Mol. function=hydrolase activity
GRKTLLHKLLSKDDCKNSYIEPMPKDRRTRTYADMLTRFAKLLSDERKLRLQNIELDAGQSKS

SEQ ID NO: 105944 - protein, 250 aa, Setaria italica
  misc_feature (6)..(6): Xaa can be any naturally occurring amino acid
  misc_feature (197)..(197): Xaa can be any naturally occurring amino acid
  Transcript Sequence Number=SeqID_39970
  Gene Ontology: Mol. function=potassium ion transmembrane transporter activity; Cellular component=integral to membrane; Biological process=potassium ion transport
  Homolog annotation: Hit_ID=Q7XPL3; Match level="QueryCoverage=98%, HitCoverage=28%, E-value=1e-112, Identity=78%"; Hit description =Probable potassium transporter 15
  Pfam annotation: Domain name=K_trans; Domain location=1-244; Score= -444.4; E_value=5.2e-05; Accession=PF02705.8; Description=K+ potassium transporter
SVGDGXWAFLIFASVLLLIMFIWNYGSKLKYDSEVKQKLSKDLMRKLGPNLGTIRAPGLGLVCSDIVKGVPAIFGHFLTSLPAIHSIIVFVCIRNVPVPAVPQSERFLFQRVCSRSYHMFRCIARYGYKDKKQEHHSVFERLLIEGLEKFIQREAVELSLQSEDDVDSDEEPPTPMKIITAPNGSLYSLDVPLMADXYVPSTQVIPETSCSTPHVDPVLDYAQNLELELAFIKQSKQSGAVYLIDNPILF

SEQ ID NO: 105945 - protein, 172 aa, Setaria italica
  Transcript Sequence Number=SeqID_39971
  Gene Ontology: Mol. function=potassium ion transmembrane transporter activity; Cellular component=integral to membrane; Biological process=potassium ion transport
  Homolog annotation: Hit_ID=Q7XPL3; Match level="QueryCoverage=93%, HitCoverage=18%, E-value=2e-67, Identity=75%"; Hit description =Probable potassium transporter 15
GSLPTSCCFSYHSVFERLLIEGLEKFIQREAVELSLQSEDDVDSDEEPPTPMKIITAPNGSLYSLDVPLMADYVPSTQVIPETSCSTPHVDPVLDYAQNLELELAFIKQSKQSGAVYLIDNPIIKARKDSWFFKKLMINYFFAFLRNNCRRAIMLMSIPHSNMMQVRMTSYV

SEQ ID NO: 105946 - protein, 280 aa, Setaria italica
  misc_feature (12)..(12): Xaa can be any naturally occurring amino acid
  misc_feature (32)..(32): Xaa can be any naturally occurring amino acid
  Transcript Sequence Number=SeqID_39972
  Gene Ontology: Mol. function=potassium ion transmembrane transporter activity; Cellular component=integral to membrane; Biological process=potassium ion transport
  Homolog annotation: Hit_ID=Q7XPL3; Match level="QueryCoverage=95%, HitCoverage=30%, E-value=1e-107, Identity=75%"; Hit description =Probable potassium transporter 15
  Pfam annotation: Domain name=K_trans; Domain location=1-278; Score= -281.6; E_value=7.7e-11; Accession=PF02705.8; Description=K+ potassium transporter
ILLFFGRNPFSXAWLSLVVLLCATGSEAIFFXNFCYFPVRYVQYMFVLLVLPCLVLAYLGQAAFLIANPKSSEQVFFSSIPSGVFWPVFLLANLAALIASRTMTVAIFQCLKQSIALGCFPRLKIVHTSRKFMAKIYIPVVNWFLLVSCLGFIVLFRSVYDVGNAYAIAELGVMIMATVYVTIIMLLIWESNITKVLLFFITFLFLELIFFSSALSSVGDGGWAFLIFASVLLLIMFIWNYGSKLKYDSEVKQKLSKDLMRKLGPNLGYHSSSLPWYLGL

SEQ ID NO: 105947 - protein, 305 aa, Setaria italica
  Transcript Sequence Number=SeqID_39973
  Gene Ontology: Mol. function=carbohydrate binding; Biological process= carbohydrate metabolic process
  Homolog annotation: Hit_ID=B6UAF2; Match level="QueryCoverage=99%, HitCoverage=90%, E-value=9e-99, Identity=64%"; Hit description =Starch binding domain containing protein
  Pfam annotation: Domain name=CBM_20; Domain location=64-155; Score =82.1; E_value=2e-21; Accession=PF00686.11; Description=Starch binding domain
PAARRRLLAASVGVGEPLPAQSLGEVAVALEVREDEYVANSIVSSENLPPPDADEIGPVPEAKTVRVKFVLKKQCAFGEQFLVVGDDPALGLWDPSKATALDWSEHHVWTAKTDLPANKLIEFKFLLREASGHVRWLHGANRTLRITETTNTLVVHEDWDHAKKQSVYEEEELSIGEEDVISSEDLAGSNGTMLADNNIITDEYLGSESEAVVADAPLQGEMMVANETDQPQLALHKDETVLEELLEEVKAVAQNGSNSNDTTFCQEGALLANRPSILENDLAWAGKAMQQVLRILGFQIGTTKT

SEQ ID NO: 105948 - protein, 72 aa, Setaria italica
  Transcript Sequence Number=SeqID_39974
LFLLTTGRWVIISLHGQKISCLPVAWQKRWYLLLVKADCLAFVPFSPPCVHTSRYFPFFLEGPLVDIDLLGS

SEQ ID NO: 105949 - protein, 135 aa, Setaria italica
  Transcript Sequence Number=SeqID_39975
LPLGHTSNMMLTCSLSFGKRCLETVSLISYSIMRIPPVKMLATRNKLFSLELLILLVQTLVAILQLLLQHFMVPPLYGKRLCRLLMNFQGLTETVSLLLQLRQSLHRIIFLLEGPSIPLRSFIKILKALDSSSKL

SEQ ID NO: 105950 - protein, 84 aa, Setaria italica
  Transcript Sequence Number=SeqID_39976
ITNQFTDDCTAIIQLCLISLYMFHQHQRYNKTLTSVALDDYTALLCFQKVAIGRLLEVCPRGNHRDDDIPFVSMICILCSLNIH

SEQ ID NO: 105951 - protein, 257 aa, Setaria italica
  Transcript Sequence Number=SeqID_39977
  Homolog annotation: Hit_ID=B6U6X1; Match level="QueryCoverage=100%, HitCoverage=45%, E-value=1e-118, Identity=79%"; Hit description =Propionyl-CoA carboxylase
KAVGGDKDSYSSKQVMDARLRMDGLFELEEHAVQFVEEFIALYTNGPAGGGGISTGQRKEIILQKMLVDRENIFWRAHAKKASIPCLQDQATDSETVQMHISQSQKNPTSRAMGIQHVDTSMGTAPPVRASPGKKIALYHIAHSRVGDKGNDMNFSVIPHFPGDIGRLMAVITPDWVKNVVSPLLDLSSFPDEQAIQRRINLLELVSVEIYEVPGICSLNVVVRNILDGGVNCSRRIDRHGKTLSDLILCQEVVLPP

SEQ ID NO: 105952 - protein, 59 aa, Setaria italica
  Transcript Sequence Number=SeqID_39978
  Subcellular localization annotation: CTP_CleavageSite=3; ConfidenceScore=5.05e-01
PARQSAAAGSVTRLTALRSPSCPDPSLPARPASCSPEGHTCWRYALEAIIEMMIFHLYP

SEQ ID NO: 105953 - protein, 56 aa, Setaria italica
  Transcript Sequence Number=SeqID_39979
NTRKETRIKDFKFSIKLQKSIEKNDGVKGGTLVPLHMESDSGGKGKRSSRTSKRRN

SEQ ID NO: 105954 - protein, 308 aa, Setaria italica
  Transcript Sequence Number=SeqID_39980
  Gene Ontology: Mol. function=metal ion binding; Cellular component =cytosol
  Homolog annotation: Hit_ID=Q25A03; Match level="QueryCoverage=83%, HitCoverage=48%, E-value=1e-98, Identity=68%"; Hit description =H0821G03.13 protein
  Pfam annotation: Domain name=zf-C3HC4; Domain location=4-36; Score =5.3; E_value=0.025; Accession=PF00097.17; Description=Zinc finger, C3HC4 type (RING finger)
  Pfam annotation: Domain name=zf-UBP; Domain location=48-119; Score =114.5; E_value=3.6e-31; Accession=PF02148.11; Description=Zn-finger in ubiquitin-hydrolases and other protein
  Pfam module annotation: Pfam domain module=zf-C3HC4::zf-UBP; Domain location=4-36::48-119
  Subcellular localization annotation: CTP_CleavageSite=23; ConfidenceScore=5.02e-01
SERLDQDISGILATTCDHSFQCSCVSVWVNSSCPVCQFCQKQPENSTCSVCPTSGNLWICVICGFVGCGRYQEGHAKQHWKDTQHCYSLDLETQRVWDYVGDSFVHRLNHSKSDAKNAKFKSKCKYSGDDCVNCTCDDDSDMGGAMFSSKAETIVDEYNRLLASQLETQREYYEGLLSEAKRNKERRISEAVDKAVNDKLQELQLKLENLMAEKKKVADKNEKLTRSQDMWRQTLRDIEEREKAQLKSKDETIRDLEEQIKDFKFSIKLQKSIEKNDGVKGGTLVPLHMESDSGGKGKRSSRTSKRRN

SEQ ID NO: 105955 - protein, 74 aa, Setaria italica
  Transcript Sequence Number=SeqID_39981
NKIVTFSEKWLMPMALSRLILEMQSKLWFLGEITNLKWPTISISMGLHSRLVVHFNQERICMISLQLTCIVVLR

SEQ ID NO: 105956 - protein, 204 aa, Setaria italica
  Transcript Sequence Number=SeqID_39982
MATTTAAPGLAVAATDPVRSFLSSTAASGDLDADLRELASALSSEPDVPYRSLRAIWCAASPDARPPLRSLLRGAEFVLPSPKPREKSDELKARLEKLREMQERKEYAELVRDVAPPSRDDSPEPFSSYKDQIGFGLHVVVIMFTGYLVGFAMFKALFNNSPVLNAAGGILGVVGGMLVETVLFIIRSSSKELASSVPKSKKVQ

SEQ ID NO: 105957 - protein, 72 aa, Setaria italica
  Transcript Sequence Number=SeqID_39983
  Gene Ontology: Mol. function=histone-lysine N-methyltransferase activity; Cellular component=nucleus
FACFSVGLCIFGEKVKCHCQALNCQGYLGSQIKNPTQNYLAIVAEQEQLREHSPTQRRSSAPILESMAHLLP

SEQ ID NO: 105958 - protein, 72 aa, Setaria italica
  Transcript Sequence Number=SeqID_39984
  Gene Ontology: Mol. function=histone-lysine N-methyltransferase activity; Cellular component=nucleus; Biological process=regulation of transcription, DNA-dependent
  Homolog annotation: Hit_ID=B9SQW4; Match level="QueryCoverage=94%, HitCoverage=13%, E-value=3e-25, Identity=77%"; Hit description=Set domain protein, putative
  Pfam annotation: Domain name=SET; Domain location=1-72; Score=-15.8; E_value=0.06; Accession=PF00856.20; Description=SET domain
NIFSVIDDAICEQRLWDIRTRGDKNFYMCEISKDFTIDATFKGNVSRFLNHSCDPNCKLEKWQVDGEEQRST

SEQ ID NO: 105959 - protein, 93 aa, Setaria italica
  misc_feature (32)..(32): Xaa can be any naturally occurring amino acid
  misc_feature (54)..(54): Xaa can be any naturally occurring amino acid
  Transcript Sequence Number=SeqID_39985
  Gene Ontology: Mol. function=histone-lysine N-methyltransferase activity; Cellular component=nucleus
  Homolog annotation: Hit_ID=B9IM92; Match level="QueryCoverage=88%, HitCoverage=16%, E-value=7e-20, Identity=58%"; Hit description=SET domain protein
FCIKKKRTSVHVDTGCTNCRADSTCKEDCECXKNCRCSDLCTNRPFRKDKKLKXVKTEHCGWGAVALEPLEKGDFVIEYVGEGKVLFSCYNFS

SEQ ID NO: 105960 - protein, 248 aa, Setaria italica
  misc_feature (181)..(181): Xaa can be any naturally occurring amino acid
  Transcript Sequence Number=SeqID_39986
  Gene Ontology: Mol. function=histone-lysine N-methyltransferase activity; Cellular component=nucleus; Biological process=regulation of transcription, DNA-dependent
  Homolog annotation: Hit_ID=B9IM92; Match level="QueryCoverage=96%, HitCoverage=46%, E-value=1e-96, Identity=70%"; Hit description=SET domain protein
  Pfam annotation: Domain name=SET; Domain location=102-231; Score =176.4; E_value=8.2e-50; Accession=PF00856.20; Description=SET domain
QNADFTNSIEEVFRRLPLPYVNEEFNIDSTIRDFSEAVYKPPPYTSIRRNVYLIKKKRTSVHVDTGCTNCRADSTCKEDCECRGLSMSCSKNCRCSDLCTNRPFRKDKKIKIVKTEHCGWGAVALEPLEKGDFVIEYVGEVIDDAICEQRLWDIRTRGDKNFYMCEISKDFTIDATFKGNXSRFLNHSCDPNCKLEKWHVDGETRVGVFASRSVKVGDPLTYDYRFVHFGEKVKCHCQALNCQGYLGS

SEQ ID NO: 105961 - protein, 490 aa, Setaria italica
  misc_feature (94)..(94): Xaa can be any naturally occurring amino acid
  Transcript Sequence Number=SeqID_39987
  Gene Ontology: Mol. function=histone-lysine N-methyltransferase activity; Cellular component=nucleus
  Homolog annotation: Hit_ID=B9IM92; Match level="QueryCoverage=44%, HitCoverage=48%, E-value=7e-68, Identity=51%"; Hit description=SET domain protein
  Pfam annotation: Domain name=SET; Domain location=81-210; Score =161.5; E_value=2.5e-45; Accession=PF00856.20; Description=SET domain
WRHPSDWLLQNENAESTSSIEEVFCRLPLPYVNKNFSDSTIRNFADAVYKPPPYTAIKRNIYLINKKRTGVRVDTGCTDCRAYSTCKEDCECRXHQCGWGAVALEPLEKGDFIVEYVGEVIDDTTCEQRLRDLEKRGDKNFYMCEISKDFTIDATFKGNVSRFLNHSCEPNCKLEKWQVSGETRVGFFASRAIKIGEPLTYEYRPVRRCKDKVPNCLFLEHQHLPPSHPLDLMCEAIATRRPHNATIGASAQHVASIGEEQNNMNSTQIMVDFGRQGLDHELDQDLHDESLNVSANDADQQAERNDERVTKRPLTRSKRGISKKHKVIAVTLTPCVEETGSVHPEFRSVQANVNESLDVSANDGDQQGQRSDEHVTERPLSASKGGIFKKHKAIVETPCSKDTGSVHPESRSARANMNEQEANQGKDYSISRCLDVLDAMDDVPDGIKILASDVFMDVMKREMFLCYAPKLRGPWLKKEVDKLQSSRLVN

SEQ ID NO: 105962 - protein, 48 aa, Setaria italica
  Transcript Sequence Number=SeqID_39988
  Gene Ontology: Mol. function=histone-lysine N-methyltransferase activity; Cellular component=nucleus
  Homolog annotation: Hit_ID=B9IM92; Match level="QueryCoverage=100%, HitCoverage=9%, E-value=2e-12, Identity=64%"; Hit description=SET domain protein
EVFRRLPLPYVNEEFNIDSTIRDFSEAVYKPPPYTSIRRNVYLIKKKR

SEQ ID NO: 105963 - protein, 57 aa, Setaria italica
  Transcript Sequence Number=SeqID_39989
RSSENGLFKKTTCTLYMNEIIIKEKIAKVQLCHACTHLYAVGKVSILILQKPIGRMP

SEQ ID NO: 105964 - protein, 366 aa, Setaria italica
  misc_feature (135)..(135): Xaa can be any naturally occurring amino acid
  misc_feature (152)..(152): Xaa can be any naturally occurring amino acid
  misc_feature (170)..(170): Xaa can be any naturally occurring amino acid
  Transcript Sequence Number=SeqID_39990
  Gene Ontology: Mol. function=histone-lysine N-methyltransferase activity; Cellular component=nucleus
  Homolog annotation: Hit_ID=B9IM92; Match level="QueryCoverage=75%, HitCoverage=58%, E-value=5e-88, Identity=53%"; Hit description=SET domain protein
  Pfam annotation: Domain name=SET; Domain location=122-258; Score =117.4; E_value=4.6e-32; Accession=PF00856.20; Description=SET domain
MVCKQKMFFWRCGRCTVAAHTKCAPWPVIHLKDNRGSAICWRHPSDWLLQNENADFTNSIEEVFRRLPLPYVNEEFNIDSTIRDFSEAVYKPPPYTSIRRNVYLIKKKRTSVHVDTGCTNCRADSTCKEDCECRXHQCGWGAVALEPLGERXIFIVEYVSHCLVVSSICXDAICEQRLWDIRTRGDKNFYMCEISKDFTIDATFKGNVSRFLNHSCDPNCKLEKWQVDGETRVGVFASRSVKVGDPLTYDYRFVHFGEKVKCHCQALNCQGYLGSQIKNPTQNYLAIVAEQEQLREHSPTQRRSSAPILESMAHLLPWANCTEAFNLRSKGKIIRLCWAGKRKRTSLAVSSTSMPTLVSEVPAADI

SEQ ID NO: 105965 - protein, 70 aa, Setaria italica
  Transcript Sequence Number=SeqID_39991
GPTIVLSAALLRLPLDASYRGADRQWRRRRCHGPRHDGPELLFQGFASLSSHLLVLRRERHSSSLVLLPI

SEQ ID NO: 105966 - protein, 58 aa, Setaria italica
  Transcript Sequence Number=SeqID_39992
  Homolog annotation: Hit_ID=Q9FR63; Match level="QueryCoverage=82%, HitCoverage=5%, E-value=7e-09, Identity=54%"; Hit description=Stripe rust resistance protein Yr10
MREDVICKWVGEGFVRKQHGKTLYEVGEEYIEDLIRKNMIQPMLYNHDNKHGDSWRSG

SEQ ID NO: 105967 - protein, 570 aa, Setaria italica
  misc_feature (437)..(437): Xaa can be any naturally occurring amino acid
  Transcript Sequence Number=SeqID_39993
  Gene Ontology: Mol. function=nucleotide binding; Biological process =defense response
  Homolog annotation: Hit_ID=Q8LKP5; Match level="QueryCoverage=100%, HitCoverage=69%, E-value=1e-176, Identity=55%"; Hit description =Putative NBS-LRR resistance protein
  Pfam annotation: Domain name=NB-ARC; Domain location=176-462; Score =173.1; E_value=8.1e-49; Accession=PF00931.14; Description=NB-ARC domain
MDVVTGAMTMLLPKLGDLLAEEYQLQASVRDDVAFLKAELESMEAALLRISEAPIDRPPDAQDRIWAREVRELTYDVEDCVEAFLVRLHHHAPKNDLQGLRGFIDRGLSLLKRAKICRDMGADVRDIKRRIVEVSERRVRYKVDGVAAKPGGPTVDSLRLSALYGKATELVGTRERSDELVKILMECDEASKLRLKVVSVVGFGGLGKTTIAKIVYEKLKGQFDCAAFVTISLDPNMEKVFRNMLCQLVHECNMSNSTRGGEAQIIKELKEFLRNKRYLIVIDDIWSYSVWNTVQYALIENECGSRIITTTRILAKQASASVYQLKPLSLADSRNLFCHRIFGIEDKCPPNQLAEVSENILKKCGGVPLAVITIASLLASKMRKENTEKYWYEVYQSMGSGLEESIDVKNMRRILCLSYYDLPPHLKTCLLYLTLYXEDYGIMREDVICKWVGEGFVRKQHGKTLYEVGEEYIEDLIRKNMIQPMLYNHDNKVWSFCVHDMMLDLITSLSEEENFLKALGGSQPISVPSKIRRLSLQNIKAKGRRQVETMNLSHLRSLIVSPEAFALLPA

SEQ ID NO: 105968 - protein, 968 aa, Setaria italica
  Transcript Sequence Number=SeqID_39994
TLNAHIDQCLSAESNTELVETVLVKPKVKPRKKRLLEDIYKTALPYTLEDLDRRNGTNWAVELAMSTVSKEVCTENQSPEVAPFDRRDDEKEGDVYVDSNGIKIRILSKCSDGPLVLRDDDSRKVAKHETGKCILMSKKIPKSKMLKNKKLKMHRKKYNKTNHLNSQVPAYSHDDINEETSEEERHSRNPSGSTSNCGSVTMRQWACSKRSDITKNFSRKFSDKVASGAQKSDRSSMLGFNDSQITESPAGVFSSESPEDMATTSEAIGFEQSNARLLGSIPTWSSKTPLQSGIVPKVPRSAAALAKRKIKEIGRREANKLDNYDIERNPSSAKRSEARSLSFSTAGPSNGPNRLVPTSKKIRKHRSMLRTGKRAFSSSSSRLVHGFGRDHEPDTGHVNKKFRVSNNEGPKKFVKHTEEDTADNDSSFGTDMPESGQQDDQYDVPQETEGTQMYYEGEEPETDVPYDSTSRSNPVDCQISDGSLSPENNRSAGNVLVEGYSVAVEDPSSSEQLAHHGQESNSVVNNETEEWQIDPASTKESSACLTNNRDMGPGAPQDNSSITSNREDSNQEQGLPLGRDSLDSPISTASTMSPPAALKDSRMNESEPGPSTGRTVEERTTGSLNQENKSIPIAREGEQMPNEKPFRCSCQENIARDSNQSAVVRPPMLNFTGKQVPQLHIGLRASSCFSTYQRTSTKPNPCLDTHDHPLAAKVSAESAMNLPSYTADCMSPALQNQLPSPSNPILRLMGKNLMVMNNEESVHPQPPSSDYMLRGNYVAPVGFVPPKYQHLSNSAFINTPPTTASHQMPLPSVQAGSFVGPPLHGGSVMQSDHHALQKAYRNIVPVMHHPNYMMKEVIVIDDSPEHRSEPQVSMLLPHAPSPATMPTPNTMPPQPFYCLPSQSPILPRDRAVGSMPVYANVGSMVGVGSSSQGSQTEVANPYMQNPFFAQSATGYLNQPMYYSQNLRR

SEQ ID NO: 105969 - protein, 120 aa, Setaria italica
  misc_feature (88)..(88): Xaa can be any naturally occurring amino acid
  misc_feature (110)..(110): Xaa can be any naturally occurring amino acid
  Transcript Sequence Number=SeqID_39995
  Gene Ontology: Mol. function=transferase activity, transferring phosphorus-containing groups; Cellular component=chloroplast; Biological process=phosphorylation
  Homolog annotation: Hit_ID=C5IHD0; Match level="QueryCoverage=100%, HitCoverage=13%, E-value=2e-55, Identity=87%"; Hit description =Cytosolic orthophosphate dikinase
  Pfam annotation: Domain name=PPDK_N; Domain location=11-120; Score= -130.1; E_value=0.00011; Accession=PF01326.11; Description=Pyruvate phosphate dikinase, PEPpyruvate bi
MAPAQCVASQRVFHFGKGKSEGNKTMKELLGGKGANLAEMSSIGLSVPPGFTVSTEACQQYQEAGRSLPQGLWDEIIDGLAWVEEEMXARLGDPQRPLLLSVRSGAAVSXPGMMDTVLNL

SEQ ID NO: 105970 - protein, 91 aa, Setaria italica
  Transcript Sequence Number=SeqID_39996
RKWRQLQRCSFLSAAKLTTLKTQKDNYQICIFLISHTTTMASQSNHITPINEDNYLDRAPPLLPQVLSMAMPPVAGTTSSPNFCRINIPSN

SEQ ID NO: 105971 - protein, 161 aa, Setaria italica
  misc_feature (17)..(17): Xaa can be any naturally occurring amino acid
  misc_feature (30)..(30): Xaa can be any naturally occurring amino acid
  misc_feature (34)..(34): Xaa can be any naturally occurring amino acid
  Transcript Sequence Number=SeqID_39997
  Gene Ontology: Mol. function=binding
  Homolog annotation: Hit_ID=B9RG44; Match level="QueryCoverage=95%, HitCoverage=39%, E-value=5e-34, Identity=49%"; Hit description=Sil1, putative
IRDNEHGQELSFQQMGXAMLQHILSTASTXIRLXKKVVSLLAYVADFQLSAGKSQAPFLSNHLFIKSVVDMISAPDLDLEEKALLAVRSLLQLTSADASDLQKFSGLDDTLDALRVQLDELTSQEERREYALEVEILRREVQIMFQQKFNQVLQHQMKNDK

SEQ ID NO: 105972 - protein, 74 aa, Setaria italica
  Transcript Sequence Number=SeqID_39998
  Gene Ontology: Mol. function=protein serine/threonine kinase activity; Biological process=protein amino acid phosphorylation
  Homolog annotation: Hit_ID=Q2QZV1; Match level="QueryCoverage=100%, HitCoverage=2%, E-value=6e-27, Identity=78%"; Hit description =Retrotransposon protein, putative, unclassified
QLAGVDAYGLISMIVEAARTVKRNRETCQLLARRARMIGDLLQQLERTRLKQHMETRNPVEQLEETLRQAYILI

SEQ ID NO: 105973 - protein, 212 aa, Setaria italica
  Transcript Sequence Number=SeqID_39999
  Homolog annotation: Hit_ID=B6TG26; Match level="QueryCoverage=90%, HitCoverage=90%, E-value=2e-78, Identity=77%"; Hit description=VAMP protein SEC22
  Pfam annotation: Domain name=Hin1; Domain location=40-178; Score =162.7; E_value=1.1e-45; Accession=PF07320.5; Description=Harpin -induced protein 1 (Hin1)
MSKEGKHHRHEHHLRRCCGCMASCLLALVLIVAFVALVVYLALRPSKPSFYLQDLQLRRPITVGDPSLSASAQVTLASRNPNDHVGVLYRRLDVFVTYRDEPVTVPVSLPPQYQGHRDVTVWSPVLSAQSVPVAGYVADAMKQDVAAGFVALQVKVDGRIKWKVGSWVSGSYHLFVSCPAVLSAGFPGFGGGANATLSALKFAQPTGCSVEV

SEQ ID NO: 105974 - protein, 147 aa, Setaria italica
  misc_feature (77)..(77): Xaa can be any naturally occurring amino acid
  Transcript Sequence Number=SeqID_40000
  Gene Ontology: Mol. function=protein serine/threonine kinase activity; Biological process=protein amino acid phosphorylation
  Homolog annotation: Hit_ID=Q84ZH4; Match level="QueryCoverage=99%, HitCoverage=21%, E-value=7e-68, Identity=83%"; Hit description =Putative receptor kinase Lecrk
  Pfam annotation: Domain name=Pkinase; Domain location=1-147; Score= -12.6; E_value=9.6e-08; Accession=PF00069.17; Description=Protein kinase domain
  Pfam annotation: Domain name=Pkinase_Tyr; Domain location=2-131; Score=-110.2; E_value=2.1e-06; Accession=PF07714.9; Description =Protein tyrosine kinase
  Pfam module annotation: Pfam domain module=Pkinase::Pkinase_Tyr; Domain location=1-147::2-131
VAEVVSIGHLQHRNLVQLHGYCRRKGELILVYEYMSGGSLDRYLYDQENKPTLNWDQRMRIIKGIASGLLYLHEEWXKVVLHRDIKPSNVLLDDEMNGHLGDFGLARLYDHGGEPQTTHVVGTIGYLAPELARTSKATPPTDVFPWY

SEQ ID NO: 105975 - protein, 54 aa, Setaria italica
  Transcript Sequence Number=SeqID_40001
AAQRAAEDAFRLPRVDEQVHKAVMAANRAATAARVAAIKAVQNRMDGKFCDTYV

SEQ ID NO: 105976 - protein, 146 aa, Setaria italica
  Transcript Sequence Number=SeqID_40002
  Gene Ontology: Mol. function=metal ion binding; Cellular component =nucleus; Biological process=proteolysis
  Homolog annotation: Hit_ID=Q53PX0; Match level="QueryCoverage=100%, HitCoverage=7%, E-value=2e-44, Identity=63%"; Hit description=PHD -finger family protein, expressed
  Pfam annotation: Domain name=DDT; Domain location=78-138; Score=50.6; E_value=6.2e-12; Accession=PF02791.9; Description=DDT domain
GSASEMKEPASTRQRVGGCKSSARPDAPQHSGSGSDMSEDVESSSNSSDFTKEGPSEPCPPVQAVELPPSSGDIPVPEESISYLFSVYNFLRSFSVQLFLSPFGLDDFVAAINCSAQNNLLDAVHVSLLRALRRHLESKSAGGSQL

SEQ ID NO: 105977 - protein, 319 aa, Setaria italica
  misc_feature (8)..(8): Xaa can be any naturally occurring amino acid
  Transcript Sequence Number=SeqID_40003
  Gene Ontology: Mol. function=protein serine/threonine kinase activity; Cellular component=plasma membrane; Biological process =protein amino acid phosphorylation
  Homolog annotation: Hit_ID=B6U2E7; Match level="QueryCoverage=99%, HitCoverage=50%, E-value=1e-161, Identity=87%"; Hit description=ATP binding protein
  Pfam annotation: Domain name=Pkinase; Domain location=61-309; Score =133.8; E_value=5.5e-37; Accession=PF00069.17; Description=Protein kinase domain
  Pfam annotation: Domain name=Pkinase_Tyr; Domain location=61-318; Score=50.6; E_value=4.3e-17; Accession=PF07714.9; Description =Protein tyrosine kinase
  Pfam module annotation: Pfam domain module=Pkinase::Pkinase_Tyr; Domain location=61-309::61-318
PVALIAVXGFLWICLLSRKKSIVGILLKMDKQSVPDGAKLVTYQWNLPYSTSEIIRRLELLDEEDVVGSGGFGTVYKMVMDDGTSFAVKRIDLSRESRDRTFEKELEILGSIRHINLVNLRGYCRLPTAKLLIYDFVELGSLDCYLHGDEQEDQPLNWNARMKIALGSARGLAYLHHDCSPGIVHRDIKASNILLDRSLEPRVSDFGLARLLVDNGAHVTTVVAGTFGYLAPEYLQNGHATEKSDVYSFGVLLLELVTGKRPTDACFIKKGLNIVGWLNTLTGEHRLEDIIDERCGDVEVEAVEAILDIAAMCTDADPG

SEQ ID NO: 105978 - protein, 58 aa, Setaria italica
  Transcript Sequence Number=SeqID_40004
MPDKERRPSSSVGAEAAREGLGDQQWPWSEFLADDAGLGMELCCPAGLSEPGSSSLTG

SEQ ID NO: 105979 - protein, 269 aa, Setaria italica
  misc_feature (257)..(257): Xaa can be any naturally occurring amino acid
  misc_feature (260)..(260): Xaa can be any naturally occurring amino acid
  Transcript Sequence Number=SeqID_40005
  Gene Ontology: Mol. function=ARF guanyl-nucleotide exchange factor activity; Cellular component=intracellular; Biological process =regulation of ARF protein signal transduction
  Homolog annotation: Hit_ID=B9S916; Match level="QueryCoverage=99%, HitCoverage=18%, E-value=1e-117, Identity=78%"; Hit description =Pattern formation protein, putative
LVDSQPFLDHDMFAVMSGPTIAAIAVVFDHSEHEDVLLTCVDGFLGVAKISAFHHLEDVLDDLVVSLCKFTTLLNTSLVEEPVTAFGDDLKARLATETLFTIANRYGDYIRTGWRNVLDCILRLHKLGLLPARVASDAADDSELSPEAVQGKAAPSAVPPSHIPVMGTPWKSSGLMGRFSQLLSLDSEEPRSQPTEQQLAAHQRTLQTIQKCRIDSIFTESKFLQPDSLLQLARALIWAAGRPQKVASSPDDEDTAXVFXLELLIAITL

SEQ ID NO: 105980 - protein, 538 aa, Setaria italica
  misc_feature (343)..(343): Xaa can be any naturally occurring amino acid
  Transcript Sequence Number=SeqID_40006
  Gene Ontology: Mol. function=ion channel activity; Cellular component= integral to membrane; Biological process=ion transport
  Homolog annotation: Hit_ID=Q4VDM4; Match level="QueryCoverage=100%, HitCoverage=90%, E-value=0.0, Identity=83%"; Hit description=Cyclic nucleotide-gated ion channel 2 (Fragment)
  Pfam annotation: Domain name=Ion_trans; Domain location=6-262; Score=- 10.1; E_value=0.074; Accession=PF00520.23; Description=Ion transport protein
  Pfam annotation: Domain name=cNMP_binding; Domain location=364-462; Score=40.8; E_value=5.4e-09; Accession=PF00027.21; Description =Cyclic nucleotide-binding domain
  Pfam module annotation: Pfam domain module=Ion_trans::cNMP_binding; Domain location=6-262::364-462
AYVSRESLVVGCGKLVWDARAIAAHYARSLKGLWFDLFVILPLPQIIFWLVIPKLIREEQVKFIMTILLLIFIFQFLPKVYHSIHIMRKMQKVTGYIFGTIWWGFGLNLFAYFIASHIAGGCWYVLAIQRIASCLQEECKKNNSCDLMSLACSKEICFHPPWSSNVNGLACDANMTSFSQQNMSTCLSGNGSFAYGIYLGALPVISSNSLAVKILYPIFWGLMTLSTFGNDLAPTSNGLEVIFSIINVLSGLMLFTLLIGNIQVFLHAVLARKRKMQLRFRDMEWWMRRRQLPSRLRQRVRKFERERWAAVTGDEEMEMIKDLPEGLRRDIKRYLCLELVKQXVPLFHGMDDLILDNICDRLRPLVFSSGEKVIREGDPVQRMVFILQGKLRSTQPLTKGVVATCMLGAGNFLGDELLSWCLRRPFVDRLPASSATFECVEAAQAFCLDAPDLQFITEHFRYKFANEKLKHTARYYSSNWRTWAAVNIQLAWRRYRARKMDVTAMVAPPLAAGPDDGDRRLRHYAAMFMSLRPHDHLE

SEQ ID NO: 105981 - protein, 82 aa, Setaria italica
  Transcript Sequence Number=SeqID_40007
  Subcellular localization annotation: CTP_CleavageSite=34; ConfidenceScore=5.60e-01
ETGCVGTNVAGPSSVKSRDSPAMVSTGSLSSHASCSSISSSSAMVESMLQMEPDVVQLSLPHTTPAEGFEFNFSRDGMQTTW

SEQ ID NO: 105982 - protein, 106 aa, Setaria italica
  Transcript Sequence Number=SeqID_40008
  Gene Ontology: Mol. function=protein binding
  Homolog annotation: Hit_ID=B9SDI5; Match level="QueryCoverage=87%, HitCoverage=20%, E-value=9e-21, Identity=52%"; Hit description =Protein binding protein, putative
VNVWIAFARTTKALIVQADRDDDDDGDVETPKANLDNEVWQGLESAFVSIVLTLPSNSQAEILSEWLQSKHVRYPDLTEAFEAWCYRSKVAERCQFIFLSDIDRVS

SEQ ID NO: 105983 - protein, 93 aa, Setaria italica
  Transcript Sequence Number=SeqID_40009
  Gene Ontology: Mol. function=aspartic-type endopeptidase activity; Cellular component=chromatin; Biological process=RNA-dependent DNA replication
  Homolog annotation: Hit_ID=Q8SA91; Match level="QueryCoverage=97%, HitCoverage=3%, E-value=1e-16, Identity=45%"; Hit description =Putative gag-pol polyprotein
VCADALSRRAHEVADCYSISMSSSEWTQVIVDGYFDDLASSAMIAKLVVDGQSVSNFSYQDGLLRFKGRIWLGTNSSIQHAVLQAMHSSAIGG

SEQ ID NO: 105984 - protein, 59 aa, Setaria italica
  misc_feature (18)..(18): Xaa can be any naturally occurring amino acid
  Transcript Sequence Number=SeqID_40010
  Gene Ontology: Mol. function=DNA binding; Cellular component =chromosome; Biological process=nucleosome assembly
  Homolog annotation: Hit_ID=Q943L2; Match level="QueryCoverage=98%, HitCoverage=41%, E-value=2e-20, Identity=86%"; Hit description =Histone H2B.11
TNDIFEKLVQEAARLTRXNKKPTITSREIQTSVRLVLHGELAKHAVFEGAKAVTKFTTN

SEQ ID NO: 105985 - protein, 99 aa, Setaria italica
  Transcript Sequence Number=SeqID_40011
  Gene Ontology: Mol. function=protein serine/threonine kinase activity; Biological process=protein amino acid phosphorylation
  Homolog annotation: Hit_ID=Q53QC2; Match level="QueryCoverage=54%, HitCoverage=4%, E-value=9e-16, Identity=68%"; Hit description =Leucine Rich Repeat family protein, expressed
  Pfam annotation: Domain name=LRRNT_2; Domain location=44-84; Score =47.0; E_value=7.4e-11; Accession=PF08263.4; Description=Leucine rich repeat N-terminal domain
  Subcellular localization annotation: CTP_CleavageSite=82; ConfidenceScore=5.41e-01
MATASSSFILVQLLVISLSLLVTGVASASSSSPGPSPTPNINGSETDLAALLAFKAQLSDPLGILARSWTTNVSFCRWIGVSCNQPQQRVTALSLTVCH

SEQ ID NO: 105986 - protein, 194 aa, Setaria italica
  Transcript Sequence Number=SeqID_40012
  Homolog annotation: Hit_ID=B6U078; Match level="QueryCoverage=89%, HitCoverage=43%, E-value=2e-28, Identity=45%"; Hit description=F-box domain containing protein
QNHAGFSFDYLPGESWQLCDVRDGRVLLERLLEHDEDSVVFSPELAVCDPVHRCFRLLPPIPQDLIAHVQVQGNKARYFEAFLVPSGHQEETSFKVIGRTHCEEKLAVFIFSSDSNLWRVGTSTSWADLGLTTPPDDFVLGWSQYEHGCFYCKIIWRDKLLKLDMNSMEFSTVDLPQATMMSGNCHWWRERGRR

SEQ ID NO: 105987 - protein, 76 aa, Setaria italica
  Transcript Sequence Number=SeqID_40013
  Pfam annotation: Domain name=UPF0197; Domain location=2-76; Score =77.8; E_value=3.9e-20; Accession=PF05251.4; Description =Uncharacterised protein family (UPF0197)
  Subcellular localization annotation: CTP_CleavageSite=53; ConfidenceScore=5.24e-01
MAAKAISSPVPVEWYPSLAALMVSVGLMLTASFFIYEATSSRRSRSLAKEITTAAMASVFLGFGSLFVLLASGVYV

SEQ ID NO: 105988 - protein, 227 aa, Setaria italica
  Transcript Sequence Number=SeqID_40014
ELPLELKQKVSHEILQRLRDLGENRNTTEQREAVESWRVEKLKYIRSSSTQNLSNFGLSSEKSRMLKRALDFNWRMLLEDIGLWIPPTVHHIEHDDKPENEQEEEEIVPGPPLPPECNAELHTDYGGTAVRWGLTHHKESAADCCQACIDQAKRAKPGALKCNIWVYCPSEYGCYSPDKYEHKHQECWLKQADHPKLNFKDRYSEPYRDSHPTAPVVVPWMSGVISA

SEQ ID NO: 105989 - protein, 80 aa, Setaria italica
  Transcript Sequence Number=SeqID_40015
FLKDYNALILGRKKTKERNCNNQFLILQEHLNKITIHGLDPQGLHRIGSFQSSYKNSSQQDYTTRISSVLMLLTSCISAH

SEQ ID NO: 105990 - protein, 75 aa, Setaria italica
  Transcript Sequence Number=SeqID_40016
YLFRLRKEFRCRYLRLTACRSQVPGHAGAKPPLPHSTALPCLATSRPLRVRAASTCSRDHKLAGGRHRDLTGVTA

SEQ ID NO: 105991 - protein, 105 aa, Setaria italica
  Transcript Sequence Number=SeqID_40017
  Homolog annotation: Hit_ID=B6TZ85; Match level="QueryCoverage=44%, HitCoverage=13%, E-value=3e-16, Identity=91%"; Hit description =Sucrose responsive element binding protein
  Subcellular localization annotation: CTP_CleavageSite=84; ConfidenceScore=5.74e-01
SPPPVQMQQQQPAPSQMPPPPPPPPTQPSLPFQLEPPAMNLASPRPPPPPQSPAPFSAEFLSMMQEMIRIEVRNYMSGSGLDPRADAGAAVHAVSKRMMGMAKIE

SEQ ID NO: 105992 - protein, 292 aa, Setaria italica
  Transcript Sequence Number=SeqID_40018
  Gene Ontology: Mol. function=catalytic activity; Cellular component =peroxisome; Biological process=metabolic process
  Homolog annotation: Hit_ID=B6TTI6; Match level="QueryCoverage=95%, HitCoverage=98%, E-value=1e-116, Identity=76%"; Hit description =Delta3,5-delta2,4-dienoyl-CoA isomerase
  Pfam annotation: Domain name=ECH; Domain location=34-215; Score =120.0; E_value=7.6e-33; Accession=PF00378.12; Description=Enoyl-CoA hydrataseisomerase family
MAGGDRGSSDAEAELRRGFETLAVSQPDPAAAVYEVRLNRPAQRNALSPAAFAEIPRTMSLLDRLPTARAVVLSAAGPHFCAGIELGGPGNPLTASSSGGSDPVAAAEGLRRAILEMQEALTAIERCRKPVIAAVHGACVGGGVDVVAACDIRCCSRDATFVLKEVDMAIVADLGALQRLPRIVGYGNAADLALTGRKITAMEAKEMGLVSRVFDSKKELDAGVAKIAKEIAEKSAWAVMGTKAVLLRSRDVTVEQGLEHVATWNAAMLRSNDLKEAIRAFLEKRKPVFSKL

SEQ ID NO: 105993 - protein, 153 aa, Setaria italica
  Transcript Sequence Number=SeqID_40019
  Gene Ontology: Mol. function=DNA binding; Cellular component=nucleus; Biological process=regulation of transcription
  Homolog annotation: Hit_ID=B6TZ85; Match level="QueryCoverage=33%, HitCoverage=14%, E-value=3e-23, Identity=96%"; Hit description =Sucrose responsive element binding protein
  Pfam annotation: Domain name=Myb_DNA-binding; Domain location=1-46; Score=48.4; E_value=2.8e-11; Accession=PF00249.23; Description=Myb -like DNA-binding domain
HRPFTPDEDDTILRAHARFGNKWATIARLLSGRTDNAIKNHWNSTLKRKYYAATVPGAVQRGVPVDDAGDDPDRGPQLHVRVGPGPARRRRRRRARRQQAHDGHGQDRVEAVEEDNDESANRSIRIKNQHVQRRHGKAISLPSNKQRPCGVGK

SEQ ID NO: 105994 - protein, 244 aa, Setaria italica
  Transcript Sequence Number=SeqID_40020
  Gene Ontology: Mol. function=DNA binding; Cellular component=nucleus; Biological process=regulation of transcription
  Homolog annotation: Hit_ID=B6TZ85; Match level="QueryCoverage=76%, HitCoverage=52%, E-value=2e-69, Identity=74%"; Hit description =Sucrose responsive element binding protein
  Pfam annotation: Domain name=Myb_DNA-bind_2; Domain location=22-79; Score=-7.7; E_value=0.041; Accession=PF08914.3; Description=Rap1 Myb domain
  Pfam annotation: Domain name=Myb_DNA-binding; Domain location=25-71; Score=58.6; E_value=2.4e-14; Accession=PF00249.23; Description=Myb -like DNA-binding domain
  Pfam annotation: Domain name=Myb_DNA-binding; Domain location=77-122; Score=48.4; E_value=2.8e-11; Accession=PF00249.23; Description=Myb -like DNA-binding domain
  Pfam module annotation: Pfam domain module=Myb_DNA-bind_2::Myb_DNA -binding::Myb_DNA-binding; Domain location=22-79::25-71::77-122
MASSSSSPSCRAGGAGGKPDVDRIKGPWSPEEDEALQRLVARHGARNWSLISRSIPGRSGKSCRLRWCNQLSPQVEHRPFTPDEDDTILRAHARFGNKWATIARLLSGRTDNAIKNHWNSTLKRKYYAAAGSGCGAAGPAAAADADDERPLKRTSSDGHPGLCFSPGSPSGSDLSDSSHHSLPSVMPSAAPAVTSQQQQHVYRPVPRAGGVVVLPPPLAPRPPSPPPQAPPPPATSLFVLFPCS

SEQ ID NO: 105995 - protein, 86 aa, Setaria italica
  Transcript Sequence Number=SeqID_40021
VVPENTTDQPLKQVPNFITTLVRKSEYYTVHEQWKDKTAGLAPGSDVPDEANQDITGPFPHHSRRGLTRPSTQDEAGEAKCQQQHT

SEQ ID NO: 105996 - protein, 370 aa, Setaria italica
  Transcript Sequence Number=SeqID_40022
  Gene Ontology: Cellular component=exocyst; Biological process =exocytosis
  Homolog annotation: Hit_ID=B9T3B0; Match level="QueryCoverage=95%, HitCoverage=56%, E-value=1e-130, Identity=68%"; Hit description =Protein binding protein, putative
  Pfam annotation: Domain name=Exo70; Domain location=4-354; Score =393.8; E_value=3e-115; Accession=PF03081.7; Description=Exo70 exocyst complex subunit
PTPAAPHTTDTPFAEAVKGAALQLFGFAEAISIGRRSPEKLFKIIDLHDALSDLLPDVSDIFAASKAAESIYVQAVEIRSRLADAVRGILSEFENAVLRDPPKTAVPGGTIHPLTRYVMNYSSLICDYKVTLSELIVSRPSASARLAAEGNELVPSLADLELPELENQLPLASHIVWIIVVLEHNLEGKAALYKDLALSHLFMMNNVHYIVHKVKDSPDLWGMIGDDYLKRLTGKFTMAATNYQRTSWLKILNCLRDEGLHVSGGFSSGISKSALRERFKSFNAAFEDAHRVQSGWCVPDNQLREELRISIAEKLLPAYRSFLGRFRHHIENGKHPELYIKYSVEDLEIAVGDFFEGVPPSPHNRRRSHG

SEQ ID NO: 105997 - protein, 457 aa, Setaria italica
  Transcript Sequence Number=SeqID_40023
  Gene Ontology: Mol. function=N-acetyltransferase activity; Cellular component=intracellular; Biological process=metabolic process
  Homolog annotation: Hit_ID=B6U0N0; Match level="QueryCoverage=99%, HitCoverage=83%, E-value=0.0, Identity=90%"; Hit description=KOB1
KGSYFAVTSSSSAAADCAEILGRSASSHGVSLYGGWSFDSESSITPKICITGSTSAGLHQILPWLYYHKVIGVSHFFLFVEGEAAKPAVTSVLESIRGVKIIYRTKELKERQDKSRIWNETWLGGFFYKPCNYELFVKQSLNMEMAIIMARDAGMDWIIHLDTDELIHPAGAREYSLRRLLLDVPDNVDMVIFPNYESSIERDDIKDPFTEVSMFKKNYDHLPKDTYFGLYKEATRGNPNYFLTYGNGKSAARVQEHLRPNGAHRWHNYMKTPNEIKLEEAAILHYTYTKFSDLTSRRDRCGCKPTKEDVKRCFILEFDRLAFIIASTATEEEMRNWYREHVVWTDKDTNLKLLRKGVLTRIYAPMAIIRGLKESGVFTSAVTSAKAQSKTKSSNMGLENKESILPNVTAGQSTLEGGHEKLQATVRKILEMVDAQEEAMPPMSPPGFVELIESALS

SEQ ID NO: 105998 - protein, 120 aa, Setaria italica
  Transcript Sequence Number=SeqID_40024
  Subcellular localization annotation: CTP_CleavageSite=45; ConfidenceScore=5.35e-01
AAANTKSDMPPDPSMDESSTAKASVVVPAKNMSTSQPQISEVPVIADKNMVGTITSEEPQLVTKLSNALARLGETFSSYVKDSRLKTIADSFFDRVSELAPDASLASLEEVSEKLVGLLE

SEQ ID NO: 105999 - protein, 87 aa, Setaria italica
  Transcript Sequence Number=SeqID_40025
  Gene Ontology: Mol. function=catalytic activity; Biological process =metabolic process
  Homolog annotation: Hit_ID=Q9S9P7; Match level="QueryCoverage=98%, HitCoverage=14%, E-value=5e-15, Identity=51%"; Hit description =F26G16.14 protein
MARGHIAQCLGGILARRGAATVAVDSGGRSFTGAEFADGVRRLAAGLAGRGMRPGDVVAVVAFNSIQYVELFLAVTYVGAIIAPLNY

SEQ ID NO: 106000 - protein, 266 aa, Setaria italica
  Transcript Sequence Number=SeqID_40026
  Gene Ontology: Biological process=multicellular organismal development
  Homolog annotation: Hit_ID=B6T6E2; Match level="QueryCoverage=92%, HitCoverage=93%, E-value=9e-82, Identity=65%"; Hit description =Craniofacial development protein 1
  Pfam annotation: Domain name=BCNT; Domain location=177-254; Score =77.4; E_value=5e-20; Accession=PF07572.4; Description=Bucentaur or craniofacial development
MASTSSAGDAGGSGSKGVVPDETLTSSANASSSHQESHDVGTKSRVEDIWKKMNSGLPNKMPTPMMTKFSNTAKEKKNKPTNKNWMTVLGLSPSNASTANQSPQNGQQQAQHETSEDAKKLAAAALVAAKNAAAVASGRGKVEITEVRDFAGKDIEIKKLVDANSKEAIEKAKAGGAAPSAVDNILEQIRKKQKLSVLDKTKKDWGEYKEEKGVEEELDAYKKSSNQYLDKQSFLQRADYREFERERDARLSMMAKRKTDMREDNA

SEQ ID NO: 106001 - protein, 201 aa, Setaria italica
  Transcript Sequence Number=SeqID_40027
MAMTSEDGDILALLSEPSLTEEQLEASESDDILPAILEAIKSNAKAVEPSPEEAAWADSCFVQTSELSDHDWGAMRNALLDALEKPTESPFDTSEAVHDQGVHSISEAKRQHDDVHMEQMDNSDDDKDSSQDCEVADVIRGADEHGKQMDSYAVKPEDGDELASPEVLEQAESTDSIFKVWDLELSFSDDDDGELELIKDL

SEQ ID NO: 106002 - protein, 122 aa, Setaria italica
  Transcript Sequence Number=SeqID_40028
FCQDCEVADVIRGADEHGKQMDSYAVKPEDGDELASPEVLEQAESTDSIFKVWDLELSFSDDDDGELELIKDLKKLLKENGSPPEAVYPTLPLDDTTKSLDQINIDELVVGLSDLSIQQTNK

SEQ ID NO: 106003 - protein, 72 aa, Setaria italica
  Transcript Sequence Number=SeqID_40029
NSCDTVILVKNNCNTLEGLQVCETVDMQMYGKTLCYIILLIRMNHMVQANWLNHSYGIIYACIMWCMQPNTP

SEQ ID NO: 106004 - protein, 195 aa, Setaria italica
  misc_feature (165)..(165): Xaa can be any naturally occurring amino acid
  misc_feature (188)..(188): Xaa can be any naturally occurring amino acid
  Transcript Sequence Number=SeqID_40030
  Gene Ontology: Mol. function=protein kinase activity; Cellular component=integral to membrane; Biological process=protein amino acid phosphorylation
  Homolog annotation: Hit_ID=Q7F8Q8; Match level="QueryCoverage=99%, HitCoverage=27%, E-value=3e-64, Identity=66%"; Hit description =Putative leucine-rich repeat transmembrane protein kinase 2
  Pfam annotation: Domain name=LRR_1; Domain location=118-140; Score =13.2; E_value=0.92; Accession=PF00560.25; Description=Leucine Rich Repeat
  Pfam annotation: Domain name=LRR_1; Domain location=142-164; Score =15.0; E_value=0.31; Accession=PF00560.25; Description=Leucine Rich Repeat
  Pfam annotation: Domain name=LRR_1; Domain location=166-187; Score =12.2; E_value=1.4; Accession=PF00560.25; Description=Leucine Rich Repeat
  Pfam annotation: Domain name=LRR_1; Domain location=72-91; Score =16.4; E_value=0.12; Accession=PF00560.25; Description=Leucine Rich Repeat
  Pfam annotation: Domain name=LRR_1; Domain location=94-113; Score =9.5; E_value=4.7; Accession=PF00560.25; Description=Leucine Rich Repeat
  Pfam module annotation: Pfam domain module=LRR_1::LRR_1::LRR_1::LRR _1::LRR_1; Domain location=118-140::142-164::166-187::72-91::94-113
PDAIGLWGLYRTLESPWQLSGWTFQGGDPCSEGGGRGRWRGVFCKGSSVVTISISGLGVGGWLGPELLKFQSLKKLDLSFNNITGEIPPTLPPNVEHLNLAANKFEGNIPASLPWLHSLKYLNFSYNKLSGVIGDVFVNMDSLETMDLSFNAFSGDLPRSFSSLXNLHYLYLHHNEFTGSVILLAGLXLSSLNIE

SEQ ID NO: 106005 - protein, 134 aa, Setaria italica
  Transcript Sequence Number=SeqID_40031
  Gene Ontology: Mol. function=oxidoreductase activity, acting on paired donors, with incorporation or reduction of molecular oxygen, 2-oxoglutarate as one donor, and incorporation of one atom each of oxygen into both ...
  Gene Ontology: Mol. function=donors; Cellular component=plasma membrane; Biological process=protein metabolic process
  Homolog annotation: Hit_ID=Q338D2; Match level="QueryCoverage=69%, HitCoverage=31%, E-value=1e-33, Identity=69%"; Hit description =Prolyl 4-hydroxylase, putative, expressed
  Pfam annotation: Domain name=ShK; Domain location=76-112; Score=9.2; E_value=0.072; Accession=PF01549.16; Description=ShK domain-like
IVLNVSWPISCNVGLILAVKPVKGDALLFFSLHPNTTTDTNSLHGSCPVIEGEKWSATKWIHVRSFGSPKATTGECRDKDDMCPKWADAGECAKNPEYMVGTRDSPGSCVQCSCKLLNSMADDQNKESCGSRKN

SEQ ID NO: 106006 - protein, 92 aa, Setaria italica
  Transcript Sequence Number=SeqID_40032
LPGLLGVGRRAPALYCPVGVFNPLKMGGYQCGVQKDAVFSHWPCLISFISPCPMVLGQKCPISFMVSLSFSSLRLSHHSSHTFLSVEEWVRD

SEQ ID NO: 106007 - protein, 138 aa, Setaria italica
  misc_feature (69)..(69): Xaa can be any naturally occurring amino acid
  Transcript Sequence Number=SeqID_40033
  Gene Ontology: Mol. function=protein kinase activity; Cellular component=cellular_component; Biological process=protein amino acid phosphorylation
  Homolog annotation: Hit_ID=Q6KAK1; Match level="QueryCoverage=100%, HitCoverage=9%, E-value=1e-54, Identity=72%"; Hit description =Protein kinase-like
RRLERIRNTFKGIEGSHVWPFQVWLQTDKAAYLLRQYFFNNLHDRLSTRPFLSQIAKKWLAFQRWLPTXDHLVVQLIHAVEQSHSKGVCHGDIKCENVLVTSWNWLYLADFASFKPTYIPYDDPSDYSFYFDTGGRRR

SEQ ID NO: 106008 - protein, 259 aa, Setaria italica
  misc_feature (193)..(193): Xaa can be any naturally occurring amino acid
  Transcript Sequence Number=SeqID_40034
  Gene Ontology: Mol. function=protein kinase activity; Cellular component=cellular_component; Biological process=protein amino acid phosphorylation
  Homolog annotation: Hit_ID=Q6KAK1; Match level="QueryCoverage=98%, HitCoverage=20%, E-value=1e-103, Identity=63%"; Hit description =Protein kinase-like
  Pfam annotation: Domain name=Pkinase; Domain location=1-203; Score= -92.1; E_value=0.0052; Accession=PF00069.17; Description=Protein kinase domain
QVWLQTDKAAYLLRQYFFNNLHDRLSTRPFLSQIAKKWLAFQLIHAVEQSHSKGVCHGDIKCENVLVTSWNWLYLADFASFKPTYIPYDDPSDYSFYFDTGGRRRCYLAPERFYEHGGESQVAADAPLQPSMDIFSLGCVLAELFLDGVALFEFSNLLSYRRGQYDPMLLLHKIQDTGIRDMILHMIQLDPQXRLPCRSYLQKYESVVFPVYFSNFLHKFFSDIVPLDSDARVEKTQDNFEKILEIMMDSSTIEQIGRC

SEQ ID NO: 106009 - protein, 105 aa, Setaria italica
  Transcript Sequence Number=SeqID_40035
PSRPELHSKPLSLKPLANLYLVVPAELLYHWTEQPITGLLVKLLNTYHLKLSLVFHAVRIWYDHKQDSKGNADFRIGSGLPLSHCFSEVINTLISRASVALLVLV

SEQ ID NO: 106010 - protein, 160 aa, Setaria italica
  misc_feature (57)..(57): Xaa can be any naturally occurring amino acid
  misc_feature (65)..(65): Xaa can be any naturally occurring amino acid
  Transcript Sequence Number=SeqID_40036
  Gene Ontology: Mol. function=helicase activity; Cellular component =replication fork; Biological process=S phase of mitotic cell cycle
  Homolog annotation: Hit_ID=B9T8Y5; Match level="QueryCoverage=100%, HitCoverage=50%, E-value=2e-64, Identity=73%"; Hit description=DNA replication helicase dna2, putative
IYHPLLAHKKFDTCIMDEAGQITLPVSLGPLMLATKFVLVGDHYQLPPLVQSSEARXNGMGISLXWRLSEAHPQAISALRCQYRMSSGIMELSNALIYGNRLCCGSLEIANAKLKFSGRESVQLKLREILNADRAVIFANTDQIPALETKDHRTVNNPTE

SEQ ID NO: 106011 - protein, 209 aa, Setaria italica
  misc_feature (62)..(62): Xaa can be any naturally occurring amino acid
  Transcript Sequence Number=SeqID_40037
  Gene Ontology: Mol. function=identical protein binding
  Homolog annotation: Hit_ID=Q6AU09; Match level="QueryCoverage=88%, HitCoverage=19%, E-value=8e-58, Identity=75%"; Hit description=Fip1 motif family protein, expressed
  Pfam annotation: Domain name=Fip1; Domain location=36-98; Score=97.9; E_value=3.4e-26; Accession=PF05182.5; Description=Fip1 motif
MNKNFHSGYGSTPWGGSGRGFGGGLDFTLPPHKTIFDIDVDAAFDEKPWKYPGADISDFFNXGFDEEKWKDFCKQLDQLRLESRMQSRIRVYESGRSEQDYDPDLPPELAAATGHPDISVDNRNKTDNGHTDFDAQGRGPANVRTPVMTGRPIQVENIYTDRIPTADSRPHRMRESDSVIEIVCQGRDSMDDETVDQLRRILKEVIKRP

SEQ ID NO: 106012 - protein, 111 aa, Setaria italica
  Transcript Sequence Number=SeqID_40038
  Subcellular localization annotation: CTP_CleavageSite=73; ConfidenceScore=5.87e-01
VVFVTSARSKGSSSSRRRDAAATSSKNWRKTLPPSPTTSSSQRNSRGGGNEHARRWLHRRSSTSRGVSASPPSASLRSQLIAVQMQSVCLEDVEESTASLSSREKRRKSLR

SEQ ID NO: 106013 - protein, 297 aa, Setaria italica
  misc_feature (286)..(286): Xaa can be any naturally occurring amino acid
  Transcript Sequence Number=SeqID_40039
  Gene Ontology: Cellular component=mitochondrion
  Homolog annotation: Hit_ID=Q84Q17; Match level="QueryCoverage=98%, HitCoverage=68%, E-value=1e-141, Identity=44%"; Hit description =Putative pentatricopeptide (PPR) repeat-containing protein
  Pfam annotation: Domain name=PPR; Domain location=119-153; Score =42.2; E_value=2e-09; Accession=PF01535.12; Description=PPR repeat
  Pfam annotation: Domain name=PPR; Domain location=18-52; Score=25.3; E_value=0.00024; Accession=PF01535.12; Description=PPR repeat
  Pfam annotation: Domain name=PPR; Domain location=220-254; Score =42.5; E_value=1.7e-09; Accession=PF01535.12; Description=PPR repeat
  Pfam annotation: Domain name=PPR; Domain location=255-289; Score =11.2; E_value=0.42; Accession=PF01535.12; Description=PPR repeat
  Pfam module annotation: Pfam domain module=PPR::PPR::PPR::PPR; Domain location=119-153::18-52::220-254::255-289
RKTNLHRMQAEGAEVNSVTWNTIAGGYIQMRDYKAAVRLICDMVRGGAGVDFVTLVIGLNACSRAGWLRLGKEIHGLAVRMHCDGIESVSNAVITMYARCKDMERALMLFKMLRCPGLVTWNTMIAGFALSDDAEEASRLFREMVCSDVEPNYVTVVTYLALCARVANLQHGRELHTHIVKHGFKGYCLLWNSLIDMYSKSGRLSVAQNVFDTMDDRDMISYTSMIAGYGMQGKGAVALRLFNQMVDSGIMPDAIIMVTVLSACSHSGLVDEGEELFDKMVHSFGXKGPQMEHYSCM

SEQ ID NO: 106014 - protein, 117 aa, Setaria italica
  Transcript Sequence Number=SeqID_40040
WCSICLISLMWYQRYLEDFNIDTIIFCPRITSLDSGYLSKNSISRLNKNHLPPCGTRKGGPSDYIPSFNEAAVYGLGELITSCDHSAPLCLIQKHGYAKELKHYPSKWTSFYTDVAK

SEQ ID NO: 106015 - protein, 106 aa, Setaria italica
  Transcript Sequence Number=SeqID_40041
TLSKVNQEKGRVPSDYIPSFNEAAVYGLGELITSCDHSAPLCLVREQFSTKSCWLFSTVIKKSQMCYHHLTICLSTFVPLIKKFIYCLQLNCFSKHKTKFCKFNWS

SEQ ID NO: 106016 - protein, 284 aa, Setaria italica
  misc_feature (14)..(14): Xaa can be any naturally occurring amino acid
  Transcript Sequence Number=SeqID_40042
  Gene Ontology: Mol. function=molecular_function; Cellular component =endomembrane system; Biological process=biological_process
  Homolog annotation: Hit_ID=A5PK76; Match level="QueryCoverage=45%, HitCoverage=23%, E-value=7e-17, Identity=37%"; Hit description =ASPSCR1 protein
  Pfam annotation: Domain name=UBX; Domain location=133-212; Score=4.3; E_value=0.032; Accession=PF00789.12; Description=UBX domain
MEAEYTHHRAGPSXSSTTTLLWPCATRRRKRGEDGDDDLSPASVAMDLDADAQHAADKLKAVSEELGHQIRVFSREKFAQQPSKLPSADYEEDDEFYELQPADYRNLVSIRKAEKSKMLKTRMMREAELAAQRAKIAKAVMRVRFPDGYILEADFLPSDRIHSLVDLLMKVLARPDLPFYLYTVPPKKRILDTSQDFYTAGFVPGANVHFSYDLPEGSLADDLKSGPFLREEIQSLDGLSLLLKPASQPDDSRMNSPAVQSGVSQSNPAPTANEKPGKPKWLKR

SEQ ID NO: 106017 - protein, 121 aa, Setaria italica
  Transcript Sequence Number=SeqID_40043
PASGGLLFDSHATSSSFTRETLERELTSYCRCLTFRHHLRLPWWGCRRFSQRGDANMASATGGSGDGGGDHRSSSGKGKTIVVPWDKPKKMSMLEKAMLRYLQKRHKQSSRSGRHDLVCQA

SEQ ID NO: 106018 - protein, 74 aa, Setaria italica
  misc_feature (1)..(13): Xaa can be any naturally occurring amino acid
  Transcript Sequence Number=SeqID_40044
XXXXXXXXXXXXXVLTNKLLSSPIEHNRLNINRTEFNTYINTTKQFKHQLNRTEHIHQLMIIIDINRTHEHQHQ

SEQ ID NO: 106019 - protein, 142 aa, Setaria italica
  Transcript Sequence Number=SeqID_40045
  Gene Ontology: Mol. function=protein kinase activity; Cellular component=intrinsic to membrane; Biological process=protein amino acid phosphorylation
  Homolog annotation: Hit_ID=B9RJB4; Match level="QueryCoverage=96%, HitCoverage=24%, E-value=7e-49, Identity=67%"; Hit description =Mitogen-activated protein kinase kinase kinase, putative
  Pfam annotation: Domain name=Pkinase; Domain location=1-133; Score= -7.7; E_value=4.9e-08; Accession=PF00069.17; Description=Protein kinase domain
  Pfam annotation: Domain name=Pkinase_Tyr; Domain location=1-131; Score=-102.4; E_value=6.4e-07; Accession=PF07714.9; Description =Protein tyrosine kinase
  Pfam module annotation: Pfam domain module=Pkinase::Pkinase_Tyr; Domain location=1-133::1-131
LHRDIKCANILVDASGLVKLADFGLAKEMSILSQARSSKGTVFWMAPEVAKAKPHGPPADIWSLGCTVLEMLTGKVPYPDMEWIHALLNIGRGIPPEIPNTLSEDARDFIEKCVQANPNDRPSAAQLLEHPFVQRPLQPFSA

SEQ ID NO: 106020 - protein, 83 aa, Setaria italica
  misc_feature (77)..(77): Xaa can be any naturally occurring amino acid
  Transcript Sequence Number=SeqID_40046
FTITRQSPFYSAGITRSRAELDDSCRVVIRDEVISDSEREARPSTCFQIGVSRCCTRQGLVSTTQMLELKSRMATGXSCPTIC

SEQ ID NO: 106021 - protein, 186 aa, Setaria italica
  misc_feature (126)..(126): Xaa can be any naturally occurring amino acid
  Transcript Sequence Number=SeqID_40047
  Gene Ontology: Mol. function=iron ion binding; Cellular component =integral to membrane; Biological process=iron ion transport
  Homolog annotation: Hit_ID=Q6H3Z6; Match level="QueryCoverage=98%, HitCoverage=27%, E-value=9e-90, Identity=84%"; Hit description=Metal- nicotianamine transporter YSL2
  Pfam annotation: Domain name=OPT; Domain location=1-185; Score= -274.2; E_value=0.033; Accession=PF03169.7; Description=OPT oligopeptide transporter protein
LCFPLRKALVIDYKLTYPSGTATAVLINGFHTPKGEENAKKQVNGFLRCFTVSLLWSFFQWFYTGGEGCGFLQFPTFGLKAWKQTFFFDFSLTYVGAGMICSHLVNLSALFGAILSWGILWPLISXTKGNWYPANVPESSMTSLFGYKSFLCVALIMGDGLYHFTKVMVITVNSLHERSNNNILRR

SEQ ID NO: 106022 - protein, 54 aa, Setaria italica
  Transcript Sequence Number=SeqID_40048
AYSGSDYIENLNALVRNLPPPRYMVSAHILKGVLSIYVTALALLTVYAKYSFRM

SEQ ID NO: 106023 - protein, 136 aa, Setaria italica
  Transcript Sequence Number=SeqID_40049
  Gene Ontology: Mol. function=homoserine kinase activity; Biological process=threonine metabolic process
  Homolog annotation: Hit_ID=B6UB59; Match level="QueryCoverage=85%, HitCoverage=30%, E-value=4e-37, Identity=75%"; Hit description =Homoserine kinase
  Subcellular localization annotation: CTP_CleavageSite=30; ConfidenceScore=5.30e-01
PSTRRERARARASSWALRPSLVSPRSRALRVNAAAQDPAPAFQSVTAFAPATVANLGPGFDFLGCAVADASLSLGDTVIATLDPTLPPGTVSIASVTSPSRPHLAARLSKDPLRNCAGVAAIAALRALGVRSHAVS

SEQ ID NO: 106024 - protein, 793 aa, Setaria italica
  misc_feature (743)..(743): Xaa can be any naturally occurring amino acid
  Transcript Sequence Number=SeqID_40050
  Gene Ontology: Mol. function=protein serine/threonine kinase activity; Cellular component=plasma membrane; Biological process =protein amino acid phosphorylation
  Homolog annotation: Hit_ID=Q01L66; Match level="QueryCoverage=100%, HitCoverage=100%, E-value=0.0, Identity=55%"; Hit description =H0321H01.14 protein
  Pfam annotation: Domain name=Pkinase; Domain location=411-743; Score =241.7; E_value=1.8e-69; Accession=PF00069.17; Description=Protein kinase domain
  Pfam annotation: Domain name=Pkinase_Tyr; Domain location=411-731; Score=-39.1; E_value=4e-11; Accession=PF07714.9; Description=Protein tyrosine kinase
  Pfam module annotation: Pfam domain module=Pkinase::Pkinase_Tyr; Domain location=411-743::411-731
MGSSGCSSEIVESTEEEFDSAPIGGSSLLHIKLRDEEKRSKCHDYPVEDDLDQLLKAIDSRTFRRALSPGSTGGDALGKGVLKKPARSGLSQNAGIGISSKTVNMKQALRRLCISQASEMAAMKRLSMSPGSSSSSEAGTIHRLYASLMVQSSTEGLLHDDEKMNLIEISLTPEKIDKSSSRGTSEFSEDCEFETADGSAVTSIRSVSSTSAEVRKIRIQDVISGDPIDSESSLVENGKLGSKISAATDDGSPRVPILSKPITTSRLVKPVFRCKTAGKKKVKEEPSSLGDSSNSTKFCSSKESISLASTSCSSTSSVTNPTSCAEEEKSTPGPEKSDETSSEWLGAEEKGECSQNSKSSISEYGCSTSISDESQFGLCGYSNRPHMAKDLRWLTIRQLALQQGSLGLDNFKLLKRLGCGDIGTVYLAELVDSDCLFALKVMDIEYLINRKKMLRAQAEREILEMLDHPFLPTLYAHFTTDNLSCLVMEYCPGGDLHVLRQRQPGRSFPEPAARFYVAEVLLALEYLHMLGVIYRDLKPENILVREDGHIMLSDFDLSLRCSVNPVLLRSSSVTANHQPRKLAGPCAENYCINSSCLQQPSCAQTSCFTPRLPSIPKPRKPKSSQKRLPQLVVEPIDARSNSFVGTHEYLAPEIIKGDGHGSAVDWWTFGVFLYELLYGKTPFRGPGNDETLANVVSQNLRFPDNPAVSSNAKDLIRGLLVKEPENRLGSLRGAAEIKQHPFXEGLNWALIRSAAPPETQPCNVVTLAKERKKKEGKCLEFRSNSEDLEFEVF

SEQ ID NO: 106025 - protein, 340 aa, Setaria italica
  misc_feature (38)..(38): Xaa can be any naturally occurring amino acid
  misc_feature (113)..(113): Xaa can be any naturally occurring amino acid
  misc_feature (205)..(205): Xaa can be any naturally occurring amino acid
  Transcript Sequence Number=SeqID_40051
  Gene Ontology: Mol. function=protein serine/threonine kinase activity; Biological process=protein amino acid phosphorylation
  Homolog annotation: Hit_ID=Q25AG2; Match level="QueryCoverage=93%, HitCoverage=39%, E-value=1e-151, Identity=82%"; Hit description =H0512B01.12 protein
  Pfam annotation: Domain name=Pkinase; Domain location=48-317; Score =157.8; E_value=3.2e-44; Accession=PF00069.17; Description=Protein kinase domain
  Pfam annotation: Domain name=Pkinase_Tyr; Domain location=50-317; Score=59.2; E_value=1.1e-17; Accession=PF07714.9; Description =Protein tyrosine kinase
  Pfam module annotation: Pfam domain module=Pkinase::Pkinase_Tyr; Domain location=48-317::50-317
TFVLISVILFGTYCTITIKEIPSVQSSNNVGLPLKAFXIYAELEKATSGFQEVLGTGASGIVYKGQLQDDLGTYIAVKKIDKLEHETEKEFTVEVQTIGRTHHKNLVRLLGFXNEGKERLLVYEFMTNGSLNQFLFGDVRLEWNLRAQLALGVARGCYTLHEECSTQIIHCDIKPQNILLDGNFTAKISDFGLAKLLRTNQTQKXTGIRGTRGYVAPEWFKSIGITAKVDVYSFGVILLELICCRRNVELEAEEDQKILTDWANDCYRCGRVDFLVEGDDEAILNLMKVERFVAVALWCLQEDPTMRPTMLKVTQMLDEAAAVPTVPTPPDPSSFVSSLP

SEQ ID NO: 106026 - protein, 94 aa, Setaria italica
  Transcript Sequence Number=SeqID_40052
  Gene Ontology: Cellular component=extracellular region; Biological process=xenobiotic metabolic process
  Homolog annotation: Hit_ID=Q38769; Match level="QueryCoverage=100%, HitCoverage=42%, E-value=2e-32, Identity=71%"; Hit description =Permatin
  Pfam annotation: Domain name=Thaumatin; Domain location=1-94; Score =16.3; E_value=2.1e-09; Accession=PF00314.9; Description=Thaumatin family
MSFQCGGNGPSCAADVNARCPAELKVPGGCASACEKFGGDTYCCQGPYKDQCPPTDYSRFFKGLCPDAYSYAKDDRTSTFNCPQGANYDIVLCP

SEQ ID NO: 106027 - protein, 136 aa, Setaria italica
  Transcript Sequence Number=SeqID_40053
  Gene Ontology: Mol. function=protein serine/threonine kinase activity; Cellular component=plasma membrane; Biological process =protein amino acid phosphorylation
  Homolog annotation: Hit_ID=B6U656; Match level="QueryCoverage=95%, HitCoverage=34%, E-value=7e-72, Identity=99%"; Hit description=ATP binding protein
  Pfam annotation: Domain name=Pkinase; Domain location=1-131; Score= -26.1; E_value=6.1e-07; Accession=PF00069.17; Description=Protein kinase domain
  Pfam annotation: Domain name=Pkinase_Tyr; Domain location=1-131; Score=-63.9; E_value=1.8e-09; Accession=PF07714.9; Description =Protein tyrosine kinase
  Pfam module annotation: Pfam domain module=Pkinase::Pkinase_Tyr; Domain location=1-131::1-131
KSFLIKNRRRKLAFKVVVQIALDLARGLSYLHSKKIVHRDVKTENMLLDKTRTVKIADFGVARLEASNPSDMTGETGTLGYMAPEVLNGNPYNRKCDVYSFGICLWEIYCCDMPYPDLSFSEVTSAVVRQVKTICS

SEQ ID NO: 106028 - protein, 355 aa, Setaria italica
  Transcript Sequence Number=SeqID_40054
  Gene Ontology: Mol. function=protein serine/threonine kinase activity; Cellular component=plasma membrane; Biological process =protein amino acid phosphorylation
  Homolog annotation: Hit_ID=B6U656; Match level="QueryCoverage=100%, HitCoverage=93%, E-value=0.0, Identity=93%"; Hit description=ATP binding protein
  Pfam annotation: Domain name=Pkinase; Domain location=51-325; Score =203.1; E_value=7.6e-58; Accession=PF00069.17; Description=Protein kinase domain
  Pfam annotation: Domain name=Pkinase_Tyr; Domain location=51-325; Score=236.7; E_value=5.9e-68; Accession=PF07714.9; Description =Protein tyrosine kinase
  Pfam module annotation: Pfam domain module=Pkinase::Pkinase_Tyr; Domain location=51-325::51-325
EQLERHLSRAWTMEKRKEEASAGANQRGGAAGRQHSLRPRREDWEIDPAKLVVKGVIARGTFGTVHRGIYDGHDVAVKLLDWGEDGHRSEQDIAALRAAFSQEVSVWHKLDHPNVTKFIGAIMGARDLNIQTENGHIGMPTNICCVVVEYLAGGALKSFLIKNRRRKLAFKVVVQIALDLARGLSYLHSKKIVHRDVKTENMLLDKTRTVKIADFGVARLEASNPSDMTGETGTLGYMAPEVLNGNPYNRKCDVYSFGICLWEIYCCDMPYPDLSFSEVTSAVVRQNLRPEIPRCCPSSLANVMKRCWDANPDKRPEMAEVVSMMEAIDTSKGGGMIPVDQRPGCLSCFRQYRGP

SEQ ID NO: 106029 - protein, 80 aa, Setaria italica
  Transcript Sequence Number=SeqID_40055
  Gene Ontology: Mol. function=peptidase activity; Cellular component =signal peptidase complex; Biological process=signal peptide processing
LKITVVAFWVLFHVMAKLCKLKCMYTTFCLYRCPSSSEIHKHTNSTPLGRFTKEGVLVEGLFWKDVEKLIDDYNSERKSK

SEQ ID NO: 106030 - protein, 192 aa, Setaria italica
  Transcript Sequence Number=SeqID_40056
  Gene Ontology: Mol. function=peptidase activity; Cellular component =signal peptidase complex; Biological process=signal peptide processing
  Homolog annotation: Hit_ID=P58684; Match level="QueryCoverage=92%, HitCoverage=92%, E-value=6e-66, Identity=67%"; Hit description =Probable signal peptidase complex subunit 2
  Pfam annotation: Domain name=SPC25; Domain location=12-190; Score =252.5; E_value=1e-72; Accession=PF06703.3; Description=Microsomal signal peptidase 25 kDa subunit (
MASDGAAGTPAKVTPKKANLLDPHSIKHLLDETISDVVKSKGYTEDTRLGNLKLGIGAAVIAVALLAQFYPKKFPQNREFLLGCIALYVALNVVLLILSYTKEKDAILFTHPPAGSFNSTGLIISSKLPRFSDMYTLTIDSADPQSISANKPVRFSKSVTKWFTKEGVLVEGLFWKDVEKLIDDYNSERKSK

SEQ ID NO: 106031 - protein, 132 aa, Setaria italica
  misc_feature (118)..(118): Xaa can be any naturally occurring amino acid
  misc_feature (123)..(123): Xaa can be any naturally occurring amino acid
  misc_feature (129)..(129): Xaa can be any naturally occurring amino acid
  Transcript Sequence Number=SeqID_40057
  Gene Ontology: Mol. function=structural constituent of ribosome; Cellular component=intracellular; Biological process=RNA-dependent DNA replication
  Homolog annotation: Hit_ID=Q8SB40; Match level="QueryCoverage=96%, HitCoverage=13%, E-value=9e-47, Identity=73%"; Hit description =Putative ribosomal protein
MEDTPSEEEIGTPLSSTERNKYVTVDSGDDLELPRTEKRILWTQEEDVRLMSSWLHNSTDSSIGADRKNEQYWYDVADTYNETTSSQRRRNAKQAKDRWHKVNKWTDLFHNAWLKARXRVFTXGYNDQXWID

SEQ ID NO: 106032 - protein, 343 aa, Setaria italica
  misc_feature (260)..(260): Xaa can be any naturally occurring amino acid
  Transcript Sequence Number=SeqID_40058
  Gene Ontology: Mol. function=structural constituent of ribosome; Cellular component=intracellular; Biological process=metabolic process
  Homolog annotation: Hit_ID=Q8SB40; Match level="QueryCoverage=97%, HitCoverage=36%, E-value=1e-102, Identity=60%"; Hit description =Putative ribosomal protein
MPTRTFTTDLEEMNTFGKIQADEHANRLKVLEVQKKLSSEKIEQAKLAHLAAKEQKEAAEVQREARKYEVEARMFETYNRLLAMDVALMSDEEKKLLDVWIKKVVILSVRSLLFSFSFRHCRFSFSFILSDLEEQREHDEQEAVQEDDEGEEPVEIDPADVYTLDDFLAEDEKLESFRRRIGDKLKAKFEGASSEPPSHRQRQSGPQMYIPRNREAGHDDLVANYFSANPNYTDEMFRRRFRMTQPLFLRIVGVLSDWDXFFTQRVDAAGRDGHSPLQKCTAAIRWLGYGTPADQLDEVLKIAASTSLEFLGWKFAEGVIECFGGEYLCPSIIDELEKILQEN

SEQ ID NO: 106033 - protein, 252 aa, Setaria italica
  misc_feature (37)..(37): Xaa can be any naturally occurring amino acid
  misc_feature (67)..(67): Xaa can be any naturally occurring amino acid
  misc_feature (182)..(182): Xaa can be any naturally occurring amino acid
  misc_feature (231)..(231): Xaa can be any naturally occurring amino acid
  Transcript Sequence Number=SeqID_40059
  Gene Ontology: Mol. function=structural constituent of ribosome; Cellular component=intracellular; Biological process=RNA-dependent DNA replication
  Homolog annotation: Hit_ID=Q8SB40; Match level="QueryCoverage=91%, HitCoverage=23%, E-value=4e-68, Identity=55%"; Hit description =Putative ribosomal protein
SLSQFFKINHLIILQMSSWLHNSTDSSIGTDRKNEQXWYDVADTYNETTPSHRRRNAGSGRDHKNCXTKDRWHKVNKWTNLFHNAWLKARRVFTSGYNDQMWIDKAHAFYVEDNKDLKLGHFVLMEVWYTIRNEAKWISYNNGLKQARKRKSSDKNNEGENMDHVDLEDMEEIPRPEHGPKXMAKKSKKEALEKKAKGKDIDQTELEELNTFGKIQADEHANRLKVLEVQXKLSSEKIERAKLVPTLVLSFF

SEQ ID NO: 106034 - protein, 201 aa, Setaria italica
  Transcript Sequence Number=SeqID_40060
  Homolog annotation: Hit_ID=Q9FZI9; Match level="QueryCoverage=84%, HitCoverage=16%, E-value=2e-17, Identity=34%"; Hit description =F17L21.26
KGSFASSRPPLPDAERLFLIERDLISKLQVPKVIKPHPTRPKRTTICIDCSNIVESTTWLVEVAVSKKTTREVEAELELPNALPAIVSGCNNNRVHLTNDAYKKMVGQPLCPWLNSLLGAGASRRMNGEVVLNVQMFSIVSCLPSNRCAFPCTAKISWQHEDGTASLIVPCAVEHLTGNSDDYCFIWRFDSKKSSIMYSFP

SEQ ID NO: 106035 - protein, 108 aa, Setaria italica
  Transcript Sequence Number=SeqID_40061
  Gene Ontology: Mol. function=transferase activity, transferring glycosyl groups; Cellular component=1,3-beta-glucan synthase complex; Biological process=cell wall organization and biogenesis
  Homolog annotation: Hit_ID=B9SKY2; Match level="QueryCoverage=82%, HitCoverage=4%, E-value=1e-32, Identity=68%"; Hit description =Transferase, transferring glycosyl groups, putative
IIMSLDRPPYEWHEFFPNLQHNLGVVTTVWAPIVMVYFMDTQIWYAIFSTICGGVNGAFSRLGEIRTLGMLRSRFQAIPRAFGQKLVPNRGSHFKREEEDRNPPYDKF

SEQ ID NO: 106036 - protein, 193 aa, Setaria italica
  misc_feature (106)..(106): Xaa can be any naturally occurring amino acid
  Transcript Sequence Number=SeqID_40062
  Gene Ontology: Mol. function=zinc ion binding
  Homolog annotation: Hit_ID=Q10DV6; Match level="QueryCoverage=91%, HitCoverage=23%, E-value=1e-75, Identity=76%"; Hit description =Transposon protein, putative, unclassified, expressed
  Pfam annotation: Domain name=MULE; Domain location=84-179; Score =41.8; E_value=2.7e-09; Accession=PF10551.1; Description=MULE transposase domain
EIFEVLSFLDYLEIVPPNNQEMIEPCRCDFGLDDTQKLLGYFKRLNTENPTFSYAFQVDKNDCLTHAFWADAKVRTSYCYFGDGVRLETSFVENDDVLPLVLLTGXHHLQSVVFGCALLTDFTESSYIWFFQNWIAAMGSHHPTSLATSYNEAIGSAAAKVFPQTHLLYCTSQILNRCKENLVNVYSRCASFE

SEQ ID NO: 106037 - protein, 154 aa, Setaria italica
  Transcript Sequence Number=SeqID_40063
PLGKPRSNMRSSHGGSRACAMTAFLILLFGCFALCVHCRSPALKDGGGTEKSYLRNDSHLTTPCPSSLSAASSSTSPVNDESKIELVMCVYKGLQCVEGEPCHCCVLEQPEPPCYFTHSECVAKCPFCYPPPCSPPGPTVEGRALQAGSNNATM

SEQ ID NO: 106038 - protein, 65 aa, Setaria italica
  Transcript Sequence Number=SeqID_40064
  Subcellular localization annotation: CTP_CleavageSite=37; ConfidenceScore=5.32e-01
LFPTSDPSNGIRDLHAGSPFFPTGNANPYISFVKCIVCSQESSTGRFRLVANEFETNTQRIYECD

SEQ ID NO: 106039 - protein, 35 aa, Setaria italica
  Transcript Sequence Number=SeqID_40065
ITVYNEKLFVKHFSSSLISIFLVVFEQFHFMQVLD

SEQ ID NO: 106040 - protein, 309 aa, Setaria italica
  misc_feature (26)..(26): Xaa can be any naturally occurring amino acid
  misc_feature (40)..(40): Xaa can be any naturally occurring amino acid
  misc_feature (64)..(64): Xaa can be any naturally occurring amino acid
  misc_feature (70)..(70): Xaa can be any naturally occurring amino acid
  misc_feature (294)..(294): Xaa can be any naturally occurring amino acid
  Transcript Sequence Number=SeqID_40066
  Gene Ontology: Mol. function=metal ion binding; Cellular component =intracellular
  Homolog annotation: Hit_ID=Q01HG3; Match level="QueryCoverage=95%, HitCoverage=46%, E-value=1e-114, Identity=67%"; Hit description =OSIGBa0142I02-OSIGBa0101B20.26 protein
  Pfam annotation: Domain name=IBR; Domain location=74-132; Score=48.6; E_value=2.5e-11; Accession=PF01485.13; Description=IBR domain
VHSPEVTLILKKLGSNFVRLSCQHLXFCVKCMETLCRMHXKEGSVFQLVCLDTKCNASIPPFVXKRLLTXEEFERWDRLVLKKALDSMSDVVYCPRCGIGCLEDESNDAECPKCSFIFCSLCKEPCHPAKQCITPEEKIKRQQASGKMSQKEMVQELLTIRKMFSDILIQLCPKCQMPIVKSEGCNKMSCGNCGQLLCFRCGRAISGYDHFWNECVLFELCQYSDVTPFERHMEEVQIGRSAKVQLTPIGSTIRCPKCRQRNFKENEEYIFCWACRIHYCSLCRMRVDDKYMLXSGHYRSSECVGLGNF

SEQ ID NO: 106041 - protein, 177 aa, Setaria italica
  Transcript Sequence Number=SeqID_40067
  Subcellular localization annotation: CTP_CleavageSite=26; ConfidenceScore=5.54e-01
PAAAATSSSSSPSAKQSHHHQRRSAAAAAVTDPTPPHRHASDVVVADNSTTRAGSITASIHNHQLLLKKEVLDMDSLEPAQEDAAADHDLVVGGMIADMDGALNVLCASSFHSKKQQQQHATADHLERLPEEENKRLLLDRDPFSFSFLDWVGASFGVAGEAAAANKAVTVRWLDAA

SEQ ID NO: 106042 - protein, 201 aa, Setaria italica
  misc_feature (73)..(73): Xaa can be any naturally occurring amino acid
  misc_feature (141)..(141): Xaa can be any naturally occurring amino acid
  Transcript Sequence Number=SeqID_40068
  Gene Ontology: Cellular component=membrane
  Homolog annotation: Hit_ID=Q7XSV5; Match level="QueryCoverage=70%, HitCoverage=45%, E-value=2e-33, Identity=47%"; Hit description =OSJNBa0039K24.1 protein
  Pfam annotation: Domain name=DUF6; Domain location=7-137; Score=34.9; E_value=3.1e-07; Accession=PF00892.12; Description=Integral membrane protein DUF6
  Pfam annotation: Domain name=TPT; Domain location=6-137; Score=-34.2; E_value=0.065; Accession=PF03151.8; Description=Triose-phosphate Transporter family
  Pfam module annotation: Pfam domain module=DUF6::TPT; Domain location= 7-137::6-137
FCSFRSFGFRSWFRSLQTRMAEDFSAPYTSTAIMCLMAGAQCAGVSAAMDRSLDVWKLGFDIRLYSVLYIGVXGSGIGFAIMSWCIQVRGPLYVSMFSPLLMVVVAIVGWAILGEKIRVGSAIGSVLIVAGLYMVLWGKGXEMDKPGGLDNDKGDEEAGMGLGLKGKPAVASNRVDAVTPLPPVFSATSPNKDTGPRNGSN

SEQ ID NO: 106043 - protein, 95 aa, Setaria italica
  Transcript Sequence Number=SeqID_40069
LEEEAGRGTGGRRDAAGGGAPTEHRACTYYQDSPYERSKCSQNLATMTNITGCRMPELMWGGQRRQLAWLQEIPQPRSLRIANFRFQRPADFVGL

SEQ ID NO: 106044 - protein, 127 aa, Setaria italica
  Transcript Sequence Number=SeqID_40070
  Subcellular localization annotation: CTP_CleavageSite=16; ConfidenceScore=5.47e-01
PAIDKVGPSASRHRASSSMARSTSRATSRGGRRSHGATLVIGSPQGAPELESADDSDDTTNSEDDDPTYGQEEVGPSQLQGASTPTQGSAPPKREAWGRDRTDVGSVNVLPTNPGRHHVTKKSYTPH

SEQ ID NO: 106045 - protein, 151 aa, Setaria italica
  misc_feature (106)..(106): Xaa can be any naturally occurring amino acid
  misc_feature (117)..(117): Xaa can be any naturally occurring amino acid
  Transcript Sequence Number=SeqID_40071
KKVNTKLKAATVKLKKTREERDQFDEASNQIVLHLKTKEEELARSIASCKVEASTVSAWISFLEDTWKLQSLFEELKEKQANEELDRCGDCFAKLIKHHVLHACSXEELSTSIDRIXKTFVDNLKIFSDRSVSAEDGANGSSKQSKPSQNT

SEQ ID NO: 106046 - protein, 155 aa, Setaria italica
  misc_feature (153)..(153): Xaa can be any naturally occurring amino acid
  Transcript Sequence Number=SeqID_40072
  Gene Ontology: Mol. function=metal ion binding
  Homolog annotation: Hit_ID=Q8H055; Match level="QueryCoverage=100%, HitCoverage=27%, E-value=4e-49, Identity=66%"; Hit description =Putative DHHC-type zinc finger protein
TTYDYIIALREQEDQQEVPGHQSPQMSIISSVTGFSTASSFGPLHRGSWCTPPRLFLEDQFDVVPPEIGMSQNSGSKKMKEEEVGRRKPGPVKISPWTLARLNAEEVSKAAAEARKKSKILKPIAKYDASDNGSKPDHKLSNKRRPDRRGFPXEL

SEQ ID NO: 106047 - protein, 312 aa, Setaria italica
  Transcript Sequence Number=SeqID_40073
  Gene Ontology: Mol. function=hydrogen-translocating pyrophosphatase activity; Cellular component=membrane; Biological process=proton transport
  Homolog annotation: Hit_ID=B6UEE8; Match level="QueryCoverage=98%, HitCoverage=40%, E-value=1e-127, Identity=77%"; Hit description =Pyrophosphate-energized vacuolar membrane proton pump
  Pfam annotation: Domain name=H_PPase; Domain location=1-312; Score =18.7; E_value=1.1e-24; Accession=PF03030.8; Description=Inorganic H+ pyrophosphatase
FRSGAAMGFLLASSALLVLYAAINLFGLYYGDDWGGLYESITGYGLGGSSVALFGRVGGGIYTKAADVGADLVGKVERNIPEDDPRNPAVIADNVGDNVGDIAGMGSDLFGSYAESSCAALFVASISSFGTEHNSTAMMYPLLVSAVGLLVCAVTTVVATDITKVRATDEVGPALKRQILISTVLMTGGIAAVTFLALPPSFTLFDFGNDKHVKNWHLFICVSAGLWAGLVIGYVTEYFTSNAYAPVQAVARSCRTGAATNVIFGLAVGYKSVIVPILAIAAAIYAGFRLAAMYGIALAALGMLSTIDERGL

SEQ ID NO: 106048 - protein, 80 aa, Setaria italica
  Transcript Sequence Number=SeqID_40074
  Gene Ontology: Mol. function=hydrolase activity, hydrolyzing O -glycosyl compounds; Biological process=carbohydrate metabolic process
  Homolog annotation: Hit_ID=B6ST35; Match level="QueryCoverage=96%, HitCoverage=13%, E-value=4e-29, Identity=77%"; Hit description=Endo -1,4-beta-xylanase
PTAKLVNADGMLTEAGSRFAGLRREWTSHAKGKVDANGNFKFRGFHGTYEVVLPTAAGEVKKQRFDVKKGDAPLVLDMNF

SEQ ID NO: 106049 - protein, 63 aa, Setaria italica
  Transcript Sequence Number=SeqID_40075
  Gene Ontology: Mol. function=DNA polymerase processivity factor activity; Cellular component=PCNA complex; Biological process =regulation of DNA replication
  Homolog annotation: Hit_ID=B4FGZ9; Match level="QueryCoverage=100%, HitCoverage=46%, E-value=4e-29, Identity=100%"; Hit description =Proliferating cell nuclear antigen
  Pfam annotation: Domain name=PCNA_N; Domain location=1-63; Score =72.9; E_value=1.1e-18; Accession=PF00705.10; Description =Proliferating cell nuclear antigen, N-termin
MLELRLVQGSLLKKVLEAIRELVTDANFDCSGTGFSLQAMDSSHVALVALLLRAEGFEHYRCD

SEQ ID NO: 106050 - protein, 114 aa, Setaria italica
  Transcript Sequence Number=SeqID_40076
  Gene Ontology: Mol. function=DNA polymerase processivity factor activity; Cellular component=PCNA complex; Biological process =regulation of DNA replication
  Homolog annotation: Hit_ID=B4FGB1; Match level="QueryCoverage=72%, HitCoverage=41%, E-value=1e-41, Identity=97%"; Hit description =Proliferating cell nuclear antigen
  Pfam annotation: Domain name=PCNA_C; Domain location=22-113; Score =88.8; E_value=2e-23; Accession=PF02747.7; Description=Proliferating cell nuclear antigen, C-terminal domain
RQRIKIADFEMKLMDIDSEHLGIPDSEYQAIVRMPSAEFMRICKDLSSIGDTVIISVTKEGVKFSTSGEIGSANIVCRQNQTVDKVPLASLTFNWNKSHPLHLSVFVGLQNSYG

SEQ ID NO: 106051 - protein, 170 aa, Setaria italica
  Transcript Sequence Number=SeqID_40077
  Gene Ontology: Cellular component=extracellular region
  Homolog annotation: Hit_ID=B6SSB7; Match level="QueryCoverage=77%, HitCoverage=49%, E-value=4e-49, Identity=76%"; Hit description =Protein kinase
  Pfam annotation: Domain name=DUF26; Domain location=74-126; Score =77.8; E_value=4e-20; Accession=PF01657.9; Description=Domain of unknown function DUF26
  Subcellular localization annotation: CTP_CleavageSite=56; ConfidenceScore=5.30e-01
MASSPVLVLLVLIAATAAAPQLSSAVDPVGTYCAKNFTGAQTQASISQVLAALVPRASAAYYATATAGSGSSAIWGLAQCRGDIPASDCALCISAAAKQAASSCRGQADVRLWYDYCFLRYTDADFLGLPDTGYTLILINTMNASDPAAFDRAERKLMARVAAEAGDAGR

SEQ ID NO: 106052 - protein, 263 aa, Setaria italica
  Transcript Sequence Number=SeqID_40078
  Gene Ontology: Mol. function=DNA polymerase processivity factor activity; Cellular component=PCNA complex; Biological process =regulation of DNA replication
  Homolog annotation: Hit_ID=P17070; Match level="QueryCoverage=99%, HitCoverage=99%, E-value=1e-146, Identity=95%"; Hit description =Proliferating cell nuclear antigen
  Pfam annotation: Domain name=PCNA_C; Domain location=127-254; Score =322.0; E_value=1.2e-93; Accession=PF02747.7; Description =Proliferating cell nuclear antigen, C-terminal domain
  Pfam annotation: Domain name=PCNA_N; Domain location=1-125; Score =320.3; E_value=4e-93; Accession=PF00705.10; Description =Proliferating cell nuclear antigen, N-termin
  Pfam annotation: Domain name=Rad9; Domain location=12-254; Score= -99.4; E_value=0.1; Accession=PF04139.5; Description=Rad9
  Pfam module annotation: Pfam domain module=PCNA_C::PCNA_N::Rad9; Domain location=127-254::1-125::12-254
MLELRLVQGSLLKKVLEAIRELVTDANFDCSGTGFSLQAMDSSHVALVALLLRAEGFEHYRCDRNLSMGMNLNNMAKMLRCAGNDDIITIKADDGSDTVTFMFESPKQDKIADFEMKLMDIDSEHLGIPDSEYQAIVRMPSAEFMRICKDLSSIGDTVIISVTKEGVKFSTSGEIGSANIVCRQNQTVDKPEEATVIEMQEPVSLTFALRYMNSFTKASSLSDQVTISLSSELPVVVEYKIAEMGYIRFYLAPKIEEDEEMKP

SEQ ID NO: 106053 - protein, 508 aa, Setaria italica
  misc_feature (481)..(481): Xaa can be any naturally occurring amino acid
  Transcript Sequence Number=SeqID_40079
  Gene Ontology: Mol. function=protein serine/threonine kinase activity; Cellular component=peroxisome; Biological process=protein amino acid phosphorylation
  Homolog annotation: Hit_ID=Q2QWW5; Match level="QueryCoverage=97%, HitCoverage=67%, E-value=1e-135, Identity=51%"; Hit description =Protein kinase domain containing protein
  Pfam annotation: Domain name=Pkinase; Domain location=154-426; Score =147.7; E_value=3.6e-41; Accession=PF00069.17; Description=Protein kinase domain
  Pfam annotation: Domain name=Pkinase_Tyr; Domain location=154-426; Score=57.1; E_value=1.6e-17; Accession=PF07714.9; Description =Protein tyrosine kinase
  Pfam module annotation: Pfam domain module=Pkinase::Pkinase_Tyr; Domain location=154-426::154-426
MRSPASSIPMRSPARSKEVSLALVPVKACRRESPEVATGWPLLRKKFLPDRKASLPDKSKMSVVQWAMRLPSRYSGVSPVHSEYRTTRPDSMSTSHILRDRLVIPLRSNSGKSSVVIQELDKETPEELTLLKEKFSSVYSSFSYSELAKITSDFSPECVVGQGGTSQVYRGCLANGRELAVKILKYSDEVLKEFVSEIEIVSSLSHKNVISLIGFCFKNDDLLLVYEYLQRGSLEEILHGEKECKNIFGWTERFSVAVGVAHALDYLHGNDNSRPVIHRDVKSSNILISECFEPKLSDFGLAVWAADVTSQMTCNDVAGTFGYLAPEYFMHGKVNSKIDVYAFGVVLLELISGRKPLCNGCPKGQESLVMWANSIIQGGKLTQLVDPNLPTEGHTNEVERMTLAASLCIRQAPQNRPQIDAVLKLLEGDNDILKWARSQVGLAYEVDGDECVMTPPAPGSNANIQSYINLAFDVDDDSASXSSTDFIAANTSLEEYLKGRWSRSSSFD

SEQ ID NO: 106054 - protein, 137 aa, Setaria italica
  Transcript Sequence Number=SeqID_40080
QSLGVALTPLLRSELGNALILPNKHILGPASLAGRLRWPPRLPAARLTSPVSCLRRRWSHEPEARSRRTAAELARSPLHLSLLTLDLPAIAPLSLSPPGRLPPRSPGRAGLPSATARGGCGWGPSAVCYARWPAPLL

SEQ ID NO: 106055 - protein, 47 aa, Setaria italica
  Transcript Sequence Number=SeqID_40081
VVHLSISQACLFNLPNIQTLISDKITDQGVLKKIKHDNVILNLAAYN

SEQ ID NO: 106056 - protein, 87 aa, Setaria italica
  Transcript Sequence Number=SeqID_40082
LQIGKSMFERPYHPNLYKKSDQQDDFEVLRYYTMEIVHSLHTKMGCRLIHPLFRPMHVKLESKIMISYKPNNPANLHTPYQRLYLKC

SEQ ID NO: 106057 - protein, 571 aa, Setaria italica
  Transcript Sequence Number=SeqID_40083
  Gene Ontology: Mol. function=nucleic acid binding
  Homolog annotation: Hit_ID=Q2QYQ5; Match level="QueryCoverage=71%, HitCoverage=27%, E-value=8e-71, Identity=38%"; Hit description =Retrotransposon protein, putative, unclassified, expressed
  Pfam annotation: Domain name=PLAC8; Domain location=326-458; Score =118.7; E_value=1.9e-32; Accession=PF04749.9; Description=PLAC8 family
  Subcellular localization annotation: CTP_CleavageSite=56; ConfidenceScore=5.34e-01
MAPNGNGILKADTQRVESTASDNPGTTGVATQGVSQQGKRWSGFRNFLNRLSSGPRLKKLGPSPSFKFQQLALQRDEFSRSIHSDNHGSHDHFQFIRKINWGHLWMMAKDWIKEPMNMALFVWIAIVAVSGAILFLVMTGMLNRALPSKSQRDTWFEVNNQILNALFTLMCLYQHPQRIYNFVLLCRWEQKDILRLRKTYCKNGTYKPNEWMHMMVVVILLNLNCFAQYALCGLNLGYRRSERPPIGVGLTISVAIGAAAFAGLYNIISPLGKDYDTEQADIDQEAQIEVASTESGRAASRFKSFERRYSFIQSDERRFVESRPEWVGGLLDFWDQISLAYLSIFCSCCVFGWNMQRLGFGNMYVHIATFLLFCIAPFFIFNLAAVNINNESLREALGLTGLFLCFFGLLYGGFWRIQMRKRFNLPGNTTCCRNPDVTDCFQWLFCCSCSLAQEVRTADYYDITEDRSHRGQVTEDSQRIMSMSPLRREDGLPLFKSNPSSPYRSGNASPSIFILESPSAPRRSSGSTPQGGSPTMGDRAMKAPIPSVLHRGGGPDHDTGTSNEAATSPMR

SEQ ID NO: 106058 - protein, 91 aa, Setaria italica
  Transcript Sequence Number=SeqID_40084
  Gene Ontology: Mol. function=ubiquitin thiolesterase activity; Cellular component=intracellular; Biological process=ubiquitin -dependent protein catabolic process
  Homolog annotation: Hit_ID=Q10RB2; Match level="QueryCoverage=97%, HitCoverage=5%, E-value=3e-22, Identity=54%"; Hit description =Ubiquitin carboxyl-terminal hydrolase family protein, expressed
DARGYEEVVSECERGLSIEAPSDPAPHSLRLPGPDVDQVQSELRNLIQKANLASISTWVKTLGGAGDDKLRLIPVRRLAEEPMEGRLVPTF

SEQ ID NO: 106059 - protein, 533 aa, Setaria italica
  Transcript Sequence Number=SeqID_40085
  Gene Ontology: Mol. function=ubiquitin thiolesterase activity; Cellular component=intracellular; Biological process=ubiquitin -dependent protein catabolic process
  Homolog annotation: Hit_ID=Q10RB2; Match level="QueryCoverage=99%, HitCoverage=34%, E-value=1e-161, Identity=56%"; Hit description =Ubiquitin carboxyl-terminal hydrolase family protein, expressed
  Pfam annotation: Domain name=UCH; Domain location=323-532; Score= -81.5; E_value=0.054; Accession=PF00443.21; Description=Ubiquitin carboxyl-terminal hydrolase
RSSSWSDQYLVCQDSADEETREKFQLVADCDDLDCKLSTSDDYFNEQEEELRHRVQLEAEERKLEETLEYQRRIEEETKQKHLAEQFRSTYASSVVGTAGLSSTGKGNLEGIKFGDFRYSDVPLQEHSSYTENSFRGEHNGWDSPGEQALTSSDMRVSRLTLKMNGIWTNAQHIKPQGNPSIQKPKKSTSEGQKKYVQGVPGAVYDDDRACGPQFGTAAPRWSSRSKIAPYANHNYHDGKQNQLHVLPSDDRLFVNKGHAAGTEKSNFEKVGSDGIPSEDVCIEDDFDKRFQEDLNEAVRQSLGYDTCPAGTISASNGAEVCGAGLKNAAGEYNCFLNVIIQSLWHIRRFRYEFVKTSLLHKHVEDPCAVCALYDIFSDLSKASKGQGEAVAPTSLRIALSKSYPNSKFFQEGQMNDASEVLGVIFECLHKSYTSRTVSHGKSHEKNCVGSWDCANISCIAHNLFGMDIYERMNCHNCKFESRRLKYTSFFHNINASSLRTAKMMCPDYSFDELLKIVEMNDQLACDQDVGGC

SEQ ID NO: 106060 - protein, 1100 aa, Setaria italica
  misc_feature (30)..(30): Xaa can be any naturally occurring amino acid
  misc_feature (854)..(854): Xaa can be any naturally occurring amino acid
  Transcript Sequence Number=SeqID_40086
  Gene Ontology: Mol. function=ubiquitin thiolesterase activity; Cellular component=intracellular; Biological process=ubiquitin -dependent protein catabolic process
  Homolog annotation: Hit_ID=Q10RB2; Match level="QueryCoverage=99%, HitCoverage=88%, E-value=0.0, Identity=55%"; Hit description =Ubiquitin carboxyl-terminal hydrolase family protein, expressed
  Pfam annotation: Domain name=DUF629; Domain location=149-641; Score =203.8; E_value=4.7e-58; Accession=PF04780.4; Description=Protein of unknown function (DUF629)
  Pfam annotation: Domain name=UCH; Domain location=798-1096; Score= -23.1; E_value=9e-06; Accession=PF00443.21; Description=Ubiquitin carboxyl-terminal hydrolase
  Pfam module annotation: Pfam domain module=DUF629::UCH; Domain location=149-641::798-1096
GFLKFRSLRNLIQKANLASISTWVKNPGRXAGDDKLRLIPVRRLAEEPMEGRLVPTLPSPRRPNEIKKATKTPEERRQEIEVRLAAMRLLQQQKEQSNGAVAATPTSSQSQGDDAPSSSSQSSVGGHRADRRRGGSRKVTVSSTSDRMDQVRAYWAAIPVEQRLAFLNTSISELKSYYAAMMHKEKDAASVASDVLNEVLGFAAKSGKWEFWVCGRCREQFADAESHRLHVLREHVGILSPELQDMVPHEIDAGWARMLIGWNWRPLDATAALKLFEEEQADNLGLDRDKDSMSSDSWSNKDKSDTSESSVSPHNEESDGFAVVMREGYRKWPLSDDVERANILERIHSLFQILVKNKNLSVSNLNKVIQFAMEELRGMLSESLLLNHSLDESPHCICFLEASSLRKVVKFLQDLMQSSGLNRHLEKDEGLGDGDTFPKNHDGLEKVTLNSDSSELIIDGESFGRKFVSENVDTDALLSWLYAGSSIGEQLLGWNRMLEERSNQGVDLLRALEREFNSLQNLCERKLEQLRNEEALISVESIFAQEQADRDEMGHYQGYEELLRKRQEELLDFNAEVMTNRSRSELDVVSSILKEVHTSHFGYDEAFSSMAPRLCDYDGTEEEGWRLPDLQSNDSVVHVVVSKMKEQITMELSKIDAKIMRNVAVMHQLEHKLGPASSLDYRTVLIPLMKSFLQTHLEELVDKDARERSDAAREAFLAELALDAKKNASNHEKSKEKKKLKDSRRSKDPKDSSWSDQYLVCQDSADEETREKFQLVADCDDLDCKLSTSDDYFNEQEEELRHRVQLEAEERKLEETLEYQRRIEEETKQKHLAEQFRSTYASLDRSFKNPNPNXSKFFQEGQMNDASEVLGVIFECLHKSYTSRTVSHGKSHEKNCVGSWDCANISCIAHNLFGMDIYERMNCHNCKFESRRLKYTSFFHNINASSLRTAKMMCPDYSFDELLKIVEMNDQLACDQDVGGCGKLNHKHHILSSRPHVFTVVLGWQNNKESVDDISATLAGISTEIDISIFFHGIDQGSKHTLVSVVCYYGQHYHCFAFKDGRWVMYDDQTVKVIGSWGDVLVMCEKGHLQPQVLFFEAAS

SEQ ID NO: 106061 - protein, 272 aa, Setaria italica
  Transcript Sequence Number=SeqID_40087
  Homolog annotation: Hit_ID=Q69S58; Match level="QueryCoverage=41%, HitCoverage=18%, E-value=5e-33, Identity=69%"; Hit description =Putative hydroxyproline-rich glycoprotein DZ-HRGP
  Subcellular localization annotation: CTP_CleavageSite=45; ConfidenceScore=5.28e-01
LPPPPPPPQRPSGANLSITDSAQPSVVLPPPPPPPGLPPKSNDMEAAGPSKDTPGFIQDTAARVLPPPPPPQSSNLPPLPPRPPLQPDMLTPGVMRFPPPPPPPDSRPQYMAPGVARPPPPPPGLPPAQMPMPPYGVLPGPPQMPRPPFLPGPPMHPDEFAAFGPRPQLPQQPSYVKSAAPTVVKRPLAQHTPELTAMVPASVRVKRESALPKPKPKVVQQQQSSTPSISKPSVTLIRSDVQPSSSAPKPPSIDDSYMAFLEDMKELGALDG

SEQ ID NO: 106062 - protein, 89 aa, Setaria italica
  Transcript Sequence Number=SeqID_40088
NSLSLYSIFIGLDGMQFHNQSTERTFNCEQMIPSSIVHREEKIEIYMYIAPQESTCCMSLKHTKLSVGGRFSQLDYELQNACACMHEPP

SEQ ID NO: 106063 - protein, 229 aa, Setaria italica
  misc_feature (96)..(96): Xaa can be any naturally occurring amino acid
  Transcript Sequence Number=SeqID_40089
  Homolog annotation: Hit_ID=Q9FI89; Match level="QueryCoverage=62%, HitCoverage=18%, E-value=4e-26, Identity=49%"; Hit description =Similarity to regulatory protein Nedd1
  Subcellular localization annotation: CTP_CleavageSite=80; ConfidenceScore=5.38e-01
FLTFYLKGFFLTKLTILMNLQNKGILSNANSSLDASSPNLQSSLPSSYVSKAVSSLNPDQPGAAQSTSMWRPTTYTDRMSSSSVFSDGLASAFGSXKSKKTGAETKDELLSSLLSRQEAAIASSSASPLASNGVVPPQSANTGSSTDQQGASSFSLQYVQRMLEESLGSVQKSIHEDVRNLHIELLRQFHMQEMEMSGVLNLVLEKVEGLTKEVQQLRRENQQLRQQLL

SEQ ID NO: 106064 - protein, 348 aa, Setaria italica
  misc_feature (16)..(16): Xaa can be any naturally occurring amino acid
  Transcript Sequence Number=SeqID_40090
  Homolog annotation: Hit_ID=Q9FI89; Match level="QueryCoverage=41%, HitCoverage=18%, E-value=9e-25, Identity=48%"; Hit description =Similarity to regulatory protein Nedd1
TPSSGNWWDEHGSDDXKKDDKTGEKKLSTTRKFPYMEGNDEPHPISDWRSTANSRQDSISSVTTTSMPSWKSELSISSPETATGNALPDRLAQRQQISRFGASAFSTGGLAFTALQDSSSAASHSLKGSLTSNILMNLQNKGILSNANSSLDASSPNLQSSLPSSYVSKAVSSLNPDQPGAAQSTSMWRPTTYTDRMSSSSVFSDGLASAFGSTKSKKTGAETKDELLSSLLSRQEAAIASSSASPLASNGVVPPQSANTGSSTDQQGASSFSLQYVQRMLEESLGSVQKSIHEDVRNLHIELLRQFHMQESMEMSGVLNLVLEKVEGLTKEVQQLRRENQQLRQQLL

SEQ ID NO: 106065 - protein, 182 aa, Setaria italica
  Transcript Sequence Number=SeqID_40091
  Homolog annotation: Hit_ID=B9RN68; Match level="QueryCoverage=87%, HitCoverage=14%, E-value=3e-31, Identity=40%"; Hit description =Nucleotide binding protein, putative
  Pfam annotation: Domain name=WD40; Domain location=106-159; Score =6.2; E_value=7.4; Accession=PF00400.24; Description=WD domain, G -beta repeat
  Pfam annotation: Domain name=WD40; Domain location=54-96; Score=15.1; E_value=0.3; Accession=PF00400.24; Description=WD domain, G-beta repeat
  Pfam module annotation: Pfam domain module=WD40::WD40; Domain location=106-159::54-96
  Subcellular localization annotation: CTP_CleavageSite=38; ConfidenceScore=5.12e-01
ITPDGSNPSTPYATENSSVGSRKNNSHNTVHEGSDGSNSEMPSSTQSCDVPELMPILLLSGVHQSGVNCLHISYSATDKSYCIISGGDDQAVQCFSFTVGSLEDSSTTTARLNLHDNGTLKILFQHKVPSAHSAAVKGIWTDGTWAFSTGLDQRVRCWKMESSAKFTEYSHAIISVPEPETL

SEQ ID NO: 106066 - protein, 167 aa, Setaria italica
  misc_feature (7)..(7): Xaa can be any naturally occurring amino acid
  misc_feature (26)..(26): Xaa can be any naturally occurring amino acid
  Transcript Sequence Number=SeqID_40092
  Gene Ontology: Mol. function=protein serine/threonine kinase activity; Biological process=protein amino acid phosphorylation
  Homolog annotation: Hit_ID=B3VCC3; Match level="QueryCoverage=99%, HitCoverage=23%, E-value=3e-56, Identity=62%"; Hit description =Calcium-dependent protein kinase
  Pfam annotation: Domain name=Pkinase_Tyr; Domain location=68-165; Score=-139.0; E_value=0.00017; Accession=PF07714.9; Description =Protein tyrosine kinase
KAKCRAXLEAAEAAQKIAELEAQKRXRAEWKAKREAEDRKKATDALNRNDLRYRRYSIDDIEAATHKFDKALKIGEGGYGPVYKAVLDHTNVAIKILRPDASQGRKQFQQEIEVLSCMRHPNMVLLLGACPEYGCLVYEYMDYGSLEDRLCRRGKTLPIPWSIRFRY

SEQ ID NO: 106067 - protein, 161 aa, Setaria italica
  misc_feature (6)..(6): Xaa can be any naturally occurring amino acid
  misc_feature (51)..(51): Xaa can be any naturally occurring amino acid
  Transcript Sequence Number=SeqID_40093
  Gene Ontology: Mol. function=protein serine/threonine kinase activity; Biological process=protein amino acid phosphorylation
  Homolog annotation: Hit_ID=Q7XQU0; Match level="QueryCoverage=100%, HitCoverage=19%, E-value=1e-70, Identity=81%"; Hit description =OSJNBa0043L09.7 protein
  Pfam annotation: Domain name=Pkinase; Domain location=1-161; Score= -33.7; E_value=1.7e-06; Accession=PF00069.17; Description=Protein kinase domain
  Pfam annotation: Domain name=Pkinase_Tyr; Domain location=1-159; Score=-94.7; E_value=2e-07; Accession=PF07714.9; Description=Protein tyrosine kinase
  Pfam module annotation: Pfam domain module=Pkinase::Pkinase_Tyr; Domain location=1-161::1-159
QHKNLXVRLLGCCIHEDEKLLIYEYLPNKSLDKSFFDPAMKSMLDWSKRLXIIKGVARGILYLHQDSRMMIIHRDLKASNILLDAEMNPKISDFGIARIFGSNQQQASTRRVVGTYGYMSPEYAMEGIFSVKSDTYSFGILLLEIVSGLKISSPCRPILSY

SEQ ID NO: 106068 - protein, 125 aa, Setaria italica
  Transcript Sequence Number=SeqID_40094
  Gene Ontology: Mol. function=protein serine/threonine kinase activity; Biological process=protein amino acid phosphorylation
  Homolog annotation: Hit_ID=Q7XQU0; Match level="QueryCoverage=96%, HitCoverage=14%, E-value=5e-51, Identity=78%"; Hit description =OSJNBa0043L09.7 protein
IDSNSGYMSPEYAMEGIFSVKSDTYSFGILLLEIVSGLKISSPRHLLMDYPSLTAYAWNLWKDGTARDFVDTWVLESCSLDEALQCIHIGLLCVQDSPTDRPLMSSVVSMLNNVAMPRPVPRQPL

SEQ ID NO: 106069 - protein, 51 aa, Setaria italica
  Transcript Sequence Number=SeqID_40095
SLDLYDFCRHRHPTMLCCSILQVVQFRHSRTQQQHHHQNTTEVMKSSYQLV

SEQ ID NO: 106070 - protein, 62 aa, Setaria italica
  Transcript Sequence Number=SeqID_40096
DYRFSFFFVSLQGSVCSCTCCCPELLALTGIPRPQPNPNHQHLPPPPNWRCDSAKLLLHELW

SEQ ID NO: 106071 - protein, 132 aa, Setaria italica
  Transcript Sequence Number=SeqID_40097
  Subcellular localization annotation: CTP_CleavageSite=52; ConfidenceScore=5.37e-01
RVDLAGAEAVVTPATAVTRSLVVTAAVVVGPRLSRACHRRSPFVPSGEASRMAAAAGALTARRCFQFLLLHRALGAPPTSASPHAAAVLQAAASPRRSDGPRGAHQAPTPTPLGAPVASLPGAPPLGAWRKR

SEQ ID NO: 106072 - protein, 90 aa, Setaria italica
  misc_feature (74)..(74): Xaa can be any naturally occurring amino acid
  misc_feature (78)..(78): Xaa can be any naturally occurring amino acid
  Transcript Sequence Number=SeqID_40098
  Gene Ontology: Mol. function=unfolded protein binding; Cellular component=chaperonin-containing T-complex; Biological process =cellular protein metabolic process
  Homolog annotation: Hit_ID=Q306F7; Match level="QueryCoverage=54%, HitCoverage=21%, E-value=3e-12, Identity=77%"; Hit description=Down syndrome encephalopathy related protein 1
IVLSCISFFLSFFFLRQIFTLLTRLECSGTISAHCNLCLPGSSDSCASASRVARIRGTCHHVWLNFFVFFSRDXGIDXCWPSWSRTPDLK

SEQ ID NO: 106073 - protein, 95 aa, Setaria italica
  Transcript Sequence Number=SeqID_40099
GVRLFGEDSFKDWWERGVSGVGEQLQKGLNSLIIVGAWNRRALNGVSPSLARALLLASEEMQFWGLARARCISSLATCTRVGWCWSWWCISSLAT

SEQ ID NO: 106074 - protein, 247 aa, Setaria italica
  misc_feature (35)..(35): Xaa can be any naturally occurring amino acid
  misc_feature (142)..(142): Xaa can be any naturally occurring amino acid
  misc_feature (169)..(169): Xaa can be any naturally occurring amino acid
  Transcript Sequence Number=SeqID_40100
  Homolog annotation: Hit_ID=Q67UH7; Match level="QueryCoverage=88%, HitCoverage=56%, E-value=2e-35, Identity=37%"; Hit description =Mitochondrial transcription termination factor-like
SLSILPFLRLPFDNFLRALKRSSYLLTADLERVIXPNVLYLRECTLRAHEISMTSINQPRLLYSKQEHVRAMLAHAVDIGIPCGTPMFWHALQFVANRNKETIAAKMELLKKTFRWSDAEVASVVSRCPSLLTISEDRAQRXQFLFAEVGLHPEYIAPRPALITFSLEXRLMPCHYVVKFLKANGLLGHDWSYFTTVMLTEKVFVHKFIHPYKETAPQLAEDYADACRGKCRLDLDCRSRVLHWQVC

SEQ ID NO: 106075 - protein, 130 aa, Setaria italica
  misc_feature (101)..(101): Xaa can be any naturally occurring amino acid
  Transcript Sequence Number=SeqID_40101
  Gene Ontology: Mol. function=enzyme inhibitor activity
  Pfam annotation: Domain name=PMEI; Domain location=1-123; Score=21.0; E_value=0.00031; Accession=PF04043.7; Description=Plant invertasepectin methylesterase inhibitor
QKHARKYDTVDPLTVLEMQVDAFKKRVRAASRRAKREARTAATPEQRRALNLCKSFYLDAGDNLGACKRAIRFRDGVTIRATMSMAAQDMQNCDEEFRKAXAKNPVCDLNRSLVDMSENCRALSNMIPAS

SEQ ID NO: 106076 - protein, 102 aa, Setaria italica
  Transcript Sequence Number=SeqID_40102
  Homolog annotation: Hit_ID=B9T2B9; Match level="QueryCoverage=84%, HitCoverage=12%, E-value=4e-15, Identity=51%"; Hit description =Pentatricopeptide repeat-containing protein, putative
  Pfam annotation: Domain name=PPR; Domain location=42-76; Score=14.4; E_value=0.18; Accession=PF01535.12; Description=PPR repeat
  Pfam annotation: Domain name=PPR; Domain location=7-41; Score=17.0; E_ value=0.081; Accession=PF01535.12; Description=PPR repeat
  Pfam module annotation: Pfam domain module=PPR::PPR; Domain location =42-76::7-41
GFQPHLESYQYLITGICDEGDYDKAKSLFCDLLGMDYNHNEVVWKILNDGLLKAGHVDVCSQLLSAMENRHCHINSQTYAMVTNSLHEASGSVVNELRGEAA

SEQ ID NO: 106077 - protein, 49 aa, Setaria italica
  Transcript Sequence Number=SeqID_40103
ELGWSLISIIPTQHMLVRVFCQIRTNERHLIVSVCTHEFLKCFAMHLVI

SEQ ID NO: 106078 - protein, 98 aa, Setaria italica
  misc_feature (84)..(84): Xaa can be any naturally occurring amino acid
  Transcript Sequence Number=SeqID_40104
MYSFQMASEDSKDMLKNVDWKTVGGAVTTESSQPVIKKRLPKKIRQVPECYFLPRRSLPSALAIYGAVCAAGVGAGMLLEVWIXKIKEDGGIIWEMDK

SEQ ID NO: 106079 - protein, 153 aa, Setaria italica
  Transcript Sequence Number=SeqID_40105
  Homolog annotation: Hit_ID=Q67UH6; Match level="QueryCoverage=81%, HitCoverage=26%, E-value=8e-13, Identity=31%"; Hit description =Mitochondrial transcription termination factor-like
  Subcellular localization annotation: CTP_CleavageSite=68; ConfidenceScore=5.14e-01
TDQRAFVVAYSIGRQNATAKMELLRSLGWSSSQVAVAVAKMPSILASSEDRLRRAVDFLTKEAGMEVEAVARGPSLLKFSIERRLVPRLKVLKLFKEKGLPLGGRSFYGVACMSRENFFNTFVLPHAKILPRGLIGAFATARAGKAAAGPARL

SEQ ID NO: 106080 - protein, 55 aa, Setaria italica
  Transcript Sequence Number=SeqID_40106
TESNMMIGGHQISLATSRTGILIMLTPAPKSPASSATLYYLNSWVAVQLFRSLRR

SEQ ID NO: 106081 - protein, 222 aa, Setaria italica
  misc_feature (217)..(217): Xaa can be any naturally occurring amino acid
  Transcript Sequence Number=SeqID_40107
  Subcellular localization annotation: CTP_CleavageSite=58; ConfidenceScore=5.30e-01
FFFFFLIAIFPDLYFFWIKARAPTHAFRSSERRPNNNKVPGAEAVPTKAPTTADSTPTAGARGSTRAWSQVEEPREAKVDEEGDLNSDGPKVKLQPAAEQGAHPSIPEGRAARTATRRRSTTTRSREPQCRSTLSCNSVSGGDGSDGDGGVEVPAEASDGEVGRTRTGRREGELRFIRAHRTTASTADEDGNDGDNCNGEGRRRSSKGHPALIRANXENHIK

SEQ ID NO: 106082 - protein, 208 aa, Setaria italica
  misc_feature (96)..(96): Xaa can be any naturally occurring amino acid
  misc_feature (133)..(133): Xaa can be any naturally occurring amino acid
  Transcript Sequence Number=SeqID_40108
MFLTDAIDSYGCLQQQFEDEEFDQDDDDDLGDFIVYSDEEDAEMSKHKHQRQAELEDDIEEEVEEEVEQVEEIEEEEEEAPVGQQEILSLREQLKXGIRRKNAAMAAGTSKASCSSSVNQMIMPPAKDGYGTXFGPSKPVLARRVIEEGCSSIMKERQNVPSRKGGQLVSKVQPGTVENLQKPKFVSEVKGNQSKIDYSAYCTDICID

SEQ ID NO: 106083 - protein, 105 aa, Setaria italica
  misc_feature (14)..(14): Xaa can be any naturally occurring amino acid
  Transcript Sequence Number=SeqID_40109
  Homolog annotation: Hit_ID=Q9LQV3; Match level="QueryCoverage=99%, HitCoverage=16%, E-value=3e-14, Identity=44%"; Hit description =F10B6.18
DQEHLDRLGDQLSXTCTLPPSNRKSRDHKFKVPEAFNVFDAQVTRQRLEGMIAPVSCKEVLTVIHSKRGGNAAASDHSEWLLTVMAMPEAINFKLVPITSLLKGV

SEQ ID NO: 106084 - protein, 77 aa, Setaria italica
  Transcript Sequence Number=SeqID_40110
QDVVYVKQDNSSPLSPSEIKEHLDRLGDQLFTGTCTLPPSNRKSRDHKFKVNKSCSLMSNSKLNYGLNVHQKIRKMN

SEQ ID NO: 106085 - protein, 51 aa, Setaria italica
  Transcript Sequence Number=SeqID_40111
HQSMPMAPKASFSLFPRATCLTLDHTVSYCPLLATDTVTLLMMIHCHPPND

SEQ ID NO: 106086 - protein, 78 aa, Setaria italica
  Transcript Sequence Number=SeqID_40112
KTTSILHEIAFTVLLWNLDALAASSSTRSQQKSREHGGAPLLQERSPGLLPRSRRHGGLRRAAPAGCSVPVRPRPAGG

SEQ ID NO: 106087 - protein, 111 aa, Setaria italica
  misc_feature (35)..(35): Xaa can be any naturally occurring amino acid
  Transcript Sequence Number=SeqID_40113
  Gene Ontology: Mol. function=nucleic acid binding; Cellular component= intracellular
  Homolog annotation: Hit_ID=B9RAP0; Match level="QueryCoverage=52%, HitCoverage=3%, E-value=3e-18, Identity=72%"; Hit description =Nucleic acid binding protein, putative
  Subcellular localization annotation: CTP_CleavageSite=39; ConfidenceScore=5.13e-01
KQLPYNRVIYKAFGCSSPNNSPAKLKTYARRQGRXKKIVLAGRWCGKVWMSNQVHPFLAHRIESHEPEEIDEIWSCYEKSNADHVEHSSREATSPRKSSSRAIEEKTSNRE

SEQ ID NO: 106088 - protein, 206 aa, Setaria italica
  Transcript Sequence Number=SeqID_40114
YPCLLQPELISVDDDDDDEDDEISALLRSFQSPNEPASLCLEPTSTADMLQLGGGGGSSSGPSALGAVEGSGQSWKAMVTPYDNVTTSASIPWNCSDGSISMSQQQISQQGDVFSTGFSDTAMHCQPSGNNILSGFGQQLQPNLQMPMMLSATDLLQLISRPGPSIWSTADSSGQDAPGMPAASASMFDQMSIGGGTMHIGQGWPE

SEQ ID NO: 106089 - protein, 67 aa, Setaria italica
  Transcript Sequence Number=SeqID_40115
KGPKLVQNLLHPPLRGLPQLLGHPESSVNRSPHWILPIHRDRTGGRQNSPTSQESLEVIIEIQPQRH

SEQ ID NO: 106090 - protein, 72 aa, Setaria italica
  Transcript Sequence Number=SeqID_40116
  Gene Ontology: Mol. function=asparagine-tRNA ligase activity; Cellular component=cytoplasm; Biological process=tRNA aminoacylation for protein translation
  Homolog annotation: Hit_ID=Q8GTK9; Match level="QueryCoverage=90%, HitCoverage=11%, E-value=7e-32, Identity=90%"; Hit description =Putative asparaginyl-tRNA synthetase, chloroplast/mitochondrial
MLVCRRNPELAFADLNDDMACATAYLQYVVKYILENCKEDMDFFNTWVEKGIIERLNDVVEKNFVHLSYTDA

SEQ ID NO: 106091 - protein, 165 aa, Setaria italica
  Transcript Sequence Number=SeqID_40117
  Gene Ontology: Mol. function=asparagine-tRNA ligase activity; Cellular component=cytoplasm; Biological process=tRNA aminoacylation for protein translation
  Homolog annotation: Hit_ID=Q8GTK9; Match level="QueryCoverage=99%, HitCoverage=33%, E-value=2e-80, Identity=78%"; Hit description =Putative asparaginyl-tRNA synthetase, chloroplast/mitochondrial
  Pfam annotation: Domain name=tRNA_anti; Domain location=2-66; Score =27.5; E_value=5.5e-05; Accession=PF01336.17; Description=OB-fold nucleic acid binding domain
STILFVEVNDGSCLSNMQCVLTPDTEGYDQIDSVTTGASVLVEGVVAISQGGKQKVELKVSKITVIGKSDPTSFPIQKKRASREFLRTVAHLRPRTNTFGAVARVRNALAYATHKFFQDNGFVWVSSPIITASDCEGAGEQFYVTTLLSNTAEGGSLLKDIPATK

SEQ ID NO: 106092 - protein, 279 aa, Setaria italica
  Transcript Sequence Number=SeqID_40118
  Gene Ontology: Mol. function=asparagine-tRNA ligase activity; Cellular component=cytoplasm; Biological process=tRNA aminoacylation for protein translation
  Homolog annotation: Hit_ID=Q8GTK9; Match level="QueryCoverage=94%, HitCoverage=45%, E-value=1e-150, Identity=93%"; Hit description =Putative asparaginyl-tRNA synthetase, chloroplast/mitochondrial
  Pfam annotation: Domain name=tRNA-synt_2; Domain location=5-279; Score=-6.7; E_value=1.9e-11; Accession=PF00152.12; Description=tRNA synthetases class II (D, K and N)
LLQVSPVDCLLYLPGAVARVRNALAYATHKFFQDNGFVWVSSPIITASDCEGAGEQFYVTTLLSNSAEGGSLLKDIPATKDGRVDWSQDFFCKPAFLTVSGQLNGETYASALSDIYTFGPTFRAENSNTARHLAEFWMIEPELAFADLNDDMACATAYLQYVVKYILENCKEDMDFFNTWVEKGIIERLNDVVEKNFVHLSYTDAVELLLGSKKKFEFPVKWGLDLQSEHERYITEVAFSGRPVIIRDYPKEIKAFYMRQNDDGKTVAAMDLLVPRVGE

SEQ ID NO: 106093 - protein, 185 aa, Setaria italica
  Transcript Sequence Number=SeqID_40119
  Gene Ontology: Mol. function=asparagine-tRNA ligase activity; Cellular component=cytoplasm; Biological process=tRNA aminoacylation for protein translation
  Homolog annotation: Hit_ID=Q8GTK9; Match level="QueryCoverage=80%, HitCoverage=30%, E-value=3e-66, Identity=74%"; Hit description =Putative asparaginyl-tRNA synthetase, chloroplast/mitochondrial
  Pfam annotation: Domain name=tRNA_anti; Domain location=40-118; Score= 69.5; E_value=1.3e-17; Accession=PF01336.17; Description=OB-fold nucleic acid binding domain
AAAAATGPAGEAVGEFRKRLRVADVKGGEDEGAALVGKELAVRGWVRTCRAQRTVTFVEVNDGSCLSNMQCVLTPDTEGYDQIDSVTTGASVLVEGVVASSQGGKQKVELKVSKITVIGKSDPTSFPIQKKRASREFLRTVAHLRPRTNTFGAVCFTHCCLLFLPFSGILDFKSHQFDILFSFFQ

SEQ ID NO: 106094 - protein, 160 aa, Setaria italica
  Transcript Sequence Number=SeqID_40120
  Gene Ontology: Mol. function=asparagine-tRNA ligase activity; Cellular component=cytoplasm; Biological process=tRNA aminoacylation for protein translation
  Homolog annotation: Hit_ID=Q8GTK9; Match level="QueryCoverage=100%, HitCoverage=27%, E-value=2e-85, Identity=93%"; Hit description =Putative asparaginyl-tRNA synthetase, chloroplast/mitochondrial
  Pfam annotation: Domain name=tRNA-synt_2; Domain location=1-156; Score=-44.2; E_value=1.5e-09; Accession=PF00152.12; Description=tRNA synthetases class II (D, K and N)
LVHLSYTDAVELLLGSKKKFEFPVKWGLDLQSEHERYITEVAFSGRPVIIRDYPKEIKAFYMRQNDDGKTVAAMDLLVPRVGELIGGSQREERLDHLEARLDEQNLNKESYWWYLDLRRYGSVPHAGFGLGFERLVQFATGIDNIRDAIPFPRVPGSAEF

SEQ ID NO: 106095 - protein, 110 aa, Setaria italica
  Transcript Sequence Number=SeqID_40121
KNKEDQNIGLARFLVPLVYYSTWFRLQIQTMLHSMPSMLRNAPIKRSLLAVVGAGLQLRKAPITPRCGIERRRRRRGPRGRPRGWRWRAASRPPPPSPTASRRRPPAATR

SEQ ID NO: 106096 - protein, 55 aa, Setaria italica
  Transcript Sequence Number=SeqID_40122
DKILPLRYKQLCMSSLEGARLAPDLLHRLCQLCSYMFPQTIAGIHTTTRYEEAAE

SEQ ID NO: 106097 - protein, 150 aa, Setaria italica
  misc_feature (90)..(90): Xaa can be any naturally occurring amino acid
  Transcript Sequence Number=SeqID_40123
  Gene Ontology: Mol. function=ATPase activity, coupled to transmembrane movement of substances; Cellular component=integral to membrane; Biological process=transport
  Homolog annotation: Hit_ID=Q9LGX1; Match level="QueryCoverage=76%, HitCoverage=59%, E-value=1e-57, Identity=77%"; Hit description=MDR -like ABC transporter
  Pfam annotation: Domain name=ABC_tran; Domain location=17-147; Score =3.0; E_value=2.4e-06; Accession=PF00005.19; Description=ABC transporter
MPDVQIFRDLCLTIHAGKTVALVGESGSGKSTAISLLQRFYDPDVGHILLDGVDIQKFQLRWLRQQMGLVSQEPALFNDTIRANIAYGKXGQATESEIIAAAELANAHKFISSALQVSYFHLILSTNIICGFCMQSIKHQKLLLTEVFVT

SEQ ID NO: 106098 - protein, 41 aa, Setaria italica
  Transcript Sequence Number=SeqID_40124
ADLIAVVRNGVIIEKGKHDALINIKDGAYASLVALHSAASS

SEQ ID NO: 106099 - protein, 1137 aa, Setaria italica
  Transcript Sequence Number=SeqID_40125
  Gene Ontology: Mol. function=ATPase activity, coupled to transmembrane movement of substances; Cellular component=integral to membrane; Biological process=transport
  Homolog annotation: Hit_ID=Q9LGX1; Match level="QueryCoverage=98%, HitCoverage=95%, E-value=0.0, Identity=65%"; Hit description=MDR -like ABC transporter
  Pfam annotation: Domain name=ABC_membrane; Domain location=1-205; Score=45.7; E_value=1.8e-10; Accession=PF00664.15; Description=ABC transporter transmembrane region
  Pfam annotation: Domain name=ABC_membrane; Domain location=571-846; Score=170.4; E_value=5.1e-48; Accession=PF00664.15; Description=ABC transporter transmembrane region
  Pfam annotation: Domain name=ABC_tran; Domain location=277-461; Score= 229.8; E_value=6.8e-66; Accession=PF00005.19; Description=ABC transporter
  Pfam annotation: Domain name=ABC_tran; Domain location=921-1106; Score=209.1; E_value=1.2e-59; Accession=PF00005.19; Description=ABC transporter
  Pfam annotation: Domain name=BacA; Domain location=33-229; Score= -186.3; E_value=0.084; Accession=PF02673.10; Description=Bacitracin resistance protein BacA
  Pfam annotation: Domain name=SMC_N; Domain location=267-465; Score= -131.2; E_value=0.061; Accession=PF02463.11; Description=RecFRecNSMC N terminal domain
  Pfam module annotation: Pfam domain module=ABC_membrane::ABC _membrane::ABC_tran::ABC_tran::BacA::SMC_N; Domain location=1 -205::571-846::277-461::921-1106::33-229::267-465
ARIRNLYLKTILRQEIAFFDKYTSTGEVVGRMSGDTVLIQDAMGEKVGKFIQLVVTFFGGFIVAFAQGWLLTLVMMATIPPLVLAGAVMSNVVAKMASLGQAAYAESSVVVEQTIGSIRTVASFTGEKRAVEKYNKSLKSAYKSGVREGLAAGLGMGTVMVLLFCGYSLGIWYGAKLILEKGYTGAKVMNVIFAVLTGSLALGQASPSMKAFAGGQAAAYKMFETINRTPEIDAYSTTGRKLEDIRGDIEFRDVYFSYPTRPDEQIFKGFSLTIPSGMTIALVGQSGSGKSTVISLIERFYDPQLGDVLIDGVNLKEFQLRWIRSKIGLVSQEPVLFAASIKENIAYGKDNATDQEIRAAAELANAAKFIDKMPQGFDTSVGEHGTQLSGGQKQRIAIARAILKDPRILLLDEATSALDAESERVVQEALDRIMTNRTTVIVAHRLSTVRNADTIAVIHQGTLVEKGPHNELLRDPEGAYSQLIRLQEANRQDNRKGDSNARSGKQMSINKSASRRSSRDNSSHHSFSVPFGMPLGIDIQDGSSNKLCDEMPQEVPLSRLASLNKPEIPVLILGSIASVISGVIFPIFSILLSNVIKAFYEPPHLLRKDSQFWSSMFLVFGAVYFLSLPVSSYLFSVAGCRLIRRIRLMTFEKVVNMEIEWFDHPENSSGAIGARLSADAAKVRGLVGDALQLVVQNSSTLVAGLVIAFVSNWELSLIILALIPLIGLNGWIQMKFIQGFSADAKMMYEEASQVANDAVSSIRTVASFSAEEKVMDLYKKKCEGPLRTGIRTGIISGIGFGVSFFLLFGVYAASFYAGARLVEDRKTTFPKVFRVFLALAMAAIGVSQSSTLTSDSSKAKSAASSIFAIVDRKSRIDPSEDAGVTVETLRGNIEFQHVSFKYPTRPDVQIFRDLCLTIHAGKTVALVGESGSGKSTAISLLQRFYDPDVGHILLDGVDIQKFQLRWLRQQMGLVSQEPALFNDTIRANIAYGKDGQATESEIIAAAELANAHKFISSALQGYDTMVGERGAQLSGGQKQRVAIARAIVKDPRILLLDEATSALDAESERVVQDALDRVMVNRTTVIVAHRLSTIQNADLIAVVRNGVIIEKGKHDALINIKDGAYASLVALHSAASS

SEQ ID NO: 106100 - protein, 116 aa, Setaria italica
  Transcript Sequence Number=SeqID_40126
  Gene Ontology: Mol. function=serine-type endopeptidase inhibitor activity; Cellular component=extracellular region
  Homolog annotation: Hit_ID=B6SGU0; Match level="QueryCoverage=93%, HitCoverage=89%, E-value=5e-24, Identity=51%"; Hit description =Bowman-Birk type trypsin inhibitor
  Pfam annotation: Domain name=Bowman-Birk_leg; Domain location=46-72; Score=20.5; E_value=0.0044; Accession=PF00228.12; Description=Bowman- Birk serine protease inhibitor family
  Pfam annotation: Domain name=Bowman-Birk_leg; Domain location=74-106; Score=8.4; E_value=0.35; Accession=PF00228.12; Description=Bowman -Birk serine protease inhibitor family
  Pfam module annotation: Pfam domain module=Bowman-Birk_leg::Bowman -Birk_leg; Domain location=46-72::74-106
MSRPQVLLVALAVLAVLATLPLCKGSEEEEGGAAFAMDTNARAWPCCDKCGLCLLMYPPQCNCMDFSERGCHPACRKCVRYTADGSSISQEPPVYRCADLLTNFCQRRCTPATVVA

SEQ ID NO: 106101 - protein, 107 aa, Setaria italica
  Transcript Sequence Number=SeqID_40127
  Subcellular localization annotation: CTP_CleavageSite=2; ConfidenceScore=5.09e-01
KTSSHGQQKIFRQDCGPSTTNELFSVLPWTIQRQMQGRYGSHGKEMPTRMVVSSKEMAANCVRRALRRRVMVSSVRQAVSGLLASGGAVAAQYLGKKMAKAWQSRAA

SEQ ID NO: 106102 - protein, 178 aa, Setaria italica
  Transcript Sequence Number=SeqID_40128
  Gene Ontology: Mol. function=two-component response regulator activity; Cellular component=nucleus; Biological process=two -component signal transduction system (phosphorelay)
  Homolog annotation: Hit_ID=Q9S7U8; Match level="QueryCoverage=78%, HitCoverage=90%, E-value=1e-57, Identity=81%"; Hit description =Response regulator 2
  Pfam annotation: Domain name=Response_reg; Domain location=46-164; Score=90.5; E_value=6.1e-24; Accession=PF00072.16; Description =Response regulator receiver domain
  Subcellular localization annotation: CTP_CleavageSite=16; ConfidenceScore=5.16e-01
MAAAAPSLAPAPSPAPAAKVASPKAGDRKVVPVTAADVVELAEKHVLAVDDSSVDRAVIAKILRSSKYRVTTVESATRALELLALGLLPDVNMIITDYWMPGMTGYELLKHVKESSKLKEIPVVIMSSENVPNRITRCLEEGAEDFLLKPVRPSDVSRLCSRIRLIRPGYSCLGYLYL

SEQ ID NO: 106103 - protein, 103 aa, Setaria italica
  Transcript Sequence Number=SeqID_40129
  Gene Ontology: Mol. function=two-component response regulator activity; Cellular component=nucleus; Biological process=two -component signal transduction system (phosphorelay)
  Homolog annotation: Hit_ID=Q9S7U8; Match level="QueryCoverage=100%, HitCoverage=65%, E-value=9e-40, Identity=77%"; Hit description =Response regulator 2
  Pfam annotation: Domain name=Response_reg; Domain location=2-103; Score=36.2; E_value=1.3e-07; Accession=PF00072.16; Description =Response regulator receiver domain
IVCSRIFAVTTVESATRALELLALGLLPDVNMIITDYWMPGMTGYELLKHVKESSKLKEIPVVIMSSENVPNRITRCLEEGAEDFLLKPVRPSDVSRLCSRIR

SEQ ID NO: 106104 - protein, 321 aa, Setaria italica
  misc_feature (165)..(165): Xaa can be any naturally occurring amino acid
  Transcript Sequence Number=SeqID_40130
  Gene Ontology: Mol. function=DNA-directed RNA polymerase activity; Cellular component=nucleus; Biological process=transcription
  Homolog annotation: Hit_ID=Q69X40; Match level="QueryCoverage=99%, HitCoverage=17%, E-value=9e-94, Identity=56%"; Hit description=DNA -directed RNA polymerase
  Pfam annotation: Domain name=RNA_pol_Rpb1_5; Domain location=51-265; Score=-48.7; E_value=1.5e-07; Accession=PF04998.9; Description=RNA polymerase Rpb1, domain 5
LKRDEMEYDDDTENEEGMDSESEEETKVKHQSEEDPAESGDDLQEADEEHKTSKSDMTSVDDMSYSAKKVKKSKDKHETAKLQERTHTEGKSDERKQDQMTYKRKKKLKRTVHVESKDLDFEIHYAFCDEPHILLAQIAQKTARSIFVRACKNIDKCEVEEKKRXGSSAVLKTSGVNFEVFWNLRKYISINKITTNDIHAMLKTYGVEAARATIIEEVNHVFGVYGIKVDPRHLSMIADFMTFDGGYRPMNRLGMGQFSTSPFGKMTFETATKFIVDAATHGESDSLECPSASICLGKPAKVGTGTFGLLQNLALEQPMAI

SEQ ID NO: 106105 - protein, 61 aa, Setaria italica
  Transcript Sequence Number=SeqID_40131
QIFLPKRRDFPTQESIEDLYYYLSNTTILLLVLAVLIPVLFPMTIMSSISLLLSCFSQLSE

SEQ ID NO: 106106 - protein, 127 aa, Setaria italica
  misc_feature (116)..(116): Xaa can be any naturally occurring amino acid
  Transcript Sequence Number=SeqID_40132
  Gene Ontology: Mol. function=superoxide dismutase activity; Cellular component=chloroplast; Biological process=superoxide metabolic process
  Homolog annotation: Hit_ID=B6TXN2; Match level="QueryCoverage=79%, HitCoverage=26%, E-value=1e-50, Identity=92%"; Hit description =Superoxide dismutase
  Pfam annotation: Domain name=Sod_Fe_N; Domain location=40-123; Score =70.2; E_value=7.8e-18; Accession=PF00081.14; Description =Ironmanganese superoxide dismutases, alpha-
ATDDETDLETDTDDTIDADGDTEDELESSLPEDVEWIKQQPLPYPSDALEPYISKETVEQHWVVHQQMHVDRLNGIIGGSEWEDMSLGQMMLSSFNEGREQPHPPFFHAAQVWNHXFYWRFMKPGGW

SEQ ID NO: 106107 - protein, 50 aa, Setaria italica
  Transcript Sequence Number=SeqID_40133
SYARNFDDGAWKAEEGVSWAGPGGAFPRASVGEAMNTGDSVPSSTSCLAP

SEQ ID NO: 106108 - protein, 163 aa, Setaria italica
  Transcript Sequence Number=SeqID_40134
  Gene Ontology: Mol. function=ion channel activity; Cellular component= spliceosome; Biological process=RNA splicing
  Homolog annotation: Hit_ID=Q53RB6; Match level="QueryCoverage=99%, HitCoverage=32%, E-value=2e-85, Identity=90%"; Hit description=Prp18 domain containing protein, expressed
  Pfam annotation: Domain name=Prp18; Domain location=7-151; Score =304.6; E_value=2.2e-88; Accession=PF02840.7; Description=Prp18 domain
VCDEDKIAAFFRRLMGEWSQEMDEMPEAERRTAKGKAAVATCKQCARYLDPLFKQCKKKALPPDVRQALLEVVKCCMRRDYLAAVDNYIKLAIGNSPWPIGVTMVGIHERSAREKIYTNSVAHIMNDETTRKYLQSVKRLITFCQRKYPTDPSRSVEFNSLGL

SEQ ID NO: 106109 - protein, 212 aa, Setaria italica
  misc_feature (32)..(32): Xaa can be any naturally occurring amino acid
  Transcript Sequence Number=SeqID_40135
  Gene Ontology: Mol. function=nucleotide binding; Cellular component =endoplasmic reticulum lumen; Biological process=negative regulation of caspase activity
  Homolog annotation: Hit_ID=Q9ATB8; Match level="QueryCoverage=98%, HitCoverage=42%, E-value=1e-100, Identity=85%"; Hit description=BiP -isoform D (Fragment)
  Pfam annotation: Domain name=HSP70; Domain location=1-212; Score= -128.0; E_value=1.2e-09; Accession=PF00012.12; Description=Hsp70 protein
GGEDFDQRVMDYFIKLIKRKHGRDIAGDARAXGKLRRECERAKRTLSNQHQVRVEIEALFDGVDFSEQLTRARFEELNNDLFRKTMVPVKKAMADAGLQKGDIDEIVLVGGSTRIPKVQQLLKDYFNGKEPNKGVNPDEAVAYGAAVQGSILSGHVDEKTQGMILLDVAPLTLGMETVGGVMTKLITRNTVVPTKKTQVFTTYQDRQTTHTE

SEQ ID NO: 106110 - protein, 122 aa, Setaria italica
  Transcript Sequence Number=SeqID_40136
  Gene Ontology: Cellular component=cytoplasm; Biological process =intracellular protein transport
  Homolog annotation: Hit_ID=Q8RZ91; Match level="QueryCoverage=69%, HitCoverage=10%, E-value=3e-26, Identity=68%"; Hit description =Vacuolar protein sorting-associated protein VPS16-like
VHLLPQARPLARDPAALPPRLAGGDQPHPLIPAMSSSVSVAAEWDLLSDRFYRRLTLYSPLPWSAPAPTSTSSSSGVGGPVIGRLDLSTHIVAAAPFGGPIAAVRDDSKIVQLHSEPSRRRL

SEQ ID NO: 106111 - protein, 106 aa, Setaria italica
  Transcript Sequence Number=SeqID_40137
  Subcellular localization annotation: CTP_CleavageSite=36; ConfidenceScore=5.14e-01
STAADYCSNNDRCYYQIYCSCFLFSKFLFNGRRKKPCMLRKRRRRTQNFCFILICACCVLVFLISGLNDYWKKFLTFSVYICTIYITHDPSAQTKTKLVKRIRQDE

SEQ ID NO: 106112 - protein, 123 aa, Setaria italica
  Transcript Sequence Number=SeqID_40138
IYSIITASSYISAQELLMDVCLLSQWWSRKFWNNVGSSASGAGCEHLSKSSSETDKPLHTYLILVFLGEDQTDANQVIFQHGIYAFFTWDRVLRGCFFMTSMQFLKQGFWQLESSHEKALQAW

SEQ ID NO: 106113 - protein, 77 aa, Setaria italica
  Transcript Sequence Number=SeqID_40139
ATSVFVGLEEEDGAVSRRRRWRRNGSSKTLLLQMIRRLPRQPLSSELRRWRRRWNGNTQTLLLLDMVISAAVPEVVA

SEQ ID NO: 106114 - protein, 58 aa, Setaria italica
  Transcript Sequence Number=SeqID_40140
  Subcellular localization annotation: CTP_CleavageSite=22; ConfidenceScore=5.22e-01
VFFISCSLFLIFCFFCWLFYVSSSNFKLQLFVSMFLDYLLSSGSLFVTSKTMATFLTI

SEQ ID NO: 106115 - protein, 93 aa, Setaria italica
  Transcript Sequence Number=SeqID_40141
GITSHHQPNNRLILLLIDNTGIVAQLNLAFANDSSTKPFPLERPPGSAVAVIHHSPQGTEDHSQEHGLLLFPNTTAFLWNLILGTPFVKLQQS

SEQ ID NO: 106116 - protein, 116 aa, Setaria italica
  Transcript Sequence Number=SeqID_40142
  Homolog annotation: Hit_ID=B6TS32; Match level="QueryCoverage=86%, HitCoverage=25%, E-value=1e-13, Identity=44%"; Hit description=F-box domain containing protein
EVDNLNTLTLWAMELGPDGNVGGWARRRVIELSTRLPPRALRNSPDVVAFADAVDVVFLETTDGLYSFDLKSRKGTKVMGHRFYDVVPYTSFYTPVLRQALATTGEGSGASASTSS

SEQ ID NO: 106117 - protein, 106 aa, Setaria italica
  Transcript Sequence Number=SeqID_40143
HADFVPQHLLLGIWILGSIGELDDWIAAGTESGLVRVSGVWYCGALVLPKAPPTGIWWMRGILGTRLENCRFNCCIGDSVLWLIYEVWHDVAVLPFRCQGRSKAEE

SEQ ID NO: 106118 - protein, 74 aa, Setaria italica
  Transcript Sequence Number=SeqID_40144
KSKIKLNLVSLVPKEFNLSSSRKGNPSPLSELFNKLSLTAGAHHHRGIERQVNDLPNYITTKDCKENMIGNIQC

SEQ ID NO: 106119 - protein, 278 aa, Setaria italica
  misc_feature (20)..(20): Xaa can be any naturally occurring amino acid
  Transcript Sequence Number=SeqID_40145
  Gene Ontology: Mol. function=nucleoside-triphosphatase activity; Cellular component=integral to membrane; Biological process=transport
  Homolog annotation: Hit_ID=Q6H8C3; Match level="QueryCoverage=100%, HitCoverage=30%, E-value=2e-97, Identity=64%"; Hit description =Putative ABC transporter
  Pfam annotation: Domain name=ABC_tran; Domain location=160-278; Score= -5.8; E_value=1.1e-05; Accession=PF00005.19; Description=ABC transporter
PPFALYRIIYEFLHLHHLSXRTDFSGIHWGDLSDRKNGMKDILIIMALEWATFLLLTFFLDEFGTLGNGIRKMVSVCPSNVDGSSQASQKQTIQLQEFEYSVEMDRTDVLREREIVEQLLQESDSSYSIICDNLKKVYHGQDGNAEKIAVTGLSLSMQHGQCFGILGPNGAGKTSLISMLTGFTKPTSGTAYINGMDIRSDMDRIYTGIGVCPQFDLLWETLTGREHLLFYGRLKNLRCAALDRAVEQSLKSVRLFDGGVADKRVAEYSGGMKRRLSV

SEQ ID NO: 106120 - protein, 191 aa, Setaria italica
  Transcript Sequence Number=SeqID_40146
  Gene Ontology: Cellular component=chloroplast
LVGLCRIVKANPKAYVDDVVNAYSRLSEADQSRCLEFLLTNHPMELLHPYTKEWKVKLEEMELGCDAPDESDDDVGDDDEIDIVDWIKDDEADDVVDGGYSDYEDEDVVDTNEDLEADEVVENSGDSEKYWDEQWKNAMRSSDKMEKLVKTSIEASNERIEQQMEFEKEMEWKMDRTTHTESLIWFYLVSS

SEQ ID NO: 106121 - protein, 165 aa, Setaria italica
  misc_feature (80)..(80): Xaa can be any naturally occurring amino acid
  misc_feature (98)..(98): Xaa can be any naturally occurring amino acid
  Transcript Sequence Number=SeqID_40147
  Gene Ontology: Mol. function=catalytic activity; Cellular component =nucleus; Biological process=DNA integration
  Homolog annotation: Hit_ID=B8B5M4; Match level="QueryCoverage=78%, HitCoverage=28%, E-value=2e-19, Identity=45%"; Hit description =Superoxide dismutase [Cu-Zn]
IQASLVRASVGASKIAPGLMIEVLLPTFEYASGWLDHYDLHYNIAVVNTKSFPAVQEAHIDRLLQIGPHCKVVAAGRQFXGKFMTYTGITADETTDPXPDELMISTCKITMMSWIGGPLFDFDGNFVGMNFCANEKTPFLPWNIICKLLVHDATLWLPSMSQTQH

SEQ ID NO: 106122 - protein, 192 aa, Setaria italica
  Transcript Sequence Number=SeqID_40148
  Gene Ontology: Mol. function=nucleic acid binding; Cellular component= nucleus; Biological process=protein ubiquitination during ubiquitin -dependent protein catabolic process
  Homolog annotation: Hit_ID=B9IAG6; Match level="QueryCoverage=90%, HitCoverage=65%, E-value=8e-72, Identity=75%"; Hit description =Chromatin remodeling complex subunit
  Pfam annotation: Domain name=Helicase_C; Domain location=73-151; Score=69.1; E_value=1.6e-17; Accession=PF00271.23; Description =Helicase conserved C-terminal domain
LNNKSSVEKVTPRVKGRKRSGILSRLASLADFKTSTKIDALREEVRNMIEHDGSAKGIVFSQFTSFLDLIQFSLEKSGIKCVQLNGAMNITEKGRAIDTFTNDPDCRIFLMSLKAGGVALNLTVASHVFLMDPWWNPAVESQAQDRIHRIGQFKPIKSTRFVIKDTVEERILQLQEKKQLVFEGTVGDFPRY

SEQ ID NO: 106123 - protein, 272 aa, Setaria italica
  Transcript Sequence Number=SeqID_40149
  Homolog annotation: Hit_ID=B9RJ85; Match level="QueryCoverage=59%, HitCoverage=35%, E-value=2e-20, Identity=33%"; Hit description =Caldesmon, putative
MGRKPSAAAAATAATADDESLAATMPADLLAAADCGGVHGHALFFDALVQLIPPRFYLPSGDEDRPWYQGLSKAAKAAMKAQSRANVKAARRARLDPSAPPASTLDLLKKSVADQAAEEEDGDDEEGKSGEEGEESGDEASSEDEDGDEVEEDEEDGDEKDEMPIAPAAVVSEDRSVTYEELRERLHRRIAELRGNRCTRPEFLNKPKKEKGKKAKGKNEKKGKGEGKKRKRDDGTEDAEDKDGKKAKKAEEKPDIMYANVVVDPKERQRKG

SEQ ID NO: 106124 - protein, 200 aa, Setaria italica
  Transcript Sequence Number=SeqID_40150
  Homolog annotation: Hit_ID=B9RJ85; Match level="QueryCoverage=57%, HitCoverage=32%, E-value=5e-20, Identity=46%"; Hit description =Caldesmon, putative
  Pfam annotation: Domain name=SURF6; Domain location=2-186; Score =53.5; E_value=8e-13; Accession=PF04935.4; Description=Surfeit locus protein 6
YEEAEFLNKPKKEKGKKAKGKNEKKGKGEGKKRKRDDGTEDAEDKDGKKAKKAEEKPDIMYANVVVDPKEARRRKKRRIKNKKKELEQAKRLQEAKQDPEKANKIAWDTARRRAAGEKVHDDPKLIKESLKKEEKRQQKHAAQWKERQKTVDNQRKEKQKKRTENIRERAHQKKMRKIEKREKKLMRPGFEGRKDGYVNE

SEQ ID NO: 106125 - protein, 133 aa, Setaria italica
  Transcript Sequence Number=SeqID_40151
  Gene Ontology: Mol. function=kinase activity
  Homolog annotation: Hit_ID=Q2R4Z0; Match level="QueryCoverage=72%, HitCoverage=13%, E-value=2e-44, Identity=85%"; Hit description =ATPase, histidine kinase, DNA gyrase B-, and HSP90-like domain containing protein
AEVLTTIGFLDGAPTISVHGFNIYHKNRLILPFHRVLSSASSKGRGVAGVLEADFIKPTHDKQDFEKSQLFQRLMNRLKDMTNEYWDIYCHKIGYVKTPRVRAAPVPRAPPAVLPIENGPAEPSGGECTCSCG

SEQ ID NO: 106126 - protein, 143 aa, Setaria italica
  Transcript Sequence Number=SeqID_40152
  Gene Ontology: Mol. function=electron carrier activity; Biological process=oxidation reduction
  Homolog annotation: Hit_ID=Q6ERN5; Match level="QueryCoverage=76%, HitCoverage=33%, E-value=8e-35, Identity=57%"; Hit description =Putative cytochrome P450
MEDKALLAAVSVFALLIVLSKLKSLLVTKPKLNLPPGPWTLPVIGSLHHLVTSPNFYRAMRRLAQKHGPVMMLRLGEIPMLVVSSPEAAMEVMKTHDIIFADRYRNPTINALAFDGDEITFAPYGERWRHLRKICVLEMLSAA

SEQ ID NO: 106127 - protein, 81 aa, Setaria italica
  Transcript Sequence Number=SeqID_40153
QRAAKLIYLCNKNRLQNSKWHTRQRGVSRGKQRDAKVLINASHSKNNYGHCKVSTNLQVPRGWSRRTEIRDRSFSPSKFIP

SEQ ID NO: 106128 - protein, 72 aa, Setaria italica
  Transcript Sequence Number=SeqID_40154
  Gene Ontology: Mol. function=DNA binding; Cellular component=nucleus; Biological process=regulation of transcription
  Homolog annotation: Hit_ID=B2ZGQ9; Match level="QueryCoverage=95%, HitCoverage=39%, E-value=1e-22, Identity=82%"; Hit description=NAC domain protein (Fragment)
  Pfam annotation: Domain name=NAM; Domain location=28-72; Score=-21.4; E_value=1.9e-05; Accession=PF02365.7; Description=No apical meristem (NAM) protein
MRSMESTDSSSGSAPPQQQKQTSSAPDLPPGFRFHPTDEELVVHYLKKKAASAPLPVAIIAVVDLYKFDPWE

SEQ ID NO: 106129 - protein, 228 aa, Setaria italica
  Transcript Sequence Number=SeqID_40155
  Gene Ontology: Mol. function=pyridoxal phosphate binding; Cellular component=plasma membrane; Biological process=metabolic process
  Homolog annotation: Hit_ID=B9S8P3; Match level="QueryCoverage=91%, HitCoverage=22%, E-value=2e-70, Identity=61%"; Hit description =Molybdopterin cofactor sulfurase, putative
ANIIADRLNRASDAAEASGYTFRDDEGCASDGYDDAQDWGRREPEIICRHIDHVDMMGLNRTTLRLRYLINWLVTSLLQLKLPDSKGGDGVPLVHIYGPKIKYERGAAVAFNVKQSDGTFVNAEVVQKIAEKNGISVGIGFLSHIKLDMNQKQLNGTLDIPEASFYKNGRRDNKKVTVRVEVVTASLGFLTNFEDVYKMWAFVAKFLDPSFLESERLTISADHLEGQT

SEQ ID NO: 106130 - protein, 90 aa, Setaria italica
  Transcript Sequence Number=SeqID_40156
  Gene Ontology: Mol. function=hydrolase activity, hydrolyzing O -glycosyl compounds; Cellular component=anchored to membrane; Biological process=carbohydrate metabolic process
  Homolog annotation: Hit_ID=B6TX61; Match level="QueryCoverage=73%, HitCoverage=13%, E-value=2e-25, Identity=86%"; Hit description =Glucan endo-1,3-beta-glucosidase 5
LRCVLASVLVVVAAAAAAADALGVNWGTMSTRRLPPKVMARLLADNGFRKVKIFDADERTMEGLAGTGIETMVAVPNDLLAAVANYARAR

SEQ ID NO: 106131 - protein, 292 aa, Setaria italica
  misc_feature (12)..(12): Xaa can be any naturally occurring amino acid
  misc_feature (25)..(25): Xaa can be any naturally occurring amino acid
  misc_feature (263)..(263): Xaa can be any naturally occurring amino acid
  Transcript Sequence Number=SeqID_40157
  Gene Ontology: Mol. function=ligase activity, forming carbon-nitrogen bonds; Cellular component=cytoplasm
  Homolog annotation: Hit_ID=B9RKQ1; Match level="QueryCoverage=100%, HitCoverage=42%, E-value=1e-72, Identity=51%"; Hit description =Raspberry3, putative
  Pfam annotation: Domain name=ATP_bind_3; Domain location=1-85; Score=- 82.0; E_value=0.0043; Accession=PF01171.12; Description=PP-loop family
FVLRLSRNSGFXGLAGTAFVSQLFXAPNVKYDGENFRRCGILLVRPMLDFSKDDMYKICQGSNQSWVEDPTNNSMMYARNRIRASLGNLSTEGTFLSGVHKLISACRLTRTHVDYTWSMIAKQCVSILEYGYGVIDLEKLDPSNVDDLCLSQYLAYILQFVSQRHRPLRGRSARLLLDYIRTIPCKAALTVAGCYLCAAPRSKGTKVLVCCSVDWMESSSAEISYKCSYEEQVFPVPEIDQIVLEGCLQSKQFIQNRSNLPCXYSKSSVDVLNKAKDLSIIDDFTLQKLCYL

SEQ ID NO: 106132 - protein, 70 aa, Setaria italica
  Transcript Sequence Number=SeqID_40158
NATENCALVKNATNCEAEWLTYVRSMLDPTWRHPVAFPNLKTVQSNLKVHAAIVSTCFFHRIHLQASSIQ

SEQ ID NO: 106133 - protein, 156 aa, Setaria italica
  Transcript Sequence Number=SeqID_40159
  Subcellular localization annotation: CTP_CleavageSite=24; ConfidenceScore=5.19e-01
LPRCNDLSSLNPGSTFLLFLFPILSSALRNSERQMHRSITSLQPSRSCIACSLDHSKYQMIHVYLFTLATIIYLCAVKQHIHNHGRVGVHQGAEAEGGEAEPGDRLRAGRAETQLLLPDGTRIASLAYTPCHVHVEIDNDAHAQKLLGTHMHDANL

SEQ ID NO: 106134 - protein, 180 aa, Setaria italica
  Transcript Sequence Number=SeqID_40160
  Gene Ontology: Mol. function=transcription regulator activity; Cellular component=nucleus; Biological process=regulation of transcription
  Homolog annotation: Hit_ID=B6TL58; Match level="QueryCoverage=80%, HitCoverage=80%, E-value=3e-67, Identity=88%"; Hit description=DNA binding protein
LSSVVCACARARHREMLSRERKKKQAAAALQEKLKILRSITHSHALSNTSIIMDASAYIKELKQKVVRLNQEIACAQDALRHNSSYPTVTVETLVGGHGGFLINVFSDKSCPGLLVSVLEAFDELGLSVLQATASCADSFRLEAVGGENVAENVDEHVVKQAVLQAIRSCSESGSEHDEG

SEQ ID NO: 106135 - protein, 56 aa, Setaria italica
  Transcript Sequence Number=SeqID_40161
YYYTGNGIHRIISTREQLPMSPAIEDIEAKNTGRGRKWSRQSDLGFLRRSRTGGSG

SEQ ID NO: 106136 - protein, 108 aa, Setaria italica
  Transcript Sequence Number=SeqID_40162
GNGIHRIISTREQLPMSPAIEDIEAKNTGRGRKWSRQSDLGFLRRSRTGGSGDRPGVCAYALRLPLVMLAAALGAAPDGLQHGLLHDVLVHVLRHVLRAAPPKRINML

SEQ ID NO: 106137 - protein, 139 aa, Setaria italica
  Transcript Sequence Number=SeqID_40163
  Gene Ontology: Mol. function=calcium ion binding; Cellular component =oxygen evolving complex; Biological process=photosynthesis
  Homolog annotation: Hit_ID=B6SZC8; Match level="QueryCoverage=92%, HitCoverage=59%, E-value=2e-67, Identity=97%"; Hit description =Oxygen evolving enhancer protein 3
  Pfam annotation: Domain name=PsbQ; Domain location=2-139; Score=46.2; E_value=1.3e-10; Accession=PF05757.3; Description=Oxygen evolving enhancer protein 3 (PsbQ)
GRSAFVPAPTSPGTVPRWGTKSYVRERFFEPELTAEEAAARIRQTAEGMRTLRPMLETMSWKYVLFYVRLKSKYLDLDLTTAMAGVPAGRRADYVRVANELVNNMTEFDRFVRTPKVYESYLFYEKTLKSLDDVAEFLV

SEQ ID NO: 106138 - protein, 136 aa, Setaria italica
  misc_feature (86)..(86): Xaa can be any naturally occurring amino acid
  Transcript Sequence Number=SeqID_40164
  Gene Ontology: Mol. function=calcium ion binding; Cellular component =oxygen evolving complex; Biological process=photosynthesis
  Homolog annotation: Hit_ID=B6SZC8; Match level="QueryCoverage=97%, HitCoverage=41%, E-value=5e-37, Identity=65%"; Hit description =Oxygen evolving enhancer protein 3
LVVYVLRPMLETMSWKYVLFYVRLKSKYLDLDLTTAMAGVPAGRRADYVRVANELVNNMTEVGTCQFVELIGFHVTPENAGFFSIXFSHQTIWHHIRRCPFAVQFDRFVRTPKVYESYLFYEKTLKSLDDVAEFLV

SEQ ID NO: 106139 - protein, 64 aa, Setaria italica
  Transcript Sequence Number=SeqID_40165
  Gene Ontology: Mol. function=nutrient reservoir activity
  Homolog annotation: Hit_ID=A9XEB7; Match level="QueryCoverage=64%, HitCoverage=25%, E-value=6e-10, Identity=80%"; Hit description=10kD delta canein
MMLQQPWTRPFQQYWTPRMMPFQQCHCGAISQIMQQQQLPSMFNPMATAIPPMFFQQPFAGVPF

SEQ ID NO: 106140 - protein, 244 aa, Setaria italica
  Transcript Sequence Number=SeqID_40166
  Gene Ontology: Mol. function=catalytic activity; Cellular component =nucleus; Biological process=ribosome biogenesis
  Homolog annotation: Hit_ID=Q8H7V4; Match level="QueryCoverage=91%, HitCoverage=25%, E-value=6e-38, Identity=40%"; Hit description =Putative polyprotein from transposon TNT
EDRFGELLAWKGYPFGDPPNDTLECVWGVLEKEVVTNISRVVSSLASFNRDHSRSFACTGLLIKWQGRAKRKRTVVLTSASLVRSRDNEDNIDKNLRIEVFLPPNQRCDGTLELYNLQYNIAIVSIKERFNAIRPADILDKEMEVSPEKVVAIGRDTIHGLLMGTIGEVKSSNEDCKLNCKELQCSTCHITKAGIGGPLIGFDGSFVGMNFYDGSDVTPFLPRVVIFDLLRRVVDSGLPAESGE

SEQ ID NO: 106141 - protein, 103 aa, Setaria italica
  Transcript Sequence Number=SeqID_40167
SDYVTFKLTKHYPSLQFLLVFTHKQDARHPAAAAHSSGVVEWWTKLRRGRGAGGLLCGARKPATSSSSSPPPFSPPPSWPAAAAPHQLPLPARPPFLIPWASS

SEQ ID NO: 106142 - protein, 108 aa, Setaria italica
  Transcript Sequence Number=SeqID_40168
LLVFTVAIEQVMHDLGSCWRVSENCYACASIGSCLSSFMVVQLAWLTITLAGEFPASPLHMLLFCKYLYVCKMCCRMQKAAAHENLKYYANIYAVEKCVVGCRLSPFQ

SEQ ID NO: 106143 - protein, 126 aa, Setaria italica
  Transcript Sequence Number=SeqID_40169
SERRGRGASDGDDELGPIATVLRRRVEDARAAAGLQWWPEGRREASNIKGGHGFAGASQEAQERHRWAVRGRNCVFDEEERLEGGGRHAGSAPRALRGGRPRRPRRAVLEGRRINSCLYTPMRLAS

SEQ ID NO: 106144 - protein, 64 aa, Setaria italica
  Transcript Sequence Number=SeqID_40170
  Subcellular localization annotation: CTP_CleavageSite=61; ConfidenceScore=5.24e-01
PYFIHISPSNAYVFGGLGWSLFTFQRMDRRNMFNRKKTLTGKAANYHSLNMNEILQINLVLATN

SEQ ID NO: 106145 - protein, 257 aa, Setaria italica
  Transcript Sequence Number=SeqID_40171
  Gene Ontology: Cellular component=extracellular region; Biological process=cell wall organization and biogenesis
  Homolog annotation: Hit_ID=Q1ZYQ8; Match level="QueryCoverage=85%, HitCoverage=80%, E-value=1e-105, Identity=84%"; Hit description =Expansin-B10
  Pfam annotation: Domain name=DPBB_1; Domain location=90-169; Score =113.1; E_value=9.4e-31; Accession=PF03330.10; Description=Rare lipoprotein A (RlpA)-like double
  Pfam annotation: Domain name=Pollen_allerg_1; Domain location=182 -255; Score=108.6; E_value=2.1e-29; Accession=PF01357.13; Description= Pollen allergen
  Pfam module annotation: Pfam domain module=DPBB_1::Pollen_allerg_1; Domain location=90-169::182-255
  Subcellular localization annotation: CTP_CleavageSite=25; ConfidenceScore=5.04e-01
TTFIQQGSSEMASTTSTTVMVAVVVASLVGGAVCGPPKVPPGKNISATCDGKWLDAKATWYGKATGAGPDDNGGACGYKDVNKAPFNSMNACGNSPIFKDGLGCGSCYEIKCDKPAECSGEPVIVHITDMNDEPIAAYHFDLAGTAFGAMAKKGEEEKLRKAGIIDMQFRRVKCKYPADTKIAFHIEKGCNPNYFALLVKYAAGDGDIVAVDIKEKGSDEFVPLKHSWGAIWRIDSPKPIKGPIAVRLTSEGGTKLR

SEQ ID NO: 106146 - protein, 61 aa, Setaria italica
  Transcript Sequence Number=SeqID_40172
VLKTDIHGAVLALRTEILTHLFVEAGLASVVDHIVPLITIISLYIHPCMNVSLIFHQARVC

SEQ ID NO: 106147 - protein, 69 aa, Setaria italica
  Transcript Sequence Number=SeqID_40173
GILSNCNHMTASLKNILIYGADPDTKQWLEDHKHLIYDCFVLSNKFCQSVSDQPIQFRQLTYKQPLSEL

SEQ ID NO: 106148 - protein, 86 aa, Setaria italica
  Transcript Sequence Number=SeqID_40174
  Gene Ontology: Mol. function=electron carrier activity; Biological process=oxidation reduction
  Homolog annotation: Hit_ID=B9SCQ6; Match level="QueryCoverage=74%, HitCoverage=11%, E-value=1e-13, Identity=61%"; Hit description =Cytochrome P450, putative
RKDPAVEARILEEIEGIVAARKAPGEVEEEFVFQPDEVKRMDYLHAALSEALRLYPSVPVDHKEVTHTQTNTRFVFINSISTLFFG

SEQ ID NO: 106149 - protein, 541 aa, Setaria italica
  Transcript Sequence Number=SeqID_40175
  Gene Ontology: Mol. function=electron carrier activity; Cellular component=integral to membrane; Biological process=oxidation reduction
  Homolog annotation: Hit_ID=B9SCQ6; Match level="QueryCoverage=93%, HitCoverage=92%, E-value=0.0, Identity=66%"; Hit description =Cytochrome P450, putative
  Pfam annotation: Domain name=p450; Domain location=56-532; Score =150.3; E_value=5.9e-42; Accession=PF00067.14; Description=Cytochrome P450
MSGAMDTAVSHNATDAAAAAKLGGGLASLLPEVQTLELLVAVSIFVAIHSLRQRRSQGLPTWPLVGMLPSLLLGLRGDMYEWITGILKARGGTFTFRGPWFTNLHCVVTADPRNLEHLLKTRFGSFPKGPYFRDNVRDLLGDGIFGADDEVWRRQRKAASLEFHSAEFRALTASSLVELVHRRLLPVLADAEAGGGAVDLQDVLLRLTFDNVCMIAFGVDPGCIRPGLPEIPFARAFEDATEATIVRFLTPTAVWRAMRALGVGNERVLQRSLAGVDEFAYDVIRKRKEELEAGYDAGRRSDLLTVFTKMRDEDGRPAYSDKFLRDICVNFILAGRDTSSVALAWFFWLLGKNPAVEARILEEIEGIVAARKAPGEVEEEFVFQPDEVKRMDYLHAALSEALRLYPSVPVDHKEVVEDEVFPDGTVLRKGTKVIYAMYAMGRMESIWGDDCREYRPERWLRDGRFTSESAYKFTAFNGGPRLCLGKDFAYYQMKFAAASILLRYRVHVVEGHPVAPKIALTMYMKHGLKVTLAKRDKATRL

SEQ ID NO: 106150 - protein, 93 aa, Setaria italica
  Transcript Sequence Number=SeqID_40176
  Subcellular localization annotation: CTP_CleavageSite=35; ConfidenceScore=5.38e-01
IPVSLKTMQSTDRAGKLPILVASLQRKTTSGRCIVSSMTGILCPLVGQQFPCLDTQFFFPFNSFDNISRHSCCPYADSRRKGLLDVPVLYRML

SEQ ID NO: 106151 - protein, 382 aa, Setaria italica
  Transcript Sequence Number=SeqID_40177
  Gene Ontology: Mol. function=DNA binding
  Subcellular localization annotation: CTP_CleavageSite=42; ConfidenceScore=5.52e-01
TQNIRSQVTGSSKSSAGPKAPSVVVEPGTQPGSTQHLEPLSTSAHKSGPSVLTTHATEQGHGASEVAVVNPPGPSDGAHSLETKKALSTTPVPGSCDIEEKEDDSTFCVITIDDLFPEDAMQPETVDLKAKQPEIVDQKANQQVEIVSQRAKQPETVDPKAKQPETADPKAKQPENADPKAKQPDALNPKVEMVDPKDKDMLEFDQFVASQGGVNTDHLDKSKTGGSASQAQGLAGSQKKQVKLMPTVGKGNPVSAAAPATVKRIKTPVPHLVNPVPAGTPRGIVGTVNANAPNKTLVRKAATPAPAGVQAPPLKKHAVNIKGNQAMQPSTAVAGSGVPASNQASVAVNGASKANPPPSSAQASAVVNIGSKANPPSSGQAS

SEQ ID NO: 106152 - protein, 54 aa, Setaria italica
  misc_feature (27)..(27): Xaa can be any naturally occurring amino acid
  Transcript Sequence Number=SeqID_40178
  Gene Ontology: Mol. function=cysteine-type endopeptidase activity; Cellular component=vacuole; Biological process=proteolysis
  Homolog annotation: Hit_ID=B6TG95; Match level="QueryCoverage=96%, HitCoverage=14%, E-value=5e-14, Identity=68%"; Hit description =Vignain
MNHAVTAVGYGTDENGDQYWILKNSYXAGQDGYMMLQRGTGACGISTMSSYPIA

SEQ ID NO: 106153 - protein, 108 aa, Setaria italica
  misc_feature (21)..(21): Xaa can be any naturally occurring amino acid
  Transcript Sequence Number=SeqID_40179
  Homolog annotation: Hit_ID=UPI0000196FAA; Match level="QueryCoverage =100%, HitCoverage=13%, E-value=6e-14, Identity=40%"; Hit description= transducin family protein / WD-40 repeat family protein
ETCLYCSAPVPFESTDVAICXERHTLTRCKASMLLCSVLQPAWHCVCCGGMVDKLLPESFFTMQASPLDANNDEGSLNLSGAAVPLCPFCGILLQRQMPVFLLSTSPV

SEQ ID NO: 106154 - protein, 72 aa, Setaria italica
  Transcript Sequence Number=SeqID_40180
  Homolog annotation: Hit_ID=B9S7B1; Match level="QueryCoverage=90%, HitCoverage=17%, E-value=8e-18, Identity=61%"; Hit description =Endonuclease V, putative
LVCSTGFGLACHLGVLADLPTIGVGKNLHHVDGLNQSEVRRQLEGKENCDKEFISLTGRSGTTWGVAMRSCP

SEQ ID NO: 106155 - protein, 162 aa, Setaria italica
  misc_feature (91)..(91): Xaa can be any naturally occurring amino acid
  Transcript Sequence Number=SeqID_40181
  Gene Ontology: Mol. function=endonuclease activity; Cellular component=cytosol; Biological process=DNA repair
  Homolog annotation: Hit_ID=B9S7B1; Match level="QueryCoverage=99%, HitCoverage=44%, E-value=4e-54, Identity=61%"; Hit description =Endonuclease V, putative
  Pfam annotation: Domain name=Endonuclease_5; Domain location=1-161; Score=148.1; E_value=2.8e-41; Accession=PF04493.6; Description =Endonuclease V
VVVQLQVPYIPGFLAFREAPILLGLLEKVKNNAHDFYPQVLMVDGNGLLHPRGFGLACHLGVLADLPTIGVGKNLHHVDGLNQSEVRRQLXGKRNCDKEFISLTGRSGTTWGVAMRSCPGSLKPVYISVGHRISLDSAAAIVKLCCKYRVPEPTRQADIRSK

SEQ ID NO: 106156 - protein, 47 aa, Setaria italica
  Transcript Sequence Number=SeqID_40182
FFTVFHFLSCIDLLKVPSFHFFLLVTDVIDKYHSDHMPKDIHTNIPL

SEQ ID NO: 106157 - protein, 148 aa, Setaria italica
  misc_feature (14)..(14): Xaa can be any naturally occurring amino acid
  Transcript Sequence Number=SeqID_40183
  Subcellular localization annotation: CTP_CleavageSite=70; ConfidenceScore=5.58e-01
LGVVLIQVRISTAXSISTSSFSSASNTISCSISVTSSSSSVIRVSMSEIRIPLWMSWYDCSTKSFLVVLRCSWVSTAIRAKTAIALPWSSTSRYNAFIQRVVVERVSCGCEVTNTSMLFTLSSQSASSLSLAGNKPIGSKRTSKGCRY

SEQ ID NO: 106158 - protein, 54 aa, Setaria italica
  Transcript Sequence Number=SeqID_40184
MPLCQLQLPHQNVTFQASWPGLFVDKKGVYWDLPLSLSADLASVGSSSGLSYHL

SEQ ID NO: 106159 - protein, 140 aa, Setaria italica
  Transcript Sequence Number=SeqID_40185
  Gene Ontology: Mol. function=binding
  Homolog annotation: Hit_ID=B3U1U8; Match level="QueryCoverage=92%, HitCoverage=85%, E-value=5e-40, Identity=60%"; Hit description =Pentatricopeptide repeat protein (Fragment)
GAYVQLANIYAMANRWADVSRVRRWMKDNAVVKTPGYSWIEIKGVRHEFRSNDRLHPQLDLIHDKLDRLEELMKAMGYVPDLDFALHDVEESLKAQMLMRHSEKLAIAFGLISSPPGMTLRIFKNLRVCGDCHNAAKLIS

SEQ ID NO: 106160 - protein, 152 aa, Setaria italica
  misc_feature (131)..(131): Xaa can be any naturally occurring amino acid
  Transcript Sequence Number=SeqID_40186
  Gene Ontology: Mol. function=lyase activity; Cellular component =chloroplast; Biological process=metabolic process
  Homolog annotation: Hit_ID=C0SSW5; Match level="QueryCoverage=92%, HitCoverage=17%, E-value=1e-53, Identity=70%"; Hit description=Ent -copalyl diphosphate synthase
HDRIINTLACVIALASWGIHAEKCEKGLSFIRENMWRLVKEDEDWMLVGFEIALPSLLEMAKDLDLDIPYDHPALQEIYDRRDLKLNKIPKDVLHSIPTTLLHSIEGGPGLDWKRLLNLRFSDGSFMSSPXATAYALMETVTGMPRVLRHHR

SEQ ID NO: 106161 - protein, 187 aa, Setaria italica
  misc_feature (20)..(20): Xaa can be any naturally occurring amino acid
  misc_feature (149)..(149): Xaa can be any naturally occurring amino acid
  Transcript Sequence Number=SeqID_40187
  Gene Ontology: Mol. function=oxidoreductase activity; Biological process=oxidation reduction
  Homolog annotation: Hit_ID=B6TBU1; Match level="QueryCoverage=93%, HitCoverage=45%, E-value=7e-49, Identity=58%"; Hit description=1 -aminocyclopropane-1-carboxylate oxidase
  Pfam annotation: Domain name=2OG-FeII_Oxy; Domain location=53-159; Score=143.6; E_value=6.2e-40; Accession=PF03171.12; Description=2OG -Fe(II) oxygenase superfamily
APDPLPEELPEALRNVIMEXVDAVMKLGLRVSELLSESLGLSSGHLREMGCMESLHAVCQYYPPCPEPHLTFGIKSHTDPAFFTVLLQDGSTGGLQVLVDRGGGHRRTWVDVPPLPGALTVNIGDLLQLVSNDRFRSVEHRVPAIKSKXRVSVASFFNTDLKRSTRLYGPITDGRCPPSYSVTAQEF

SEQ ID NO: 106162 - protein, 75 aa, Setaria italica
  Transcript Sequence Number=SeqID_40188
CQHFDLELLTISLENSLGEFSSSLFCNLVIDSKKLPQSFCILLKSLKNYLLKLDASKILLQGGILINEHLLPMES

SEQ ID NO: 106163 - protein, 62 aa, Setaria italica
  Transcript Sequence Number=SeqID_40189
MDPCLCSNYSALQISLWDYIIPDKEHANLQVVAKSKYPLIDQVSRPPPPPWLGTALQLCADR

SEQ ID NO: 106164 - protein, 67 aa, Setaria italica
  misc_feature (50)..(50): Xaa can be any naturally occurring amino acid
  misc_feature (59)..(59): Xaa can be any naturally occurring amino acid
  Transcript Sequence Number=SeqID_40190
CGCNCVDAAAVGESKGNMETNGGKLGCCTKCNFFSGLYTCDDVVSKCDPXCKVVKKHPXKKFQCTDT

SEQ ID NO: 106165 - protein, 85 aa, Setaria italica
  Transcript Sequence Number=SeqID_40191
FDSNFAVLIWLFPMTEHACQYLYEQLILLVSHDYIVQNTIRVSWTKQHCPITEHRLIDEHIDLQSDSSERPRQCTYRFPWPQPQS

SEQ ID NO: 106166 - protein, 168 aa, Setaria italica
  Transcript Sequence Number=SeqID_40192
  Gene Ontology: Mol. function=peptidase activity; Cellular component =signal peptidase complex; Biological process=signal peptide processing
  Homolog annotation: Hit_ID=Q9LGB4; Match level="QueryCoverage=100%, HitCoverage=100%, E-value=2e-52, Identity=62%"; Hit description =Probable signal peptidase complex subunit 3
  Pfam annotation: Domain name=SPC22; Domain location=5-167; Score =274.1; E_value=3.1e-79; Accession=PF04573.4; Description=Signal peptidase subunit
MHSWTQRLLAAATTAVVLLAAVCAAASALDAFHVPAVQAQAHVTKINRFHKQINGNNKVTLTFNLSANLESVFTWNTKQVFVFLTAEYENAKNSLNQISLWDYIIPDKEHANLQVVAKSKYPLIDQGSSLRGKKVQFVLHWYVMPNAGAMIQDRMALSEFKLPDAYTS

SEQ ID NO: 106167 - protein, 50 aa, Setaria italica
  misc_feature (19)..(19): Xaa can be any naturally occurring amino acid
  Transcript Sequence Number=SeqID_40193
WSSGVLSCTTFDWSRKVSXFFFKVVVERAATFNVVVEGYLRMVRSFICIF

SEQ ID NO: 106168 - protein, 72 aa, Setaria italica
  Transcript Sequence Number=SeqID_40194
IFNYSCIFFRFKIYSCFLYKICMFLQISHRMTMAIHKHLGYDARILPKVHVSVSVSVFFKKWRICIRIRASV

SEQ ID NO: 106169 - protein, 37 aa, Setaria italica
  Transcript Sequence Number=SeqID_40195
CVVREKLLRLLIPFRINRLTVNAESIRIVSQNENSMP

SEQ ID NO: 106170 - protein, 504 aa, Setaria italica
  Transcript Sequence Number=SeqID_40196
  Homolog annotation: Hit_ID=B8Q893; Match level="QueryCoverage=94%, HitCoverage=100%, E-value=1e-177, Identity=66%"; Hit description =SKIP interacting protein 7 (Fragment)
  Subcellular localization annotation: CTP_CleavageSite=49; ConfidenceScore=5.24e-01
MKHHKLHQERSHRIQPFSPASFTSSVGESNVNNTISPTRSLDIMGRSVRAGYGLQTSTELLKVLNRIWSLEEQHTANLSVVNGLKLELQQAQTHIQELMQERRRYRHEVSSLMRQLSENKLVRKSKDHGKIDTVVHSLQGELEDERRQRRHSEDLHRKLGKELSQIKSAFLKAVKDLEKEKKGNRLLEDLCDQFAMGIRNYEEELRVVKQRNAKNYELNFDKSVLHISEAWLDERMQMRSIAVKEDLAHGTTITERLSSEIEAFILSKRAGNSKNNEKHMNDSTRLRRQSLESVHLNGATSAPQLAEDDDDSVASDLHCFELNMHEHTGPRRSDTGGIDVPKRRSEHPHGMAAEGSHMSSMPVYSQKDKIPEINSQSNARITPTEEQNGTTSAQITRGSYNGSLKNNQDAHHVDCLGQESFDHFSRTSLFCEGTTSGDLGNLGSPTRQLKYQSTSLDPEIVECSPEQPVGVMENTLKAKLLQARLEGRHARMKASCGSSTSRRK

SEQ ID NO: 106171 - protein, 52 aa, Setaria italica
  Transcript Sequence Number=SeqID_40197
GYSVHLCWVASTLCPSLCWFGCSILPTPAHLEFSVLCRRARQSIIILAFMEM

SEQ ID NO: 106172 - protein, 162 aa, Setaria italica
  misc_feature (10)..(10): Xaa can be any naturally occurring amino acid
  Transcript Sequence Number=SeqID_40198
  Gene Ontology: Mol. function=superoxide dismutase activity; Cellular component=chloroplast; Biological process=superoxide metabolic process
  Homolog annotation: Hit_ID=B6TXN2; Match level="QueryCoverage=97%, HitCoverage=40%, E-value=5e-80, Identity=88%"; Hit description =Superoxide dismutase
  Pfam annotation: Domain name=Sod_Fe_C; Domain location=41-162; Score =148.3; E_value=2.3e-41; Accession=PF02777.10; Description =Ironmanganese superoxide dismutases, C-term
MMLSSFNEGXREAAPLLPFFHAAQVWNHDFYWRSMKPGGGGKPPERLLKFINRDFGSYEHMIQQFMDAALTQFGSGWVWLSYKESKLPYVKSRSPIPSDNYGRLVISKTPNAINPLVWGHSPLLAIDVWEHAYYLDYEDRRADYVAAVLEKLVSWEVVSRGS

SEQ ID NO: 106173 - protein, 106 aa, Setaria italica
  Transcript Sequence Number=SeqID_40199
EFRCVSSCPFSLCICVDVPVRSCFSLLSRQCDLILARCFFSDELDGWIVRAFTCFYRILILLNCSVYLMRPDLALDLGHCGLFVMRRFYYFLMRILLRTMDVEYSS

SEQ ID NO: 106174 - protein, 110 aa, Setaria italica
  misc_feature (45)..(45): Xaa can be any naturally occurring amino acid
  Transcript Sequence Number=SeqID_40200
  Gene Ontology: Mol. function=nucleotide-sugar transmembrane transporter activity; Cellular component=integral to membrane; Biological process=nucleotide-sugar transport
  Homolog annotation: Hit_ID=O65494; Match level="QueryCoverage=93%, HitCoverage=100%, E-value=3e-29, Identity=69%"; Hit description=UDP -galactose transporter-like protein
  Pfam annotation: Domain name=Nuc_sug_transp; Domain location=1-94; Score=-124.5; E_value=3.6e-05; Accession=PF04142.7; Description =Nucleotide-sugar transporter
YIFGMVFNLVAICVQDFGAVINKGFFHGYSFITVSMILNHALSGXVAVSMVMKYADNIVKVYSTSVAMLLTAIVSVFLFSFHLSLAFFLGSTVVSVSVYLHSVGKPQQQK

SEQ ID NO: 106175 - protein, 66 aa, Setaria italica
  Transcript Sequence Number=SeqID_40201
VHIYSFLCNLMDFVLTYTRNGPENTTVQFALNMTFGGNIWLGAEFCYTMIVAGILSKSLYLPACTF

SEQ ID NO: 106176 - protein, 93 aa, Setaria italica
  Transcript Sequence Number=SeqID_40202
RIDMRNSIGSEECSQQMLIPTLKYQEICSKLRHRKRCRSSPKVLLFKKATEQQTVVLITREELMTKYQKRNALPQAGSDLDLLIIRKDRIFPG

SEQ ID NO: 106177 - protein, 209 aa, Setaria italica
  Transcript Sequence Number=SeqID_40203
  Gene Ontology: Mol. function=RNA methyltransferase activity; Biological process=RNA processing
  Homolog annotation: Hit_ID=Q10T58; Match level="QueryCoverage=96%, HitCoverage=13%, E-value=2e-89, Identity=67%"; Hit description=RNA methyltransferase, TrmH family protein, expressed
RCSNGQGRWKVFLLLYEMLQEYGTHLVEAAWMHQVMLLFESTPQTDYLNHTSHGAFHAQMESWEGILHWMTVLWERGFTHDNPQVRCLVMQSFLDISWEHYKVCAQIIPRGFVLGSLIRGLNDVVHHKDFGVGGIYDSKTIKGAESFFSTYAQNLTRRDRIHLVWSLASAAKHDSFGRAGLMTLASCVASCTCQSDINDVPCATPWKRS

SEQ ID NO: 106178 - protein, 404 aa, Setaria italica
  Transcript Sequence Number=SeqID_40204
  Gene Ontology: Mol. function=binding; Cellular component=plasma membrane
  Homolog annotation: Hit_ID=B6TE00; Match level="QueryCoverage=95%, HitCoverage=71%, E-value=1e-168, Identity=77%"; Hit description =Nodulin-like protein
  Pfam annotation: Domain name=Nodulin-like; Domain location=1-127; Score=-104.7; E_value=9.4e-05; Accession=PF06813.5; Description =Nodulin-like
MLALFSPPTNLNSIFVLSQQGFLGLSGAILVQIYRTLHIDPTAFILMLAILPTTIAVMLMSFVDVHSTHERYNKKFLDAFSLIAVTVAVYLMIIIICDQVFMISSAAQTVCFVILLLLALSPVAVAVKAQKLESIQHEEPTSSEQRIGLLREEVAEGSESASSSTALLGSNQDLSAGKENLNVLQAMGKLNFWLLFLAMACGMGSGLATVNNISQIGGSLGYTNKETSTLVSLWSIWNFSGRFGAGFISDHFLRLRGVGRPFFIGATLLIMSVGHGIISSGLPASLYIGSVLVGLCYGCQWALMPSITSEIFGLNHFGTIFNMVAVASPVGSYILSVRVVGYIYDMESTPHEHGCHGKHCFALSFMIMACVCVFGSVVAFVLFVRTRKFYRRVVYARLQSFLDK

SEQ ID NO: 106179 - protein, 169 aa, Setaria italica
  Transcript Sequence Number=SeqID_40205
  Gene Ontology: Mol. function=transporter activity; Cellular component= membrane; Biological process=transport
  Homolog annotation: Hit_ID=Q6JN48; Match level="QueryCoverage=96%, HitCoverage=13%, E-value=7e-23, Identity=40%"; Hit description =Ethylene insensitive 2
EETYLENVAHEEVHWPSVPKDSLEGHEKSALGHTESSEISTESDHDAQPPTAHREINPEAHPTPSIFCEEPKSVEADLTGPISKVCTDAIVEQSTADNIKVERATEKIVQVETDFFTQKDTDVSHDLEFEKYPGGKAPSFTSDGPPSLTLSRGNTDAGNISGTDTLSKQ

SEQ ID NO: 106180 - protein, 60 aa, Setaria italica
  Transcript Sequence Number=SeqID_40206
MDMMVVCICLLDYSDMMPRCYSRNLWCISPSLYYRAFGTPVLGILQCHWCCPRSNTMWWL

SEQ ID NO: 106181 - protein, 167 aa, Setaria italica
  Transcript Sequence Number=SeqID_40207
  Gene Ontology: Mol. function=transcription factor binding; Cellular component=intracellular; Biological process=regulation of transcription, DNA-dependent
  Homolog annotation: Hit_ID=Q10A60; Match level="QueryCoverage=100%, HitCoverage=62%, E-value=2e-70, Identity=79%"; Hit description=GTP -binding protein, putative, expressed
GRRVSSGNLVDVARQWVEKQGLLPPSDESSLGGSRPGNSGLLTAAKEARYDKEALIKFFRMLIRRRYFSNELPAPSPWSLTSREDTILPVETVNDDDLFQRKSYGSQSYKYNGVAPLPAQRNLTPPPTLYPQQPMSSSSENYRYHRFSSSSIPDSGGGRPSRADINI

SEQ ID NO: 106182 - protein, 384 aa, Setaria italica
  misc_feature (134)..(134): Xaa can be any naturally occurring amino acid
  Transcript Sequence Number=SeqID_40208
MSSVQAFVAEHMTSKELDMDWSKEAVGLDGFRYVGCNDLRDVALNSLHMFFKTAVQMLSSEGYTEDAVVNAIVDSALCYQYDGPIDKITEHARTLLQSGGHQVDYSSSENVDTVLHMLGLFFFAMHQVCLRHAXPFFTLGDALWCILLCDLDISITRAAFSHTSGYGNGQSEGHAPRQCNLCEARENVNEISEECGCGSSRGTESPAQFEPSQSEAAQRVWSNILANYIVSVQNSATKNQDASSTQDENSPSVPRAVVQRSKKATKGNRSKTNSIKYQKDSGKDLVVFKNIPHIKDSDKTSSRMLKESKITNGILGSAQNTSTGISEVAIKKCLQPATLVPTQPVSGPSSVKSRDSPAMVSTGSLSSHASCSSISSILSLFLIC

SEQ ID NO: 106183 - protein, 58 aa, Setaria italica
  Transcript Sequence Number=SeqID_40209
FWIYVAAHFIRLLEEELTPEQMLTKHHWDSCLDDESQKTRDDAVYPKELGGNQVGKRL

SEQ ID NO: 106184 - protein, 69 aa, Setaria italica
  Transcript Sequence Number=SeqID_40210
KYSTSSELTIEITEEEPLATSMIASITTMEQDNKSYSYFAHKHRVQSNQFRQYSDTQSSTVKLNMFRKH

SEQ ID NO: 106185 - protein, 120 aa, Setaria italica
  misc_feature (2)..(2): Xaa can be any naturally occurring amino acid
  misc_feature (13)..(13): Xaa can be any naturally occurring amino acid
  Transcript Sequence Number=SeqID_40211
  Gene Ontology: Mol. function=aspartic-type endopeptidase activity; Cellular component=chromatin; Biological process=RNA-dependent DNA replication
  Homolog annotation: Hit_ID=Q75LZ2; Match level="QueryCoverage=97%, HitCoverage=5%, E-value=2e-48, Identity=75%"; Hit description =Putative polyprotein
EXRPYRYAPTQKXEIEKQLTEMLQNGVIRPSNSPYASPVLLVTKKKDGSWRFCVDYRHLNAISVKNKHPLPVVDELLDELAGARWFSKLDFRSGYHQIRIVKGDEHKTAFKTHSGLYEFL

SEQ ID NO: 106186 - protein, 275 aa, Setaria italica
  Transcript Sequence Number=SeqID_40212
  Gene Ontology: Mol. function=transcription regulator activity; Cellular component=nucleus; Biological process=regulation of transcription
  Homolog annotation: Hit_ID=B6SY24; Match level="QueryCoverage=95%, HitCoverage=69%, E-value=2e-93, Identity=68%"; Hit description=BHLH transcription factor
  Pfam annotation: Domain name=HLH; Domain location=82-132; Score=35.1; E_value=2.8e-07; Accession=PF00010.18; Description=Helix-loop-helix DNA-binding domain
FVGCVGLILNFGLQAGEAKGPDGKKCRVGAGGSPVKPKVEEATASDGSVEDKGQKKGKGKSSKPPVEPPKDYVHVRARRGQATDSHSLAERVRRERISQRMKVLQDLVPGCNKVIGKALMLDEIINYVQSLQRQVEFLSMKLATVNPLDFSNLPTLLQKDIFQACGPSASSVFSLESSSSGFPFSDQGDVFQSFVPNGLENQCGLNPLDLALSQATNAQYAFQDGTASTNLQQRNFWEEDLQSVFHIDNGQSQENGVSAQSFHGQLQAGHMKMEF

SEQ ID NO: 106187 - protein, 281 aa, Setaria italica
  Transcript Sequence Number=SeqID_40213
  Gene Ontology: Mol. function=transcription regulator activity; Cellular component=nucleus; Biological process=regulation of transcription
  Homolog annotation: Hit_ID=B6U6D0; Match level="QueryCoverage=98%, HitCoverage=78%, E-value=1e-105, Identity=70%"; Hit description=BHLH transcription factor
  Pfam annotation: Domain name=HLH; Domain location=94-144; Score=30.3; E_value=8.1e-06; Accession=PF00010.18; Description=Helix-loop-helix DNA-binding domain
YRNRPRPDGRTKRQRAKEASAQAGEQKDPDAKRCKTEGAEGKDESPVKPKPEQAGSDSSVEDGGGQKPGKGKSSKPPVEPPKDYVHVRARRGQATDSHSLAERVRREKISQRMKFLQDLVPGCNKVVGKALMLDEIINYVQSLQQQVEFLSMKLATVNPQLDFSNLSTLLHKDMYQSCGPSVNSVFPLESAGAAFPFCEQADLFQSFGSGAMEDQCSLSLLDTALPHTTNQTFAFQKQQRDFWEDGLPNTLPIVSEQSQENGVSAPDFDGQLQADQTKIEF

SEQ ID NO: 106188 - protein, 128 aa, Setaria italica
  Transcript Sequence Number=SeqID_40214
  Subcellular localization annotation: CTP_CleavageSite=77; ConfidenceScore=5.79e-01
MALNNLLNLPPSKGALKPSLPPLPTRPSLPAPPRRPRLRPSLTFLRSEPRRVVHSSASSSPPSDAAPSPPSSREEAVAQARSCLATALQRPLNNSVPLKKLKRQRQPRLRAEIPVVDDSPGSLARLAL

SEQ ID NO: 106189 - protein, 68 aa, Setaria italica
  Transcript Sequence Number=SeqID_40215
IDQIIHSISFRESKDNIHRPIIQLQQIFQIYRVEKRNLPYANVNSKENIIVQVPLLNSSFSYILVIVK

SEQ ID NO: 106190 - protein, 192 aa, Setaria italica
  Transcript Sequence Number=SeqID_40216
RFGGEWHLLVQNTDLVSGSPDGHGYFNAQRGPYAAASLERSGSFREGGDGYAIFPASSSSRSAAVDSLSLLQSLAVDLRPVTADHKTSRFDLKKSISSIFGTTTEDSPSIPSLGRNLSNSIEEIRRIRSNLNDISNKARERSRAFGGAAMKIDKLCPNIVRKRSRGDGSSNERVLSSGGVIPKNVPQSHINA

SEQ ID NO: 106191 - protein, 123 aa, Setaria italica
  Transcript Sequence Number=SeqID_40217
NYLGRKDARARPPPSRAPLSPLGTAAAPCSEAARRLRRQDLPLPLAEAEVLIILHLVVGSLLSGKSPPTRPSWLRGSRSHRTRRCGQLPRVPALPRRCRRPPSSSSPGRQDRRSSRSAAAPPP

SEQ ID NO: 106192 - protein, 136 aa, Setaria italica
  Transcript Sequence Number=SeqID_40218
SSAWIPPARLDSVERTSAARTPESRREAQIRHRQRKNQRLEKESAVAGATANNEDKQPRGDAKLPTVSQTNRKTKDLRLNSPAELNAQPPPGTKPRKRHLTLSSSKQSSTTDESPEKKADAAKSPSEIHMGTSKQP

SEQ ID NO: 106193 - protein, 82 aa, Setaria italica
  Transcript Sequence Number=SeqID_40219
MATSGKAMASGLLLCLLLVHSGMVVLGSDDCWVNNNADYPICFHQPKCLGHCQDKGKVDGRCNSNFPNLVPICECLLPNCNH

SEQ ID NO: 106194 - protein, 85 aa, Setaria italica
  Transcript Sequence Number=SeqID_40220
CYAKSMNFVKGIRILFVFLFLCSCTIYILPPCGYCSGQAPFITSYRAKLELGFSFLCLPLVVPFFFSTACQILCSTPPYKAKRSA

SEQ ID NO: 106195 - protein, 60 aa, Setaria italica
  Transcript Sequence Number=SeqID_40221
QIKLTIQLTNTYAYVYRVKSSPAPLNSGRAISTIHTNVHTRSVTCAHQLEIYIGVASIYG

SEQ ID NO: 106196 - protein, 117 aa, Setaria italica
  Transcript Sequence Number=SeqID_40222
  Subcellular localization annotation: CTP_CleavageSite=41; ConfidenceScore=5.85e-01
TSFTLPSCTTTILTSLTDSGSTSTPSIGTTFSISVGFTTPMSSTVATMFSISKGFSTPKSSTASLALTSPSTSCSFQGLPLTTLSLLAGSTSFTLPSCTITILGSLAGSGLISTPST

SEQ ID NO: 106197 - protein, 99 aa, Setaria italica
  Transcript Sequence Number=SeqID_40223
MAVNWELRGCCDRDQRIFIAAVGVSTVVILLLWRTFLLTPFKLITVFLHETSHALACKLTCGDVEGMQVHANEGGVTQTRGGIYWIILPAGYLGSSFWG

SEQ ID NO: 106198 - protein, 61 aa, Setaria italica
  Transcript Sequence Number=SeqID_40224
IADLGSSFWGMIFILASTNLLTTRIAAGCFILALVIVLFVADNWFLRWLCIGMNSHDFISV

SEQ ID NO: 106199 - protein, 188 aa, Setaria italica
  Transcript Sequence Number=SeqID_40225
FLCAFVQKIFQFHWLLQVEGMQVHANEGGVTQTRGGIYWIILPAGYLGSSFWGMIFILASTNLLTTRIAAGCFILALVIVLFVADNWFLRWLCIGFVVFIAVVWVIQEFTSFHILKYVILFIGVMNSLFSVYDIYDDLISRRVHSSDAEKFAEICPCPCNGFAWGVIWGFISFIFLCASIYLGLVILS

SEQ ID NO: 106200 - protein, 111 aa, Setaria italica
  Transcript Sequence Number=SeqID_40226
GRVHASRVLPWALLPPPLPYPGPERALFLDLNPKSTSPVPLRGGAPGPNPHCTEDISLGHLPWHLHTSRVCPSTLGDSLSSIAGLHLPAAERLSPGTVAISYVSFVGAQQM

SEQ ID NO: 106201 - protein, 89 aa, Setaria italica
  Transcript Sequence Number=SeqID_40227
  Gene Ontology: Mol. function=RNA-directed DNA polymerase activity; Biological process=RNA-dependent DNA replication
  Homolog annotation: Hit_ID=Q8H044; Match level="QueryCoverage=89%, HitCoverage=7%, E-value=7e-16, Identity=52%"; Hit description =Putative reverse transcriptase
MAAACSRCLQAVLLWAALSPWTLALEAAAAVPAKLKAAPAPVVAGPVSKVEDARMFQIYYGQSFKVIKNSGDGKSYLLMQCACAEHVQD

SEQ ID NO: 106202 - protein, 102 aa, Setaria italica
  misc_feature (12)..(12): Xaa can be any naturally occurring amino acid
  misc_feature (16)..(16): Xaa can be any naturally occurring amino acid
  misc_feature (18)..(18): Xaa can be any naturally occurring amino acid
  Transcript Sequence Number=SeqID_40228
  Gene Ontology: Mol. function=zinc ion binding
LNLSLLSKRYNXLCRXFXIAAARAATSAESFTFMENQSNILMDQVEQVIQTRPPDIVDLIGANCDRTQSSVDNIVAEGIHGHTNFLNGSADGRCSSIVFFPI

SEQ ID NO: 106203 - protein, 59 aa, Setaria italica
  Transcript Sequence Number=SeqID_40229
  Gene Ontology: Mol. function=zinc ion binding
SPCTISIDLYFGANCDRTQSSVDNIVAEGIHGHTNFLNGSADGSLTFPFTLGAGALDYR

SEQ ID NO: 106204 - protein, 337 aa, Setaria italica
  Transcript Sequence Number=SeqID_40230
  Gene Ontology: Mol. function=zinc ion binding; Cellular component =nucleus; Biological process=regulation of transcription, DNA -dependent
  Homolog annotation: Hit_ID=Q7XTS2; Match level="QueryCoverage=82%, HitCoverage=29%, E-value=7e-58, Identity=40%"; Hit description =OSJNBa0008M17.13 protein
  Pfam annotation: Domain name=SWIM; Domain location=152-199; Score =34.7; E_value=3.7e-07; Accession=PF04434.9; Description=SWIM zinc finger
MLFDCEDEDEFLTAWKEMLEKYDLEDNQWLADLYSIKEKWALPYGRDAFYADMKSVQQKESLTSELKKHLCLEYDLLNFFEQFERLLCDRRSAELEADVNANQSTKKPPMRMLRQAANVYTPAAFKMFEREFELYMDCMLYNCGEMGTIFEYRISVEDNPKDHFVKFDSHNSMMNCTCKTFEFIGIPCRHMLKVLDTRNIKDLPVQYIVKRWTKDAKSGSSNGGCAFSFEPESAQTKRYNLLCRIFSIAAARAATSAESFTFMENQSNILMDQVEQVIQTRPPDIVDLIGANCDRTQSSVDNIVAEGIHGHTNFLNGSADGSLTFPFTLGAGALDYR

SEQ ID NO: 106205 - protein, 140 aa, Setaria italica
  Transcript Sequence Number=SeqID_40231
  Gene Ontology: Mol. function=zinc ion binding; Cellular component =nucleus; Biological process=regulation of transcription, DNA -dependent
  Homolog annotation: Hit_ID=Q7XTS2; Match level="QueryCoverage=98%, HitCoverage=14%, E-value=2e-39, Identity=53%"; Hit description =OSJNBa0008M17.13 protein
  Pfam annotation: Domain name=MULE; Domain location=14-109; Score =111.2; E_value=3.4e-30; Accession=PF10551.1; Description=MULE transposase domain
DSKSTVDFVHFGDVVCFDSGYALQGYGRPLALFTGLNHHKQTVIFGAALLYDESNEAFRWLLDTFKMAMNGNPKTLLTDRSAAISEAVAATLPATAHRYCVWQIYQNALQQLSQAFHGSKTLECNFKRCLFDCEDEDEVF

SEQ ID NO: 106206 - protein, 241 aa, Setaria italica
  Transcript Sequence Number=SeqID_40232
  Pfam annotation: Domain name=PAE; Domain location=1-240; Score=322.8; E_value=7.1e-94; Accession=PF03283.5; Description=Pectinacetylesterase
GSGAGSRSWLIHLEGGGWCDTVRSCAGRTLTDFGSSKFMQRQINFTGILSNDPVLNPDFYSWNRVFVRYCDGASFAGDSQHEDGNGTLFFRGRRIWEAVLDELMQKGLAHSKQALLTGCSAGGLATLLHCNDFRARFPQEVSVKCLPDAGFFLDAKVLSGQRHMRSVYNGVVHLQNVTKVLPKDCLLANKDPTECFFPAEIIKSISTPTFIVNSAYDTWQVQNVVATDSSSPDESWRRCRA

SEQ ID NO: 106207 - protein, 205 aa, Setaria italica
  Transcript Sequence Number=SeqID_40233
  Homolog annotation: Hit_ID=B3V945; Match level="QueryCoverage=91%, HitCoverage=45%, E-value=6e-39, Identity=41%"; Hit description=PAE
  Pfam annotation: Domain name=PAE; Domain location=1-185; Score=-7.1; E_value=2.2e-15; Accession=PF03283.5; Description=Pectinacetylesteras e
RRDPHHLCFVLRRAYGKDLSGQRHMRSVYNGVVHLQNVTKVLPKDCLLANKDPTECFFPAEIIKSISTPTFIVNSAYDTWQVQNVVATDSSSPDESWRRCRADIRSCNSSQIQVLNEFRKEMVDGLTAVEDNTNCSWFIDSCFTHCQAWFDNSPWNHPVSPRLGSKTLVEAVGDWYFGRSQNQVVREIGCEYPCNPTCNSDKFPT

SEQ ID NO: 106208 - protein, 82 aa, Setaria italica
  Transcript Sequence Number=SeqID_40234
TAWCNTAVGQQQCSTSLGAIKQVPKFSPGTGNLQGKGVLILAQEAYWMLPSQIDLRFPFSFAGFKRSFEQWGHGLMWKPLGL

SEQ ID NO: 106209 - protein, 126 aa, Setaria italica
  Transcript Sequence Number=SeqID_40235
MVGGSSCGSAAKLALNKYLQQTEEEGLVISNEENNTRPEYGDFLFHNVVQGAVSCGSNEAIIGAATKVDMLPSPEDILVISDCEVETGLNNRTLRQEPDVLTHAATIQTYVGHSEGPTEEMQKCTV

SEQ ID NO: 106210 - protein, 90 aa, Setaria italica
  Transcript Sequence Number=SeqID_40236
MSMFQGPKYEFVKLDQQCLIHDSSSKSYHHYNFTMKKKSSIYLREKREKRSWVYQLFFAEVKPTKEGKQFICCPLQRDENGINLIQLISH

SEQ ID NO: 106211 - protein, 92 aa, Setaria italica
  Transcript Sequence Number=SeqID_40237
NLKYKSLVESIQVITVDLSELVICFVLCMSMLLQCFCAPKTDIVLLFLLLCSIFFCKLFFRTINQGPCNCTILFYKIKSFMYKHYRSRMYER

SEQ ID NO: 106212 - protein, 73 aa, Setaria italica
  Transcript Sequence Number=SeqID_40238
PSIQPVNNAMVQEKENDVNIKSQVRIRGLIILLHTFSKTYNMLPILVIGWHKTDYILILVFIQDLELFYSKRK

SEQ ID NO: 106213 - protein, 324 aa, Setaria italica
  Transcript Sequence Number=SeqID_40239
  Gene Ontology: Mol. function=heat shock protein binding; Biological process=protein folding
  Homolog annotation: Hit_ID=B6TKS5; Match level="QueryCoverage=100%, HitCoverage=100%, E-value=1e-152, Identity=85%"; Hit description =DnaJ subfamily B member 13
  Pfam annotation: Domain name=DnaJ; Domain location=4-65; Score=140.8; E_value=4.3e-39; Accession=PF00226.23; Description=DnaJ domain
  Pfam annotation: Domain name=DnaJ_C; Domain location=201-323; Score =76.0; E_value=1.3e-19; Accession=PF01556.10; Description=DnaJ C terminal region
  Pfam module annotation: Pfam domain module=DnaJ::DnaJ_C; Domain location=4-65::201-323
MGVDYYKVLGVGRGATDDELKKAYRRLAMKYHPDKNPSPQADSLFKQVSEAYDVLSDPQKRAIYDQYGEDGLKAGAPPPSASTHGAGAHGFRFNPRSAEEIFSEIFGGAFPGAGPRTPGGSVPHGFPGFGSAAGPGETSSAGLQRKAPPIERQLACSLEDLYKGATKKMKISRDVLDAAGKPTNVEEILTIDIKPGWKKGTKITFPEKGNEMRNVVPSDLVFIIEERAHPKFKRDGNDLIYTHKISLVEALTGCTVQLTTLDGRNLTIPVKSVVSPTYEEVVQGEGMPITREPSKKGNLRIKFQIKFPTNLTADQKSGIQQLLS

SEQ ID NO: 106214 - protein, 135 aa, Setaria italica
  misc_feature (12)..(12): Xaa can be any naturally occurring amino acid
  Transcript Sequence Number=SeqID_40240
  Gene Ontology: Mol. function=RNA binding; Cellular component =intracellular
  Homolog annotation: Hit_ID=B9T014; Match level="QueryCoverage=75%, HitCoverage=16%, E-value=7e-26, Identity=55%"; Hit description =Programmed cell death protein, putative
RAEAEEDFERRXKKGKRKRKAGESSGFGADDDLGTLFGGATTGKLPRFANRITLKNVSPNMKLWGVVIEVNQKDIVLSLPGGMRGFVRSEDVCDIALHENRKDSENSICAEVVHVGQLVPCIVLRVDDDRKEGKV

SEQ ID NO: 106215 - protein, 163 aa, Setaria italica
  misc_feature (105)..(105): Xaa can be any naturally occurring amino acid
  Transcript Sequence Number=SeqID_40241
  Gene Ontology: Mol. function=ATP-dependent helicase activity; Biological process=DNA recombination
  Homolog annotation: Hit_ID=UPI00017390E4; Match level="QueryCoverage =100%, HitCoverage=16%, E-value=5e-60, Identity=71%"; Hit description= ATP binding / ATP-dependent DNA helicase/ ATP-dependent helicase/ helicase/ nucleic acid binding
  Pfam annotation: Domain name=Helicase_C; Domain location=1-57; Score =28.1; E_value=3.5e-05; Accession=PF00271.23; Description=Helicase conserved C-terminal domain
DEALSSFRSGETRILLSTQVIEIGVDVPDASMMVVMNAERFGIAQLHQLRGRVGRGKRKSRCIFLASTPSTLPRLKVLEKSADGFYLANADLLLRGPGNLLGKKXQSGHLPEFPIARLEIDGGILQEAHHAALKVLAASNDLTLYPRLKVELSMRQPLCILGD

SEQ ID NO: 106216 - protein, 120 aa, Setaria italica
  Transcript Sequence Number=SeqID_40242
IGPGPFLFLLPSFFFPFSFFLPCPSAILQFLRFIWRHLAWPYKCLGITYAIGRVACHAFPYHFKNHGIYREIGAKIQVHSKKVFLQGQIVTQTFSRKVCKHISKSRICTTTYFTQRTVAL

SEQ ID NO: 106217 - protein, 93 aa, Setaria italica
  Transcript Sequence Number=SeqID_40243
NAESHRAKAIFLHNYTYCRIHSIATIHYLAPGLTNMVCLEATGICALGEQIRWMTLHMEATDPMFFLPFTGSAIDLAIPHLPQIGNDPLILQE

SEQ ID NO: 106218 - protein, 118 aa, Setaria italica
  Transcript Sequence Number=SeqID_40244
  Homolog annotation: Hit_ID=A5JTT1; Match level="QueryCoverage=100%, HitCoverage=38%, E-value=1e-18, Identity=48%"; Hit description =Pathogen-inducible transcription factor ERF3
AKNGARVWLGTYDTAEDAALAYDRAAYRMRGSRALLNFPLRIGSEIAAATAAAAAGDKRQSPEPATSSDSSFSTSSSSSCSTSGSPKRRKRGEAAAATMAMALVPPPSQLNRPAQPWF

SEQ ID NO: 106219 - protein, 224 aa, Setaria italica
  Transcript Sequence Number=SeqID_40245
  Gene Ontology: Mol. function=transcription factor activity; Cellular component=nucleus; Biological process=regulation of transcription, DNA-dependent
  Homolog annotation: Hit_ID=A5JTT1; Match level="QueryCoverage=95%, HitCoverage=77%, E-value=4e-58, Identity=58%"; Hit description =Pathogen-inducible transcription factor ERF3
  Pfam annotation: Domain name=AP2; Domain location=136-188; Score =83.9; E_value=5.8e-22; Accession=PF00847.12; Description=AP2 domain
MLLNTIREHLLEEPSEALVLDTIRQHLLEEPPACRRSESFGSLVADQWSGSLPFRTDDADDMVVFEALRDAFATGWLPDGSFAQVKPEPLPSPDSSYSYDGFGLLEPPEPMTPSASSDAATPRREGEAAVGVARGKHYRGVRQRPWGKFAAEIRDPAKNGARVWLGTYDTAEDAALAYDRAAYRMRGSRALLNFPLRIGSEIAAAAAAAATATAVGEKRPSPEP

SEQ ID NO: 106220 - protein, 227 aa, Setaria italica
  Transcript Sequence Number=SeqID_40246
  Homolog annotation: Hit_ID=B6TX89; Match level="QueryCoverage=99%, HitCoverage=48%, E-value=6e-96, Identity=78%"; Hit description=F-box domain containing protein
  Pfam annotation: Domain name=FBD; Domain location=146-195; Score =13.9; E_value=0.0035; Accession=PF08387.2; Description=FBD
VVAITDCTWTEQSSLALFEMPELRTLRYSGAMATRHIIDGEVSLDEVLLAIEKPQVKPREATLRELIALVGNVRSLLLSPWCIEQFEEWWKVRLDRVRQLSCIIERREEGALSIAPLLSNCPNVEELRVSVVPSQGKRRRCSDGECHGVLCSKGVAVKHLKGVRMKYIDESKSGLELVKLLLKNAPQLETMNIVPSMDGLEQAKFRRRVLKFRKSSRNASIQFCTAG

SEQ ID NO: 106221 - protein, 76 aa, Setaria italica
  Transcript Sequence Number=SeqID_40247
  Gene Ontology: Mol. function=oxidoreductase activity, acting on the CH-CH group of donors; Cellular component=integral to membrane; Biological process=steroid metabolic process
  Homolog annotation: Hit_ID=B6TIF9; Match level="QueryCoverage=77%, HitCoverage=22%, E-value=5e-22, Identity=93%"; Hit description =Steroid reductase DET2
MADQAAAAAAGDAVFARCLLALYLISPLTVLALRYVSAPYGKLSRPGWGPALRAPLAWFLMESPTLWLPPLVLLRS

SEQ ID NO: 106222 - protein, 56 aa, Setaria italica
  Transcript Sequence Number=SeqID_40248
LLSTINFIGTLFHCSVEKLPGVSILWQHCPKSDLASIDYSTTLHPKQRGLAYPKSE

SEQ ID NO: 106223 - protein, 125 aa, Setaria italica
  Transcript Sequence Number=SeqID_40249
  Homolog annotation: Hit_ID=B9SCB4; Match level="QueryCoverage=90%, HitCoverage=12%, E-value=3e-09, Identity=33%"; Hit description =Myosin-9, putative
EGREGELQFVQMKYADEACKLTVVQRQLKELTEENKQLSDANCESESWASALISELEQFRAAKQNGASIMASSEMNLLDDFAEIEKMEMASGDLKGNVPRASLKKADMAPVTPEKSGNDPAVNGT

SEQ ID NO: 106224 - protein, 80 aa, Setaria italica
  Transcript Sequence Number=SeqID_40250
  Gene Ontology: Cellular component=integral to membrane
  Homolog annotation: Hit_ID=B6TCN7; Match level="QueryCoverage=61%, HitCoverage=33%, E-value=6e-18, Identity=89%"; Hit description =Threonine endopeptidase
ALWLTSVVVGAINAVPLLPKILELVGLGYTGWFVYRYLLFKESQEDEATAESATSGQSTDDNKGKERPKFMRDFKPNYSF

SEQ ID NO: 106225 - protein, 90 aa, Setaria italica
  Transcript Sequence Number=SeqID_40251
  Homolog annotation: Hit_ID=B6TCN7; Match level="QueryCoverage=73%, HitCoverage=43%, E-value=5e-25, Identity=90%"; Hit description =Threonine endopeptidase
IENCVTGCPERWRVHPPRLPAVPRGSALLPRRTACQLRLQDAPRLSLLRVKAASEDTSASGDELIEDLKAKWDAVEDKPTVLLALRSSKS

SEQ ID NO: 106226 - protein, 107 aa, Setaria italica
  Transcript Sequence Number=SeqID_40252
  Gene Ontology: Mol. function=catalytic activity; Cellular component =glyoxysome; Biological process=metabolic process
  Homolog annotation: Hit_ID=Q8W2F8; Match level="QueryCoverage=97%, HitCoverage=58%, E-value=2e-41, Identity=77%"; Hit description=3 -ketoacyl-CoA thiolase (Fragment)
  Pfam annotation: Domain name=Thiolase_N; Domain location=1-107; Score= -104.5; E_value=7.3e-06; Accession=PF00108.15; Description=Thiolase, N-terminal domain
ADVAAAIKAGFYDIGIGAGLESMSINSIGWEGQVNPRISAFQKAQDCLLPMGITSENVAHRYGVTRQEQDQAAAESHRRAAAATASGKFKDEIVPVPTKIVDPKLER

SEQ ID NO: 106227 - protein, 89 aa, Setaria italica
  Transcript Sequence Number=SeqID_40253
  Gene Ontology: Mol. function=acyltransferase activity; Cellular component=glyoxysome; Biological process=fatty acid biosynthetic process
  Homolog annotation: Hit_ID=Q306J8; Match level="QueryCoverage=100%, HitCoverage=51%, E-value=2e-33, Identity=71%"; Hit description =Acetoacetyl-CoA thiolase (Fragment)
  Pfam annotation: Domain name=Thiolase_C; Domain location=1-65; Score =28.7; E_value=6.2e-09; Accession=PF02803.10; Description=Thiolase, C- terminal domain
QAGIGPIQVNVNGGAIAMGHPLGATGARCVATLLNEMKRRGRDCRFGVVTMCIGSGMGAAAVFERGDTVDELSNVRDIQSHNFLSRDAK

SEQ ID NO: 106228 - protein, 336 aa, Setaria italica
  misc_feature (141)..(141): Xaa can be any naturally occurring amino acid
  Transcript Sequence Number=SeqID_40254
  Gene Ontology: Cellular component=chloroplast
  Homolog annotation: Hit_ID=Q53M04; Match level="QueryCoverage=79%, HitCoverage=100%, E-value=3e-85, Identity=61%"; Hit description=GUN4- like family protein, expressed
  Pfam annotation: Domain name=GUN4; Domain location=154-297; Score =218.1; E_value=2.2e-62; Accession=PF05419.4; Description=GUN4-like
MRCLRIEIKWITAPRPNKSHKYTQGNTLSILHTTRPPARLSLNPIHSFIIVSLPLISFPSILSSVLLPSMANASLQSLLLPQHHSFVNTGGSHESSPSALLKLSTNNSGSISFRLYSNTSPSVTTTSTANSSAPTPVTPAXAADSPPTPSIDLLGRQLAAGDYRQADETTRALLIELAGESARRRGYVFFSEVQFISAEDLQAIDKLWKEHSNGKFGYSVQRRLWEKSRRDFTRFFIKVGWMKKLDTEIEQYNYRAFPDEFMWEIKDDTPEGHLPLTNALRGTQLLGNILTHPAFEEESQEDEATAESATSGQSTDDNKGKERPKFMRDFKPNYSF

SEQ ID NO: 106229 - protein, 150 aa, Setaria italica
  misc_feature (19)..(19): Xaa can be any naturally occurring amino acid
  misc_feature (105)..(105): Xaa can be any naturally occurring amino acid
  Transcript Sequence Number=SeqID_40255
  Gene Ontology: Cellular component=integral to membrane
  Homolog annotation: Hit_ID=B6TCN7; Match level="QueryCoverage=100%, HitCoverage=100%, E-value=9e-72, Identity=94%"; Hit description =Threonine endopeptidase
  Subcellular localization annotation: CTP_CleavageSite=48; ConfidenceScore=5.24e-01
MAATAYSVALLGGARLPAXPRGSALLPRRTACQLRLQDAPRLSLLRVKAASEDTSASGDELIEDLKAKWDAVEDKPTVLLYGGGAVVALWLTSVVVGAINAVPLXLPKILELVGLGYTGWFVYRYLLFKESRKELATDIETLKKKIAGTE

SEQ ID NO: 106230 - protein, 116 aa, Setaria italica
  misc_feature (75)..(75): Xaa can be any naturally occurring amino acid
  Transcript Sequence Number=SeqID_40256
  Gene Ontology: Mol. function=potassium ion transmembrane transporter activity; Cellular component=membrane; Biological process=potassium ion transport
  Homolog annotation: Hit_ID=Q6YWQ4; Match level="QueryCoverage=89%, HitCoverage=13%, E-value=5e-43, Identity=77%"; Hit description =Potassium transporter 25
AKESEVLCSVGLSPYEEIDPQNIAPKRKKARFMIPKSAQVDSEVRRELQELTDARETGMSFIMGHSYMKAKSGSXFVKRIAINFIYEFLTRNSRGPAYAANVPHVSTLEVGMVCQV

SEQ ID NO: 106231 - protein, 117 aa, Setaria italica
  misc_feature (83)..(83): Xaa can be any naturally occurring amino acid
  Transcript Sequence Number=SeqID_40257
YGVLSLVFWTLTLVTLLKYVLVVLRADDDGEGGTFALYSLICRQVGAGLLPGGDGDDDLKEQRNGAAPPPASSVRKALQQRRXLQWLLLLFALLGTSMVIGDGVLTPAVSGRRSHLP

SEQ ID NO: 106232 - protein, 262 aa, Setaria italica
  misc_feature (33)..(33): Xaa can be any naturally occurring amino acid
  Transcript Sequence Number=SeqID_40258
  Gene Ontology: Mol. function=potassium ion transmembrane transporter activity; Cellular component=membrane; Biological process=potassium ion transport
  Homolog annotation: Hit_ID=Q6YWQ4; Match level="QueryCoverage=93%, HitCoverage=31%, E-value=2e-88, Identity=67%"; Hit description =Potassium transporter 25
  Pfam annotation: Domain name=K_trans; Domain location=1-262; Score= -358.4; E_value=4.3e-08; Accession=PF02705.8; Description=K+ potassium transporter
LSLVFFVILRSLSIWVIVRVRGIGLIHTELMSXGIPAIFSHFVTNLPAFHQVLVFLCIKSVSVPHVQPEERFLVGRIGLKQYRLYRVVVRYGYRDVQQDSLEFEKALVSSIAEFIRSGDSDQNGYLDGSDSPYERLSVISKGLPFQEEDGEPDGSPESSTRKETNLKLVLSKSRRVRFVLPENVQINSEVHSELQELTEARETGMSFIMGRSYMKAKSGSSLIKRIAINFIYEFLTRNSRGPAYAANVPHVSTLEVGMVCQV

SEQ ID NO: 106233 - protein, 146 aa, Setaria italica
  Transcript Sequence Number=SeqID_40259
  Gene Ontology: Mol. function=potassium ion transmembrane transporter activity; Cellular component=membrane; Biological process=potassium ion transport
  Homolog annotation: Hit_ID=Q5Z6K9; Match level="QueryCoverage=64%, HitCoverage=12%, E-value=9e-48, Identity=94%"; Hit description =Potassium transporter 24
PFIFLMIMCVWHYGTAKKYEFDVDNKVSISWLLNLGPSLGIVRVRGIGLIHTELMSGIPAIFSHFVTNLPAFHQVLVFLCIKSVSVPHVQPEERFWSESPERMNSAMLLTRAFSNSRLSCCTSRYPYRTTTLYSLYCFRPMRPTKN

SEQ ID NO: 106234 - protein, 95 aa, Setaria italica
  Transcript Sequence Number=SeqID_40260
VYHFNHGICFVSLFFLLLCYSKTNLKNIEIARVCLYHCDGDQWQLSVSSQKLDSDSQIQLQFIQILILIQYRCTINWSPIQVHKILSFLHCSLSP

SEQ ID NO: 106235 - protein, 774 aa, Setaria italica
  Transcript Sequence Number=SeqID_40261
  Gene Ontology: Mol. function=potassium ion transmembrane transporter activity; Cellular component=membrane; Biological process=potassium ion transport
  Homolog annotation: Hit_ID=Q6YWQ4; Match level="QueryCoverage=100%, HitCoverage=100%, E-value=0.0, Identity=83%"; Hit description =Potassium transporter 25
  Pfam annotation: Domain name=K_trans; Domain location=27-774; Score =1470.6; E_value=0; Accession=PF02705.8; Description=K+ potassium transporter
MDLEAAGGAAAAHGKRWRGESWRATLLLAYQSLGVVYGDVATSPLYVYKSAFAGNDIQHSAGNEEIYGVLSFVFWTLTLITLLKYVLIVLRADDGGEGGTFALYSLICRHVRAGLLPGGGTRDELMEEEKATGRRGERPVSRIRAVLEKYRVLQRLLLLFALLGTCMVIGDGVLTPAVSVFSAVSGLELSMEKEQHKYIELPVACAILICLFALQHYGTHKVGFLFAPIVCIWLLCISAIGLYNIIHWDHHVYRALSPYYMYQFLKKTQTGGWMSLGGILLCVTGSEAMYADLGHFSQSSIQIAFISVVYPALVLAYMGQAAYISQHHSFEKNHHIGFYVSVPESLRWPVLVIAILAAVVGSQAIITGTFSIIKQCSSLSCFPGVKIVHTSSTVHGQIYIPEINWMLMILCLAVTIGFRDTKHLANAQGLAVITVMLVTTCLMSLVIVLCWNKSIFIALCFLLFFGTIEVLYFSASLVKFHEGAWVPITLSFIFMVVMCVWHYGTIKKYEFDVQNKVSVNWLLNLGPSLGIVRVRGIGLIHTELMSGIPAIFSHFVTNLPAFHQVLVFLCVKSVPVPHVQPEERFLVGRIGPKEYRLYRVIVKYGYRDVQKDDLEFEKELVSNIAEFIRSSGEYDKNGFVEDTDMPSEKLSPVSTGIPLWEEDGDLDASASPHKEIDPQNIAPKRKKARFMIPKSAQVDSEVRRELQELMDAREAGMSFILGHSYMKAKSGSSFIKRIMINFFYEFLRKNSRGPAYAANIPHASTLEVGMVYQV

SEQ ID NO: 106236 - protein, 184 aa, Setaria italica
  Transcript Sequence Number=SeqID_40262
  Gene Ontology: Mol. function=DNA binding; Biological process =regulation of transcription, DNA-dependent
  Homolog annotation: Hit_ID=B9RVD7; Match level="QueryCoverage=97%, HitCoverage=22%, E-value=5e-41, Identity=50%"; Hit description=WD -repeat protein, putative
  Pfam annotation: Domain name=WD40; Domain location=101-139; Score =4.7; E_value=11; Accession=PF00400.24; Description=WD domain, G-beta repeat
  Pfam annotation: Domain name=WD40; Domain location=143-181; Score =17.1; E_value=0.076; Accession=PF00400.24; Description=WD domain, G -beta repeat
  Pfam annotation: Domain name=WD40; Domain location=58-97; Score=27.2; E_value=6.9e-05; Accession=PF00400.24; Description=WD domain, G-beta repeat
  Pfam module annotation: Pfam domain module=WD40::WD40::WD40; Domain location=101-139::143-181::58-97
MKGRAVKLREAHKSGSPALCSAVWGPGGQHVVTASAADTAVLIHDAAALLAGGRSSGSAPLSTVRLHKDGVTALAVAPGPGGSLASGSIDHSVKFYTFPEGAFQSNVARFTLPIRSLSFNKKGTLVLVSGDDDGIKLIATIDNTISKVLKGHKGSITGLAFDPRNDYLASVDSFGTVILLGFFC

SEQ ID NO: 106237 - protein, 167 aa, Setaria italica
  Transcript Sequence Number=SeqID_40263
  Gene Ontology: Cellular component=integral to membrane; Biological process=protein insertion into membrane
  Homolog annotation: Hit_ID=B9HAX2; Match level="QueryCoverage=63%, HitCoverage=25%, E-value=4e-16, Identity=41%"; Hit description=Inner membrane protein
ISNMVQKLPSLKEGGAFWFTDLTTPDALYIFPAMASLSFLLRLEFSLHYTKRERSLETDIVRILLVLTFPFAASFPKAICCYFITWSFASLAQMIVLHQPAVKKLLFSKPNNPTCSCSDGPTGPTAEDSAHPVDENEEPLPPEGREASDSSVDQVKDKSDKESGKDS

SEQ ID NO: 106238 - protein, 36 aa, Setaria italica
  Transcript Sequence Number=SeqID_40264
MRVFVRIFYKASKNRFDNDPEFKERAQQGVVRLTGR

SEQ ID NO: 106239 - protein, 42 aa, Setaria italica
  Transcript Sequence Number=SeqID_40265
  Gene Ontology: Mol. function=aminoacyl-tRNA ligase activity; Cellular component=cytoplasm; Biological process=tRNA aminoacylation for protein translation
  Homolog annotation: Hit_ID=B4FMR1; Match level="QueryCoverage=100%, HitCoverage=6%, E-value=5e-16, Identity=85%"; Hit description =Arginyl-tRNA synthetase
KAEWIIYVTDVGQQQHFEMFFKAARMAGWLPDPNEKKFPKTS

SEQ ID NO: 106240 - protein, 68 aa, Setaria italica
  Transcript Sequence Number=SeqID_40266
QFIKPRVQFLYIFRCYRCQFEWVYNYTSAIMLELHSSWSELLDRVGQDVHPFHAWKLALSVWMYLVGS

SEQ ID NO: 106241 - protein, 78 aa, Setaria italica
  Transcript Sequence Number=SeqID_40267
  Gene Ontology: Mol. function=methionine adenosyltransferase activity; Cellular component=cytoplasm; Biological process=one-carbon compound metabolic process
  Homolog annotation: Hit_ID=P49612; Match level="QueryCoverage=60%, HitCoverage=12%, E-value=1e-21, Identity=97%"; Hit description=S -adenosylmethionine synthetase 1 (Fragment)
  Pfam annotation: Domain name=S-AdoMet_synt_M; Domain location=43-78; Score=-29.6; E_value=0.00093; Accession=PF02772.8; Description=S -adenosylmethionine synthetase, cent
SWCRSHKQPCCRGPQQGKHQARHLRPGRRACQGVHGHFTKRPEEIGAGDQGHMFGYATDETPELMPLSHVLATKLGAR

SEQ ID NO: 106242 - protein, 56 aa, Setaria italica
  Transcript Sequence Number=SeqID_40268
  Gene Ontology: Mol. function=methionine adenosyltransferase activity; Cellular component=cytoplasm; Biological process=one-carbon compound metabolic process
  Homolog annotation: Hit_ID=Q56TU4; Match level="QueryCoverage=94%, HitCoverage=12%, E-value=8e-23, Identity=90%"; Hit description=S -adenosylmethionine synthetase 1
  Pfam annotation: Domain name=S-AdoMet_synt_N; Domain location=5-56; Score=51.0; E_value=4.8e-12; Accession=PF00438.12; Description=S -adenosylmethionine synthetase, N-te
MAELDTFLFTSESVNEGHPDKLCDQISDAVLDACLAEDPDSKVACETCTKTNMVMV

SEQ ID NO: 106243 - protein, 62 aa, Setaria italica
  Transcript Sequence Number=SeqID_40269
  Gene Ontology: Cellular component=cis-Golgi network; Biological process=intracellular protein transport
VLGEQLSRRGESVASLRPILQRILADVHERLAFCARTHIREEIANFRPTDEDLDYSPSKCCV

SEQ ID NO: 106244 - protein, 86 aa, Setaria italica
  Transcript Sequence Number=SeqID_40270
  Gene Ontology: Mol. function=methionine adenosyltransferase activity; Cellular component=cytoplasm; Biological process=one-carbon compound metabolic process
  Homolog annotation: Hit_ID=P49613; Match level="QueryCoverage=100%, HitCoverage=22%, E-value=8e-41, Identity=93%"; Hit description=S -adenosylmethionine synthetase 2
  Pfam annotation: Domain name=S-AdoMet_synt_N; Domain location=1-86; Score=161.0; E_value=3.6e-45; Accession=PF00438.12; Description=S -adenosylmethionine synthetase, N-te
TFLFTSESVNEGHPDKLCDQVSDAVLDACLAEDPDSKVACETCTKTNMVMVFGEITTKANFDYEKIVRDTCRNIGFVSADVGLDAD

SEQ ID NO: 106245 - protein, 132 aa, Setaria italica
  misc_feature (85)..(85): Xaa can be any naturally occurring amino acid
  misc_feature (88)..(88): Xaa can be any naturally occurring amino acid
  Transcript Sequence Number=SeqID_40271
  Gene Ontology: Mol. function=protein transporter activity; Cellular component=cis-Golgi network; Biological process=intracellular protein transport
  Homolog annotation: Hit_ID=Q01E00; Match level="QueryCoverage=95%, HitCoverage=17%, E-value=1e-30, Identity=53%"; Hit description =Putative tethering factor SEC34 (ISS) (Fragment)
FLIKHLLILREQIAPFDIEFSVTHKELDFSHLLDHLRRILRGQVSLFDWSRSTSLARTFSPRVLENQIDARKELEKSLKATCEEXLIXSITKLVVDPMLSFVTKVTAVKVALSSGSQGQKLDSVLAKPLKTQ

SEQ ID NO: 106246 - protein, 40 aa, Setaria italica
  Transcript Sequence Number=SeqID_40272
  Gene Ontology: Cellular component=cis-Golgi network
FLLFRCTYLYDTLRPRLIYEGNIDSLCELVDILKVEVLGE

SEQ ID NO: 106247 - protein, 282 aa, Setaria italica
  misc_feature (143)..(143): Xaa can be any naturally occurring amino acid
  Transcript Sequence Number=SeqID_40273
  Gene Ontology: Mol. function=methionine adenosyltransferase activity; Cellular component=cytoplasm; Biological process=one-carbon compound metabolic process
  Homolog annotation: Hit_ID=P50303; Match level="QueryCoverage=94%, HitCoverage=73%, E-value=1e-137, Identity=89%"; Hit description=S -adenosylmethionine synthetase 3 (Fragment)
  Pfam annotation: Domain name=S-AdoMet_synt_C; Domain location=220 -282; Score=34.6; E_value=3.9e-07; Accession=PF02773.8; Description=S- adenosylmethionine synthetase, C-te
  Pfam annotation: Domain name=S-AdoMet_synt_M; Domain location=96-218; Score=323.5; E_value=4.4e-94; Accession=PF02772.8; Description=S -adenosylmethionine synthetase, cent
  Pfam annotation: Domain name=S-AdoMet_synt_N; Domain location=1-81; Score=131.3; E_value=3.1e-36; Accession=PF00438.12; Description=S -adenosylmethionine synthetase, N-te
  Pfam module annotation: Pfam domain module=S-AdoMet_synt_C::S-AdoMet _synt_M::S-AdoMet_synt_N; Domain location=220-282::96-218::1-81
DLVADAVLDACLAEDPDSKVACETCTKTNMVMVFGEITTKANVDYEKIVRDTCRNIGFVSADVGLDADHCKVLVNIEQQSPDIAQGVHGHFTKRPEEIGAGDQGHMFGYATDETPELMPLSHVLATKLGARLTEVRKNGTCPXLRPDGKTQVTVEYRNEGGAMVPIRVHTVLISTQHDETVTNDEIAADLKEHVIKPVIPEQYLDEKTIFHLNPSGRFVIGGPHGDAGLTGRKIIIDTYGGWGAHGGGAFSGKDPTKVDRSGAYIARQAAKSIVANGLARRA

SEQ ID NO: 106248 - protein, 391 aa, Setaria italica
  Transcript Sequence Number=SeqID_40274
  Gene Ontology: Mol. function=protein transporter activity; Cellular component=cis-Golgi network; Biological process=intracellular protein transport
  Homolog annotation: Hit_ID=A8IXF4; Match level="QueryCoverage=94%, HitCoverage=41%, E-value=3e-69, Identity=41%"; Hit description =Component of oligomeric golgi complex 3
  Pfam annotation: Domain name=Sec34; Domain location=107-266; Score =131.7; E_value=2.4e-36; Accession=PF04136.7; Description=Sec34-like family
MATTPAPASALPKSGAVSKGYNFASTWEQNAPLTEQQKAAIAALSHAVAERPFPANLEKSSGKDGGAAVPEKESALEEAGAMDAVLVNTHQFYKWFAELESAMKSETEEKYRLYENTLEERVNTCDGILKQVDDTLNLFEELQSLHSSVATKTKTLHDACDQLLVEKQRLIEFAEALRSRLNYFDELENVSSSFYSQNMSIGNEQFLPLLKRLDDCISYVENNPQYAESAVYLVKFRQLQSRALGMIRSHVLSILKGASSQVQAAIRGSDSGKNIVTEGIEASLIYVRFKAAASELKPILGEIESRSSRKEYAQILSECHNLFCEQRLYLVRGMVQQRISEFARKEALPSLTRSGCAYLMEACQFEHQLFAHFFPSSAADVSSMAPLMEPL

SEQ ID NO: 106249 - protein, 409 aa, Setaria italica
  Transcript Sequence Number=SeqID_40275
  Gene Ontology: Mol. function=methionine adenosyltransferase activity; Cellular component=cytoplasm; Biological process=one-carbon compound metabolic process
  Homolog annotation: Hit_ID=P23686; Match level="QueryCoverage=96%, HitCoverage=100%, E-value=0.0, Identity=88%"; Hit description=S -adenosylmethionine synthetase 1
  Pfam annotation: Domain name=S-AdoMet_synt_C; Domain location=256 -398; Score=291.2; E_value=2.3e-84; Accession=PF02773.8; Description =S-adenosylmethionine synthetase, C-te
  Pfam annotation: Domain name=S-AdoMet_synt_M; Domain location=132 -254; Score=332.2; E_value=9.9e-97; Accession=PF02772.8; Description =S-adenosylmethionine synthetase, cent
  Pfam annotation: Domain name=S-AdoMet_synt_N; Domain location=18-117; Score=216.6; E_value=6.5e-62; Accession=PF00438.12; Description=S -adenosylmethionine synthetase, N-te
  Pfam module annotation: Pfam domain module=S-AdoMet_synt_C::S-AdoMet _synt_M::S-AdoMet_synt_N; Domain location=256-398::132-254::18-117
MFALWGNSGRSKKMAELDTFLFTSESVNEGHPDKLCDQISDAVLDACLAEDPDSKVACETCTKTNMVMVFGEITTKANVDYEKIVRDTCRGIGFVSNDVGLDADHCKVLVNIEQQSPDIAQGVHGNFTKRPEDIGAGDQGHMFGYATDETPEMMPLSHVLATKLGARLTEVRKNGTCPWLRPDGKTQVTVEYHNDNGAMVPIRVHTVLISTQHDETVTNDEIAADLKEHVIKPVIPEQYLDEKTIFHLNPSGRFVIGGPHGDAGLTGRKIIIDTYGGWGAHGGGAFSGKDPTKVDRSGAYIARQAAKSIVANGLARRCIVQVSYAIGVPEPLSVFVDTYGTGKVPDKEILKIVLENFDFRPGMIIIHLDLKRGGNGRYLKTAAYGHFGRDDPDFTWEVVKPLKWETPSA

SEQ ID NO: 106250 - protein, 519 aa, Setaria italica
  Transcript Sequence Number=SeqID_40276
  Gene Ontology: Mol. function=protein transporter activity; Cellular component=cis-Golgi network; Biological process=intracellular protein transport
  Homolog annotation: Hit_ID=Q01E00; Match level="QueryCoverage=96%, HitCoverage=68%, E-value=1e-118, Identity=44%"; Hit description =Putative tethering factor SEC34 (ISS) (Fragment)
VQAAIRGSDSGKNIVTEGIEASLIYVRFKAAASELKPILGEIESRSSRKEYAQILSECHNLFCEQRLYLVRGMVQQRISEFARKEALPSLTRSGCAYLMEACQFEHQLFAHFFPSSAADVSSMAPLMEPLCTYLYDTLRPRLIYEGNIDSLCELVDILKVEVLGEQLSRRGESVASLRPILQRILADVHERLAFCARTHIREEIANFRPTDEDLDYPGKLERSVDTSSSATVGDNSDVYLTWYRPLEKTVSCLSKLYRCLEPSVFTGLAQDAVEVCSTSLQSASKVISKKATPMDGQLFLIKHLLILREQIAPFDIEFSVTHKELDFSHLLDHLRRILRGQVSLFDWSRSTSLARTFSPRVLENQIDARKELEKSLKATCEEFIMSITKLVVDPMLSFVTKVTAVKVALSSGSQGQKLDSVLAKPLKTQAFASPDKVAELVQKVATAIQEDLPKVMTKMRLYLQNPSTRMILFKPINTNIVEAHIQLQSLLKSEYSTEEMQSISMLPIPDLQSQLDSLL

SEQ ID NO: 106251 - protein, 268 aa, Setaria italica
  misc_feature (31)..(31): Xaa can be any naturally occurring amino acid
  misc_feature (37)..(37): Xaa can be any naturally occurring amino acid
  misc_feature (88)..(88): Xaa can be any naturally occurring amino acid
  misc_feature (110)..(110): Xaa can be any naturally occurring amino acid
  misc_feature (130)..(130): Xaa can be any naturally occurring amino acid
  misc_feature (228)..(228): Xaa can be any naturally occurring amino acid
  Transcript Sequence Number=SeqID_40277
  Gene Ontology: Mol. function=methionine adenosyltransferase activity; Cellular component=cytoplasm; Biological process=one-carbon compound metabolic process
  Homolog annotation: Hit_ID=P50299; Match level="QueryCoverage=98%, HitCoverage=65%, E-value=1e-135, Identity=90%"; Hit description=S -adenosylmethionine synthetase 1
  Pfam annotation: Domain name=S-AdoMet_synt_M; Domain location=122 -245; Score=322.0; E_value=1.2e-93; Accession=PF02772.8; Description =S-adenosylmethionine synthetase, cent
  Pfam annotation: Domain name=S-AdoMet_synt_N; Domain location=5-107; Score=194.7; E_value=2.6e-55; Accession=PF00438.12; Description=S -adenosylmethionine synthetase, N-te
  Pfam module annotation: Pfam domain module=S-AdoMet_synt_M::S-AdoMet _synt_N; Domain location=122-245::5-107
MAAVDTFLFTSESVNEGHPDKLCDQVSDAVXLDACLXLTDPDSKVACETCTKTNMVMVFGEITTKANVDYEKIVRDTCRNIGFVSADXVGLDADHCKVLVNIEQQSPDIXRGVHGHFTKRPEEIGAGDQXGHMFGYATDETPELMPLSHVLATKLGARLTEVRKNGTCPWLRPDGKTQVTVEYRNEGGAMVPIRVHTVLISTQHDETVTNDEIAADLKEHVIKPVIPXQYLDEKTIFHLNPSGRFVIGGPHGDAGLTGRKIIIDTYGG

SEQ ID NO: 106252 - protein, 50 aa, Setaria italica
  Transcript Sequence Number=SeqID_40278
ISFPENVNPASMCQPNHLIGFLISVKPSPYVSWALGVIMDDCDFPSKNSK

SEQ ID NO: 106253 - protein, 108 aa, Setaria italica
  Transcript Sequence Number=SeqID_40279
IFYFHSEITLVILVALRFLQQIIVSYRLQQHEYWTTENSGSRTTMATALSPASSDMKWLFLMAIKWCRGQVRSTSRSDMPYAIDMHEMHSGCPEFIIFPHDNTSMKHE

SEQ ID NO: 106254 - protein, 150 aa, Setaria italica
  misc_feature (102)..(102): Xaa can be any naturally occurring amino acid
  Transcript Sequence Number=SeqID_40280
  Gene Ontology: Mol. function=histone-lysine N-methyltransferase activity; Cellular component=nucleus; Biological process=chromatin modification
  Homolog annotation: Hit_ID=Q6ZJS9; Match level="QueryCoverage=82%, HitCoverage=13%, E-value=1e-11, Identity=40%"; Hit description =Putative histone-lysine N-methyltransferase
MRLLPKPTMVSAIRRFPPGCGRVTGSQPLNKSADYRPLTESKELSAAGGSSGLKKKVIVKCPAHIRMKVASACTMGSINKLDDIAASILQDDCFSKALAAYXRKLELKFNVSSDVPSVRCQRQHGTQNVDARSKVKMMCKRFRFICRATV

SEQ ID NO: 106255 - protein, 143 aa, Setaria italica
  Transcript Sequence Number=SeqID_40281
  Gene Ontology: Mol. function=DNA binding
SLDHAGTVRGDIPEKQTYPRGSKMSNFKRKRKGNASTPPSEVQEYIKRAVDLQAMLQKDREKMSEVQLRLSKEKLEVARLKQQEAKDRKETTLYEKYTELLMANTQRFDEFQKEEHRKAVKRMGEMLFVNNGMPLSSSNLKHM

SEQ ID NO: 106256 - protein, 285 aa, Setaria italica
  Transcript Sequence Number=SeqID_40282
  Gene Ontology: Mol. function=transporter activity; Cellular component= integral to membrane; Biological process=transport
  Homolog annotation: Hit_ID=Q651D5; Match level="QueryCoverage=98%, HitCoverage=98%, E-value=1e-124, Identity=79%"; Hit description =Probable aquaporin PIP2-7
  Pfam annotation: Domain name=MIP; Domain location=34-263; Score =404.8; E_value=1.5e-118; Accession=PF00230.12; Description=Major intrinsic protein
MPIEDVSIETTEAAGPQKVPYWDPPPAPLLETSELMKWSLYRALIAEFVATLIFLYVSIATVIGYKDQSKALACNGVGFLGVAWSFGATIFILVYCIGGISGGHINPAVTFGLFVGRKLSLLRTVLYIVAQCLGAICGVAIVKGITGDQYSLLGGGANSVADGFSVVAGLGAEIMGTFVLVYTVFSATDPKRTARDSFIPVLVPLPIGFAVFVVHLATIPITGTGINPARSLGAAVIFGEAWKNHWIFWVGPLIGATAAALYHKLVLRGEAAKALGSFRSTSATV

SEQ ID NO: 106257 - protein, 208 aa, Setaria italica
  Transcript Sequence Number=SeqID_40283
  Gene Ontology: Mol. function=oxidoreductase activity; Cellular component=cytoplasm; Biological process=oxidation reduction
  Homolog annotation: Hit_ID=B5M1Y6; Match level="QueryCoverage=87%, HitCoverage=36%, E-value=4e-76, Identity=75%"; Hit description =Alcohol dehydrogenase
  Pfam annotation: Domain name=Aldedh; Domain location=41-208; Score= -177.8; E_value=1.3e-09; Accession=PF00171.14; Description=Aldehyde dehydrogenase family
MGSEGNGGVTDRPAAEEKNVGAPPFEMPEIRFTKLFINGCFVDAGSGRTFETRDPRTGDVIASVAEGDKEDVDLAVKAARDAFDHGEWPRMSGSERGRIMMRFADLVEQHAGELAALESLDAGKHPAVTMAVDIGNAAGSLRYFAGAADKIHGETLKMRGQFQGYTLREPLGVAGLIIPWNFPTTMFGIKVAPALAAGCTVVVKPRRT

SEQ ID NO: 106258 - protein, 78 aa, Setaria italica
  Transcript Sequence Number=SeqID_40284
ANNFHSTLPKKNSQIIDDNLSVTTLCVYIGSECFYIPLPKAYYDSILSFFCDCRVTCLLRLQCLMLRYGDLVEGQQDG

SEQ ID NO: 106259 - protein, 476 aa, Setaria italica
  Transcript Sequence Number=SeqID_40285
  Pfam annotation: Domain name=TLD; Domain location=253-420; Score =51.2; E_value=4.1e-12; Accession=PF07534.8; Description=TLD
  Subcellular localization annotation: CTP_CleavageSite=44; ConfidenceScore=5.05e-01
PPHFHDLLARLGPAIASLFSADGAAAGDAGWVPFLRGFNRCCARVSASRSLALLLRVYAAACDATGAPCGVQFQPDEGGDEDGKVVGELAPEEIAAFLWMCWVMTWSGSAPKASGDGGDKSEEPVVVLLPDVTHLVLSALVSAGAVADDDGIWGWKIPSGGKGVKVQEFTSWMLSTASGLGNCLSRYVQDRFRSLVADPAEESSVSTVNTTFDTSDVYLLTRGRAWAIALSLRNKLSEKFLSASVIGMDTEDLLYRSAIHGKGLSRFWSGVEGYNGPMLILLSAFSKGGVENVDSNRRWVIGVLTEEGFESKDTFYGSSGFLCAAHPIFHMLPPSGKEKNFVYSHLHPQIRVYEAHPKPVGLAFGGTVGNERIFLDEDFSKVVVRHHAVDKTYQHGSLIPNQGYLPVEASVLDVEVWGLGGGATRRQQDMYKKRENIFSEQRRKVDLKTFGNWEDSPEKMMMDMMADPNRVRREDR

SEQ ID NO: 106260 - protein, 86 aa, Setaria italica
  Transcript Sequence Number=SeqID_40286
FSLLLCYNLYCFLYFYWWKWYVIFLVLTPILKLKLSVLSAWHSVIKSKQLSVVFLMVMSDSGYCFILSSHSISGATILLCAAPVFL

SEQ ID NO: 106261 - protein, 114 aa, Setaria italica
  misc_feature (10)..(10): Xaa can be any naturally occurring amino acid
  Transcript Sequence Number=SeqID_40287
  Gene Ontology: Cellular component=chloroplast
  Homolog annotation: Hit_ID=B4F7X1; Match level="QueryCoverage=99%, HitCoverage=37%, E-value=1e-58, Identity=98%"; Hit description =Ankyrin repeat protein
  Pfam annotation: Domain name=Ank; Domain location=16-48; Score=42.3; E_value=1.9e-09; Accession=PF00023.22; Description=Ankyrin repeat
  Pfam annotation: Domain name=Ank; Domain location=49-81; Score=38.2; E_value=3.4e-08; Accession=PF00023.22; Description=Ankyrin repeat
  Pfam module annotation: Pfam domain module=Ank::Ank; Domain location =16-48::49-81
SHLLRKGANXHVRDRDGATPLHYAVQAGALQTVKLLIKYKVDVNVADNDGWTPLHLAIQSRNRDIAKVLLVNGADRTRRTKDGRTALDLSLCFGRDFKSYDLAKLVKLIPANRV

SEQ ID NO: 106262 - protein, 99 aa, Setaria italica
  misc_feature (11)..(11): Xaa can be any naturally occurring amino acid
  Transcript Sequence Number=SeqID_40288
  Homolog annotation: Hit_ID=Q8H0B8; Match level="QueryCoverage=100%, HitCoverage=61%, E-value=3e-23, Identity=56%"; Hit description=Cold regulated protein
PWTHWVVANIXPPPRGLPRGVLRQGGRGGREYGGVQEGVNDWKQPGWRGPVPESRGHRIQFKLYALDDEVHLGNKVTKDKLLEAIEGHVLGEAELVALF

SEQ ID NO: 106263 - protein, 61 aa, Setaria italica
  Transcript Sequence Number=SeqID_40289
GKTREKYPVQFQMRKEQCSTLSNFYWSTNPKSVCITSVGRNPMLRIIILTFGNVKEYFLPK

SEQ ID NO: 106264 - protein, 80 aa, Setaria italica
  Transcript Sequence Number=SeqID_40290
  Gene Ontology: Mol. function=inorganic anion exchanger activity; Cellular component=integral to membrane; Biological process=anion transport
  Homolog annotation: Hit_ID=B6SV45; Match level="QueryCoverage=100%, HitCoverage=12%, E-value=3e-36, Identity=96%"; Hit description=Boron transporter-like protein 2
DWVAGLRSGFRILAPTMYIFFASALPVIAFGEQLSTATNGILTTVETLASTAICGIIHSILGGQPLLIVGVAEPTIIMYT

SEQ ID NO: 106265 - protein, 203 aa, Setaria italica
  misc_feature (155)..(155): Xaa can be any naturally occurring amino acid
  Transcript Sequence Number=SeqID_40291
  Gene Ontology: Mol. function=transferase activity, transferring glycosyl groups; Biological process=metabolic process
  Homolog annotation: Hit_ID=A5I866; Match level="QueryCoverage=92%, HitCoverage=38%, E-value=1e-52, Identity=52%"; Hit description =Glucosyltransferase
TRSDQLVWTRPVGVDRDHDCMRWLDRQPRRSVVYVSFGSGGTLTWQQTAELARGLELGQCRFIWAVKRPHQSSTIGAFFGTQKGEDISLDFLPEGFMERTRGMGFVTQSWTPQTAILGHPSVGCFVTHCGWNSILESVTNGVPMIAWPLYAEQKXMNAAMLEVQVGVAVRAKVGVDRFTSKEEVVSAIQRVIVGKEAERMRKR

SEQ ID NO: 106266 - protein, 70 aa, Setaria italica
  Transcript Sequence Number=SeqID_40292
KSQIQCISRSSGPRLLLVIFSSLSFCALHRSDVDEASYKKPNRWPVPEPRWSYLPSRVPLPWALVGATYD

SEQ ID NO: 106267 - protein, 621 aa, Setaria italica
  Transcript Sequence Number=SeqID_40293
  Gene Ontology: Mol. function=catalytic activity; Cellular component =nucleus; Biological process=DNA integration
  Homolog annotation: Hit_ID=B8B5M4; Match level="QueryCoverage=81%, HitCoverage=53%, E-value=1e-78, Identity=53%"; Hit description =Superoxide dismutase [Cu-Zn]
  Subcellular localization annotation: CTP_CleavageSite=76; ConfidenceScore=5.44e-01
MAPARPRRMAPARPCARSAARVGQMPISMLRTSSSNKKKKARKSGKKTRNLWLYNVFEEEFGSLSNSSQGTLSKLSQEVVSNLSETVVSLASFDGDRIHAVCTGIVVKNDGCGTSVLTSATLVRSLDIDNGCKIFPGLMIEVSLPNNRSADGWLVHCDFNYNVAVVNISHYPGFRAAHFAHLIHFGCKVVALGRCFKTGKLKALYGTVNDEPSGDLRKHLMISTCKITMTMAGGPLVDLDGSFVGMNFYSKKMMTPFLPMDKIYKCLVHAGILWAEIKHGGDSTIERSPCEIQEFLMPNVEGSSSGERDKNQELSISSTSYSEDFEEEELWPLLYPNPLPVDDFTELVRNDLKSRNYPMPIRLEGGMRLINTFEEEFVEDTWSKLSKKVASGVSRSVVSLASFKGEERFFACTGIFIDFNESTSRVLTSASLVRTSADEYKIADNLKIKVYLPNKQVAEGTLQHYNLSYNIAVVSVMGFRCLRTAEFNNQRQIEPHMEVVAVGRIFESGKLMATSGKVADKEGNLDCKELMISTCKVTKAGIGGPLIDFDGNFIGMNFHGKEETHYLPRSMVLERLRLCERSDVDEASYKKPNRWPVPEPRWSYLPSRVPLPWALVGATYD

SEQ ID NO: 106268 - protein, 44 aa, Setaria italica
  Transcript Sequence Number=SeqID_40294
  Gene Ontology: Mol. function=acid-amino acid ligase activity; Cellular component=intracellular; Biological process=ubiquitin -dependent protein catabolic process
  Homolog annotation: Hit_ID=B9SGR6; Match level="QueryCoverage=100%, HitCoverage=2%, E-value=5e-11, Identity=75%"; Hit description =Ubiquitin protein ligase E3a, putative
VDDELPSVNTCRHFIKLPPYSSKEIMKKKLKYAITEGLGSFHLS

SEQ ID NO: 106269 - protein, 129 aa, Setaria italica
  misc_feature (91)..(91): Xaa can be any naturally occurring amino acid
  Transcript Sequence Number=SeqID_40295
  Gene Ontology: Mol. function=ribonuclease H activity; Biological process=DNA integration
  Homolog annotation: Hit_ID=Q8SA85; Match level="QueryCoverage=89%, HitCoverage=8%, E-value=4e-19, Identity=39%"; Hit description=Prpol
GARNFLVKSNAKVIKEQIKKECEAREPELIKYLAEVRRMEKHFRDFTIEHLPRKGNGEVDDLAKKASRNEQLPLDVFFEVITTPSIKRDNXPMSLVNAISSMDWRTQIIAYLCNNYELVEEHELKHMKQ

SEQ ID NO: 106270 - protein, 195 aa, Setaria italica
  Transcript Sequence Number=SeqID_40296
NFAIHLTPAPDDMILVCEIAAELKKLMTSGEDNSRDSSDTFHTINCKTKSSLAAVCLQMVELSLTELDWGLGKLKSILTLGYDSANVDEDQPADERMQRLALEEALYSRSILVVHALSSFAHMSLKDTQAEHFLKLTAKFYKLLTRMSKSQIAPKGYTQFIPSLKFQKLAEVTCRMLTSTLYDFVSSVQQNLEAP

SEQ ID NO: 106271 - protein, 32 aa, Setaria italica
  Transcript Sequence Number=SeqID_40297
LVGNRWELIAGRIPGRTAEEVEMFWSKKHQEK

SEQ ID NO: 106272 - protein, 101 aa, Setaria italica
  Transcript Sequence Number=SeqID_40298
LPIGLVLSIVLHLFALLALCASATTATYVPLGAMNPCMQYCMMQQPYAVNPCMQYCMMQQALAMGRFASPASMMLQQPWTSPLQQYWTPRMMPSMMPFQQS

SEQ ID NO: 106273 - protein, 82 aa, Setaria italica
  Transcript Sequence Number=SeqID_40299
SRDALLSFRISTPTKCRVGTASPRAREHGPGKTATGTYLDACVLNMICDVVVELQVHCYSMQISHRPSLSSAIDVTLFSCFK

SEQ ID NO: 106274 - protein, 207 aa, Setaria italica
  Transcript Sequence Number=SeqID_40300
  Gene Ontology: Mol. function=peptidyl-prolyl cis-trans isomerase activity; Cellular component=outer membrane-bounded periplasmic space; Biological process=protein folding
  Homolog annotation: Hit_ID=B6T5Z4; Match level="QueryCoverage=83%, HitCoverage=82%, E-value=3e-76, Identity=81%"; Hit description=FK506 binding protein
  Pfam annotation: Domain name=FKBP_C; Domain location=76-201; Score =108.8; E_value=1.8e-29; Accession=PF00254.20; Description=FKBP-type peptidyl-prolyl cis-trans isomer
  Subcellular localization annotation: CTP_CleavageSite=39; ConfidenceScore=5.77e-01
MVTTAVTAVAGAAPPPPKGKAVTVATTPLPTLTRRQLLVAVATASTFRTAAPSAAAPEFAEIPGSGGVKALDRREGSGEVPAEGDQVAIHYYGRLAAKQGWRFDSTYDHKDETGEPIPFVFTIGSGKVIPGIEAAVKSMKVGGLRRVIIPPSQGYQNTSQEPIPPNFFDQQRLFTTIFNPTRLANGEGSTLGTLIFDIELINIRQRS

SEQ ID NO: 106275 - protein, 148 aa, Setaria italica
  Transcript Sequence Number=SeqID_40301
  Gene Ontology: Mol. function=potassium ion transmembrane transporter activity; Cellular component=integral to membrane; Biological process=potassium ion transport
  Homolog annotation: Hit_ID=Q9AYN4; Match level="QueryCoverage=100%, HitCoverage=19%, E-value=3e-74, Identity=92%"; Hit description=High -affinity potassium transporter
MSLEVENPGGGESANRLSLKRHDSLFGDAEKVSHGKYHGSEGSWARTLHLAFQSVGIIYGDIGTSPLYVYSSTFPDGIKYNDDLLGVLSLIIYTLIIIPMLKYVFIVLYANDNGDGGTFALYSLISRYAKIRMIPNQQAEDAMVSNYS

SEQ ID NO: 106276 - protein, 68 aa, Setaria italica
  misc_feature (5)..(5): Xaa can be any naturally occurring amino acid
  Transcript Sequence Number=SeqID_40302
ACPSXKNDSYEITSPMVCLIAHCSKHLGLYILSHIHKVWGPLSFYELSLEEEIVHSLSLPSISSMYAT

SEQ ID NO: 106277 - protein, 294 aa, Setaria italica
  Transcript Sequence Number=SeqID_40303
  Gene Ontology: Mol. function=binding; Biological process=DNA integration
  Homolog annotation: Hit_ID=A9ZN33; Match level="QueryCoverage=97%, HitCoverage=92%, E-value=1e-97, Identity=64%"; Hit description =Putative ankyrin repeat protein
  Pfam annotation: Domain name=Ank; Domain location=23-55; Score=29.5; E_value=1.4e-05; Accession=PF00023.22; Description=Ankyrin repeat
  Pfam annotation: Domain name=Ank; Domain location=56-88; Score=17.1; E_value=0.075; Accession=PF00023.22; Description=Ankyrin repeat
  Pfam annotation: Domain name=Ank; Domain location=89-119; Score=16.7; E_value=0.1; Accession=PF00023.22; Description=Ankyrin repeat
  Pfam annotation: Domain name=TPR_1; Domain location=179-212; Score =14.0; E_value=0.12; Accession=PF00515.20; Description=Tetratricopepti de repeat
  Pfam annotation: Domain name=TPR_1; Domain location=247-280; Score =40.1; E_value=9e-09; Accession=PF00515.20; Description =Tetratricopeptide repeat
  Pfam annotation: Domain name=TPR_2; Domain location=179-212; Score =16.3; E_value=0.13; Accession=PF07719.9; Description=Tetratricopeptid e repeat
  Pfam annotation: Domain name=TPR_2; Domain location=213-246; Score =0.9; E_value=26; Accession=PF07719.9; Description=Tetratricopeptide repeat
  Pfam annotation: Domain name=TPR_2; Domain location=247-280; Score =29.8; E_value=1.1e-05; Accession=PF07719.9; Description =Tetratricopeptide repeat
  Pfam module annotation: Pfam domain module=Ank::Ank::Ank::TPR_1::TPR _1::TPR_2::TPR_2::TPR_2; Domain location=23-55::56-88::89-119::179 -212::247-280::179-212::213-246::247-280
PEIFKFLLSRGARADVESTSPLTSFTPLFLATCGGHASILEILLEQNADPNVRMGDQVTPISFALRHSSVPCLKLLVQAGADVNGFGSYNPLAKAAKKGLTEAIKCLLEAGADPNVPDSFGRLPIELAAEYGTWEDVELLFPVTSKIPTVADWSVNGIISHVYLEVMQLQDDEFVKKKKSELKRQGTDAFRNEDYLKALEFYTQALKVDQFDATLFSNRSICWLRLGDGMKALYDAIECKNLRPKWAKAYYRKGAALMFMKDYDSAYDALSRGLELDPESEEMETLLWEAMELK

SEQ ID NO: 106278 - protein, 77 aa, Setaria italica
  Transcript Sequence Number=SeqID_40304
  Gene Ontology: Mol. function=hydrogen ion transporting ATP synthase activity, rotational mechanism; Cellular component=proton -transporting ATP synthase complex, catalytic core F(1); Biological process=ATP synthesis coupled proton transport
  Homolog annotation: Hit_ID=B8AWF8; Match level="QueryCoverage=98%, HitCoverage=14%, E-value=2e-33, Identity=92%"; Hit description=ATP synthase subunit beta
LQNYSSLQVPVGRATLGRIMNVIGEPIDEKGDITTNHFLPIHREAPAFVEQATEQQILVTGIKVVDLLAPYQRGGKD

SEQ ID NO: 106279 - protein, 106 aa, Setaria italica
  Transcript Sequence Number=SeqID_40305
  Gene Ontology: Mol. function=transferase activity, transferring alkyl or aryl (other than methyl) groups; Biological process=isoprenoid biosynthetic process
  Homolog annotation: Hit_ID=B6TAR5; Match level="QueryCoverage=98%, HitCoverage=27%, E-value=1e-18, Identity=62%"; Hit description =Prenyl transferase
  Subcellular localization annotation: CTP_CleavageSite=32; ConfidenceScore=5.58e-01
MLSLSCPGVSMSKKAFDSGQLASCRCSWPGARAAPRRQRTPCVCFVASPATQPGLAAIDVPPQTIVTTASVPERISVSSLLEVVSGDLLNLNNNLKSVSFVYKPHR

SEQ ID NO: 106280 - protein, 131 aa, Setaria italica
  Transcript Sequence Number=SeqID_40306
  Gene Ontology: Mol. function=transferase activity, transferring alkyl or aryl (other than methyl) groups; Cellular component=cyanelle; Biological process=isoprenoid biosynthetic process
  Homolog annotation: Hit_ID=B6TAR5; Match level="QueryCoverage=99%, HitCoverage=32%, E-value=3e-57, Identity=80%"; Hit description =Prenyl transferase
GTTICEQMYEYGRNLGLSFQVVDDILDFTQSAEQLGKPAGSDLAKGNLTAPVIFALQDEPRLREIIDSEFSEPGSLGTAIELVHRSGGIRRAQELAKEKGDLAIQSLQCLPRSEFRSTLEKVVHYNLQRIE

SEQ ID NO: 106281 - protein, 409 aa, Setaria italica
  Transcript Sequence Number=SeqID_40307
  Gene Ontology: Mol. function=transferase activity, transferring alkyl or aryl (other than methyl) groups; Cellular component=chloroplast; Biological process=isoprenoid biosynthetic process
  Homolog annotation: Hit_ID=B6TAR5; Match level="QueryCoverage=87%, HitCoverage=88%, E-value=1e-149, Identity=74%"; Hit description =Prenyl transferase
  Pfam annotation: Domain name=polyprenyl_synt; Domain location=116 -375; Score=272.8; E_value=7.7e-79; Accession=PF00348.9; Description =Polyprenyl synthetase
  Subcellular localization annotation: CTP_CleavageSite=36; ConfidenceScore=5.71e-01
GTATAGAAAVVPSSPLQPQPQLLRHACSARRTQRVRCSWAGGRAASRRRTLGVCFVVSPSQPAGLAAIDVPAASIPNTTTIPERISVSSLLEVVSDDLLKLNNNLKSLVGAENPVLVSAAEQIFGAGGKRLRPALVFLVSRATAELAALSELTTEHQRLAEIIEMIHTASLIHDDVIDDSGMRRGKETIHQLYGTRVAVLAGDFMFAQSSWFLANLENIEVIKLISQVIKDFASGEIKQASTLFDCDITLDDYLLKSYYKTASLIAASTRSAAIFSGVSTAICEQMYEYGRNLGLSFQVVDDILDFTQSAEQLGKPAGSDLAKGNLTAPVIFALQDEPELREIIDSEFSETDSLAAAIDLVHRSGGIRRAHELAREKGDLAIQNLQCLPRSDFRSTLEKMVKYNLERIE

SEQ ID NO: 106282 - protein, 306 aa, Setaria italica
  Transcript Sequence Number=SeqID_40308
  Gene Ontology: Mol. function=protein tyrosine/serine/threonine phosphatase activity; Biological process=protein amino acid dephosphorylation
  Homolog annotation: Hit_ID=B6TA53; Match level="QueryCoverage=85%, HitCoverage=79%, E-value=1e-100, Identity=63%"; Hit description=Dual- specificity protein-like phosphatase 4
  Pfam annotation: Domain name=DSPc; Domain location=72-213; Score =52.4; E_value=1.7e-12; Accession=PF00782.12; Description=Dual specificity phosphatase, catalytic domain
MRICELGDGDGGLAGQQEQQEEEVGASGGGEVVRLKAKRALVGAGARVLFYPTLLYNVLRNRFEADFRWWDRVDQFILLGAVPFPSDVPRLKQLGVRGVVTLNEPYETLVPTSLYQAHEIEHLMIPTRDYLFAPSVEDISQAIDFIHRNASQGGTTYVHCKAGRGRSTTIVLCYLIKYRSMTPEAALDHVRSIRPRVLLAPSQWQVVSTFGTLVTGQLPVRSTKLGSFLEAIDACRTDTEYDDYHAMEFDYEDSGLPLSQIMLPRPTSPTGCIDAVLITEADLEGYDTYVNTRKDALEVATHRPTN

SEQ ID NO: 106283 - protein, 257 aa, Setaria italica
  Transcript Sequence Number=SeqID_40309
TEILVSLIDLNEPLPIMDDPEINACESGELVPHESDDPLRDSLAITAAESLVAMCNVVVQPGSPQPDTLHWFADLAASKENTMFDKDSDDDFEALTLKLQETKSTEHHSTPRATQEDNCDNGHCSAASLLTPKPQRGKGRGRRKRKDFQRDILPCLALLPKHEVSEDLRALGRPKPVTPMKGGGRGGQQPRGRRRARSMAVAMEVEEVEVSPPPGLPPLAPADLDADALGITRWGRTTRRCRRPRCPPANNASLHVA

SEQ ID NO: 106284 - protein, 176 aa, Setaria italica
  Transcript Sequence Number=SeqID_40310
  Gene Ontology: Mol. function=catalytic activity; Biological process =metabolic process
  Homolog annotation: Hit_ID=Q7F1V2; Match level="QueryCoverage=99%, HitCoverage=20%, E-value=5e-95, Identity=92%"; Hit description =Putative Cycloartenol Synthase
PPELFLLPSLVPVQPGRLWSHFRMAFIPISYLYGKKFVGPITRLVMSLREELHIHPYRKIDWKKARKLCAKEDVYNPHTWLQECLSDCLYSFGEPFLTQWPISYMRKKALQQIAEFLKYEDENSQYICIGAAQKALSMLCCWIENHNSDAFKSHLARVADFLWVGEDGMKVRSCAW

SEQ ID NO: 106285 - protein, 60 aa, Setaria italica
  Transcript Sequence Number=SeqID_40311
KNQKFAGIYKRSPNTLNSTYKFKHCINYNVNSLNTGKVLHKVLQSQLLKDGMFFSTYSRA

SEQ ID NO: 106286 - protein, 240 aa, Setaria italica
  Transcript Sequence Number=SeqID_40312
  Gene Ontology: Mol. function=electron carrier activity; Biological process=oxidation reduction
  Homolog annotation: Hit_ID=B6ST66; Match level="QueryCoverage=100%, HitCoverage=46%, E-value=7e-89, Identity=69%"; Hit description =Cytochrome P450 CYP92C5
ILAYGYRGIVHTPYGAYWRMTRKLCTTELFSARRVMSFERVRSEEMRALVRGLFRRAGGVVAVREHVTCATLRNILRMAVGEKWSGCYGSAEGQAFRRTLDEAFSVAGAVSNVGEWVPWLGWLDLQGCVRRMKRLSEMYDRFNEQILDEHEERRRRAGAGEFVASDLVDVLLQLTEEGRSESSEAKLTRDGGCKVIQDIIAGGTESSAVTIEWAMSELLRRPDAMAAAADELDRVVGRGR

SEQ ID NO: 106287 - protein, 178 aa, Setaria italica
  misc_feature (20)..(20): Xaa can be any naturally occurring amino acid
  Transcript Sequence Number=SeqID_40313
  Homolog annotation: Hit_ID=B9RYW7; Match level="QueryCoverage=99%, HitCoverage=23%, E-value=1e-34, Identity=43%"; Hit description =Ankyrin repeat-containing protein, putative
  Pfam annotation: Domain name=Ank; Domain location=44-76; Score=15.2; E_value=0.23; Accession=PF00023.22; Description=Ankyrin repeat
  Pfam annotation: Domain name=Ank; Domain location=77-110; Score=31.1; E_value=4.4e-06; Accession=PF00023.22; Description=Ankyrin repeat
  Pfam module annotation: Pfam domain module=Ank::Ank; Domain location =44-76::77-110
DITIRNREGKSLMSIIQQKXSEIRDCFEQILLQASLTNTLTGQTLFRPLHYAARIGDKSSLLQLLTMGHDPNSLDEDGFTPLMHAAASGRLDSCKILVSHGGADYSLVNERNETALSLARRSSISSKATEEWLLGHLSRAHVLAGEELMKHTREGKGSPHQKTVRMTKSGVLTWGTSR

SEQ ID NO: 106288 - protein, 108 aa, Setaria italica
  Transcript Sequence Number=SeqID_40314
LMVYVKRLRISPRCDASIGLSMPTVHRVIFISIARYKTMQRAYDARCTFLLSIRRRRRLVGALETDAVAVVQAGTAAEVMADVSALIAAGLDATAASTAGVDVRRWVF

SEQ ID NO: 106289 - protein, 136 aa, Setaria italica
  Transcript Sequence Number=SeqID_40315
  Subcellular localization annotation: CTP_CleavageSite=30; ConfidenceScore=5.05e-01
GLATQRSSGGGRFNAPLRQAAQRHRNEAQRASSRGNNIYSDEVTRTQRIYSSKASRIGRAWMPRQAPTRHAAQALAQQGWTPAKSRRRHSSQRALPNPLRCEPLQGGASIAWPRTIVLLPGALLLLPPLRSPGAVL

SEQ ID NO: 106290 - protein, 98 aa, Setaria italica
  Transcript Sequence Number=SeqID_40316
RWSGKIVKAGSFKVCLYFVTDHDYYVELYMSMLTVCFFHDDTRSLCYSDLIYAQKIWNFDLLIAENKRHTDNLILLSNSAVTVCMYKMYEISDMQKRG

SEQ ID NO: 106291 - protein, 56 aa, Setaria italica
  Transcript Sequence Number=SeqID_40317
MDAERGDDQSPLLQHHPPNQTQVSPANQHYNKPFSWKAPAVILAFEFLESIAYSGI

SEQ ID NO: 106292 - protein, 129 aa, Setaria italica
  Transcript Sequence Number=SeqID_40318
  Gene Ontology: Mol. function=nucleic acid binding; Cellular component= cytoplasm; Biological process=multicellular organismal development
  Homolog annotation: Hit_ID=Q7Y001; Match level="QueryCoverage=100%, HitCoverage=12%, E-value=2e-54, Identity=77%"; Hit description =Protein argonaute 12
  Pfam annotation: Domain name=Piwi; Domain location=1-90; Score= -119.0; E_value=0.069; Accession=PF02171.9; Description=Piwi domain
NILPGTVVDTTICHPSEFDFYLCSHSGIQGTSRPAHYHVLFDENGFSADALQTLTYNLCYTYARCTRSVSIVPPAYYAHLGAFRARHYIEDDISEQGSSTGTSRTYDQSVPVKQLPRIKEKVQQFMFYC

SEQ ID NO: 106293 - protein, 248 aa, Setaria italica
  misc_feature (176)..(176): Xaa can be any naturally occurring amino acid
  Transcript Sequence Number=SeqID_40319
  Gene Ontology: Mol. function=DNA binding
  Subcellular localization annotation: CTP_CleavageSite=35; ConfidenceScore=5.38e-01
SPRKLETSLVKVTDAQSSPNSSSCGSFRSPCQTCSSSTLGDKLIDSVSLVHSGLQSDISDVDKSKSSQSPLHTRADTTTVKIPSNQEAMHDQSTDDYIPLPQEEDNLEGVDDLFGLLKDESHSSESKGSSDSEDHTTFHQVCVRKEDRCYPPVLNSKLHSDSEGRTSVFSRLVKTXKVVSEEKRSKTEAFPPRSAQSFNPLFQRKKQKKAQRGKPFPCQNDRMLVMSSGNRLNRVAASNHSFVGRRST

SEQ ID NO: 106294 - protein, 240 aa, Setaria italica
  Transcript Sequence Number=SeqID_40320
DSVYTIPRGGADWAALQQDPVELLRKLDELRDQITRSCHVVGQPREHRRVSRRAVSMLPEHLEPPPQPGYHRSRYGGRYGHGLPPPSPYAPQRPEHGERYVRQSSGHYRQYPGRQWENGGMAPGSYHHYGCACPHCLHGQRAAPQEENIPMARYFAGQHESYRFERSPSVSSDYDRRSVASSLYSHRTVLKRRAEFFRKKAEHICRPVDGAAPFAVCSSCYKLLQMPVEKCIGRKKNRFQ

SEQ ID NO: 106295 - protein, 475 aa, Setaria italica
  Transcript Sequence Number=SeqID_40321
  Gene Ontology: Cellular component=plasma membrane
ENWLVCWFCCQIISLKHDEGKGIPLTPSSSLYVPEMEQSSNDQMMKDSTHQRQEDFNSVFYNANEHSSMQFNMDFADDNSLSSTTSHGRTDKEYGSNRSIQSKAEGLSFSPSRSLDAGSPKDILCERDAGCEAEPSVDGSVTPRSPVLEDKLVDPLCTQEKGNNEDAMAYRSDITCKGEYDVNDDYDESVSTRSKQKGNDDDKDATEDESSRSSYEQKDKEDNCCNLEGGNKMHKQNSVKDDSSSLEDGSEKYEYTNIKDDNSSPGGSEDSSKYEPKAKGDEKCVLGSENISNNCDEDNKDNAIEAGSTSERHDELKTEEDYGKLQRPFTEDANSPAESGSSVNGRTNSGFSRGSSEAGLDEDQSSTGKSGDSSFFAGFLKKGFKDLSLLNKSMDSAKVSINGHPISERALKKAEKKAGPVDPGSYWYDYRAGFWGVMGRECIGIIPPFIREFNYPMARNCAGGDTGVFVNGREL

SEQ ID NO: 106296 - protein, 139 aa, Setaria italica
  Transcript Sequence Number=SeqID_40322
  Gene Ontology: Cellular component=plasma membrane
NRYNKISERALKKAEKKAGPVDPGSYWYDYRAGFWGVMGRECIGIIPPFIREFNYPMARNCAGGDTGVFVNGRELHQRDLDLLVGRGLPRISGKSYSIEVSGDITDEATGKKLRSLGKLAPTIEKLKRGFGMHVPEEFR

SEQ ID NO: 106297 - protein, 131 aa, Setaria italica
  misc_feature (63)..(63): Xaa can be any naturally occurring amino acid
  misc_feature (122)..(122): Xaa can be any naturally occurring amino acid
  Transcript Sequence Number=SeqID_40323
  Gene Ontology: Mol. function=binding; Cellular component=integral to membrane; Biological process=transport
  Homolog annotation: Hit_ID=B9RCC2; Match level="QueryCoverage=93%, HitCoverage=18%, E-value=2e-42, Identity=64%"; Hit description =Mitochondrial carrier protein, putative
  Pfam annotation: Domain name=Mito_carr; Domain location=70-131; Score= 27.4; E_value=9.2e-06; Accession=PF00153.19; Description =Mitochondrial carrier protein
DALKGVGLLHYQNCWNALVGCLKRGGIASLYAGWGAVLCRNIPHSIVKFYAYESLKQSIFRCXSQNGKLSSGETLICGGFAGSTAALFTTPFDVVKTRVQLQALSPVSKYDGVLHALKEIFXQEGLRGLYR

SEQ ID NO: 106298 - protein, 95 aa, Setaria italica
  Transcript Sequence Number=SeqID_40324
  Subcellular localization annotation: CTP_CleavageSite=80; ConfidenceScore=5.74e-01
AAPARPFLASLRLASPTASLRDRVRPLAPASGFVLVPGPLLTSRTSFHVQLFVSRTDTRAYTHAAPALVFVASFVLFDDVANHASEFVPLALFLR

SEQ ID NO: 106299 - protein, 89 aa, Setaria italica
  Transcript Sequence Number=SeqID_40325
MAKALKLVVLMLVAALLLLGPCDGRELKDSAAASRAAGGGSSGEGKATGLPLIPQLPPIPQLPPVSPVLPLPPVVPGLPPARKSDSKSP

SEQ ID NO: 106300 - protein, 100 aa, Setaria italica
  misc_feature (1)..(1): Xaa can be any naturally occurring amino acid
  Transcript Sequence Number=SeqID_40326
  Gene Ontology: Mol. function=DNA-directed RNA polymerase activity; Biological process=transcription
  Homolog annotation: Hit_ID=C0JR65; Match level="QueryCoverage=99%, HitCoverage=6%, E-value=6e-45, Identity=85%"; Hit description=DNA -directed RNA polymerase
XRDCDGHFGVTKLAATVHNPYFIDEVVHFLNQICPGCLNLRENIDLKTLERETVRATCKYCSKDGSKLYPSVIFKTLSSPRVLLSKSKLHRSPSVMERIS

SEQ ID NO: 106301 - protein, 59 aa, Setaria italica
  misc_feature (12)..(12): Xaa can be any naturally occurring amino acid
  misc_feature (14)..(14): Xaa can be any naturally occurring amino acid
  Transcript Sequence Number=SeqID_40327
  Gene Ontology: Cellular component=nucleus
SLYGSNTLEEDXEXLQACCIVSERKLYHSLVLRVSERKILYRLRKYASSRSKTKKRKHP

SEQ ID NO: 106302 - protein, 48 aa, Setaria italica
  Transcript Sequence Number=SeqID_40328
IFRSVAVVILSYNLEPSHVSSPSLSAPLFSCSGGSESSLNQDRFSLRV

SEQ ID NO: 106303 - protein, 89 aa, Setaria italica
  Transcript Sequence Number=SeqID_40329
  Subcellular localization annotation: CTP_CleavageSite=75; ConfidenceScore=5.91e-01
DQPTYQRTLISRSPPRRPLRSRSRSISPRRGRGPPLRRGRSDSSYSRSPSPPRKGPRRVSRSRSPRRPPRGRSISSDSRSSSSPSPRRR

SEQ ID NO: 106304 - protein, 445 aa, Setaria italica
  misc_feature (76)..(76): Xaa can be any naturally occurring amino acid
  misc_feature (90)..(90): Xaa can be any naturally occurring amino acid
  Transcript Sequence Number=SeqID_40330
  Gene Ontology: Mol. function=nucleic acid binding; Cellular component= nucleolus; Biological process=nematode larval development
  Homolog annotation: Hit_ID=Q9SEE9; Match level="QueryCoverage=25%, HitCoverage=27%, E-value=8e-41, Identity=70%"; Hit description =Arginine/serine-rich protein
  Pfam annotation: Domain name=RRM_1; Domain location=126-196; Score =71.3; E_value=3.5e-18; Accession=PF00076.14; Description=RNA recognition motif. (a.k.a. RRM, RBD, o
TLAQHHQAAPARPAAAGDDGEASARPLRVALLLGLLLPLAVPLRLLGLRLVSLPVALPLLLVVVLPVPEPLPSPGXRSSPGARKGRSPSXPPKRGSPSKKVRSPSPPPKKASSPRKASPPAESTVICIDHLSRNVNEAHLKEIFGNFGEVVNVELSMDRLVNLPRGYGYVEFKKRADAEKALLYMDGGQIDGNVVKLRFTLQPRQRAASPMKVPPPPPKRDAPQTDKGAGSAEKDAQQRPRESSPRKKPASPPRKRSPPNRRVESPRRPPDPSPRRRPDSPPIRRRPDPSPVRRGDTPPRRRPLSPLRRRSPSPPRRHRSPMRPSPRRGRGSPSPRRRSPGPLRRRSPPPRRLRSPPRRPPPPRRYSRSPPRRPLRSRSRSISPRRGRGPPLRRGRSDSSYSRSPSPPRKGPRRVSRSRSPRRPPRGRSISSDSRSSSSPSPRRR

SEQ ID NO: 106305 - protein, 241 aa, Setaria italica
  Transcript Sequence Number=SeqID_40331
  Gene Ontology: Mol. function=protein serine/threonine kinase activity; Cellular component=cell wall; Biological process=protein amino acid phosphorylation
  Homolog annotation: Hit_ID=Q2R9X8; Match level="QueryCoverage=98%, HitCoverage=53%, E-value=4e-48, Identity=37%"; Hit description =Leucine Rich Repeat family protein, expressed
  Pfam annotation: Domain name=LRR_1; Domain location=100-122; Score =18.9; E_value=0.021; Accession=PF00560.25; Description=Leucine Rich Repeat
  Pfam annotation: Domain name=LRR_1; Domain location=124-146; Score =12.3; E_value=1.4; Accession=PF00560.25; Description=Leucine Rich Repeat
  Pfam annotation: Domain name=LRR_1; Domain location=148-169; Score =10.7; E_value=2.7; Accession=PF00560.25; Description=Leucine Rich Repeat
  Pfam annotation: Domain name=LRR_1; Domain location=172-194; Score =10.1; E_value=3.5; Accession=PF00560.25; Description=Leucine Rich Repeat
  Pfam annotation: Domain name=LRR_1; Domain location=196-218; Score =9.8; E_value=4.1; Accession=PF00560.25; Description=Leucine Rich Repeat
  Pfam annotation: Domain name=LRR_1; Domain location=220-241; Score =7.9; E_value=9.4; Accession=PF00560.25; Description=Leucine Rich Repeat
  Pfam annotation: Domain name=LRR_1; Domain location=27-49; Score =14.1; E_value=0.57; Accession=PF00560.25; Description=Leucine Rich Repeat
  Pfam annotation: Domain name=LRR_1; Domain location=52-74; Score =12.9; E_value=1; Accession=PF00560.25; Description=Leucine Rich Repeat
  Pfam annotation: Domain name=LRR_1; Domain location=76-98; Score =11.8; E_value=1.7; Accession=PF00560.25; Description=Leucine Rich Repeat
  Pfam module annotation: Pfam domain module=LRR_1::LRR_1::LRR_1::LRR _1::LRR_1::LRR_1::LRR_1::LRR_1::LRR_1; Domain location=100-122::124 -146::148-169::172-194::196-218::220-241::27-49::52-74::76-98
LILEDNMLEAPDTKSWEFLYALRNCNHLNVLSLAGNRLTGAIPDYIGKLPTGLAKLYLDDNHLSGLVPSSIGNLTGLICLDLDNNKLTGTIGEWIGMLKKLQYLDLSENSLNGPIPSSIGNLTRLGVLDLGHNEFTGTIPTSLAYLQQLKYLNFSYNKLEGNLPSVVFSIPTLTTFVLSYNKLEGPMPSEVGHLTQLTALLLSSNKIFGEIPDTLSQCQELNILELDKNCLTGSIPVFFFV

SEQ ID NO: 106306 - protein, 55 aa, Setaria italica
  Transcript Sequence Number=SeqID_40332
VTMIHTVTMWPFWMPFYTGLETRRNNNALDYSLPQIKILNNMLPTWSVVIMSDDL

SEQ ID NO: 106307 - protein, 96 aa, Setaria italica
  Transcript Sequence Number=SeqID_40333
  Subcellular localization annotation: CTP_CleavageSite=47; ConfidenceScore=5.86e-01
GPPTLTHPSLLFTSSVVTTHKAPRASRLSPRRHRTPPNSQLTPCLITSSRGSDRQRRTELGACCTLGHRPMRLRTHGESVTSVWVRRFAAWSTCCC

SEQ ID NO: 106308 - protein, 186 aa, Setaria italica
  misc_feature (56)..(56): Xaa can be any naturally occurring amino acid
  Transcript Sequence Number=SeqID_40334
  Homolog annotation: Hit_ID=A6MGY3; Match level="QueryCoverage=58%, HitCoverage=13%, E-value=2e-11, Identity=35%"; Hit description=IFA binding protein
MAVKTGSGSQDFWHRFCPMLSYACGELCVIILLYVAALASHAATRLARICGLKAPXIFCTRLDHALHGKAWFSADLVCFAHGLEVSSLAYCKSHEQLARSDGLCKTCLLACTAVGASEEVNSSSRSRSRRLCSCCSELFKNTRNAQKHSETANAAESWDTVCGSEDINPRSQVYASDNMVSMTSKG

SEQ ID NO: 106309 - protein, 70 aa, Setaria italica
  Transcript Sequence Number=SeqID_40335
TRQHLNSTNPEILMQEYIARSELRSLNTPHHTSRYRQHYLCYPRAVLIGSFGVFTDTPQPQPPPRDELNY

SEQ ID NO: 106310 - protein, 90 aa, Setaria italica
  Transcript Sequence Number=SeqID_40336
  Subcellular localization annotation: CTP_CleavageSite=49; ConfidenceScore=5.03e-01
AHQLSAHLEMTKVGISIQGKYSVLLLNKMRPSHQLNNLCSRETRFTCIRTSIMQPKRLCTHIVRIILQKEANAQVRKNNLCTLLREVSLD

SEQ ID NO: 106311 - protein, 171 aa, Setaria italica
  misc_feature (117)..(117): Xaa can be any naturally occurring amino acid
  misc_feature (165)..(165): Xaa can be any naturally occurring amino acid
  Transcript Sequence Number=SeqID_40337
  Homolog annotation: Hit_ID=Q7FA49; Match level="QueryCoverage=99%, HitCoverage=19%, E-value=4e-88, Identity=90%"; Hit description =OSJNBa0013K16.3 protein
CPMKPTAEVWGALLSACKIHGNNELAELAAKHLFELDSPDSGSYMLMAKIYADAGKSDDSAQVRKLMRDKGIKKNPGYSWMEVGNKVHTFKADDVSHPQVIAIRNKLDELMGKIASXGYVRTESPRSEIHHSEKLCVAFGLMTLPDWMPIHIMKNLRICSDCHTXIKLISS

SEQ ID NO: 106312 - protein, 161 aa, Setaria italica
  Transcript Sequence Number=SeqID_40338
MGVGQSYVMPAETLSCSENKEMTDALETGSGYACVAVHDIDINELPATEPSPFAENSSPPADIEVHSGEFALSGCNQGEQNEGFVRAQTSVKKDKQQDGQGDRQASTGQNTAEVISSGIMLHEHPHLSQNLHQTDKSEGLQSEIFESGGVLHLLLLAASSA

SEQ ID NO: 106313 - protein, 71 aa, Setaria italica
  misc_feature (33)..(33): Xaa can be any naturally occurring amino acid
  Transcript Sequence Number=SeqID_40339
  Subcellular localization annotation: CTP_CleavageSite=45; ConfidenceScore=5.73e-01
DDPPGSPIPNPDRCAAASPPSSRCRSCSRSPAXSSSLPPPPPPPRTMSSASGASLRACSWWSEAIKHPKVG

SEQ ID NO: 106314 - protein, 155 aa, Setaria italica
  Transcript Sequence Number=SeqID_40340
  Gene Ontology: Mol. function=nucleotide binding; Biological process =defense response
  Homolog annotation: Hit_ID=Q53L10; Match level="QueryCoverage=83%, HitCoverage=14%, E-value=9e-23, Identity=43%"; Hit description=NB -ARC domain containing protein
YLDINVDPVQEETLEILGNLPSLMCLWITSKAADPKERLVVSSSMFICLKEFQFTCWRNRVGLMFEAGAMPRLEKLRVPFNACSGLNFGIEHLSSLKHIIIEIICSGATVHEVKALEEAIRNTADLLPNRPTLLVRTWDEENMVEESMTEEEIHT

SEQ ID NO: 106315 - protein, 68 aa, Setaria italica
  Transcript Sequence Number=SeqID_40341
  Pfam annotation: Domain name=Sec61_beta; Domain location=32-68; Score= 45.7; E_value=1.8e-10; Accession=PF03911.8; Description=Sec61beta family
  Subcellular localization annotation: CTP_CleavageSite=10; ConfidenceScore=5.29e-01
MVANGDAPARGSAAAAASLRRRRTTSGAAGGGGGASSMLQFYTDEAAGAKMSPNTVLIMSIGFIAVVA

SEQ ID NO: 106316 - protein, 81 aa, Setaria italica
  Transcript Sequence Number=SeqID_40342
  Gene Ontology: Cellular component=endoplasmic reticulum membrane; Biological process=intracellular protein transmembrane transport
  Homolog annotation: Hit_ID=B4FEC8; Match level="QueryCoverage=54%, HitCoverage=54%, E-value=4e-16, Identity=90%"; Hit description =Protein transport protein Sec61 beta subunit
  Pfam annotation: Domain name=Sec61_beta; Domain location=32-77; Score= 85.2; E_value=2.3e-22; Accession=PF03911.8; Description=Sec61beta family
  Subcellular localization annotation: CTP_CleavageSite=10; ConfidenceScore=5.33e-01
MVANGDAPARGSAAAAASLRRRRTTSGAAGGGGGASSMLQFYTDEAAGAKMSPNTVLIMSIGFIAVVAMLHVFGKLYRTAN

SEQ ID NO: 106317 - protein, 108 aa, Setaria italica
  Transcript Sequence Number=SeqID_40343
  Homolog annotation: Hit_ID=B4FAY8; Match level="QueryCoverage=51%, HitCoverage=37%, E-value=5e-17, Identity=83%"; Hit description =Negatively light-regulated protein
PPPCVATTRYGDDRRSRIFPFRLADPARRRRELKFTMSGMASDDVTAQVRVEGDVSDQKVEDVQGQNEMDGMPSRQEEEAAIKKKYGGILPRMKWMGCPRDKRRRQQL

SEQ ID NO: 106318 - protein, 34 aa, Setaria italica
  Transcript Sequence Number=SeqID_40344
RRTSYASADSDETLNLSAEDLGQQGEPVEDKNKE

SEQ ID NO: 106319 - protein, 141 aa, Setaria italica
  Transcript Sequence Number=SeqID_40345
  Gene Ontology: Cellular component=plasma membrane
  Homolog annotation: Hit_ID=B4FAY8; Match level="QueryCoverage=100%, HitCoverage=100%, E-value=4e-65, Identity=87%"; Hit description =Negatively light-regulated protein
  Pfam annotation: Domain name=Endosulfine; Domain location=28-121; Score=-15.4; E_value=0.059; Accession=PF04667.9; Description=cAMP -regulated phosphoproteinendosulfine
  Pfam annotation: Domain name=Lg106; Domain location=47-140; Score =153.5; E_value=6.4e-43; Accession=PF07844.3; Description=Lg106-like protein
  Pfam module annotation: Pfam domain module=Endosulfine::Lg106; Domain location=28-121::47-140
MSGMASDDVTAQVRVEGDVSDQKVEDVQGQNEMDGMPSRQEEEAAIKKKYGGILPRKTPLISKDHERAYFDSADWALGKQGGVPNKPKGPLEALRPKLQPTQQNARARRTSYASADSDETLNLSAEDLGQQGEPVEDKNKE

SEQ ID NO: 106320 - protein, 62 aa, Setaria italica
  Transcript Sequence Number=SeqID_40346
VGVPQWIDHIPILLVGPIAALPDSFIGYKDCAGLPAAVSWNAMAQINLLYSQNRRWTGNKVY

SEQ ID NO: 106321 - protein, 50 aa, Setaria italica
  Transcript Sequence Number=SeqID_40347
TSHSFSKFQAEKDELRDEKQKLKLEKESLEHQMKLMTSAPAYMPHPTLMP

SEQ ID NO: 106322 - protein, 110 aa, Setaria italica
  Transcript Sequence Number=SeqID_40348
  Gene Ontology: Mol. function=transcription regulator activity; Cellular component=nucleus; Biological process=regulation of transcription
  Homolog annotation: Hit_ID=B6UCV4; Match level="QueryCoverage=81%, HitCoverage=38%, E-value=1e-39, Identity=84%"; Hit description=BHLH transcription factor
MSLPPAPAEGGGGGGSAGDDWFLDCGILDDLPAAACGAFPWDASPSSSNPSVEVGSYVNTNDVFKEPGSNKRLRSGSSGRPTSKASREKQRRDKLNDRFLELGSTLEPGK

SEQ ID NO: 106323 - protein, 249 aa, Setaria italica
  Transcript Sequence Number=SeqID_40349
  Gene Ontology: Mol. function=transcription regulator activity; Cellular component=nucleus; Biological process=regulation of transcription
  Homolog annotation: Hit_ID=B6UCV4; Match level="QueryCoverage=91%, HitCoverage=92%, E-value=4e-91, Identity=73%"; Hit description=BHLH transcription factor
  Pfam annotation: Domain name=HLH; Domain location=80-131; Score=42.4; E_value=1.8e-09; Accession=PF00010.18; Description=Helix-loop-helix DNA-binding domain
MSLPPAPAEGGGGGGSAGDDWFLDCGILDDLPAAACGAFPWDASPSSSNPSVEVGSYVNTNDVFKEPGSNKRLRSGSSGRPTSKASREKQRRDKLNDRFLELGSTLEPGKPIKADKAAILSDATRMVIQLRSEAQQLKDTNGSLEEKIKELKAEKDELRDEKQKLKLEKESLEHQMKLMTSAPAYMPHPTLMPAPFPQAPLAPFHPQGQAAGQKLMMPFVSYPGYPMWQFMPPSEVDTSKDSEACPPVA

SEQ ID NO: 106324 - protein, 143 aa, Setaria italica
  misc_feature (75)..(75): Xaa can be any naturally occurring amino acid
  Transcript Sequence Number=SeqID_40350
  Homolog annotation: Hit_ID=B6SK84; Match level="QueryCoverage=94%, HitCoverage=31%, E-value=1e-17, Identity=37%"; Hit description=F-box domain containing protein
DECPFLKPWLVVCGDMLLIVGYHFHYISLLSGALASCKAYRLDMSTEPATWVEAAKLENHALFTGGDVRSPAFSXTSPGRWSGRTNCLYYAHDTQPWSLHGLGNDADAVWADSTDPDLVFMRTWYRQLQPFWVYPSMLYSDGQ

SEQ ID NO: 106325 - protein, 91 aa, Setaria italica
  Transcript Sequence Number=SeqID_40351
  Gene Ontology: Mol. function=4 iron, 4 sulfur cluster binding; Cellular component=nucleus; Biological process=regulation of transcription, DNA-dependent
  Homolog annotation: Hit_ID=B3W6G6; Match level="QueryCoverage=54%, HitCoverage=2%, E-value=5e-22, Identity=92%"; Hit description =Putative transcriptional activator DEMETER
MQKHLADSGASGASTEHLICSRLVTYALRTYVSGLSTEDIQHCFWRGFVCVRGFDRTSRAPRPLYARLHFPASKITRNKKAAAFAASRDDE

SEQ ID NO: 106326 - protein, 798 aa, Setaria italica
  misc_feature (240)..(240): Xaa can be any naturally occurring amino acid
  Transcript Sequence Number=SeqID_40352
  Gene Ontology: Mol. function=4 iron, 4 sulfur cluster binding; Cellular component=nucleus; Biological process=base-excision repair
  Homolog annotation: Hit_ID=B3W6G6; Match level="QueryCoverage=98%, HitCoverage=40%, E-value=0.0, Identity=63%"; Hit description =Putative transcriptional activator DEMETER
  Pfam annotation: Domain name=EndIII_4Fe-2S; Domain location=414-430; Score=21.7; E_value=0.0031; Accession=PF10576.1; Description=Iron -sulfur binding domain of endonucle
  Pfam annotation: Domain name=HhH-GPD; Domain location=242-379; Score =53.8; E_value=6.6e-13; Accession=PF00730.17; Description=HhH-GPD superfamily base excision DNA repair protein
  Pfam module annotation: Pfam domain module=EndIII_4Fe-2S::HhH-GPD; Domain location=414-430::242-379
KERGPTPTNEVNKNLRKKTINHLYTSDTYQQNGQVHFGGIASGSDLGRSSSYTALNTVDYSNGTQAETTFQYPSSDHGFPSTIKPTTVDSLGALLYGKNGSLSQDKSPLPSKPTEGADLSPLVDIYFHPSSSEHRNPNLQDEITIGTKPIGHQNFQSEFKEPTDKVEIQTVKVRDGYSSNLCQNKKANFEISEGVASYMADNSRDAKKVSSEVPIDGSKAKKSKVGTGKKRTYDWDILRXEVLCNIGKKERGHNAKDSIDWETIRQADVKEISETIRERGMNNMLAERIKEFLNRLVRDHGSIDLEWLRYVDPDKAKDYLLSIRGLGLKSVECVRLLTLHHMAFPVDTNVGRICVRLGWVPLQPLPESLQLHLLELYPMLENIQKYLWPRLCKLDQRTLYELHYQMITFGKVFCTKSKPNCNACPMRAECKHFASAFASARLALPGPAEKSLVTSGTPTAAEGSNHAYTNFRTVSQNESCNQTNISSGPVSQLEWNSHTHGDVVEKCRPIIEEPASPELEPEAAEIKEDIEDAFIDDPEEIPTIKLNFTEFTQNLKNYMQANNIEIEDADMSKALVAITPEAASIPTPKLKNISRLRTEHQVYELPDSHPLLEGLDQREPDDPCPYLLSIWTPGETAQSTDAPQTFCNSQESGKLCESATCFSCNSIREAQAQKVRGTILIPCRTAMRGSFPLNGTYFQVNEVFADHDSSRNPIDIPRSSIWNLPRRTVYFGTSVPTIFKGLSTEDIQHCFWRGFVCVRGFDRTSRAPRPLYARLHFPASKITRNKKAAAFAASRDDE

SEQ ID NO: 106327 - protein, 81 aa, Setaria italica
  Transcript Sequence Number=SeqID_40353
STVMLPRREENALLLFYLKENGSCTAVCEFITFLVNFLYEALLSSLFSRTFLPIVLAQLYAYTLVLFFRDLVFTIPRQAKI

SEQ ID NO: 106328 - protein, 112 aa, Setaria italica
  Transcript Sequence Number=SeqID_40354
  Gene Ontology: Cellular component=cytoplasm; Biological process =response to stress
  Homolog annotation: Hit_ID=Q94KM0; Match level="QueryCoverage=75%, HitCoverage=52%, E-value=2e-38, Identity=90%"; Hit description=Small heat shock protein HSP17.8
  Pfam annotation: Domain name=HSP20; Domain location=7-110; Score =179.0; E_value=1.4e-50; Accession=PF00011.13; Description=Hsp20alpha crystallin family
PWRDPADVKELPSSYAFVVDMPGLGTGDIKVQVEDERVLVISGERRREEREDAKYLRMERRMGKFMRKFVLPDNADMDKISAVCKDGVLTVTVEKLPPPEPKKPKTIEVKVA

SEQ ID NO: 106329 - protein, 63 aa, Setaria italica
  Transcript Sequence Number=SeqID_40355
  Subcellular localization annotation: CTP_CleavageSite=60; ConfidenceScore=5.47e-01
SNCMSVHSIPVNNMKSLPCVFWHVNHTSKSCISSTNPMFVSLPFGALLLYLAIGVSFLLSSMN

SEQ ID NO: 106330 - protein, 423 aa, Setaria italica
  Transcript Sequence Number=SeqID_40356
  Gene Ontology: Mol. function=protein serine/threonine kinase activity; Biological process=protein amino acid phosphorylation
  Homolog annotation: Hit_ID=B6T9K5; Match level="QueryCoverage=98%, HitCoverage=99%, E-value=0.0, Identity=88%"; Hit description =Serine/threonine-protein kinase receptor
  Pfam annotation: Domain name=Pkinase; Domain location=99-370; Score =143.4; E_value=7.1e-40; Accession=PF00069.17; Description=Protein kinase domain
  Pfam annotation: Domain name=Pkinase_Tyr; Domain location=99-370; Score=112.5; E_value=1.4e-30; Accession=PF07714.9; Description =Protein tyrosine kinase
  Pfam module annotation: Pfam domain module=Pkinase::Pkinase_Tyr; Domain location=99-370::99-370
MAPEGLLGVHRRLLDEAPAPVSDVTGHGSGSGSSSEAMRIMVGVLVTVIVCTLLYCVYCWRWRKRNAIRRSLLDSLWPRSSSDLPLMDLASILAATDNFSEANKLGEGGFGPVYRGVLSGGSEIAVKRLSARSRQGSAEFRNEVELIAKLQHRNLVRLLGWCAERDEKLLVYEYLPNRSLDAFVFDPSKSAQLGWSTRHDVILGIARGLLYLHEDSLLKVVHRDLKASNVLLDHKMSPKISDFGMAKIFEDDSDAINTGRIVGTYGYMAPEFALEGVFSVKSDVFSFGVLLLEILSGQRNGALYLEEHQQSLIQDAWKLWTQDLAAEFMDPSLGRSYSKDEAWRCYHVGLLCVQENPDVRPTMSNVLLMLISDHMKLPDPAMPPLFTRLRKIPLSAMPLTTKTESTTSPQSINDVSITIIEPR

SEQ ID NO: 106331 - protein, 157 aa, Setaria italica
  Transcript Sequence Number=SeqID_40357
  Gene Ontology: Mol. function=protein dimerization activity; Cellular component=membrane; Biological process=regulation of transcription, DNA-dependent
  Homolog annotation: Hit_ID=B6SSU4; Match level="QueryCoverage=94%, HitCoverage=30%, E-value=2e-30, Identity=50%"; Hit description=DNA binding protein
  Pfam annotation: Domain name=bZIP_1; Domain location=92-155; Score =39.3; E_value=1.5e-08; Accession=PF00170.13; Description=bZIP transcription factor
  Pfam annotation: Domain name=bZIP_2; Domain location=92-148; Score =26.0; E_value=0.00016; Accession=PF07716.7; Description=Basic region leucine zipper
  Pfam module annotation: Pfam domain module=bZIP_1::bZIP_2; Domain location=92-155::92-148
  Subcellular localization annotation: CTP_CleavageSite=59; ConfidenceScore=5.37e-01
GGGGSTSQRRHCRSLSVDSIMGNLNFGALGQVSPTLPPPSPVSGPGGSGSHTGSGPSGSAAAVATSELANGEFTESEMKKIMANDRLAEIALADPKRVKRILANRISAAKSKERKVKYMGELERRVHVLQMETSTLFSKANFSQRECEVLKTQNNEI

SEQ ID NO: 106332 - protein, 97 aa, Setaria italica
  Transcript Sequence Number=SeqID_40358
TVIGKAKDRVESLKGHAVSPTYGSKCDEKHLAQHMSSQFTADSMAACRMLLDMFLGARRSVEPFWNSTTHAHQATNRVQWMISKSTEREGLACQDLS

SEQ ID NO: 106333 - protein, 111 aa, Setaria italica
  misc_feature (69)..(69): Xaa can be any naturally occurring amino acid
  Transcript Sequence Number=SeqID_40359
  Gene Ontology: Mol. function=flavin-containing monooxygenase activity; Biological process=cellular aromatic compound metabolic process
  Homolog annotation: Hit_ID=Q65XC6; Match level="QueryCoverage=90%, HitCoverage=29%, E-value=2e-35, Identity=69%"; Hit description =Putative dimethylaniline monooxygenase
SVSSHAEYDEQLLLWRVSSQTSGAMGEEVQYVSRWLIIATGENAEAVQPDIDGLQEFPGTVLHTSAYKXSGSAFTGKRVLVLGCGNSGMEVCLDLCNHNAEPHIVVRDANY

SEQ ID NO: 106334 - protein, 251 aa, Setaria italica
  Transcript Sequence Number=SeqID_40360
  Homolog annotation: Hit_ID=B9R7J2; Match level="QueryCoverage=78%, HitCoverage=22%, E-value=3e-23, Identity=35%"; Hit description =Signal peptidase I, putative
  Subcellular localization annotation: CTP_CleavageSite=81; ConfidenceScore=5.12e-01
RLSRYVGPLPWPPQPRVTRRKLTRKTILSHPHSIGLLANGSLLSSSNNLSQIWPWSTTCAPLLQVGVVGSVVIVVHQTSVSGGHVKTELRSHDTMELLPDKCQVNVSNRLISACLFCSISPRLIKLERILKSWFSKRNMENSSMHFIEAKVTSIPLVKFRLELERDITEEDPIWKDVPEWKTLPIVQRVTLDIVARVEDDDRLKAISVKKVRQPFPIVDTTSWGSLTSNVSFTQFMSFVLPPEPLSLDVKW

SEQ ID NO: 106335 - protein, 365 aa, Setaria italica
  misc_feature (8)..(8): Xaa can be any naturally occurring amino acid
  misc_feature (96)..(96): Xaa can be any naturally occurring amino acid
  misc_feature (268)..(268): Xaa can be any naturally occurring amino acid
  Transcript Sequence Number=SeqID_40361
  Gene Ontology: Mol. function=nucleic acid binding; Cellular component= intracellular
  Homolog annotation: Hit_ID=B9RAP0; Match level="QueryCoverage=34%, HitCoverage=7%, E-value=1e-44, Identity=62%"; Hit description =Nucleic acid binding protein, putative
LSCVTCGXSFSCVAVIKPRECAAKWLMSADSSLINKQLAGSGESHLIDALQGSDFEMNRNRIISDAASLDRNSALDLLASAYGDASDSDEDVLNKXIQASNVSNELISHTIESPPNSSSNGGCDGTNMSSSSKERQQGPSSQSSQCIGNTNNGPKGVRTRNKYQLKMVLSEGFLPKDIYSEMQKKVQCEPSRSNMTSTEPIHGTDCQASRNSATVCMDGNRSTTTTVDNLATSIVKPDKDSSRMHVFCLEHAIEVEKQLRTIGGAHIXLLCRPEYPKIEVEAKLLAEEMEVKYDWKDIVFKEASIEDRKKIQEVVQDEETIPTHSDWAVKLGINLYYSANLAKSPLYNKQLPYNRVIYKAFGCSS

SEQ ID NO: 106336 - protein, 399 aa, Setaria italica
  Transcript Sequence Number=SeqID_40362
  Gene Ontology: Mol. function=prenyltransferase activity; Cellular component=integral to membrane
  Homolog annotation: Hit_ID=B6U7K6; Match level="QueryCoverage=96%, HitCoverage=96%, E-value=0.0, Identity=90%"; Hit description =Homogentisate geranylgeranyl transferase
  Pfam annotation: Domain name=UbiA; Domain location=120-398; Score =82.6; E_value=1.5e-21; Accession=PF01040.10; Description=UbiA prenyltransferase family
  Subcellular localization annotation: CTP_CleavageSite=42; ConfidenceScore=5.11e-01
MDALRLRPSLLSARPGAARPRDHFLPPFCSIQRNGEARVCFSSQRTQGPSLYQSQKFFDWKSSYCRISRQSISTSINASGQQLQSEPEAHDSASIWKAISSSLDAFYRFSRPHTVIGTALSIVSVSLLAVQSLSDISPLFLTGLLEAVVAALFMNIYIVGLNQLFDIEIDKVNKPTLPLASGEYTPATGVAIVSVFAAMSFGVGWAVGSQPLFWALFISFVLGTAYSINLPYFRWKRFAVVAALCILAVRAVIVQLAFFLHIQTFVFRRPAVFTRPLLFATGFMTFFSVVIALFKDIPDIEGDRIFGIRSFSVRLGQKKVFWICVGLLEMAYSVAILMGATSTSLWSKTATIAGHSILAAILWSCARSVDLTSKAAITSFYMFIWKLFYAEYLLIPLVR

SEQ ID NO: 106337 - protein, 91 aa, Setaria italica
  Transcript Sequence Number=SeqID_40363
WQALRFLNRTYESHNVSSNTSIRRGTSEQQVPLVEKTERELDLEVLADMGSLGKLRLASHFSSFANTCSIISHGHICLLKSCCFTDFLSQQ

SEQ ID NO: 106338 - protein, 147 aa, Setaria italica
  Transcript Sequence Number=SeqID_40364
MEQPTDMEKKDASALQRSLSAVTYCCGACGYDLRLRSSDRNTAGIVGGGYGRAARRGVVPFDAIDDARFGHADEFRCVDVRARRLFVRRTRLLCRKCGASLGFAYDDRAGDARSPRYDIKIRALQPLASAADDDGGSADMATSPPGP

SEQ ID NO: 106339 - protein, 313 aa, Setaria italica
  Transcript Sequence Number=SeqID_40365
  Gene Ontology: Mol. function=DNA binding; Biological process =regulation of transcription
  Homolog annotation: Hit_ID=B4F7W7; Match level="QueryCoverage=100%, HitCoverage=100%, E-value=1e-127, Identity=74%"; Hit description=MYB- CC type transfactor
  Pfam annotation: Domain name=Myb_DNA-binding; Domain location=48-99; Score=42.1; E_value=2.2e-09; Accession=PF00249.23; Description=Myb -like DNA-binding domain
  Subcellular localization annotation: CTP_CleavageSite=46; ConfidenceScore=5.25e-01
MYSPKPEASFGSTHTNSVANQQQMELAGNNMGPSNGANNNNNLAARQRLRWTNELHERFVEAVTQLGGPDRATPKGVLRIMGVPGLTIYHVKSHLQKYRLAKYIPDASTDGNKADNKDPGDLLAGLEGSSGLPISEALKLQMEVQKRLHEQLEVQRQLQLRIEAQGKYLQKIIEEQQRLTGVKSETPAAGASVTVSSDQFPDSERTEPSTPAPTSESPTQVGASNRDTGERAEATKSTCHGDSLSRHEPLTPDSNCQNGSPPASPNHERAAKRQRGSGNEFVDVETDFSHPRHIFESSLGPEFEQYSMSYSGH

SEQ ID NO: 106340 - protein, 69 aa, Setaria italica
  misc_feature (1)..(23): Xaa can be any naturally occurring amino acid
  Transcript Sequence Number=SeqID_40366
XXXXXXXXXXXXXXXXXXXXXXXKFQESTEFRQNIITDPTTNKSPFLDHIQMISTSQVNAALNKEHKRR

SEQ ID NO: 106341 - protein, 431 aa, Setaria italica
  Transcript Sequence Number=SeqID_40367
  Gene Ontology: Mol. function=transferase activity, transferring glycosyl groups; Cellular component=nuclear membrane; Biological process=glycogen biosynthetic process
  Homolog annotation: Hit_ID=B6SY39; Match level="QueryCoverage=100%, HitCoverage=88%, E-value=0.0, Identity=91%"; Hit description =Transferase, transferring glycosyl groups
  Pfam annotation: Domain name=Glyco_transf_8; Domain location=8-232; Score=-3.1; E_value=9.8e-06; Accession=PF01501.12; Description =Glycosyl transferase family 8
MYMGTPRDYEFYVAVRVMMRSLTRVRADADRVLIASSDVPRDWVRAMTEEDGMRVVIVENLRNPYESNLGGINRRFKLTLNKLYAWTLVDYERVVMIDSDNIFLQNTDELFQCGQFCAVFINPCYFHTGLFVLQPSMDVFKGMLHDLEVGRENSDGADQGFLVGCYPDLLDKPMFHPPENGTKLNGTYRLPLGYQMDASYYYLKLHWHVPCGPNSVITFPSAPWFKPWYWWSWPILPLGLSWHKQRWDDLGYAAEMPVILMEVLMYIVIIAVTRLARPGMTKLCYNRRPEKQNALVQWLIKMAAIVAMVAAYSIPFFVIPRTVHPIMGWSIYLFGALALSVVVINAFLLPPLDVLTTWLAIVGMLFVMAFPWYHDGIVRVLAIFGYAFCSAPFLWASLVRMMDSVQTMLERDPLFPRLGEPAQEIEFSKLY

SEQ ID NO: 106342 - protein, 167 aa, Setaria italica
  Transcript Sequence Number=SeqID_40368
  Gene Ontology: Mol. function=ubiquitin thiolesterase activity; Cellular component=intracellular; Biological process=ubiquitin -dependent protein catabolic process
  Homolog annotation: Hit_ID=B6T8R6; Match level="QueryCoverage=86%, HitCoverage=62%, E-value=3e-51, Identity=70%"; Hit description =Ubiquitin carboxyl-terminal hydrolase isozyme L3
  Pfam annotation: Domain name=Peptidase_C12; Domain location=1-163; Score=101.9; E_value=2.2e-27; Accession=PF01088.13; Description =Ubiquitin carboxyl-terminal hydrolase, family 1
PVRGSVQFCDVYGLDDELLAMVPHPVLAVLFLYPLTSLDEEKEEPGASSASTAEGKDLSKKVYFTKQTVGNACGTVGVIHAIGNATSQIKLVEGSYFEKFYKKTADMDPVQRAAFLEEDDEMEDAHSVAATAGDTDANVDVNELFCYCFFLVVCIGCNFYCSLCIGT

SEQ ID NO: 106343 - protein, 107 aa, Setaria italica
  Transcript Sequence Number=SeqID_40369
  Subcellular localization annotation: CTP_CleavageSite=11; ConfidenceScore=5.55e-01
TGKKRSFCQVRKNVKFYNTTFLQILKSAAFLGNSSSEAALFTSLLRKSEGRFSSTVRLLCLFLAVIVSFEHAGTVSPSLPGAPTKFLPLSKPSGLNFSLRFLFPLQL

SEQ ID NO: 106344 - protein, 164 aa, Setaria italica
  misc_feature (136)..(136): Xaa can be any naturally occurring amino acid
  misc_feature (143)..(143): Xaa can be any naturally occurring amino acid
  Transcript Sequence Number=SeqID_40370
WKLDLLTAQATTITQGKKYRSSAKTRANGQLTGLDEKFAKRSLEMNAVLGKLAATTQELSYYHSEADIGVYLSYCDFQSYVRSNLACTKGLSRWFSKKFKKGPLQLVAKDDKPRGDFVNSHHSVVELNRINSIFAXSKRRYIXEAQSRICKKRNAIVSMLRIQL

SEQ ID NO: 106345 - protein, 85 aa, Setaria italica
  Transcript Sequence Number=SeqID_40371
GVGRFTFAYVQFEPRRLRFSCLRCASASAAALPPSAEEAASDSAVGRAVHSAGPVASGLGGGGWDHRPRRLPVISSSCGRSSVGE

SEQ ID NO: 106346 - protein, 69 aa, Setaria italica
  Transcript Sequence Number=SeqID_40372
HKDSIYLFYLHYVKHNVFRQYYVSTSWKEKEGKRKDHTKVVLQKRVSRRTLLTFSKITQSIWLELKRGA

SEQ ID NO: 106347 - protein, 66 aa, Setaria italica
  Transcript Sequence Number=SeqID_40373
LLAICCGLICFEGKNFLEEPPIHSFGKELGTIGVAQGGRKKSICWSCSYGCAKQKKKKKKKKLKEN

SEQ ID NO: 106348 - protein, 302 aa, Setaria italica
  misc_feature (251)..(251): Xaa can be any naturally occurring amino acid
  misc_feature (279)..(279): Xaa can be any naturally occurring amino acid
  Transcript Sequence Number=SeqID_40374
  Gene Ontology: Mol. function=2 iron, 2 sulfur cluster binding; Cellular component=peroxisome; Biological process=oxidation reduction
  Homolog annotation: Hit_ID=B9RIB6; Match level="QueryCoverage=100%, HitCoverage=22%, E-value=1e-130, Identity=73%"; Hit description =Xanthine dehydrogenase, putative
  Pfam annotation: Domain name=Ald_Xan_dh_C2; Domain location=1-302; Score=79.6; E_value=1.1e-20; Accession=PF02738.10; Description =Aldehyde oxidase and xanthine dehydrogenase, molybdopterin binding domain
KVVCRTKRIGGGFGGKETRSALFAAAASVPSYYLRRPVKIVLDRDIDMTITGQRHSFLGKYKVGFTNDGKMLALDLEIYNNGGNTLDQSLAVLQRAMLHSDNVYDILNIRVSGQVCLTNIPSNTAFRGFGAPQGMLIAENWIHHMAMELQRSPEEIKELNFHNDGIELHYGQLLQNCTISSVWNKLKSSCNFVEARKAVSNFNTNNRWRKRGISMVPTKLGISFGAKFMNQAGALVQVYTDGTVLVTHGGXEMGQGLHTKVAQVAALPFNIPLGSVFIXSETSTDKVPNASATASSASSDIY

SEQ ID NO: 106349 - protein, 487 aa, Setaria italica
  misc_feature (230)..(230): Xaa can be any naturally occurring amino acid
  Transcript Sequence Number=SeqID_40375
  Gene Ontology: Mol. function=peptidyl-prolyl cis-trans isomerase activity; Cellular component=nucleolus; Biological process=protein folding
  Homolog annotation: Hit_ID=B6SH56; Match level="QueryCoverage=100%, HitCoverage=97%, E-value=8e-32, Identity=51%"; Hit description=FK506- binding protein 39 kDa
  Pfam annotation: Domain name=FKBP_C; Domain location=393-484; Score =156.9; E_value=6.3e-44; Accession=PF00254.20; Description=FKBP-type peptidyl-prolyl cis-trans isomer
KPYTLTHSDCGGRLRLTQATLGDEAGKGEKGGGRKKCVLQCSVESKDPVYLCALVPEQSETCHLELEFDEVEVTFSVIGQRSVHLVGYYIADAYEEDMSDSDAESDSLQGSDEDGFLVDDDDNNMVMGYSDSEDDSDYDSESDDEEMAYDQRRGKSSVVIEEIQEDDKPSAGEVQKGSNKKRSSENGDKSQLQLVVRDPATESLESEDEDGFPVSFSESKKSSESVSKKXGGKDKEASNEDRKRKSGAITDRGDSSGDVKAENDGASKKKKKTKDKSTAMDNGKVNNDVKEVKQQDASAEPVSAKHKKKNKNTSASEAGTDEQSAKKNNIHKDGEAVTAQEANKKNKKKKAQDTNRSENQSPTGLVESDSKEPLQTRTFANGMIIQEMELGKPDGKKATNGKKVAMRYIGKLKNGTIFDSNVSGRPFEFRLGVGQVIKGWDVGVNGMRVGDKRRLTVPPSMGYGSQRVGPIPQNSTLIFDVELVNVK

SEQ ID NO: 106350 - protein, 54 aa, Setaria italica
  Transcript Sequence Number=SeqID_40376
QLNEDKSICALFLHYPKSCINPTVCVHELSESRYGTLICMVSTECSLAGLFYFS

SEQ ID NO: 106351 - protein, 157 aa, Setaria italica
  Transcript Sequence Number=SeqID_40377
  Gene Ontology: Mol. function=DNA binding
  Homolog annotation: Hit_ID=B6SY06; Match level="QueryCoverage=96%, HitCoverage=29%, E-value=8e-48, Identity=65%"; Hit description=DNA binding protein
FFSLQALADELVETKQPDHIPGSNGATTCSVSSGIPCPNHEQSVGVENLQLPDWVTSFPSYFEDWGTVAGYNQVGDIDSPVHEYLPRKCVPIGPEHQADIPEWRPRVSVSVTGGSGFCADLDCSSVSTSEPVSRGYDFESAKWIRDCVIPISSCSSP

SEQ ID NO: 106352 - protein, 280 aa, Setaria italica
  misc_feature (251)..(251): Xaa can be any naturally occurring amino acid
  Transcript Sequence Number=SeqID_40378
  Gene Ontology: Mol. function=DNA binding; Cellular component =intracellular
  Homolog annotation: Hit_ID=B6SY06; Match level="QueryCoverage=98%, HitCoverage=55%, E-value=1e-101, Identity=67%"; Hit description=DNA binding protein
  Pfam annotation: Domain name=Myb_DNA-binding; Domain location=147 -197; Score=29.3; E_value=1.6e-05; Accession=PF00249.23; Description =Myb-like DNA-binding domain
TKFAGYNQVGDIDSPVHEYLPRKCVPIGPEHQADIPEWRPRVSVSVTGGSGFCADLDCSSVSTSEPVSRGYDFESAKWIRDCVIPISSCSSPVDWVGDNKADCECSDEGSVRCARQHIIEARESLKMSLGHDKFCELGLCEMGEDIAQRWTDEEEKRFQRVVFSNSGSLGKNFWDHLPLAFPDKTSKDLVSYYFNVFMLRKRAQQNRSDLLHVDSDDDELHGESSVACHEEEDSAVESPKHEHFIDNSLPXEGDHKEYGGEHITGPSFHECTSECRHLPN

SEQ ID NO: 106353 - protein, 90 aa, Setaria italica
  Transcript Sequence Number=SeqID_40379
SSSWQATEDSPCNSLPIEGDHKEYGGEHITGPSFHECTSECRHLPNQMHLYSNAENIAQNVYDQDELRASFEGQHNGAHTPKGVQCAEFS

SEQ ID NO: 106354 - protein, 161 aa, Setaria italica
  Transcript Sequence Number=SeqID_40380
  Gene Ontology: Biological process=transcription
NLECLANGKTDVIQERVVHDLKYTENLPEIMSWGEFVDAPDSDIPLECNSTETAQDDPSFTDKAYLMLKPEKSLIGEDNADPSVLEFTCDAPSQEDNCQATIKSTENGSIHDLSPAKQPNVCLLIKSSPEKMDAEKLDTGSASIPGSTVQLNAISDAALTN

SEQ ID NO: 106355 - protein, 58 aa, Setaria italica
  Transcript Sequence Number=SeqID_40381
MDAAGYPHMQGTGSAASSSSCRAADYSAAWDAAQQQKRQRCQDSSSNDQVGSSTENKS

SEQ ID NO: 106356 - protein, 705 aa, Setaria italica
  misc_feature (129)..(129): Xaa can be any naturally occurring amino acid
  Transcript Sequence Number=SeqID_40382
  Gene Ontology: Mol. function=hydrolase activity, acting on glycosyl bonds; Cellular component=beta-galactosidase complex; Biological process=carbohydrate metabolic process
  Homolog annotation: Hit_ID=Q6Z6K4; Match level="QueryCoverage=99%, HitCoverage=95%, E-value=0.0, Identity=89%"; Hit description=Beta -galactosidase 4
  Pfam annotation: Domain name=Glyco_hydro_35; Domain location=16-323; Score=625.2; E_value=6.4e-185; Accession=PF01301.11; Description =Glycosyl hydrolases family 35
  Pfam annotation: Domain name=Glyco_hydro_42; Domain location=38-362; Score=-257.5; E_value=0.081; Accession=PF02449.7; Description=Beta -galactosidase
  Pfam module annotation: Pfam domain module=Glyco_hydro_35::Glyco _hydro_42; Domain location=16-323::38-362
RPSVLSNASVLYDHRSLVINGRRRILISGSIHYPRSTPEMWPGLIQKAKDGGLDVIQTYVFWNGHEPVQGQYHFADRYDLVRFIKLVKQAGLYVHLRIGPYVCAEWNFGGFPVWLKYVPGIRFRTDNGXPFKAAMQKFVEKIVSMMKSEGLFEWQGGPIIMAQVENEFGPMESVVGSGAKPYANWAAQMAVGTNTGVPWVMCKQDDAPDPVINTCNGFYCDYFTPNKKYKPTMWTEAWTGWFTKFGGAVPHRPVEDLAFAVARFIQKGGSFVNYYMYHGGTNFGRTAGGPFIANSYDYDAPIDEFGLLRQPKWGHLRDLHRAIKQAEPVLVSGDPTIQSLGNYEKAHVFKSKNGACAAFLSNYHMNSAVKVRFNGRHYDLPAWSISILPDCKTAVFNTATVKEPTLLPKMTPVLQFAWQSYSEDTNSLDDSAFTKDGLVEQLSLTWDKSDYLWYTTQVNIGANEQFLKSGQWPQLTVYSAGHSMQVFVNGRSYGSVYGSYENPKLTFNGHVKMWQGSNKISILSSAVGLPNTGNHFESWNVGVLGPVTVSGLNEGKRDLSHQKWTYQVGLKGESLGLHTVTGSSAVEWAGPGGKQPLTWHKALFNAPAGSSPVALDMGSMGKGQVWVNGHHAGRYWSYRAAAGGCGRCSYAGTYREGRCLSGCGDPSQRWYHVPRSWLKPSGNLLVVLEEYGGDLAGVALATRTT

SEQ ID NO: 106357 - protein, 185 aa, Setaria italica
  Transcript Sequence Number=SeqID_40383
  Gene Ontology: Mol. function=protein serine/threonine kinase activity; Cellular component=plasma membrane; Biological process =protein amino acid phosphorylation
  Homolog annotation: Hit_ID=B9RA95; Match level="QueryCoverage=98%, HitCoverage=7%, E-value=2e-76, Identity=74%"; Hit description=DNA binding protein, putative
  Pfam annotation: Domain name=Pkinase; Domain location=3-158; Score= -50.9; E_value=1.8e-05; Accession=PF00069.17; Description=Protein kinase domain
IPNLLIGDDGTLRIADFGLATFFDPGKTQPMTSRVVTLWYRPPELLLGATEYGVAVDLWSTGCILAELLAGKPIMPGQTEIEQLHKIFKLCGSPSEDYWAKAKLPDVTLFKPQRPYRRKIAETFKDFPPTALALLDTLLAIEPSARGTAVSALDSEFFRTKPLACDPASLPKYPPSKEYDAKLRR

SEQ ID NO: 106358 - protein, 72 aa, Setaria italica
  Transcript Sequence Number=SeqID_40384
  Subcellular localization annotation: CTP_CleavageSite=48; ConfidenceScore=5.27e-01
YHHHALHQIRPRSPFQAQLTLVLDPCSVRKSASDAGFRFMSSSASKIAAESDSYFLNTSQKMYSSKIGKCSN

SEQ ID NO: 106359 - protein, 191 aa, Setaria italica
  Transcript Sequence Number=SeqID_40385
  Gene Ontology: Mol. function=amino acid binding; Biological process =metabolic process
  Homolog annotation: Hit_ID=B6TMA2; Match level="QueryCoverage=94%, HitCoverage=41%, E-value=1e-87, Identity=86%"; Hit description=Amino acid binding protein
QSISTRGGDTISVTMDNSLSSVHTLIQIQCGDRKGLLYDIMRTVKDCNIQISYGRFYASQNRRCDVDLFVVQSDGKKILDLQRQGSLCCRLRMELLRPLRVALVDRGPDTELLVANPVEVSGKGRPLVFYDITLALKNLQKRIFLAEIGRHVVEDREWEVYRVHFGEEHDLSSSLRSKIVDGVTNMLMGRD

SEQ ID NO: 106360 - protein, 128 aa, Setaria italica
  Transcript Sequence Number=SeqID_40386
  Gene Ontology: Biological process=proteolysis
  Homolog annotation: Hit_ID=B6T084; Match level="QueryCoverage=100%, HitCoverage=57%, E-value=3e-65, Identity=89%"; Hit description =Pyrrolidone-carboxylate peptidase
  Pfam annotation: Domain name=Peptidase_C15; Domain location=2-128; Score=-132.4; E_value=0.017; Accession=PF01470.9; Description =Pyroglutamyl peptidase
FGANSGSHRFALENQAVNEATFRCPDELGWKPQRVPILSCDGSILHSRQTTLPVKEISESLQQMGYDVAPSDDAGRFVCNYVYYHSLRFAEKHGIRSLFVHFPLFLAIDEKVQMQFVASLLEVLASLN

SEQ ID NO: 106361 - protein, 176 aa, Setaria italica
  misc_feature (79)..(79): Xaa can be any naturally occurring amino acid
  Transcript Sequence Number=SeqID_40387
  Gene Ontology: Biological process=proteolysis
  Homolog annotation: Hit_ID=B9RFP0; Match level="QueryCoverage=98%, HitCoverage=64%, E-value=2e-55, Identity=60%"; Hit description =Pyroglutamyl-peptidase I, putative
  Pfam annotation: Domain name=Peptidase_C15; Domain location=67-172; Score=-138.4; E_value=0.047; Accession=PF01470.9; Description =Pyroglutamyl peptidase
LGTLHKVLESAIADRENGSSTQGQIIWIHFGVNSGATRFALENQAVNEATFRCPDELGWKPQVALLANILIILIYTYIXILLLHFISFIVPMQRVPIVPADGSISRTRETTLPVNELTKSLRKIGYDVVPSDDAGRFVCNYVYYHSLRFAEQHGIKSLFVHVPLFLTIDEEVQMHF

SEQ ID NO: 106362 - protein, 221 aa, Setaria italica
  Transcript Sequence Number=SeqID_40388
  Gene Ontology: Mol. function=cysteine-type peptidase activity; Cellular component=cytoplasm; Biological process=proteolysis
  Homolog annotation: Hit_ID=B6T084; Match level="QueryCoverage=99%, HitCoverage=100%, E-value=1e-106, Identity=83%"; Hit description =Pyrrolidone-carboxylate peptidase
  Pfam annotation: Domain name=Peptidase_C15; Domain location=11-221; Score=-85.6; E_value=4.7e-06; Accession=PF01470.9; Description =Pyroglutamyl peptidase
MGSEGPSPITVHVTGFKRFHGVAENPTERIVHNLLSFMEKRGLPKGLVLGSCTVLEAAGQGALRPLYELFESTVLDRENGSPNQGQVILLHFGANSGSHRFALENQAVNEATFRCPDELGWKPQRVPILSCDGSILHSRQTTLPVKEISESLQQMGYDVAPSDDAGRFVCNYVYYHSLRFAEKHGIRSLFVHFPLFLAIDEKVQMQFVASLLEVLASLNLQ

SEQ ID NO: 106363 - protein, 101 aa, Setaria italica
  Transcript Sequence Number=SeqID_40389
  Gene Ontology: Biological process=proteolysis
  Homolog annotation: Hit_ID=B6T084; Match level="QueryCoverage=89%, HitCoverage=41%, E-value=6e-31, Identity=75%"; Hit description =Pyrrolidone-carboxylate peptidase
MGSEGPSPITVHVTGFKRFHGVAENPTERIVHNLLSFMEKRGLPKGLVLGSCTVLEAAGQGALRPLYELFESTVLDRENGSPNQGQVILVRPHLRPILYQH

SEQ ID NO: 106364 - protein, 328 aa, Setaria italica
  Transcript Sequence Number=SeqID_40390
  Homolog annotation: Hit_ID=B6TAC1; Match level="QueryCoverage=100%, HitCoverage=100%, E-value=2e-49, Identity=46%"; Hit description =Early fruit mRNA
MVGGGRRGGAADEVKLNTGNVFAALESLKKKKKGDKGKAAGSSSSSRKKHGDGAAQQQEPPQKEVFWAPAPLTTKSWADVEDDDDDDYFATTAPPRPVWGTAGHRDEAGKDEEDVEDAVRAALQEDIESDDEDLDDEVDDGAEDEPEHEAEEAAVEPPMKTVAPPTAPPKDTERQLSKKELKKKELAELDAVLAELGLSGNSSNAAQDAEKKGANQTGDGEKKEDAPAPSESKTSKKKKKKDKSSKEAKETQEAADGSEETASAEPDEDTAVDVKERLKKMASMKKKKSSKEMDTAAKIAASEAAARSARLAAAKKKEKSHYNQQPVR

SEQ ID NO: 106365 - protein, 45 aa, Setaria italica
  Transcript Sequence Number=SeqID_40391
INQHFPSSLFIIEVQFIIDLEKTRTNDWLLQESGRVHRSKWVDTQ

SEQ ID NO: 106366 - protein, 46 aa, Setaria italica
  Transcript Sequence Number=SeqID_40392
IRLGGCNIVAAQDISNDCKTLNLGGCLYHLKQQILAKVPHFNNSIT

SEQ ID NO: 106367 - protein, 62 aa, Setaria italica
  Transcript Sequence Number=SeqID_40393
  Subcellular localization annotation: CTP_CleavageSite=24; ConfidenceScore=5.30e-01
MSLACLVCHGMNSPSHSLRSYSVSSSEEESRCGAAVACLARRVTPAGTSTSVGTSKVTPFPP

SEQ ID NO: 106368 - protein, 224 aa, Setaria italica
  misc_feature (58)..(58): Xaa can be any naturally occurring amino acid
  misc_feature (104)..(104): Xaa can be any naturally occurring amino acid
  Transcript Sequence Number=SeqID_40394
  Gene Ontology: Mol. function=phosphoinositide binding; Biological process=cell communication
  Homolog annotation: Hit_ID=Q2RAA5; Match level="QueryCoverage=100%, HitCoverage=22%, E-value=4e-98, Identity=74%"; Hit description=Phox domain-containing protein, putative, expressed
  Pfam annotation: Domain name=Nexin_C; Domain location=55-182; Score =40.4; E_value=7.1e-09; Accession=PF08628.4; Description=Sorting nexin C terminal
QIQKPVRAYSDSSNMSSLNTFEDPTGIPPEWMPTNVSVPLLNLVEKVFQLKRRGWIRXVMEDAIDEWIIRQINWLRRDDVIVQVIRWIQDTLWPNGIFFTKLEXINGIPVIRQFDKQSSGTGTSKKSCANSFEFQLEASRNASEVKKLLLDGTPSTLVSIIGYKQYRRSARDMYYFLQSNVCVKQLSYAMLEQAIVTIFPELRQLIDDIHEKGRKEQASFTYQL

SEQ ID NO: 106369 - protein, 908 aa, Setaria italica
  Transcript Sequence Number=SeqID_40395
  Gene Ontology: Mol. function=phosphoinositide binding; Cellular component=intracellular; Biological process=cell communication
  Homolog annotation: Hit_ID=Q2RAA5; Match level="QueryCoverage=99%, HitCoverage=87%, E-value=0.0, Identity=75%"; Hit description=Phox domain-containing protein, putative, expressed
  Pfam annotation: Domain name=PX; Domain location=556-665; Score=93.3; E_value=8.5e-25; Accession=PF00787.16; Description=PX domain
  Pfam annotation: Domain name=PXA; Domain location=106-289; Score =30.0; E_value=9.1e-07; Accession=PF02194.7; Description=PXA domain
  Pfam module annotation: Pfam domain module=PX::PXA; Domain location =556-665::106-289
MPKRMESVDDLIEEAKVRTVWWALCIFAISYFLTHTSKSMWTNVPMSILILAFLRYLSFKVEFRWREQSARKQTYLSQVSKRQLSSNDHRLSTVPPVSRWRRKVGSPSVEAAFESFTENILRDFVLDLFYSDITPDREAPELIRGLILHALGEVSGRVKEMNLVDLLTRDMVDLIGNHLDVFRKNQALIGADVMRTLSSEERDERLKQHLIVSQELHPALLSSEHEYKVLQEIVGGIMALVLRPQDAQSPLVRCFSRELMTCLVLQPVMNFASPIYMNELIVYLLNNNDTSNVGGNTNMSNTGTVMVVHDRSSYKGGSQGSQKESRNLTVEPSGLVPGNNSSMRTLVTSEGGKSKVSEDDHDSAIQPRQPDWAVVLDAATKRRSQVLAPENLENMWAIGRNYQKKMNKTDNSSRLKGSGGDNSPSAGAVGKEISSNFNERIASVDDKYMVNLMQSTNRNVQSAFVTGSHPLALQNKNEMKPKEMNQVNYSSKEKTHEASNSAKAELKRSSSTPDIEKRYLVKSNQPMVSSESGNARKNQDEKVVGLASHGEVVLHAPKIRCRVVGAYFEKLGSKSFAVYSIAVTDADNKTWFVKRRYRNFERLHRQLKEIPNYSLHLPPKSFLSSSVDDYLVHQRCILLDKYLQDLLSIANIAEQHEVWDFLSASSKNYSAGKSTSVMKTLAVNVDDAMDDIVRQFKGVSDGLKRAVGTPPSSATAQFTDNRMSLSWNHEETDNQNLHHRNFERARSLSDGDSNYEDLTSSANSGCHSDNEVNNKGHTSNDTKHIETYSGLDTQVSGQIQKPVRAYSDSSNMSSLNTFEDPTGIPPEWMPTNVSVPLLNLVEKVFQLKRRGWIRRQVLWISKQILQLVMEDAIDEWIIRQINWLRRDDVIVQVIRWIQDVRRLSFFLH

SEQ ID NO: 106370 - protein, 199 aa, Setaria italica
  Transcript Sequence Number=SeqID_40396
  Gene Ontology: Mol. function=phosphoinositide binding; Biological process=cell communication
  Homolog annotation: Hit_ID=Q2RAA5; Match level="QueryCoverage=90%, HitCoverage=17%, E-value=6e-77, Identity=75%"; Hit description=Phox domain-containing protein, putative, expressed
  Pfam annotation: Domain name=Nexin_C; Domain location=17-156; Score =41.7; E_value=2.9e-09; Accession=PF08628.4; Description=Sorting nexin C terminal
KVKKKGKLTKTKRRRGWIYRRNNTISKQMTQLVMEDAIDEWIIRQINWLRRDDVIVQVIRWIQDTLWPNGIFFTKLDGYKGNSGISQFDKQSSGTGTSKKSCANSFEFQLEASRNASEVKKLLLDGTPSTLVSIIGYKQYRRSARDMYYFLQSNVCVKQLSYAMLEQAIVTIFPELRQLIDDIHEKGRKEQASFTYQPN

SEQ ID NO: 106371 - protein, 44 aa, Setaria italica
  Transcript Sequence Number=SeqID_40397
FKEQGMLIAFHIFIYYELLHSVINIHNQFRFKISTWSIRRDFDY

SEQ ID NO: 106372 - protein, 233 aa, Setaria italica
  misc_feature (174)..(174): Xaa can be any naturally occurring amino acid
  Transcript Sequence Number=SeqID_40398
  Gene Ontology: Mol. function=binding; Cellular component=chloroplast; Biological process=regulation of transcription, DNA-dependent
  Homolog annotation: Hit_ID=B9S1X8; Match level="QueryCoverage=100%, HitCoverage=65%, E-value=7e-82, Identity=31%"; Hit description =Pentatricopeptide repeat-containing protein, putative
  Pfam annotation: Domain name=PPR; Domain location=125-159; Score =44.9; E_value=3.2e-10; Accession=PF01535.12; Description=PPR repeat
  Pfam annotation: Domain name=PPR; Domain location=160-193; Score=5.3; E_value=2.1; Accession=PF01535.12; Description=PPR repeat
  Pfam annotation: Domain name=PPR; Domain location=18-52; Score=40.4; E_value=7.2e-09; Accession=PF01535.12; Description=PPR repeat
  Pfam annotation: Domain name=PPR; Domain location=194-228; Score =46.9; E_value=8e-11; Accession=PF01535.12; Description=PPR repeat
  Pfam annotation: Domain name=PPR; Domain location=90-124; Score=45.6; E_value=1.9e-10; Accession=PF01535.12; Description=PPR repeat
  Pfam annotation: Domain name=TPR_4; Domain location=124-149; Score =7.9; E_value=5; Accession=PF07721.6; Description=Tetratricopeptide repeat
  Pfam annotation: Domain name=TPR_4; Domain location=17-42; Score =10.2; E_value=2.7; Accession=PF07721.6; Description=Tetratricopeptide repeat
  Pfam module annotation: Pfam domain module=PPR::PPR::PPR::PPR::PPR::TP R_4::TPR_4; Domain location=125-159::160-193::18-52::194-228::90 -124::124-149::17-42
AVAEELFLRFAGEGATVQVFNAMMGVYARSGRFDDARQLLDTMHERGIEPDLVSFNTLINARAKSGCLAAGVALDLLFEVRQAGLRPDVITYNTLISACSQSSNLEDAVTVFEEMMASECRPDLWTYNAMVSVHGRCGKAEEAERLFGELVEKGFMPDAVTYNSLLYAFAKEGXDKVERTCEDLVKAGFRKNEITYNTMIHMYGKMGRLDLLVGLYDEMRSMGCTPDSVTYTV

SEQ ID NO: 106373 - protein, 90 aa, Setaria italica
  misc_feature (30)..(30): Xaa can be any naturally occurring amino acid
  misc_feature (52)..(52): Xaa can be any naturally occurring amino acid
  misc_feature (75)..(75): Xaa can be any naturally occurring amino acid
  Transcript Sequence Number=SeqID_40399
  Gene Ontology: Mol. function=transferase activity, transferring glycosyl groups; Cellular component=cytoplasm; Biological process =nucleoside metabolic process
  Homolog annotation: Hit_ID=Q67G15; Match level="QueryCoverage=61%, HitCoverage=24%, E-value=5e-20, Identity=87%"; Hit description =Adenine phosphoribosyltransferase
MGEQENNNAGGGNNAMAVVDEAPAAANGEXGRAAGDPRLQGRPDAIRVVPHXPKPGIMFNDITPLLLRPAVFKDXVDMFVERYRGMDIAA

SEQ ID NO: 106374 - protein, 77 aa, Setaria italica
  Transcript Sequence Number=SeqID_40400
IKKLEKENGFSLTFPCLLKLFAFPERAGADVVECACLIGLPKFKVPICIFFFCHGPQIYSLHAQFVEGTEDSEIFHL

SEQ ID NO: 106375 - protein, 175 aa, Setaria italica
  Transcript Sequence Number=SeqID_40401
  Gene Ontology: Mol. function=transferase activity, transferring glycosyl groups; Cellular component=cytoplasm; Biological process =nucleoside metabolic process
  Homolog annotation: Hit_ID=Q6RYT6; Match level="QueryCoverage=100%, HitCoverage=81%, E-value=9e-80, Identity=89%"; Hit description =Adenine phosphoribosyltransferase
  Pfam annotation: Domain name=Pribosyltran; Domain location=27-151; Score=155.5; E_value=1.6e-43; Accession=PF00156.19; Description =Phosphoribosyl transferase domain
PRDNLPNDQYRVVPHFPKPGIMFNDITPLLLRPAVFKDAVDMFVERYRGMDIAAVAGIEARGFIFGPAIALAIGAKFIPLRKPKKLPGDAFSESYVLEYGTDCLEMHVGAIEPGERAVVVDDLVATGGTLSAAIRLLERAGADVVECACLIGLPKFKDFYKLNGKPVYILVESRK

SEQ ID NO: 106376 - protein, 122 aa, Setaria italica
  Transcript Sequence Number=SeqID_40402
  Gene Ontology: Mol. function=structural constituent of ribosome; Cellular component=large ribosomal subunit; Biological process =translation
  Homolog annotation: Hit_ID=B6TS41; Match level="QueryCoverage=81%, HitCoverage=81%, E-value=8e-40, Identity=83%"; Hit description =Structural constituent of ribosome
  Pfam annotation: Domain name=Ribosomal_L30; Domain location=20-71; Score=30.0; E_value=1e-05; Accession=PF00327.12; Description =Ribosomal protein L30pL7e
  Subcellular localization annotation: CTP_CleavageSite=41; ConfidenceScore=5.40e-01
MSGSAFNAFKSRVPVAWSPRLYITLVRGLPGTRRLHRRTLEAMRLRRCHRTVEHRTTPSLLGMLTQVKRLVVVETEEMYNARRQAEEERRAPRPPLVISHHPPAPTPKPAAAAAEGAAATAQ

SEQ ID NO: 106377 - protein, 207 aa, Setaria italica
  Transcript Sequence Number=SeqID_40403
  Gene Ontology: Mol. function=protein disulfide oxidoreductase activity; Cellular component=integral to membrane; Biological process=cell redox homeostasis
  Homolog annotation: Hit_ID=B4F8B3; Match level="QueryCoverage=100%, HitCoverage=64%, E-value=1e-110, Identity=91%"; Hit description =Glutaredoxin family protein
  Pfam annotation: Domain name=GST_C; Domain location=107-199; Score =4.1; E_value=0.045; Accession=PF00043.17; Description=Glutathione S -transferase, C-terminal domain
YHDIPYKVVEVNPLSQLDNKWSDYKKVPILTVDGEQLVDSSDIINILQGRIRPDDELTNEDEAKWRRWVDEHLVHVLSPNIYRTTSEALESFDYIAKHGNFSFTERFAVKYAGAAAMYMVSKKLKKKYNITDERASLYDAANTWVEALNGRDFLGGSKPNLADLAVFGVLRPIRYLRAGKDMVENTQIGEWYQRMEDAVGEPSRIEE

SEQ ID NO: 106378 - protein, 58 aa, Setaria italica
  misc_feature (38)..(58): Xaa can be any naturally occurring amino acid
  Transcript Sequence Number=SeqID_40404
VTSVVCTMLMLVTGASADKLAMVFIVLMNMRSDIQLKXXXXXXXXXXXXXXXXXXXXX

SEQ ID NO: 106379 - protein, 105 aa, Setaria italica
  misc_feature (82)..(82): Xaa can be any naturally occurring amino acid
  Transcript Sequence Number=SeqID_40405
  Gene Ontology: Mol. function=protein binding
FLVQNYEDKEESNANRNLERLEMAHIRLEAALEVSGKWQITDASLLRWRRKLKRAAQECDDTLHKCKQRILEDVETEKEGEXNSSFPVRMAHTTKSFVFSVISPN

SEQ ID NO: 106380 - protein, 75 aa, Setaria italica
  Transcript Sequence Number=SeqID_40406
MTEAWWRKTAKVSVIYVSIVAPFWCCSIHNEHFVASLVFTKRPEREMFMTLDTPEERFDWFKRKHEWMTRNDVPK

SEQ ID NO: 106381 - protein, 48 aa, Setaria italica
  Transcript Sequence Number=SeqID_40407
GMRLSITTSSHPNLLEECKTLMQHHFIPHIHIISINISNEVIPSQFIR

SEQ ID NO: 106382 - protein, 80 aa, Setaria italica
  Transcript Sequence Number=SeqID_40408
YLKLGRAAGNLGSSITLLKIHHSSSHPNLLEECKTLMQHHFIPESALVLRRRKLDRWERPKSFTAMESQGRFRLLRQVRI

SEQ ID NO: 106383 - protein, 82 aa, Setaria italica
  Transcript Sequence Number=SeqID_40409
PTVPLLRRQFWTNYELAHGLYILAARVLQKIMGVHLVHPCPSTNVRQFWTNYELGRAAGNLGSSITLLKIHHSCKHGHCRVS

SEQ ID NO: 106384 - protein, 110 aa, Setaria italica
  Transcript Sequence Number=SeqID_40410
THSNISKLHMGLKPGWRPARCPQARRNLVSILDHTKACYTIINCPTYSRICSYSHVNLHELSTPQDVPSIKALSVQFQFLFFNISISSYMKRNFSFFYTSRSQPPEPSVT

SEQ ID NO: 106385 - protein, 145 aa, Setaria italica
  Transcript Sequence Number=SeqID_40411
  Subcellular localization annotation: CTP_CleavageSite=58; ConfidenceScore=5.43e-01
PQLSGPQNTSRANEKDKTGPYSPTTILTQLTHQPSSHPVRSHRSSRPSLQPPPLTVTTAAAAPHPTTTTMGKAGKKATKKAAPIKPGGTVYQCKICKLEFKETLLELSLHHGTCLAKRELEAQKARSQRAQQIRGERPYYRSYSQ

SEQ ID NO: 106386 - protein, 49 aa, Setaria italica
  Transcript Sequence Number=SeqID_40412
KFVTGSDIGEYTRHFSKQTPPETEIVTQFLTFQQQHIPSNFLNLPIFLQ

SEQ ID NO: 106387 - protein, 181 aa, Setaria italica
  Transcript Sequence Number=SeqID_40413
  Gene Ontology: Mol. function=oxidoreductase activity; Biological process=tRNA processing
  Homolog annotation: Hit_ID=B6SR38; Match level="QueryCoverage=98%, HitCoverage=99%, E-value=1e-48, Identity=61%"; Hit description =Putativ eribonuclease P
  Subcellular localization annotation: CTP_CleavageSite=33; ConfidenceScore=5.51e-01
MPPPPSTAVSSILRPTPPPDFSFRTIPLPQIRRAAAGAASSRLVLARADSSGAARGEGAETVFFDGGAHYGDLAANLLLGLTLLWLPLTLAAVSRAFILRYRFTSRRVTVVSGLSGADRTDFPYSSVTSVVVVPRFIGEWGDIIITLRDGTKVDLRSVPRFREVADYCRSMAAAEGSLVTQ

SEQ ID NO: 106388 - protein, 40 aa, Setaria italica
  Transcript Sequence Number=SeqID_40414
ICVEVLFLTKCFSCFVYNFFKYNIQEVWDTALIDHEELMA

SEQ ID NO: 106389 - protein, 77 aa, Setaria italica
  Transcript Sequence Number=SeqID_40415
CLVEVLLNMSYSLHDITLCQSSCSSLKYVWKCFFFQKCFSCFVYNFFKYNIQEVWPFVPHDQSELCPFTFYHSYLER

SEQ ID NO: 106390 - protein, 66 aa, Setaria italica
  Transcript Sequence Number=SeqID_40416
HNSQIYVPLYYIWYCIYLIQMALHFQFLFSKCVFTLKILSPYYLLYTIYVRCLEYQIHGPGHQDCL

SEQ ID NO: 106391 - protein, 119 aa, Setaria italica
  Transcript Sequence Number=SeqID_40417
  Gene Ontology: Mol. function=catalytic activity; Biological process =metabolic process
MPLDASSKLSSLRRVMVAPTPLTPEARHQFRRRLPWVHLMELGLSLSLGGGGLMLTQADAAVIHHNSQPARQMSATKEAASTVPPLNKIQKIILGDISSRSSTSKHPVTGSNRQAFSKM

SEQ ID NO: 106392 - protein, 521 aa, Setaria italica
  Transcript Sequence Number=SeqID_40418
  Gene Ontology: Mol. function=acyl-CoA binding
  Homolog annotation: Hit_ID=B9T305; Match level="QueryCoverage=87%, HitCoverage=87%, E-value=1e-127, Identity=40%"; Hit description=Acyl- CoA binding protein, putative
  Pfam annotation: Domain name=Kelch_1; Domain location=149-195; Score =17.7; E_value=0.025; Accession=PF01344.17; Description=Kelch motif
  Pfam annotation: Domain name=Kelch_1; Domain location=201-246; Score =19.0; E_value=0.018; Accession=PF01344.17; Description=Kelch motif
  Pfam annotation: Domain name=Kelch_1; Domain location=251-296; Score =19.3; E_value=0.016; Accession=PF01344.17; Description=Kelch motif
  Pfam annotation: Domain name=Kelch_1; Domain location=33-78; Score =40.5; E_value=6.5e-09; Accession=PF01344.17; Description=Kelch motif
  Pfam annotation: Domain name=Kelch_1; Domain location=96-144; Score =10.4; E_value=0.19; Accession=PF01344.17; Description=Kelch motif
  Pfam annotation: Domain name=Kelch_2; Domain location=149-195; Score =39.0; E_value=1.9e-08; Accession=PF07646.7; Description=Kelch motif
  Pfam annotation: Domain name=Kelch_2; Domain location=200-246; Score =27.6; E_value=5e-05; Accession=PF07646.7; Description=Kelch motif
  Pfam annotation: Domain name=Kelch_2; Domain location=251-296; Score =13.4; E_value=0.73; Accession=PF07646.7; Description=Kelch motif
  Pfam annotation: Domain name=Kelch_2; Domain location=33-78; Score =37.3; E_value=6.1e-08; Accession=PF07646.7; Description=Kelch motif
  Pfam annotation: Domain name=Kelch_2; Domain location=96-144; Score =7.5; E_value=4.3; Accession=PF07646.7; Description=Kelch motif
  Pfam module annotation: Pfam domain module=Kelch_1::Kelch_1::Kelch _1::Kelch_1::Kelch_1::Kelch_2::Kelch_2::Kelch_2::Kelch_2::Kelch_2; Domain location=149-195::201-246::251-296::33-78::96-144::149 -195::200-246::251-296::33-78::96-144
MGEGINGDARFAAAPYDHWVLLDPAGGSPRPSARYKHAAQVVQDKLYVVGGSRNGRSLSDVQVFDFRTFTWSALNLTRDSNQLNHENNATGGSFPALAGHSLVKWKNNLVVVAGNTRSSSSSNKVSVWLIDVETNSWSAFDTYGKVPTARGGQSVSLLGSRLLMFGGEDNKRRLLNDFHILDLETMMWEEVKTEKGGPAPRYDHSAAVYADQYLLIFGGSSHSTCFNDLYLLDLQTLEWSQPDTQGAHIAPRSGHAGTMIDENWYIVGGGDNASGSTDTIVMNASKFVWSVVTSISARDPLACEGLTLCSTTVDGEKFLISFGGYNGKYSNEIFILRLKARNLVQPRLLQSPAAAAAAASVTAAYAVITATDEKTRDIVATDDFDIKKALPANYSKKFVVEIDAVNGEKDKLESRLAEVRDENSKLKDKLDLANLSYGELAKELESVQNQLAAEGSRCQKLESQIAAARKRLESAGSLENELEVLRQQISQVEQTMTTTQRQKSGGVWKWVAGSAEASDDE

SEQ ID NO: 106393 - protein, 334 aa, Setaria italica
  Transcript Sequence Number=SeqID_40419
  Gene Ontology: Mol. function=metal ion transmembrane transporter activity; Cellular component=membrane; Biological process=metal ion transport
  Homolog annotation: Hit_ID=B9GVM0; Match level="QueryCoverage=99%, HitCoverage=80%, E-value=1e-128, Identity=67%"; Hit description =Magnesium transporter
  Pfam annotation: Domain name=CorA; Domain location=2-332; Score =401.4; E_value=1.5e-117; Accession=PF01544.10; Description=CorA-like Mg2+ transporter protein
AGPLFVYPSTVLGRERAIVVNLEQIRCVITADEVLLLNSLDSYVLQYAAELQRRLLQRAEGDELPFEFRALELALEAACSFLDAQAAELEIEAYPLLDELTSKISTLNLERVRRLKSRLVALTRRVQKVRDEIEQLMDDDGDMAEMYLTEKKMRMESSVFGDQTLLGYNSTGAAGTSVSAPVSPVSSPTESRKLEKAFSLCRSRHDSVKSSDNTTTEHIQELEMLLEAYFVVIDSTLNKLTSLKEYIDDTEDFINIQLDNVRNQLIQFELLLTTATFVVAIFGVVAGIFGMNFETTVFKIHNAFSWTLIITGVVGAFIFSSFLWFFKYKRLMPL

SEQ ID NO: 106394 - protein, 114 aa, Setaria italica
  Transcript Sequence Number=SeqID_40420
  Gene Ontology: Mol. function=transposase activity; Cellular component= membrane; Biological process=transposition, DNA-mediated
  Homolog annotation: Hit_ID=Q10JS5; Match level="QueryCoverage=93%, HitCoverage=13%, E-value=2e-21, Identity=50%"; Hit description =Transposon protein, putative, CACTA, En/Spm sub-class
MFNLLHSSLRNVIKRYFGVLKQKWSILKGMPSFSPRTQKHIIMACLAFHNLIHDSNLCDKEFKRCDDDEEYLVQHTSGTRQTQGDESDDVENEDTMNTIRTRIADALVRARGGE

SEQ ID NO: 106395 - protein, 130 aa, Setaria italica
  Transcript Sequence Number=SeqID_40421
  Subcellular localization annotation: CTP_CleavageSite=49; ConfidenceScore=5.33e-01
EYHSEIFPASSPINALARSARGVHSSSRKERAGRPRKSQRKHGVASSVRAQAGVAGARPKASQGRIQPRNTQPHRQSPRSAVSRASNRKLPRFVYQLECLFLASQVPTGKCLTRSASSRPGHMDFLFRGL

SEQ ID NO: 106396 - protein, 53 aa, Setaria italica
  Transcript Sequence Number=SeqID_40422
MDYLNLRSSFHILLSIQLLLSLFNALVVADLASEKQALLDFISAVSHGNKLNW

SEQ ID NO: 106397 - protein, 639 aa, Setaria italica
  Transcript Sequence Number=SeqID_40423
  Gene Ontology: Mol. function=protein kinase activity; Cellular component=integral to membrane; Biological process=protein amino acid phosphorylation
  Homolog annotation: Hit_ID=B9T6G8; Match level="QueryCoverage=95%, HitCoverage=96%, E-value=0.0, Identity=57%"; Hit description =Nodulation receptor kinase, putative
  Pfam annotation: Domain name=LRRNT_2; Domain location=31-68; Score =37.3; E_value=6.2e-08; Accession=PF08263.4; Description=Leucine rich repeat N-terminal domain
  Pfam annotation: Domain name=LRR_1; Domain location=122-141; Score =8.0; E_value=9.1; Accession=PF00560.25; Description=Leucine Rich Repeat
  Pfam annotation: Domain name=LRR_1; Domain location=144-166; Score =13.4; E_value=0.83; Accession=PF00560.25; Description=Leucine Rich Repeat
  Pfam annotation: Domain name=LRR_1; Domain location=168-189; Score =11.8; E_value=1.7; Accession=PF00560.25; Description=Leucine Rich Repeat
  Pfam annotation: Domain name=LRR_1; Domain location=190-212; Score =16.0; E_value=0.16; Accession=PF00560.25; Description=Leucine Rich Repeat
  Pfam annotation: Domain name=LRR_1; Domain location=98-120; Score =17.0; E_value=0.079; Accession=PF00560.25; Description=Leucine Rich Repeat
  Pfam annotation: Domain name=Pkinase; Domain location=343-613; Score =96.3; E_value=1.1e-25; Accession=PF00069.17; Description=Protein kinase domain
  Pfam annotation: Domain name=Pkinase_Tyr; Domain location=342-613; Score=45.2; E_value=9.9e-17; Accession=PF07714.9; Description =Protein tyrosine kinase
  Pfam module annotation: Pfam domain module=LRRNT_2::LRR_1::LRR_1::LRR_ 1::LRR_1::LRR_1::Pkinase::Pkinase_Tyr; Domain location=31-68::122 -141::144-166::168-189::190-212::98-120::343-613::342-613
MDYLNLRSSFHILLSIQLLLSLFNALVVADLASEKQALLDFISAVSHGNKLNWDKNTSSCSWHGIKCSADQSHIFELRVPAAGLIGAIPPNTLGKLDSLQVLSLRSNRLTGSLPSDVASLPSLRSIYLQHNEFSEQLPSSFSPSLGVIDLSYNSFTGEVPASLQKLTQLTVLNLQDNSFFGSIPDLKLPSLKLLNLSNNELKGPIPRSLQTFPNGSFSGNPGLCGLPLAECVVPSPTPSPESSSLPQSPPLPHHKKKLGTGFIIAVAVGGFALLMLVVVVLVVCFLKRKHKDESDVESKGKGTVTRSEKPKQEFSSGVQIAEKNKLVFLEGCTYSFDLEDLLRASAEVLGKGSYGTAYKAILEDGTVVVVKRLKDVVAGKREFEQQMELIGRLGKHANLVPLRAYYYSKDEKLIVYDYIDTGSVSAMLHGIRGVTEKTPLDWNSRVKIILETAYGIAHIHAEGGTKLTHGNVKSTNVLVDKNHNPSVSDYGLSALMSVPVNASRVVVGYRAPETVENRKITQKSDVYSFGVLLMEMLTGKAPLQTQGNDDVVDLPRWVHSVVREEWTAEVFDVELMKEQNIEEELVQMLQIAMACTARSPDRRPTMEELIRMIEGLRQSATESRASSDEKPKESNPPSV

SEQ ID NO: 106398 - protein, 224 aa, Setaria italica
  Transcript Sequence Number=SeqID_40424
  Gene Ontology: Mol. function=cysteine-type endopeptidase activity; Cellular component=microtubule associated complex; Biological process=proteolysis
  Homolog annotation: Hit_ID=B6UBK1; Match level="QueryCoverage=100%, HitCoverage=49%, E-value=2e-94, Identity=78%"; Hit description=ICE -like protease p20 domain containing protein
  Pfam annotation: Domain name=MORN; Domain location=1-16; Score=3.2; E_ value=5.5; Accession=PF02493.12; Description=MORN repeat
  Pfam annotation: Domain name=MORN; Domain location=109-131; Score =29.9; E_value=1e-05; Accession=PF02493.12; Description=MORN repeat
  Pfam annotation: Domain name=MORN; Domain location=17-39; Score=34.0; E_value=6e-07; Accession=PF02493.12; Description=MORN repeat
  Pfam annotation: Domain name=MORN; Domain location=40-62; Score=35.3; E_value=2.4e-07; Accession=PF02493.12; Description=MORN repeat
  Pfam annotation: Domain name=MORN; Domain location=63-85; Score=35.5; E_value=2.1e-07; Accession=PF02493.12; Description=MORN repeat
  Pfam annotation: Domain name=MORN; Domain location=86-108; Score =35.3; E_value=2.4e-07; Accession=PF02493.12; Description=MORN repeat
  Pfam module annotation: Pfam domain module=MORN::MORN::MORN::MORN::MOR N::MORN; Domain location=1-16::109-131::17-39::40-62::63-85::86-108
GKYDGFGVETWARGSRYRGQYRQGLRHGYGVYRFYTGDVYAGEWSNGQSHGYGVHTCEDGSRYIGEFKRGVKHGLGHYHFRNGDTYAGEYFADRMHGFGVYSFANGHRYEGAWHEGRRQGLGMYSFRNGETQAGHWQNGVLDTLSTQNFIPGSPIAVNHSKVLNAVQEARRAAEKAYDIPRVDDKVNRAVAAANKAANAARVAAVKAAQKRIPNNGDDLPLSVV

SEQ ID NO: 106399 - protein, 175 aa, Setaria italica
  misc_feature (172)..(172): Xaa can be any naturally occurring amino acid
  Transcript Sequence Number=SeqID_40425
  Gene Ontology: Mol. function=sequence-specific DNA binding; Cellular component=nucleus; Biological process=regulation of transcription, DNA-dependent
  Homolog annotation: Hit_ID=B6TWI7; Match level="QueryCoverage=100%, HitCoverage=43%, E-value=6e-33, Identity=49%"; Hit description=GATA zinc finger family protein
  Subcellular localization annotation: CTP_CleavageSite=42; ConfidenceScore=5.18e-01
MAQQRRVPQPHVHDGAYRALPPAPGPLRTPTICALSTEALVPVKAKRSKRSRAPGWSLSGASFLSDSASSSSTTTTSSCSSSGSFSPFLFLDSAPFSSGLELAEGYYNHFLPAPASKKSKHGGGKGSKHKPKKRGRKPKHLPPNPSAAGAVASQPAPGDRRCSHCGVQKTPXWRA

SEQ ID NO: 106400 - protein, 135 aa, Setaria italica
  Transcript Sequence Number=SeqID_40426
  Gene Ontology: Mol. function=transferase activity; Cellular component= membrane
  Homolog annotation: Hit_ID=B9SCJ1; Match level="QueryCoverage=90%, HitCoverage=26%, E-value=4e-45, Identity=70%"; Hit description =Transferase, putative
SRFRTTYRSEMARSLFCLCPLGWAPWSPRLVESVLLGCIPVIIADNIRLPFPSVLRWPEISLQVAEKDIASLEMVLDHVVATNLTTIQKNLWDPVKRKALVFNHPMEVGDATWQVLRELEVLLDQSQRRYVGSWR

SEQ ID NO: 106401 - protein, 210 aa, Setaria italica
  misc_feature (70)..(70): Xaa can be any naturally occurring amino acid
  misc_feature (162)..(162): Xaa can be any naturally occurring amino acid
  misc_feature (171)..(171): Xaa can be any naturally occurring amino acid
  Transcript Sequence Number=SeqID_40427
  Homolog annotation: Hit_ID=Q12VA4; Match level="QueryCoverage=84%, HitCoverage=36%, E-value=5e-17, Identity=29%"; Hit description=TraB family protein
  Pfam annotation: Domain name=TraB; Domain location=1-173; Score=-8.2; E_value=1.4e-08; Accession=PF01963.9; Description=TraB family
LFGILYSWFLAKVASQLEVLPGAEFRVAFEEAMSYGGKVILGDRPVQITLRRTWGKMSLWLTATFLYYIXFQSIFLPSPEELNKMVCCFNGSFHPCHQLKDMDDVDMLTLVIQEMSKAFPSLMETLLHERDMYMSSKLLKVAREHSSVVAVVGKGHVSGIKXNWQQPIQVXSLLELPVANEGASKLKILASIGALSGVIIASGIYIWGRK

SEQ ID NO: 106402 - protein, 317 aa, Setaria italica
  misc_feature (269)..(269): Xaa can be any naturally occurring amino acid
  Transcript Sequence Number=SeqID_40428
  Homolog annotation: Hit_ID=C0GUA6; Match level="QueryCoverage=73%, HitCoverage=58%, E-value=2e-26, Identity=31%"; Hit description=TraB family protein
  Pfam annotation: Domain name=TraB; Domain location=52-280; Score =165.4; E_value=1.7e-46; Accession=PF01963.9; Description=TraB family
EGTRKAAGDDAGPGATTAGGGEEVRELPEELAKGVVCLECVTSAEAAAAGVGGTCRVYVVGTAHVSQESCDQVKAVINYLKPQAVFLELCASRIAILTPQNLQVPTMNEMIDMWKKKKMNTFGILYSWFLAKVASQLEVLPGAEFRVAFEEAMSYGGKVILGDRPVQITLRRTWGKMSLWHRAKFLYYIIFQSIFLPSPEELNKMLKDMDDVDMLTLVIQEMSKAFPSLMETLLHERDMYMSSKLLKVAREHSSVVAVVGKGHVSGIKXNWQQPIQVKSLLELPVANEGASKLKILASIGALSGVIIASGIYIWGRK

SEQ ID NO: 106403 - protein, 293 aa, Setaria italica
  misc_feature (193)..(193): Xaa can be any naturally occurring amino acid
  misc_feature (210)..(210): Xaa can be any naturally occurring amino acid
  Transcript Sequence Number=SeqID_40429
  Gene Ontology: Mol. function=protein serine/threonine kinase activity; Cellular component=chromatin; Biological process=protein amino acid phosphorylation
  Homolog annotation: Hit_ID=Q2QQD0; Match level="QueryCoverage=71%, HitCoverage=9%, E-value=2e-79, Identity=67%"; Hit description =Retrotransposon protein, putative, unclassified
  Pfam annotation: Domain name=Pkinase; Domain location=1-276; Score =58.2; E_value=3e-14; Accession=PF00069.17; Description=Protein kinase domain
  Pfam annotation: Domain name=Pkinase_Tyr; Domain location=1-276; Score=15.2; E_value=9.8e-15; Accession=PF07714.9; Description =Protein tyrosine kinase
  Pfam module annotation: Pfam domain module=Pkinase::Pkinase_Tyr; Domain location=1-276::1-276
TVHKGTMRGNRQHVVVAVKVLNLMQRGARQSFIAECETLRCVRHRNLVKILKVCSSIDFQGCDFKALVYEFLPNGNLDQRLHKQSMEDGEQKALDLIARLSIAIDVAASLDYLHEYKPTPIIHCDLKSSNVLLDNDMVAHVGDFGLARFLHRDTEKSSGWASMRGSIGYAAPDYGLGNEVTTHGDVYSYGILXLEMFTGKRPTDSEFGEXPDRLSTSADKRLLTETKDGEATGSLNSSSSRDMRIASVTCILDVGICCSEEMPTDRLPIGEALKNLQTIKEQFLQHLCSEGAS

SEQ ID NO: 106404 - protein, 182 aa, Setaria italica
  Transcript Sequence Number=SeqID_40430
  Gene Ontology: Mol. function=Rho guanyl-nucleotide exchange factor activity
  Homolog annotation: Hit_ID=B6SYQ2; Match level="QueryCoverage=97%, HitCoverage=32%, E-value=5e-90, Identity=89%"; Hit description =Pollen-specific kinase partner protein
  Pfam annotation: Domain name=PRONE; Domain location=2-182; Score= -81.9; E_value=6e-10; Accession=PF03759.5; Description=PRONE (Plant -specific Rop nucleotide
VYKRTKQEFWYVSKDADESEKGNMPRQDDKWWLPTVRVPPNGLSDAYRKWLQHQKDLVAQVLKAAMAINANILMEMEVPESYMESLPKNGKSTLGDSMYKLITDDYFDPEELLSSVDLSDEHNIVDLKNRVEASVVIWQKKMTHKDSKLSWGHGVSHEKRGMFEGRAENVFLLIKHRFPGIA

SEQ ID NO: 106405 - protein, 43 aa, Setaria italica
  Transcript Sequence Number=SeqID_40431
LVLLYGLAILRDIIIRSLWINLGPMINQNYLYLISPFVYFLTQ

SEQ ID NO: 106406 - protein, 79 aa, Setaria italica
  Transcript Sequence Number=SeqID_40432
ADLVPRHVLYMFDICWANSCNKIAKQFYAAHVMDKGKDHVCCWKPVLSMDLKSYLKTEFLHFCVIFKPYWGAAKSCIWI

SEQ ID NO: 106407 - protein, 261 aa, Setaria italica
  Transcript Sequence Number=SeqID_40433
  Gene Ontology: Cellular component=nucleus; Biological process=cell division
  Homolog annotation: Hit_ID=Q43693; Match level="QueryCoverage=100%, HitCoverage=51%, E-value=1e-133, Identity=87%"; Hit description=Type A-like cyclin
  Pfam annotation: Domain name=Cyclin_C; Domain location=125-252; Score= 181.7; E_value=2e-51; Accession=PF02984.11; Description=Cyclin, C -terminal domain
  Pfam annotation: Domain name=Cyclin_N; Domain location=1-123; Score =217.5; E_value=3.5e-62; Accession=PF00134.15; Description=Cyclin, N -terminal domain
  Pfam module annotation: Pfam domain module=Cyclin_C::Cyclin_N; Domain location=125-252::1-123
LREAETKKRPSTDFMETIQKDVNPSMRAILIDWLVEVAEEYRLVPDTLYLTVNYIDRYLSGNEINRQRLQLLGVACMLIAAKYEEICAPQVEEFCYITDNTYFRDEVLEMEASVLNYLKFEMTAPTAKCFLRRFARAAQACDEDPALHLEFLASYIAELSLLEYNLLSYPPSLIAASAIFLAKFVLQPTKYPWNSTLAHYTQYKPSQLCDCVKALHHLFSVGPASNLPAIREKYSQHKYKFVAKKQCPTSIPTEFFRDVTC

SEQ ID NO: 106408 - protein, 232 aa, Setaria italica
  misc_feature (223)..(223): Xaa can be any naturally occurring amino acid
  Transcript Sequence Number=SeqID_40434
  Homolog annotation: Hit_ID=Q10MH2; Match level="QueryCoverage=97%, HitCoverage=23%, E-value=8e-39, Identity=42%"; Hit description=Fip1 motif family protein, expressed
RSSFSSAKEWQQHHDHAYQSMLNADMSDADDGQMYRERYCQEKRRARHDHSVDGEFPHYTDYGFCERQSPEVRGRYRDKGRFAKSNDEHFRHANHLELYPSRKNSERDWPAAGFPFQNSRNICIDNKRIHNAKMVHYHRDGYHQKNNGNIPRSALCSDTVAEAERFILPVKRKLHADLGSMNQKCLADLSLLKGRRLVHDQSILSDRRIYALRLHKFTDEIDXKAICNSDDM

SEQ ID NO: 106409 - protein, 54 aa, Setaria italica
  Transcript Sequence Number=SeqID_40435
  Gene Ontology: Cellular component=integral to membrane; Biological process=response to stress
  Homolog annotation: Hit_ID=Q9ARD5; Match level="QueryCoverage=100%, HitCoverage=100%, E-value=2e-11, Identity=68%"; Hit description=Low temperature-induced protein lt101.2
  Pfam annotation: Domain name=UPF0057; Domain location=4-54; Score =92.4; E_value=1.5e-24; Accession=PF01679.9; Description =Uncharacterized protein family UPF0057
MGSETFLEILLAILLPPLGVFLRYGIGVEFWICLLLTILGYIPGIIYAVYVLVA

SEQ ID NO: 106410 - protein, 124 aa, Setaria italica
  Transcript Sequence Number=SeqID_40436
  Gene Ontology: Mol. function=oxidoreductase activity
  Homolog annotation: Hit_ID=B6TB94; Match level="QueryCoverage=79%, HitCoverage=31%, E-value=1e-35, Identity=75%"; Hit description =Nucleic acid binding protein
QIVFGNLKLLILLAHNQSKNVGGMESALRKAEDIVGSMLAKGFVLGMDAVDKAKAFDEKHQLTSTATAKVASLDKTMGLSQKFNTSTLVVNEKMKVMDEKYQVAEKTKSALAAAEQTVSTAGSA

SEQ ID NO: 106411 - protein, 147 aa, Setaria italica
  Transcript Sequence Number=SeqID_40437
  Gene Ontology: Mol. function=transferase activity, transferring glycosyl groups; Biological process=metabolic process
  Homolog annotation: Hit_ID=B6TBS7; Match level="QueryCoverage=93%, HitCoverage=30%, E-value=1e-66, Identity=89%"; Hit description =Cytokinin-O-glucosyltransferase 2
NDPATGHPPVTCVVSDVVMGFSIDAAKELGLPYVQLWTASTISFLGYQHYRLLMTRGLAPLKDVEQLTNGFLDTPVEDVPGLRNMRFRDFPSFIRTTDPDEFMVHYVLKETGRSAGASAVIFNTFDELEGEAVAAMESLGLARKLRH

SEQ ID NO: 106412 - protein, 115 aa, Setaria italica
  misc_feature (36)..(36): Xaa can be any naturally occurring amino acid
  Transcript Sequence Number=SeqID_40438
  Gene Ontology: Mol. function=protein serine/threonine kinase activity; Cellular component=integral to membrane; Biological process=protein amino acid phosphorylation
  Homolog annotation: Hit_ID=O24585; Match level="QueryCoverage=100%, HitCoverage=12%, E-value=5e-55, Identity=91%"; Hit description =Putative receptor protein kinase CRINKLY4
GSPCIEQPILPTEVVLGSSRMHKVSQMSSNHSCSEXELADGEDQRIEYRAPSWITFPSVTSSQRRKSSASEADITVRTTTEGRNAGSSIGDGLRSLEEEISPASPQENLYLQHNF

SEQ ID NO: 106413 - protein, 65 aa, Setaria italica
  misc_feature (12)..(12): Xaa can be any naturally occurring amino acid
  Transcript Sequence Number=SeqID_40439
  Gene Ontology: Mol. function=protein serine/threonine kinase activity; Cellular component=integral to membrane; Biological process=protein amino acid phosphorylation
  Homolog annotation: Hit_ID=B6C9J5; Match level="QueryCoverage=100%, HitCoverage=7%, E-value=6e-25, Identity=89%"; Hit description =Receptor-like kinase CR4
  Subcellular localization annotation: CTP_CleavageSite=27; ConfidenceScore=5.04e-01
SWITFPSVTSSXQRRKSSASEADITVRTTTEGRNAGSSIGDGLRSLEEEISPASPQENLYLQHNF

SEQ ID NO: 106414 - protein, 575 aa, Setaria italica
  Transcript Sequence Number=SeqID_40440
  Gene Ontology: Mol. function=protein serine/threonine kinase activity; Cellular component=integral to membrane; Biological process=protein amino acid phosphorylation
  Homolog annotation: Hit_ID=O24585; Match level="QueryCoverage=99%, HitCoverage=63%, E-value=0.0, Identity=94%"; Hit description =Putative receptor protein kinase CRINKLY4
  Pfam annotation: Domain name=APH; Domain location=181-362; Score= -3.8; E_value=0.0032; Accession=PF01636.15; Description =Phosphotransferase enzyme family
  Pfam annotation: Domain name=Pkinase; Domain location=179-459; Score =142.4; E_value=1.4e-39; Accession=PF00069.17; Description=Protein kinase domain
  Pfam annotation: Domain name=Pkinase_Tyr; Domain location=179-452; Score=99.8; E_value=9.7e-27; Accession=PF07714.9; Description =Protein tyrosine kinase
  Pfam annotation: Domain name=TNFR_c6; Domain location=31-64; Score =24.9; E_value=0.00032; Accession=PF00020.10; Description=TNFRNGFR cysteine-rich region
  Pfam module annotation: Pfam domain module=APH::Pkinase::Pkinase _Tyr::TNFR_c6; Domain location=181-362::179-459::179-452::31-64
TRKSGICVPTVCSHGYYEYVNHGEVGLSKVCKPANSRLCLPCSTGCPEDSYESSPCNATADRVCQFDCLRCVAQECLSFCLSQKQTKSRKLMAFQMRVFVAEIVFAIILVLSVSVITCLYVRHKLRHCQCSNSELRLAKSTAYSFRKDNMRIQPDVEDLKVRRAQEFSYEELEQATGGFSEDSQVGKGSFSCVFKGILRDGTVVAVKRAIKASDVKKSSKEFHNELDLLSRLNHAHLLNLLGYCEDGSERLLVYEFMAHGSLYQHLHGNDPNLKRQLNWARRVTIAVQAARGIEYLHGYACPPVIHRDIKSSNILIDEDHNARVADFGLSIMGPADSGTPLSELPAGTLGYLDPEYYRLHYLTTKSDVYSFGVVLLEILSGRKAIDMQFEEGNIVEWAVPLIKAGDIFAILDPVLSPPSDLEALKKIASVACKCVRMRGKDRPSMDKVTTALEHALALLMGSPCVEQPILPTEVVLGSSRMHKVSQMSSNHSCSENELADGEDQRIEYRAPSWITFPSVTSSQRRKSSASEADIAGRTTTEGRNVGSSIGDGLRSLEEEIGPASPQEKLYLQHNF

SEQ ID NO: 106415 - protein, 201 aa, Setaria italica
  Transcript Sequence Number=SeqID_40441
  Gene Ontology: Mol. function=protein tyrosine kinase activity; Biological process=protein amino acid phosphorylation
  Homolog annotation: Hit_ID=B6SKI4; Match level="QueryCoverage=75%, HitCoverage=19%, E-value=2e-74, Identity=88%"; Hit description=ATP binding protein
  Pfam annotation: Domain name=LRR_1; Domain location=20-42; Score=7.9; E_value=9.3; Accession=PF00560.25; Description=Leucine Rich Repeat
  Pfam annotation: Domain name=LRR_1; Domain location=44-66; Score =14.2; E_value=0.53; Accession=PF00560.25; Description=Leucine Rich Repeat
  Pfam annotation: Domain name=LRR_1; Domain location=68-89; Score=8.5; E_value=7.2; Accession=PF00560.25; Description=Leucine Rich Repeat
  Pfam module annotation: Pfam domain module=LRR_1::LRR_1::LRR_1; Domain location=20-42::44-66::68-89
EELDVSHNRLGPAFPEVGKAVVRLVLAGNNFTGKIPAGVSALGQLQYLDVSGNRLQGWIPSSIFALPALRYINLSRNRFAGQLPATTACAEALAFVDVSANLLTGARPACMRGNSSARTVLVAGNCFADAKQQRASTYCSPGALAAVLPPPQGSGGGGQGRGKGGEIGMILAIAGAVVGGALLIALVMVVVLRRARTRHPE

SEQ ID NO: 106416 - protein, 66 aa, Setaria italica
  Transcript Sequence Number=SeqID_40442
SKCKTYNYVSIPYKHLESLHITLSLHSASYRWHRTSPVSYKESIVRNKRINCFKPLTVILLYFDRT

SEQ ID NO: 106417 - protein, 135 aa, Setaria italica
  Transcript Sequence Number=SeqID_40443
  Gene Ontology: Mol. function=protein serine/threonine kinase activity; Cellular component=plasma membrane; Biological process =protein amino acid phosphorylation
  Homolog annotation: Hit_ID=B9RZQ7; Match level="QueryCoverage=97%, HitCoverage=15%, E-value=5e-41, Identity=63%"; Hit description=ATP binding protein, putative
  Subcellular localization annotation: CTP_CleavageSite=60; ConfidenceScore=5.48e-01
SYQSKKRRALGTSVSHSSGWLPVYGGNSHTNASKSSGGKSAALNPNITAMCRHFSFPEIKAATKNFDESLVIGVGGFGKVYRGVVDGDTKVAIKRSNPSSEQGVLEFQTEIEMLSKLRHKHLVSLIGCCEDDGEI

SEQ ID NO: 106418 - protein, 185 aa, Setaria italica
  Transcript Sequence Number=SeqID_40444
  Gene Ontology: Mol. function=fructose-bisphosphate aldolase activity; Cellular component=chloroplast; Biological process=metabolic process
  Homolog annotation: Hit_ID=Q53P96; Match level="QueryCoverage=100%, HitCoverage=50%, E-value=9e-87, Identity=85%"; Hit description =Fructose-bisphosphate aldolase
  Pfam annotation: Domain name=Glycolytic; Domain location=44-185; Score=61.5; E_value=1.6e-16; Accession=PF00274.11; Description =Fructose-bisphosphate aldolase class-I
  Subcellular localization annotation: CTP_CleavageSite=37; ConfidenceScore=5.33e-01
MASATLLKSSFLPKKSEWGAARQLTAPRPVTVSVVVRASAYADELVKTAKTIASPGRGILAMDESNATCGKRLASIGLENTEANRQAYRTLLVTAPGLGNYISGAILFEETLYQSAVDGRRIVDILTEQGIVPGIKVDKGLVPLAGSNDESWCQGLDGLAARGAAYYQQGARFAKWRTVVSIPNG

SEQ ID NO: 106419 - protein, 323 aa, Setaria italica
  misc_feature (253)..(253): Xaa can be any naturally occurring amino acid
  Transcript Sequence Number=SeqID_40445
  Homolog annotation: Hit_ID=Q01JP4; Match level="QueryCoverage=72%, HitCoverage=23%, E-value=2e-85, Identity=65%"; Hit description =OSIGBa0139P06.4 protein
MEISESMDALTKRALRHINLKMVKGQLDVPRISLQLLSSVGKLDFPTERLRVQWQKRQATVLEELLLSSASLEYDMSETLQIVLSKLKDTEDWVVSVPEGRVEVLTIIERYNSKLSALTKKFNLKEETYHWTHNYHVNFRLYEKLLCSVFDILEDGQLVEEADEILETAKLTWPILGITEKLHGIFYAWVLFQKFAQTGETLLLKHASLQIQKLLLHHDIEELEVYTNSFICSADACGGTWGRWMADSALLKXNSWCRRQLENYHAHFSKKNYSIFEATLNLALLLVKTPPEDDCEEVLLIESPVGSTPESKLVHLLIVRSIH

SEQ ID NO: 106420 - protein, 89 aa, Setaria italica
  Transcript Sequence Number=SeqID_40446
  Gene Ontology: Mol. function=protein kinase activity; Biological process=protein amino acid phosphorylation
  Homolog annotation: Hit_ID=Q6KAK1; Match level="QueryCoverage=100%, HitCoverage=5%, E-value=8e-43, Identity=91%"; Hit description =Protein kinase-like
MGNKIARTTQASATEYYLHDLPSTYNLVLLDVVSRDRFLKSVRCKHDEGLLLVKVYFKRAGEPIDLKEHERRLERIRNTFKGIEGSHVW

SEQ ID NO: 106421 - protein, 102 aa, Setaria italica
  Transcript Sequence Number=SeqID_40447
SSTYIIKQTQKFVQHKRNAPSKRLLQETTHPRAREGRGDYKLGRKIAAEVCGRIAIASLLQGSLARPRTDRTRREVKSTSDVPRYKSSATARRYSRRPRRIP

SEQ ID NO: 106422 - protein, 77 aa, Setaria italica
  Transcript Sequence Number=SeqID_40448
  Gene Ontology: Cellular component=nucleus
  Pfam annotation: Domain name=DEK_C; Domain location=3-59; Score=1.1; E_value=0.096; Accession=PF08766.3; Description=DEK C terminal domain
MLSDQELAHYVESIVRQTAAQGGTGISADSVVRQLGAQLGVDVSPKAPLIRSVLVALLGPAAAAPDPAASPEKAFRP

SEQ ID NO: 106423 - protein, 143 aa, Setaria italica
  Transcript Sequence Number=SeqID_40449
  Gene Ontology: Mol. function=RNA-directed DNA polymerase activity; Cellular component=chromatin; Biological process=chromatin assembly or disassembly
  Homolog annotation: Hit_ID=A5JSC4; Match level="QueryCoverage=100%, HitCoverage=9%, E-value=8e-74, Identity=90%"; Hit description =Polyprotein
GTAPISKRPYRMPPAELAELKTQLHDLLEKGFIRPSTSPWGCPALFVKKKDGSLRMCVDYRPLNAVTVKNKYPLPRIDVLFDQLAGAKVFSKIDLRSGYHQIKIRPCDIPKTAFSTRYGLYEYLVMSFGLTNAPAYFMYLMNT

SEQ ID NO: 106424 - protein, 62 aa, Setaria italica
  Transcript Sequence Number=SeqID_40450
  Gene Ontology: Mol. function=oxidoreductase activity
  Homolog annotation: Hit_ID=Q5YFA2; Match level="QueryCoverage=100%, HitCoverage=11%, E-value=6e-27, Identity=95%"; Hit description =Brassinosteroid biosynthesis-like protein
MADLHEPLVRRKRKKVLVDYLVKFRWILVIFVVLPISALIYFNIYLGDMWSAMKSEKKRQKQ

SEQ ID NO: 106425 - protein, 163 aa, Setaria italica
  Transcript Sequence Number=SeqID_40451
  Gene Ontology: Mol. function=oxidoreductase activity; Cellular component=endoplasmic reticulum; Biological process=amyloid precursor protein catabolic process
  Homolog annotation: Hit_ID=Q5YFA2; Match level="QueryCoverage=96%, HitCoverage=27%, E-value=2e-91, Identity=98%"; Hit description =Brassinosteroid biosynthesis-like protein
LVVRVGWFKPWFYQHAQTALKRGEFVEYIPTREYYHRHTRCLYWEGKLILPFGDQFWFRFLLGWLMPPKVSLLKATQGEAIRNYYHDNHVIQDMLVPLYKVGDALEFVHREMEVYPLWLCPHRLYKLPVKTMVYPEPGFEHQHRQGDTSYAQMFTDVGVYYAP

SEQ ID NO: 106426 - protein, 479 aa, Setaria italica
  misc_feature (13)..(13): Xaa can be any naturally occurring amino acid
  Transcript Sequence Number=SeqID_40452
  Gene Ontology: Mol. function=oxidoreductase activity; Cellular component=endoplasmic reticulum; Biological process=amyloid precursor protein catabolic process
  Homolog annotation: Hit_ID=Q5YFA2; Match level="QueryCoverage=99%, HitCoverage=84%, E-value=0.0, Identity=95%"; Hit description =Brassinosteroid biosynthesis-like protein
  Pfam annotation: Domain name=FAD_binding_4; Domain location=3-119; Score=26.7; E_value=1.7e-05; Accession=PF01565.15; Description=FAD binding domain
GWPVCTARKPWIXVGMRNVDYKRARHFEVDLSAFRNILEIDKERMVAKVEPLVNMGQITRATCPMNLALAVVAELDDLTVGGLINGYGIEGSSHLYGLFSDTVVAMEVVLADGRVVRATKDNEYSDLFYGIPWSQGTLGFLVSAEIKLIPIKEYMKLTYIPVKGNLKEIAQAYADSFAPRDGDPAKVPDFVEGMVYNESEGVMMTGVYASKEEAKKGNKINCVGWWFKPWFYQHAQTALKRGEFVEYIPTREYYHRHTRCLYWEGKLILPFGDQFWFRFLLGWLMPPKVSLLKATQGEAIRNYYHDNHVIQDMLVPLYKVGDALEFVHREMEVYPLWLCPHRLYKLPVKTMVYPEPGFEHQHRQGDTSYAQMFTDVGVYYAPAAVLRGEEFNGAEAVHRLEQWLIENHSYQPQYAVSELNEKDFWRMFDASHYEHCRRKYGAVGTFMSVYYKSKKGRKTEKEVQEAEAAILEPAYADEA

SEQ ID NO: 106427 - protein, 98 aa, Setaria italica
  misc_feature (27)..(27): Xaa can be any naturally occurring amino acid
  Transcript Sequence Number=SeqID_40453
  Gene Ontology: Mol. function=transporter activity; Cellular component= integral to membrane; Biological process=transport
  Homolog annotation: Hit_ID=B6SRN7; Match level="QueryCoverage=78%, HitCoverage=19%, E-value=3e-35, Identity=98%"; Hit description =Glucose-6-phosphate/phosphate translocator 2
MRSVLVRFSRPDANRLVAEQVAIAHTXIGHVAATVSMAKVAVSFTHIIKSGEPAFSVLVSRFFLGEHFPAPVYFSLLPIIGGCALAAVTELNFNMVGE

SEQ ID NO: 106428 - protein, 181 aa, Setaria italica
  Transcript Sequence Number=SeqID_40454
  Gene Ontology: Mol. function=transporter activity; Cellular component= integral to membrane; Biological process=transport
  Homolog annotation: Hit_ID=B6SRN7; Match level="QueryCoverage=96%, HitCoverage=43%, E-value=1e-96, Identity=98%"; Hit description =Glucose-6-phosphate/phosphate translocator 2
  Pfam annotation: Domain name=DUF6; Domain location=20-145; Score =22.7; E_value=0.0015; Accession=PF00892.12; Description=Integral membrane protein DUF6
FSAETARRAKIGVYFATWWALNVIFNIYNKKVLNAFPYPWLTSTLSLAAGSAIMLASWATRIAEAPQTDLDFWKALSPVAIAHTIGHVAATVSMAKVAVSFTHIIKSGEPAFSVLVSRFFLGEHFPAPVYFSLLPIIGGCALAAVTELNFNMVGFMGAMISNLAFVVRTIFSKKGMKASQS

SEQ ID NO: 106429 - protein, 245 aa, Setaria italica
  Transcript Sequence Number=SeqID_40455
  Gene Ontology: Mol. function=transporter activity; Cellular component= integral to membrane; Biological process=transport
  Homolog annotation: Hit_ID=B6SRN7; Match level="QueryCoverage=97%, HitCoverage=59%, E-value=1e-107, Identity=86%"; Hit description =Glucose-6-phosphate/phosphate translocator 2
  Pfam annotation: Domain name=DUF6; Domain location=106-242; Score =18.1; E_value=0.007; Accession=PF00892.12; Description=Integral membrane protein DUF6
  Pfam annotation: Domain name=TPT; Domain location=97-242; Score =183.9; E_value=4.5e-52; Accession=PF03151.8; Description=Triose -phosphate Transporter family
  Pfam annotation: Domain name=UAA; Domain location=5-245; Score= -160.5; E_value=0.025; Accession=PF08449.3; Description=UAA transporter family
  Pfam module annotation: Pfam domain module=DUF6::TPT::UAA; Domain location=106-242::97-242::5-245
TGSFEEEENTESVLFGKALSPVAIAHTIGHVAATVSMAKVAVSFTHIIKSGEPAFSVLVSRFFLGEHFPAPVYFSLLPIIGGCALAAVTELNFNMVGFMGAMISNLAFVVRTIFSKKGMKGKSVSGMNYYACLSIMSLVILLPFAIAMEGPKVWAAGWQKAVAEIGPNFVWWVAAQSVFYHLYNQVSYMSLDEISPLTFSIGNTMKRISVIVASIIIFQTPVQPINALGAAIAILGTFIYSQAKQ

SEQ ID NO: 106430 - protein, 98 aa, Setaria italica
  Transcript Sequence Number=SeqID_40456
  Gene Ontology: Mol. function=transcription factor activity; Cellular component=chloroplast; Biological process=regulation of transcription, DNA-dependent
  Homolog annotation: Hit_ID=Q9ZPL1; Match level="QueryCoverage=100%, HitCoverage=18%, E-value=4e-46, Identity=88%"; Hit description=Sigma factor SIG2B
  Pfam annotation: Domain name=GerE; Domain location=29-91; Score=-1.1; E_value=0.013; Accession=PF00196.11; Description=Bacterial regulatory proteins, luxR family
  Pfam annotation: Domain name=Sigma70_r4; Domain location=28-81; Score= 94.1; E_value=4.9e-25; Accession=PF04545.8; Description=Sigma-70, region 4
  Pfam module annotation: Pfam domain module=GerE::Sigma70_r4; Domain location=29-91::28-81
QEIMPDTSAETAEEVLHRWLMKKDVDKALDSLSPREKQVLRYRFGIEGGRPRTLHDIGQLMGVSRERIRQIELGAFRKLRAKKKVQSLQHYLQPAESW

SEQ ID NO: 106431 - protein, 61 aa, Setaria italica
  Transcript Sequence Number=SeqID_40457
  Gene Ontology: Mol. function=hydrolase activity, hydrolyzing O -glycosyl compounds; Cellular component=plasma membrane; Biological process=carbohydrate metabolic process
  Homolog annotation: Hit_ID=Q8W0R0; Match level="QueryCoverage=88%, HitCoverage=10%, E-value=2e-21, Identity=92%"; Hit description=3 -glucanase
MRSNFACRYVAVGNEPFLSAFNGTFLNVTLPALQNIQRALDDAGLGESIKATVPLNADVYN

SEQ ID NO: 106432 - protein, 495 aa, Setaria italica
  Transcript Sequence Number=SeqID_40458
  Gene Ontology: Mol. function=hydrolase activity, hydrolyzing O -glycosyl compounds; Cellular component=anchored to membrane; Biological process=carbohydrate metabolic process
  Homolog annotation: Hit_ID=Q8W0R0; Match level="QueryCoverage=88%, HitCoverage=87%, E-value=0.0, Identity=83%"; Hit description=3 -glucanase
  Pfam annotation: Domain name=Glyco_hydro_17; Domain location=29-352; Score=268.0; E_value=2.2e-77; Accession=PF00332.10; Description =Glycosyl hydrolases family 17
  Pfam annotation: Domain name=X8; Domain location=377-460; Score =138.7; E_value=1.9e-38; Accession=PF07983.5; Description=X8 domain
  Pfam module annotation: Pfam domain module=Glyco_hydro_17::X8; Domain location=29-352::377-460
MAAASHHWLAVMAALVVALVAGLPAAGALGVNWGTMATHRLPSGTVVRMLQDNGIRKVKLFDADPGPMDALAGSGIEVMVGIPNNMLDMMTDYGTARDWVHENVSRYNFDGGVTIKYVAVGNEPFLSAFNGTFLNVTLPALQNIQRALDDAGLGESIKATVPLNADVYNSPVSNPVPSAGRFRSDIADLMTEIVQFLNQSGAPFTVNIYPFLSLYGSDGFPLDYAFFDGTSSPVVDAGSGITYTNVFDANFDTLVSALAAAGAGGLPVVVGEVGWPTDGDTHATAAYAQKFYAGLLRKLAANAGTPLRPSQYIEVYLFSLIDEDAKSVAPGNFERHWGIVRYDGQPKYPMDLSGGQGGNAAPAALVAARGVQYLPRQWCVANPNAPDTSRISDGVAYACSLSDCTALGYGSSCNGLDAAGNASYAFNMYFQVQNQAEGSCDFQGLAVTTAQNPSTDACNFTIQIEPSAAGRRRRAPVAAALPLLLVLRAVLQVVL

SEQ ID NO: 106433 - protein, 57 aa, Setaria italica
  Transcript Sequence Number=SeqID_40459
EVNLTEGITLQFNILFFLKYPMPYLHSECFFTFILVMPATGFYYRSFPTFESIKIRG

SEQ ID NO: 106434 - protein, 72 aa, Setaria italica
  misc_feature (17)..(17): Xaa can be any naturally occurring amino acid
  Transcript Sequence Number=SeqID_40460
  Homolog annotation: Hit_ID=Q93YN0; Match level="QueryCoverage=55%, HitCoverage=20%, E-value=1e-10, Identity=75%"; Hit description=Snowy cotyledon 2
VSYEWTGKCRSCQGTGXVVSYFRKKGKETICKCVPCAGIGEMGFLGLDFLTWHNIVVVRSKTSKETREQGQG

SEQ ID NO: 106435 - protein, 67 aa, Setaria italica
  Transcript Sequence Number=SeqID_40461
TLLEIIFGVKDQQLIHLLVWWGFPTRRTRLVIFFFNFYRTCGTMEHKRPAGDMRNKGMKCSTEAQSC

SEQ ID NO: 106436 - protein, 248 aa, Setaria italica
  misc_feature (242)..(242): Xaa can be any naturally occurring amino acid
  Transcript Sequence Number=SeqID_40462
  Gene Ontology: Mol. function=ubiquitin protein ligase binding; Cellular component=cullin-RING ubiquitin ligase complex; Biological process=ubiquitin-dependent protein catabolic process
  Homolog annotation: Hit_ID=Q0WL17; Match level="QueryCoverage=100%, HitCoverage=33%, E-value=1e-103, Identity=70%"; Hit description =Cullin 3-like protein
  Pfam annotation: Domain name=Cullin; Domain location=1-247; Score =131.7; E_value=2.3e-36; Accession=PF00888.14; Description=Cullin family
LEELNAKWMDHNKALQMIRDILMYMDRTYVPTAHRTPVHELGLNLWRDHIIHSPSIHSRLLDTLLDLIDRERMGEVINRGLMRSITKMLMDLGPAVYQDDFEKPFLEVSASFYSGESQEFIECCDCGNYLKKAERRLNEEMERVSHYLDAGSEAKITSVVEKEMIANHMHRLVHMENSGLVNMLVDDKYEDLGCMYALFRRVPDGLSTIRDVMTSYLRETGKQLVTDPERLKDPVEFVQRLXNEKDKH

SEQ ID NO: 106437 - protein, 476 aa, Setaria italica
  misc_feature (448)..(448): Xaa can be any naturally occurring amino acid
  Transcript Sequence Number=SeqID_40463
  Gene Ontology: Mol. function=ubiquitin protein ligase binding; Cellular component=cullin-RING ubiquitin ligase complex; Biological process=ubiquitin-dependent protein catabolic process
  Homolog annotation: Hit_ID=Q0WL17; Match level="QueryCoverage=97%, HitCoverage=63%, E-value=0.0, Identity=83%"; Hit description=Cullin 3-like protein
  Pfam annotation: Domain name=Cullin; Domain location=1-374; Score =539.1; E_value=5.3e-159; Accession=PF00888.14; Description=Cullin family
  Pfam annotation: Domain name=Cullin_Nedd8; Domain location=402-470; Score=125.4; E_value=1.8e-34; Accession=PF10557.1; Description =Cullin protein neddylation domain
  Pfam module annotation: Pfam domain module=Cullin::Cullin_Nedd8; Domain location=1-374::402-470
FLLLSTSIWFHMENSGLVNMLVDDKYEDLGCMYALFRRVPDGLSTIRDVMTSYLRETGKQLVTDPERLKDPVEFVQRLLNEKDKHDKIISVAFGNDKTFQNALNSSFEYFINLNNRSPEFISLFVDDKLRKGLKGATEEDVEVILDKVMMLFRYLQEKDVFEKYYKQHLAKRLLSGKTVSDDAERSMIVKLKTECGYQFTSKLEGMFTDMKTSQDTMQDFYAKKSEELGDGPTLDVHILTTGSWPTQPSPPCNLPTEILAVCEKFRSYYLGTHNGRRLTWQTNMGTADIKATFGKGQKHELNVSTYQMCVLMLFNNADGLTYKDIERDTEIPASDLKRCLQSLACVKGKNVLRKEPMSKDISEDDAFYFNDKFTSKLVKVKIGTVVAQKESEPEKQETRQRVEEDRKPQIEAAIVRIMKSRRVLDHNSIVAEVTKQLQARFLPNPVVXIKKRIESLIEREFLERDKVDRKLYRYLA

SEQ ID NO: 106438 - protein, 38 aa, Setaria italica
  Transcript Sequence Number=SeqID_40464
MLMFISIPQTLQGSGGRPGFGRGGGSGFGAGPTSSSME

SEQ ID NO: 106439 - protein, 179 aa, Setaria italica
  Transcript Sequence Number=SeqID_40465
  Gene Ontology: Cellular component=ribonucleoprotein complex
  Homolog annotation: Hit_ID=B6UIM2; Match level="QueryCoverage=53%, HitCoverage=53%, E-value=4e-49, Identity=96%"; Hit description=40S ribosomal protein S10
  Pfam annotation: Domain name=S10_plectin; Domain location=3-98; Score= 242.5; E_value=1e-69; Accession=PF03501.7; Description=PlectinS10 domain
MIISKKNRREICKYLFHEGVLYAKKDYNLAKHPKLDVPNLEVIKLMQSFKSKEYVRETFSWQYYYWYLTNDGIEYLRTFLNLPSEVVPNTLKKSSKPPSRPFGSGPPGDRPRGPPRFEGDRPRFGDRDGYRGGPRGAPGDFGGEKGGAPADFQPSFRGSRPGFGRGVGGAFGAGGSSME

SEQ ID NO: 106440 - protein, 82 aa, Setaria italica
  Transcript Sequence Number=SeqID_40466
  Gene Ontology: Mol. function=P-P-bond-hydrolysis-driven protein transmembrane transporter activity; Cellular component=mitochondrial outer membrane; Biological process=intracellular protein transport
  Homolog annotation: Hit_ID=B6SJR3; Match level="QueryCoverage=57%, HitCoverage=59%, E-value=1e-16, Identity=87%"; Hit description =Mitochondrial import receptor subunit TOM7-1
  Pfam annotation: Domain name=Tom7; Domain location=40-79; Score=87.2; E_value=5.9e-23; Accession=PF08038.4; Description=TOM7 family
MASRPSLRAKPKGKGGARGAAADPAGEGATASATAVRLVKEWTTWTMKTAKVAAHYGFIPLVIVIGMNSDPKPSISQLLSPV

SEQ ID NO: 106441 - protein, 172 aa, Setaria italica
  Transcript Sequence Number=SeqID_40467
  Gene Ontology: Mol. function=nucleic acid binding; Cellular component= nucleus
  Homolog annotation: Hit_ID=C4P742; Match level="QueryCoverage=83%, HitCoverage=75%, E-value=3e-37, Identity=49%"; Hit description=CCR4 -NOT
  Pfam annotation: Domain name=CAF1; Domain location=27-172; Score =55.6; E_value=9.3e-14; Accession=PF04857.12; Description=CAF1 family ribonuclease
MPSEELAAGGWREKQHHQHQHQQLEIRQVWADNVDREFKLIRAAIEHFPYVSMDTEFPGVIHRPSKHPAAMTPAERYALIKSNVDALHLIQVGLTFAASPTSPPALAFEVNLREFDPRVHRHAPDSVQLLASSGLDLAAHRARGVSARAFAALLMSSGLVCNPEVAWSPSTP

SEQ ID NO: 106442 - protein, 71 aa, Setaria italica
  Transcript Sequence Number=SeqID_40468
HQVHPVDLVMQAVPRVLLWHHGFHFKADHQDPAMYLLGSSHPSTCSNIKTVSSINKSIQVNSTFFSLFFKK

SEQ ID NO: 106443 - protein, 130 aa, Setaria italica
  Transcript Sequence Number=SeqID_40469
  Gene Ontology: Mol. function=magnesium ion binding; Cellular component=chloroplast; Biological process=metabolic process
  Homolog annotation: Hit_ID=Q6BDZ9; Match level="QueryCoverage=100%, HitCoverage=15%, E-value=2e-37, Identity=60%"; Hit description =Stemar-13-ene synthase
  Pfam annotation: Domain name=Terpene_synth; Domain location=1-130; Score=-24.9; E_value=2e-06; Accession=PF01397.13; Description =Terpene synthase, N-terminal domain
LDMTYRSWLQYDEEIIMDMETCAMAFRLLRMHGYDISSDAMSHFADESRFQESLHGHINDTKTLLKLYKASQVCIYEDECNLQNIGSWSGKLLHEQLSSNRLSIPIMRHEVEGALKFPFHLATVGPLEHK

SEQ ID NO: 106444 - protein, 67 aa, Setaria italica
  Transcript Sequence Number=SeqID_40470
  Pfam annotation: Domain name=PAH; Domain location=4-50; Score=24.2; E_ value=0.00052; Accession=PF02671.13; Description=Paired amphipathic helix repeat
ADKPHKIVEFQAILLDYYYMSIDIAGVVDRLQVVFQGYPNLVRAFNTLLLMGYALKQDDQQGRRRSR

SEQ ID NO: 106445 - protein, 80 aa, Setaria italica
  Transcript Sequence Number=SeqID_40471
  Subcellular localization annotation: CTP_CleavageSite=21; ConfidenceScore=5.19e-01
IHGHRASRRVVARGGNRSAFTASKESNSRSRSRSCLNWFLVFARSLWACVGELWHCHYIPAWVLHHVPEPSRHQKLVSTP

SEQ ID NO: 106446 - protein, 65 aa, Setaria italica
  Transcript Sequence Number=SeqID_40472
FSLVEQGAEKQGGLRSEETQISLDFGMNTEAGDGTDQHQHAIFSIDMFLEADIGPGYRMMAPCQI

SEQ ID NO: 106447 - protein, 100 aa, Setaria italica
  Transcript Sequence Number=SeqID_40473
  Gene Ontology: Mol. function=metalloendopeptidase activity; Cellular component=integral to membrane; Biological process=proteolysis
  Homolog annotation: Hit_ID=B1WQ59; Match level="QueryCoverage=65%, HitCoverage=18%, E-value=7e-21, Identity=69%"; Hit description =Putative peptidase M50
  Pfam annotation: Domain name=Peptidase_M50; Domain location=24-98; Score=-39.9; E_value=0.077; Accession=PF02163.14; Description =Peptidase family M50
HLAKPASTAAAAPDLLASVESVASAASVLAAIVLVHESGHFLAAASRGIHVSQFSIGFGPALARFRLGPVEYALRAIPLGGYVGFPDDDPESGFAPDDPD

SEQ ID NO: 106448 - protein, 118 aa, Setaria italica
  misc_feature (83)..(83): Xaa can be any naturally occurring amino acid
  Transcript Sequence Number=SeqID_40474
  Gene Ontology: Mol. function=calcium ion binding; Cellular component =membrane; Biological process=protein transport
  Homolog annotation: Hit_ID=P93645; Match level="QueryCoverage=79%, HitCoverage=63%, E-value=2e-27, Identity=63%"; Hit description =Vacuolar sorting receptor homolog (Fragment)
WLQVCNNSSFLTLCGISLFPLAFADVDECKENLYCKCKNCACENIWGSYECSCGGSNMLYIREHDTCISKHSTSTIGWGFLWXFLGLALAGAGAYAVYKYRLRSYMDSEIRAIMAQYM

SEQ ID NO: 106449 - protein, 113 aa, Setaria italica
  misc_feature (13)..(13): Xaa can be any naturally occurring amino acid
  Transcript Sequence Number=SeqID_40475
  Gene Ontology: Mol. function=nucleoside-triphosphatase activity; Biological process=cell division
  Homolog annotation: Hit_ID=Q9SH62; Match level="QueryCoverage=96%, HitCoverage=13%, E-value=2e-44, Identity=77%"; Hit description =F22C12.12
  Pfam annotation: Domain name=AAA; Domain location=1-95; Score=-7.5; E_ value=0.00011; Accession=PF00004.21; Description=ATPase family associated with various cellular activities (AAA)
HTWDGLLSRPDQXILVLAATNRPFDLDEAIIRRFERRIMVGLPSMESRELIMRRLLSKEKVDEGLDFKELATMTEGYSGSDLKNLCTTAAYRPVRELIQKERKKELVMRSLHT

SEQ ID NO: 106450 - protein, 77 aa, Setaria italica
  Transcript Sequence Number=SeqID_40476
  Gene Ontology: Mol. function=nucleoside-triphosphatase activity; Biological process=cell division
  Homolog annotation: Hit_ID=B9RCJ8; Match level="QueryCoverage=96%, HitCoverage=9%, E-value=2e-18, Identity=59%"; Hit description=ATP binding protein, putative
MINNAAPLRCASSWTFVEKILVQALYKVLHSVSKKYPIVLYIRDVEKFFHKSPKMYLLFEKLLNKLEGPVLVLGSRI

SEQ ID NO: 106451 - protein, 694 aa, Setaria italica
  misc_feature (20)..(20): Xaa can be any naturally occurring amino acid
  misc_feature (300)..(300): Xaa can be any naturally occurring amino acid
  Transcript Sequence Number=SeqID_40477
  Gene Ontology: Mol. function=nucleoside-triphosphatase activity; Biological process=cell division
  Homolog annotation: Hit_ID=B9RIQ4; Match level="QueryCoverage=100%, HitCoverage=81%, E-value=1e-159, Identity=71%"; Hit description=ATP binding protein, putative
  Pfam annotation: Domain name=AAA; Domain location=421-606; Score =265.6; E_value=1.2e-76; Accession=PF00004.21; Description=ATPase family associated with various cellular activities (AAA)
  Pfam annotation: Domain name=AAA_3; Domain location=421-547; Score= -8.5; E_value=0.0031; Accession=PF07726.3; Description=ATPase family associated with various
  Pfam annotation: Domain name=AAA_5; Domain location=421-553; Score =7.4; E_value=0.00023; Accession=PF07728.6; Description=ATPase family associated with various
  Pfam module annotation: Pfam domain module=AAA::AAA_3::AAA_5; Domain location=421-606::421-547::421-553
  Subcellular localization annotation: CTP_CleavageSite=45; ConfidenceScore=5.15e-01
KESISETTFERVTGLLGSTXSSFPQKEQPKETIRRQSSMTDVKLRSSESMSNLPKLRRNASTSSDMSSLASQGPSTNTAPLRRASSWTFDEKILVQALYKVLHSVSKKYPIVLYIRDVEKFLHKSPKMYLLFEKLLNKLEGPVLVLGSRIVEMDVDEELDDRLTVLFPYNIEIKPPENENHLVSWNSQLEEDMKMIQFQDNRNHILEVLAENDLECDDLGSICLSDTIGLSKYIEEIVVSAVSYHLMNNREPEYRNGKLVISAKSLSHALEIFQENKMSDKDSLKLEVTADALKAAEKGXAPTAAKSETKPATLLPPVRPPAAASAAPAAAAAAAAPAVESKPAPEKKDSPPPAAKAPEVPPDNEFEKRIRPEVIPANEIGVSFDDIGALDDIKESLHELVMLPLRRPDLFKGGLLKPCRGILLFGPPGTGKTMLAKAIANEAQASFINVSMSTITSKWFGEDEKNVRALFTLAAKVSPTIIFVDEVDSMLGQRNRAGEHEAMRKIKNEFMTHWDGLLSRPDQRILVLAATNRPFDLDEAIIRRFERRIMVGLPSMESRELIMRRLLSKEKVDEGLDFKELATMTEGYSGSDLKNLCTTAAYRPVRELIQKERKKELEKLKREKGGAPSDSTKKKEKEEPIILRPLNMTDLKEAKNQVAASFAAEGAIMGELRQWNELYGEGGSRKKQQLTYFL

SEQ ID NO: 106452 - protein, 108 aa, Setaria italica
  misc_feature (64)..(64): Xaa can be any naturally occurring amino acid
  misc_feature (68)..(68): Xaa can be any naturally occurring amino acid
  Transcript Sequence Number=SeqID_40478
  Subcellular localization annotation: CTP_CleavageSite=90; ConfidenceScore=5.56e-01
RTPPKAAAALPCGLCRRLPPLPPVPRQQRASPHRPRLPPPRPQKQQPPPPPPPSPSPPRMRRSXPMSXCWRASSPDDPWPPCSRSPPHPPATHPSTDQIRAANSASMA

SEQ ID NO: 106453 - protein, 223 aa, Setaria italica
  misc_feature (23)..(23): Xaa can be any naturally occurring amino acid
  Transcript Sequence Number=SeqID_40479
  Gene Ontology: Mol. function=nucleoside-triphosphatase activity; Biological process=maintenance of fidelity during DNA-dependent DNA replication
  Homolog annotation: Hit_ID=Q259B3; Match level="QueryCoverage=100%, HitCoverage=26%, E-value=9e-89, Identity=70%"; Hit description =H0901F07.7 protein
  Subcellular localization annotation: CTP_CleavageSite=52; ConfidenceScore=5.18e-01
SIEMLESLLKDTAAKIFQAGGNXSPVVTKRRSRMCVGVKASHKHLVPGGIVLSSSGSGATYFMEPRDAVELNNREVKLSGDERAEELVILGLLTSTIADSQLKIKNLMEKVLELDLACARGSYALWTNGVKPSFSDSYSSCQSDQSSEYSVYIEGIRHPLLLEQSLMAEGSTVDASEMPVPLDMWVKKDARIVVISGPNTGGKTASMKTLGLSSLMSKAGMFF

SEQ ID NO: 106454 - protein, 54 aa, Setaria italica
  Transcript Sequence Number=SeqID_40480
SVALVSLPSYLLPLFNVPSMLLCELHQSGMFGCQACRHSIPYPYFVALMTAHCR

SEQ ID NO: 106455 - protein, 100 aa, Setaria italica
  Transcript Sequence Number=SeqID_40481
  Homolog annotation: Hit_ID=B6TF40; Match level="QueryCoverage=100%, HitCoverage=54%, E-value=1e-21, Identity=61%"; Hit description=ZIM motif family protein
  Pfam annotation: Domain name=CCT_2; Domain location=43-69; Score =53.0; E_value=1.2e-12; Accession=PF09425.2; Description=Divergent CCT motif
  Pfam annotation: Domain name=tify; Domain location=1-24; Score=25.7; E_value=0.00015; Accession=PF06200.6; Description=tify domain
  Pfam module annotation: Pfam domain module=CCT_2::tify; Domain location=43-69::1-24
GGRMVVFEDFPAEKAAEVMRLAAGGAEQAAAPAPAPAPRDDLPIARKASLQRFLAKRKARVVERAPYTRPSPAEEAEKTKKPAAWLGLGSTDAERLTIAL

SEQ ID NO: 106456 - protein, 134 aa, Setaria italica
  Transcript Sequence Number=SeqID_40482
  Gene Ontology: Mol. function=transferase activity; Cellular component= mitochondrion
  Homolog annotation: Hit_ID=B9RZG0; Match level="QueryCoverage=98%, HitCoverage=58%, E-value=4e-17, Identity=32%"; Hit description =Pentatricopeptide repeat-containing protein, putative
  Pfam annotation: Domain name=PPR; Domain location=100-134; Score =36.5; E_value=1e-07; Accession=PF01535.12; Description=PPR repeat
  Pfam annotation: Domain name=PPR; Domain location=29-63; Score=12.5; E_value=0.29; Accession=PF01535.12; Description=PPR repeat
  Pfam annotation: Domain name=PPR; Domain location=65-99; Score=23.7; E_value=0.00077; Accession=PF01535.12; Description=PPR repeat
  Pfam module annotation: Pfam domain module=PPR::PPR::PPR; Domain location=100-134::29-63::65-99
RWFCRKGKTLPAFTLLQMMLEKGLVPDTVAYTCLLNGLINEGQVKAASYVFQEIICKEGLYADCIAYNSLMKGHLKGGKLNTMKSVISDMHKNEVYLNTASYNILMHGYVKKGHYSRSFYLYKDMVRKGIRPKQ

SEQ ID NO: 106457 - protein, 124 aa, Setaria italica
  Transcript Sequence Number=SeqID_40483
LWLKLCAILPCFFLDQIKGESSCSLKQSFFCPLSTATLIVRFWINHVLRCLFLLFAKIFLCLLGGPHLFYLENLSLDKKGKKTLFIDTPVHLCLVAARQIQYFSLMLIYNKCYCVFSMHILIIR

SEQ ID NO: 106458 - protein, 76 aa, Setaria italica
  Transcript Sequence Number=SeqID_40484
  Subcellular localization annotation: CTP_CleavageSite=48; ConfidenceScore=5.32e-01
ATNLNSSRNTTNRRSGSRGTGASSVPCGSTIPWRCMALGGIASAITIRASAILSLHAFFSLASLPAPNVMPVTLLT

SEQ ID NO: 106459 - protein, 66 aa, Setaria italica
  Transcript Sequence Number=SeqID_40485
LNFGYFIPGTELMIKILGFGYFSLVFGPRVIMPSPSINSSWFTCTSIFISDLLSFVKDYLAPSTLH

SEQ ID NO: 106460 - protein, 69 aa, Setaria italica
  Transcript Sequence Number=SeqID_40486
  Gene Ontology: Mol. function=hydrolase activity, acting on acid anhydrides, catalyzing transmembrane movement of substances; Cellular component=integral to membrane; Biological process=calcium ion transport
  Homolog annotation: Hit_ID=Q6ETP2; Match level="QueryCoverage=55%, HitCoverage=3%, E-value=8e-12, Identity=84%"; Hit description =Putative calcium-transporting ATPase
MDSSSSGGGRARRRSGGASRSSSWGSISGDCDPFDIPAKGAPVERLKKWRQAALVLNASRRFKVTLDLK

SEQ ID NO: 106461 - protein, 47 aa, Setaria italica
  Transcript Sequence Number=SeqID_40487
VFELRDGRLAELRRPPSAEGCGGWEWARIIGTPASACMTSYWTAVAT

SEQ ID NO: 106462 - protein, 74 aa, Setaria italica
  Transcript Sequence Number=SeqID_40488
LHNSCFSSRVPSYIYTQTYHLLAFQDVNNTHLFPNTHIYLRENYILSVDFLPLCHTVAKMENFMSLLLPLQCFL

SEQ ID NO: 106463 - protein, 333 aa, Setaria italica
  misc_feature (309)..(309): Xaa can be any naturally occurring amino acid
  misc_feature (323)..(323): Xaa can be any naturally occurring amino acid
  Transcript Sequence Number=SeqID_40489
  Gene Ontology: Mol. function=zinc ion binding; Cellular component =intracellular
  Homolog annotation: Hit_ID=B6TB34; Match level="QueryCoverage=100%, HitCoverage=100%, E-value=1e-130, Identity=75%"; Hit description=RNA- binding protein
  Pfam annotation: Domain name=zf-C2H2; Domain location=4-25; Score =11.9; E_value=0.61; Accession=PF00096.18; Description=Zinc finger, C2H2 type
  Pfam annotation: Domain name=zf-C2H2; Domain location=94-118; Score =9.7; E_value=1.1; Accession=PF00096.18; Description=Zinc finger, C2H2 type
  Pfam annotation: Domain name=zf-LYAR; Domain location=30-57; Score =62.7; E_value=1.4e-15; Accession=PF08790.3; Description=LYAR-type C2HC zinc finger
  Pfam module annotation: Pfam domain module=zf-C2H2::zf-C2H2::zf-LYAR; Domain location=4-25::94-118::30-57
MVWFQCEDCGENLKKPKLAGHFRSCSAWKLSCIDCGEFFSQDTVQGHTQCISEAEKYGPKGQSKPSNGAQGKPDKPKPNADVDINVGLSTRPPWFCSLCNTTTTSKQTLLLHADGKKHRAKAKAFHASQKPANGAEQTADVKETGAVPTKDSAQVNGGESGDHERDEEKDAGKRKRMDDMAIEEPDNTKRQHLTSSSIGEVIKSKDGKSENKTKSTADELAGGADCKSVQKQKINWKKIITKTLKTNPDGVMKLKKLQKLVVKELQECGVAEDKDGLRATLMDKIASSSRFSVDGKRIKLVSKNEEESXESGCRSIFGIVGGXILWCLLPDGL

SEQ ID NO: 106464 - protein, 66 aa, Setaria italica
  Transcript Sequence Number=SeqID_40490
  Subcellular localization annotation: CTP_CleavageSite=26; ConfidenceScore=5.39e-01
YSLSRIKASKITMAQSTTVAATFFIVAFMAAAASVASASASKPAAPRKLLSGDGMIPITTDDLLPH

SEQ ID NO: 106465 - protein, 313 aa, Setaria italica
  misc_feature (11)..(11): Xaa can be any naturally occurring amino acid
  Transcript Sequence Number=SeqID_40491
  Homolog annotation: Hit_ID=B9SY29; Match level="QueryCoverage=73%, HitCoverage=62%, E-value=2e-55, Identity=50%"; Hit description =Transcription factor, putative
  Pfam annotation: Domain name=DUF702; Domain location=76-245; Score =372.1; E_value=9.9e-109; Accession=PF05142.4; Description=Domain of unknown function (DUF702)
  Subcellular localization annotation: CTP_CleavageSite=55; ConfidenceScore=5.06e-01
AGDPIFPLLSXGPCVLDPDAAKSGSGAPPGSAAIQFWQPQPQSPSSAAAANPNPSASPFAYLKKPLPMLDTGAGSSGSGATTCQDCGNQAKKDCGHNRCRTCCKSRGFDCSTHVKSTWVPAARRRERQHLAASGSASSSPATASAAAVASASASKKPRLLSSQTTTSHTSTSNATTPRSFDTTSSHQDASFRDSLPRQVRAPAVFKCVRVTSIEDGEDEYAYQAMVTINGHLFKGFLYDQGPDDGRHAATSNEDSTAGVPNISELHLGGASASGAGGTGGVREGGASMGPTELYGGGGQHHILGGSSYGNTMN

SEQ ID NO: 106466 - protein, 448 aa, Setaria italica
  Transcript Sequence Number=SeqID_40492
  Gene Ontology: Mol. function=protein serine/threonine kinase activity; Cellular component=plasma membrane; Biological process =protein amino acid phosphorylation
  Homolog annotation: Hit_ID=Q69Q47; Match level="QueryCoverage=99%, HitCoverage=98%, E-value=0.0, Identity=89%"; Hit description=CBL -interacting protein kinase 24
  Pfam annotation: Domain name=NAF; Domain location=305-366; Score =108.7; E_value=1.9e-29; Accession=PF03822.6; Description=NAF domain
  Pfam annotation: Domain name=Pkinase; Domain location=10-263; Score =318.3; E_value=1.6e-92; Accession=PF00069.17; Description=Protein kinase domain
  Pfam annotation: Domain name=Pkinase_Tyr; Domain location=10-261; Score=23.6; E_value=2.7e-15; Accession=PF07714.9; Description =Protein tyrosine kinase
  Pfam module annotation: Pfam domain module=NAF::Pkinase::Pkinase_Tyr; Domain location=305-366::10-263::10-261
AARKKRVGRYEVGRTIGQGTFAKVKFAVDAETGAAVAMKVLDKETILSHRMLHQIKREISIMKIVRHPNIVRLNEVLAGKTKIYIILELITGGELFDRIAHHGKLRENEAGKYFQQLIDAIDYCHSKGVYHRDLKPENLLLDARGNLKVSDFGLSTLSQNGVGLLHTKCGTPNYVAPEVLGSNGYDGSAADIWSCGVILYVLMAGYLPFEENDLPSLYEKITAAQYSCPYWFSPGASSLIQRILDPNPKTRITIEEIRADPWFKKNYVAIRRGEDENVSLDDVQAVFDNIEDKYVSEEVTHKDGGPLMMNAFEMITLSQGLDLSALFDRQQEFVKRQTRFVSRKPAMTIVATIEVVAESMGLKVHSQNYKLRLEGTSPNRMGQFAVVLEIFEVAPSLYMVDVRKVAGETLEYHRFYKNLCSKLDSIIWRPIEVSAKSTLLRTTTRCVP

SEQ ID NO: 106467 - protein, 141 aa, Setaria italica
  misc_feature (125)..(125): Xaa can be any naturally occurring amino acid
  Transcript Sequence Number=SeqID_40493
VFVASLLRILIHAIEKQSEEIKSMAAMLSLAVVMCNKNAMSREDFARATPGDETMVKKLKEILKVNKHCTAECLEVVKLTCHVVVAMIKAQPSCIQRFNEHNFEETLAETLETMSEVDDCLLFAXEHREVIKPARSLASLV

SEQ ID NO: 106468 - protein, 65 aa, Setaria italica
  Transcript Sequence Number=SeqID_40494
VPFSSICILHRNLLSLQYIFLLLLEYSHQCYSTSLSQGATIVDLSVIIAPAPEYQPSYLLDLQDP

SEQ ID NO: 106469 - protein, 80 aa, Setaria italica
  Transcript Sequence Number=SeqID_40495
PAMLSRRLHHKCRAAILSARSKLFSCHIVPVLKSLMVELENSDFAGMKLPWCLAILVLEVTSDVVMFLSSLMRTRVSCLL

SEQ ID NO: 106470 - protein, 158 aa, Setaria italica
  misc_feature (77)..(77): Xaa can be any naturally occurring amino acid
  Transcript Sequence Number=SeqID_40496
  Gene Ontology: Mol. function=zinc ion binding; Biological process =regulation of transcription
  Homolog annotation: Hit_ID=Q41801; Match level="QueryCoverage=81%, HitCoverage=46%, E-value=5e-18, Identity=50%"; Hit description=Dof3 gene (Fragment)
ALQGPGAMLGGNLSMLPPLLRLADFDAMSLGSSFSGMAGKPSLDAAGAYSVGGGSGLEHQWRVQQMQSFPFLHAMDXARWAPPLAMTMAPGMFQLGLDSGDGRGGGGGSGEDGSGELHVMQAKREGGYQARGMYGDHHFAAAGYASYSNNAAAGNHLL

SEQ ID NO: 106471 - protein, 356 aa, Setaria italica
  Transcript Sequence Number=SeqID_40497
  Gene Ontology: Mol. function=oxidoreductase activity; Cellular component=plastid inner membrane; Biological process=metabolic process
  Homolog annotation: Hit_ID=B6T2P8; Match level="QueryCoverage=89%, HitCoverage=93%, E-value=1e-148, Identity=82%"; Hit description =Chloroplastic quinone-oxidoreductase
  Pfam annotation: Domain name=ADH_N; Domain location=59-145; Score =56.5; E_value=1e-13; Accession=PF08240.4; Description=Alcohol dehydrogenase GroES-like doma
  Pfam annotation: Domain name=ADH_zinc_N; Domain location=180-317; Score=22.8; E_value=8.7e-06; Accession=PF00107.18; Description=Zinc -binding dehydrogenase
  Pfam module annotation: Pfam domain module=ADH_N::ADH_zinc_N; Domain location=59-145::180-317
ILCPLPSPPHSPALRFPPAMAAAAATKVPATMRAVQYDACGGGAEGLKHVEVPVPSAKKNELLLKLEAASINPVDWKIQKGMLRPFLPRKLPFIPVTDVAGVVVDVGPGVNGFQAGDEVVAMLNSFYGGGLAEYAVASESLTVKRPPEVSAAEGAGLPIAAGTALQALRSIGAKFDGTGQPLNVLITAASGGVGFYAVQLAKLAGLHVTATCGARNVELVKSLGANEVLDYRTPEGASLQSPSGKKYDGVVHCTVGISWSTFEPVLAPTGRVIDITPNFAAILKSGLHKVTFAKKRLVPLLLSPNKADLEFLVGLLKDHKMKTLIDSRFPLSEASKAWQKSIEGHATGKIIVEMEG

SEQ ID NO: 106472 - protein, 69 aa, Setaria italica
  Transcript Sequence Number=SeqID_40498
  Gene Ontology: Mol. function=heat shock protein binding
  Homolog annotation: Hit_ID=Q2QQD1; Match level="QueryCoverage=52%, HitCoverage=15%, E-value=1e-10, Identity=86%"; Hit description=DnaJ domain containing protein, expressed
MPTAAMGEAMRGLAITDADHYGRLGITRLASTDEVKAAYEKRCEELNSKELEEEELNKEHDLLKVLILN

SEQ ID NO: 106473 - protein, 85 aa, Setaria italica
  Transcript Sequence Number=SeqID_40499
  Gene Ontology: Mol. function=oxidoreductase activity, acting on the CH-OH group of donors, NAD or NADP as acceptor; Cellular component =chloroplast; Biological process=cellular carbohydrate metabolic process
  Homolog annotation: Hit_ID=Q43830; Match level="QueryCoverage=88%, HitCoverage=27%, E-value=3e-26, Identity=78%"; Hit description =Malate dehydrogenase (Fragment)
VPSPGDLLEKARHIAQVADFLNARIDGKPAKQVIGDTKCLEEEFTKIIQKRGGVLIQKWGRSSAASTAVSIVDAMRSLVTPTPEG

SEQ ID NO: 106474 - protein, 58 aa, Setaria italica
  Transcript Sequence Number=SeqID_40500
FNNKKTKYDYMCDLVKSQILHLHFKILVNLTEICWRFDLVLDGFRTISGLFRHIILEF

SEQ ID NO: 106475 - protein, 104 aa, Setaria italica
  misc_feature (63)..(63): Xaa can be any naturally occurring amino acid
  Transcript Sequence Number=SeqID_40501
  Gene Ontology: Mol. function=translation initiation factor activity; Cellular component=transcription factor complex; Biological process =regulation of transcription, DNA-dependent
  Homolog annotation: Hit_ID=B9SI57; Match level="QueryCoverage=33%, HitCoverage=5%, E-value=5e-09, Identity=77%"; Hit description =Transcription initiation factor brf1, putative
  Pfam annotation: Domain name=BRF1; Domain location=29-102; Score =45.0; E_value=3e-10; Accession=PF07741.5; Description=Brf1-like TBP -binding domain
VQRNNLRKGGKVSEIVEGDADPESLSDIDDVEVDWYLHNEEETQYKKIIWEEMNKEYLEEQAXKEALAAELAARGVVVEEGKKKKRKRNEDIKSSTPAETPSAS

SEQ ID NO: 106476 - protein, 64 aa, Setaria italica
  Transcript Sequence Number=SeqID_40502
NYAITLTNAFRHNIKDLRIAQCCHASAPAPSRFFLTSRNLGPIAASKYWAISSMANGMQGMAKA

SEQ ID NO: 106477 - protein, 178 aa, Setaria italica
  misc_feature (99)..(99): Xaa can be any naturally occurring amino acid
  Transcript Sequence Number=SeqID_40503
  Gene Ontology: Cellular component=plasma membrane
  Homolog annotation: Hit_ID=Q53M65; Match level="QueryCoverage=57%, HitCoverage=30%, E-value=3e-38, Identity=75%"; Hit description =Similar to SAC domain protein 7
  Subcellular localization annotation: CTP_CleavageSite=64; ConfidenceScore=5.41e-01
MATGAALVSGCVLPARPARANHLNSRIQASRSRQFNRNRGRPRLRCSDTGHLFGCAHARGHLTVAHAEGYPVMGGTNDASPSSKLHTRLRLWEFPDSYXFEPIDGLADLYLSVSRANGTMNLVEALPPRGSSTPKVQTVYGVIGVLKLAVGSYFLVITDRDCVGSYLGHAIFKVVLGT

SEQ ID NO: 106478 - protein, 56 aa, Setaria italica
  Transcript Sequence Number=SeqID_40504
  Homolog annotation: Hit_ID=Q53M64; Match level="QueryCoverage=62%, HitCoverage=11%, E-value=9e-12, Identity=85%"; Hit description =Similar to SAC domain protein 7
HRYFLINDKDEKIEEQTGTVRTNCIDCLDRTNVTQVHPSKAITFTCTSAVILNQIA

SEQ ID NO: 106479 - protein, 72 aa, Setaria italica
  Transcript Sequence Number=SeqID_40505
NVKGLGSKVSEGAVGELYKTKYEDGDANKKDEMDFDAQYEQDNADGETFDHGYNYDADGAGAYNGIDDFDFF

SEQ ID NO: 106480 - protein, 119 aa, Setaria italica
  Transcript Sequence Number=SeqID_40506
  Gene Ontology: Mol. function=phosphatase activity; Cellular component= plasma membrane; Biological process=dorsal closure, amnioserosa morphology change
  Homolog annotation: Hit_ID=Q53M64; Match level="QueryCoverage=99%, HitCoverage=37%, E-value=7e-51, Identity=79%"; Hit description =Similar to SAC domain protein 7
SMIGRKILESQLQRIEVLGVDDTISNHPAFDTNYKILWANHGDAISIQYSGTPALKGDFVRYGKRTTQGILNDLRNALGRYYLNNFVDGTKQDAMDLLQGHYMTSVSRDMAVPRKEVLS

SEQ ID NO: 106481 - protein, 238 aa, Setaria italica
  misc_feature (190)..(190): Xaa can be any naturally occurring amino acid
  Transcript Sequence Number=SeqID_40507
  Gene Ontology: Mol. function=translation initiation factor activity; Cellular component=transcription factor complex; Biological process =regulation of transcription, DNA-dependent
  Homolog annotation: Hit_ID=B9SI57; Match level="QueryCoverage=84%, HitCoverage=32%, E-value=5e-25, Identity=35%"; Hit description =Transcription initiation factor brf1, putative
  Pfam annotation: Domain name=BRF1; Domain location=178-238; Score =10.8; E_value=0.00063; Accession=PF07741.5; Description=Brf1-like TBP-binding domain
RLICEATLTKRLIEFESTDSGSLTIEEFLATADEYNQEPVSKRSLKSGEILCKHKGKEGFEHFAHGLCEKCYNKFTKLSGGLEGGANPPAFQRAEKQRLEAAKRAEEAVAVKEAALEESLCDTQNSDVENPRKGVREDKSSTVASGELTNDSEVSKDPEGGGENCEGDADPESLSDIDDVEVDWYLHNVXETQYKKIIWEEMNKEYLEEQAAKEALAAELAARGVVVEEGKKKKRKRN

SEQ ID NO: 106482 - protein, 450 aa, Setaria italica
  misc_feature (412)..(412): Xaa can be any naturally occurring amino acid
  Transcript Sequence Number=SeqID_40508
  Gene Ontology: Mol. function=malate dehydrogenase (NADP+) activity; Cellular component=chloroplast; Biological process=carbohydrate metabolic process
  Homolog annotation: Hit_ID=P37229; Match level="QueryCoverage=87%, HitCoverage=90%, E-value=0.0, Identity=81%"; Hit description=Malate dehydrogenase [NADP] 2, chloroplastic
  Pfam annotation: Domain name=Ldh_1_C; Domain location=258-431; Score =219.7; E_value=7.7e-63; Accession=PF02866.10; Description =lactatemalate dehydrogenase, alphabeta C-t
  Pfam annotation: Domain name=Ldh_1_N; Domain location=107-256; Score =199.6; E_value=8.4e-57; Accession=PF00056.15; Description =lactatemalate dehydrogenase, NAD bin
  Pfam module annotation: Pfam domain module=Ldh_1_C::Ldh_1_N; Domain location=258-431::107-256
  Subcellular localization annotation: CTP_CleavageSite=57; ConfidenceScore=5.79e-01
MAAAAAVPSSSSASTILPSRPQTSPFQFHEHAAARRSSPALQRRRLRSRSRRNQLVCCSLDATKQVVQEERPAAVKDAAGRTDCFGVFCTTYDLRADEETKTWKKVVNIAVSGAAGTISNHLLFKLASGEVFGQDQPIALKLLGSQKSFQALEGVAMELEDSLYPLLREVSIGIDPYEVFQDVEWALLIGAKPRGPGMERADLLNLNGQIFAEQGKALNAVASKNVKVLVVGNPCNTNALICLKNAPDIPPKNFHALTRLDENRAKCQLALKAGVFYDKISNMTIWGNHSTTQVPDFLNARIDGKPAKQVIGDTKWLEEEFTKIIQKRGGVLIQKWGRSSAASTAVSIVDAMRSLVTPTPEGDWFSSGVYTNGNPYGIAEDIVFSMPCRSKGDGDYELATDVMIDDFLWERXIKKSEGELLAEKGCVGHLIGQDDELCEVTEDTMLPGDK

SEQ ID NO: 106483 - protein, 232 aa, Setaria italica
  Transcript Sequence Number=SeqID_40509
  Gene Ontology: Mol. function=heat shock protein binding
  Homolog annotation: Hit_ID=Q2QQD1; Match level="QueryCoverage=68%, HitCoverage=68%, E-value=3e-57, Identity=70%"; Hit description=DnaJ domain containing protein, expressed
  Pfam annotation: Domain name=DnaJ; Domain location=111-172; Score =15.9; E_value=0.00012; Accession=PF00226.23; Description=DnaJ domain
  Subcellular localization annotation: CTP_CleavageSite=50; ConfidenceScore=5.70e-01
MAAVGITSPPAPSAFAPATSSCSHSSHSIPRLRIRCLPTRFAAPASFRARCAAAADGGVAASEGAAAVAEDPNAGTDVAGGAATSTRPPYSLISSDNVQKAMRGLAITDADHYGRLGITRLASTDEVKAAYEKRCEELNSKELEEEELNKEHDLLKESFTILSTEEERRLYDWSLSRSGQPERYVWPFQVDPLEMAPDPPKEPEDEFPTTLVGYFFLAWFILSVAFSVTLNR

SEQ ID NO: 106484 - protein, 539 aa, Setaria italica
  Transcript Sequence Number=SeqID_40510
  Gene Ontology: Mol. function=translation initiation factor activity; Cellular component=transcription factor complex; Biological process =regulation of transcription, DNA-dependent
  Homolog annotation: Hit_ID=B9SI57; Match level="QueryCoverage=83%, HitCoverage=72%, E-value=1e-110, Identity=45%"; Hit description =Transcription initiation factor brf1, putative
  Pfam annotation: Domain name=BRF1; Domain location=422-520; Score =115.5; E_value=1.8e-31; Accession=PF07741.5; Description=Brf1-like TBP-binding domain
  Pfam annotation: Domain name=TFIIB; Domain location=180-252; Score =46.3; E_value=1.2e-10; Accession=PF00382.11; Description =Transcription factor TFIIB repeat
  Pfam annotation: Domain name=TFIIB; Domain location=79-151; Score =53.9; E_value=6e-13; Accession=PF00382.11; Description=Transcription factor TFIIB repeat
  Pfam annotation: Domain name=TFIIB_Zn_Ribbon; Domain location=9-45; Score=12.6; E_value=0.014; Accession=PF08271.4; Description=TFIIB zinc-binding
  Pfam module annotation: Pfam domain module=BRF1::TFIIB::TFIIB::TFIIB _Zn_Ribbon; Domain location=422-520::180-252::79-151::9-45
MVYCTHCADYCPSIKDPDKGYICCGTCGKVLDEEIYTDEPTFVKDPSGTSRLAGSILASIGSHYSMSRERTLEKGKDEISQIVNNLHVSGGETIISKAYCFYKLAIDRNFTRGRRTTHVAAACLYIACRQSKKAYLLIDFSDYLQISVYVLGAVFLQLCQVLLLADHPVVQKLIDPSLFIHRFTERLLGRRDNAVSDTALRIVASMKRDWMQTGRKPSGLCGAALYIAALSHGYNYTKADVVAVVHVCEATLTKRLIEFESTDSGSLTIEEFLATADEYNQEPVSKRSLKSGEILCKHKGKEGFEHFAHGLCEKCYNKFTKLSGGLEGGANPPAFQRAEKQRLEAAKRAEEAVAVKEAALEESLCDTQNSDVENPRKGVREDKSSTVASGELTNDSEVSKDPEGGGENCEGDADPESLSDIDDVEVDWYLHNEEETQYKKIIWEEMNKEYLEEQAAKEALAAELAARGVVVEEGKKKKRKRNEDIKSSTPAETPAEATFNMLKRKGLGSKVSEGAVGELYKTKYEISWKVKLKVNVKLK

SEQ ID NO: 106485 - protein, 597 aa, Setaria italica
  Transcript Sequence Number=SeqID_40511
  Gene Ontology: Mol. function=phosphatase activity; Cellular component= plasma membrane; Biological process=biological_process
  Homolog annotation: Hit_ID=Q7X911; Match level="QueryCoverage=97%, HitCoverage=98%, E-value=0.0, Identity=62%"; Hit description=SAC domain protein 6
  Pfam annotation: Domain name=Syja_N; Domain location=67-361; Score =308.4; E_value=1.5e-89; Accession=PF02383.10; Description=SacI homology domain
MGGTNDASPSSKLHTRLRLWEFPDSYVFEPIDGLADLYLSVSRANGTMNLVEALPPRGSSTPKVQTVYGVIGVLKLAVGSYFLVITDRDCVGSYLGHAIFKVTGLKVLPCNNALNTTSAEQKKMETEFSELLDAAERTIGLHFSYDINLTLSAQRLHDLGDEYKSLPLWRQAEPRFLWNSYLLEPLIENRLNQYLLPVIQGSFQNIHAEVGSEKVNVTLIARRCTRRIGTRMWRRGADAEGYAANFVESEQIMQSKGFTASYVQVRGSMPFLWEQIVDLTYKPSFDIVRQEEAPRVLERHFHDLQKKYGAVLAVDLVNTGGGEGRLRERYAKSIEPILSEDLRYVHFDFHRVCGHVHFERLSQLYDQIKDYLRKHRYFLINDKDEKIEEQTGTVRTNCIDCLDRTNVTQSMIGRKILESQLQRIEVLGVDDTISNHPAFDTNYKILWANHGDAISIQYSGTPALKGDFVRYGKRTTQGILNDLRNALGRYYLNNFVDGTKQDAMDLLQGHYMTSVSRDMAVPRKGGLLENYASFRLAFALVMGVMMFMMMSLRHARNDIRHLLLSLLWAGLCIGITHFVKANGRTFTNRPRFHQSRH

SEQ ID NO: 106486 - protein, 197 aa, Setaria italica
  Transcript Sequence Number=SeqID_40512
  Homolog annotation: Hit_ID=Q9M897; Match level="QueryCoverage=86%, HitCoverage=80%, E-value=4e-30, Identity=42%"; Hit description =F16B3.6 protein
  Pfam annotation: Domain name=DUF679; Domain location=21-184; Score =334.0; E_value=2.9e-97; Accession=PF05078.4; Description=Protein of unknown function (DUF679)
  Subcellular localization annotation: CTP_CleavageSite=10; ConfidenceScore=5.31e-01
MSSSSSLAPRSGGVSMADRALRGMADLIKLLPSGTVFLFQFLTPLVTNNGHCSTFNKVLSGSLVALCGGFCAFSSFTDSYVGSDGRVYYGVVTRRGLHTFSPDPDTASRDLSAYRLRAGDFVHAALSLLVFATIALLDADTVACLYPALEVSERTMMAVLPPVVGGAAGYVFMVFPNNRHGIGYQPTRATEDFEHKY

SEQ ID NO: 106487 - protein, 142 aa, Setaria italica
  Transcript Sequence Number=SeqID_40513
  Pfam annotation: Domain name=PAM2; Domain location=12-29; Score=13.3; E_value=0.085; Accession=PF07145.7; Description=Ataxin-2 C-terminal region
MSRSTTESQKMDWGFQLNPYAAPFVPSSMASFAAESLNRRNDSEKQPGEAEKTETADNSDEYDLPDSLSLDFYAESLGKLNISAESSSEYLGSDLDIHLRGVVAYLSHTFPNVSDDFIIDALKLQEFDVDLTIDMLSHLVRL

SEQ ID NO: 106488 - protein, 71 aa, Setaria italica
  Transcript Sequence Number=SeqID_40514
MRLYSSLRSPNFFHLFAPTISQTLVFLNDLHRLSKLKTFSVPVFVHSSHKNECCIHLYCTLTPCHQSIIII

SEQ ID NO: 106489 - protein, 48 aa, Setaria italica
  Transcript Sequence Number=SeqID_40515
ERKELSRNEWAIDGLKVAVSWSGTVKRQVAGLSSASSFSISAHQLVPV

SEQ ID NO: 106490 - protein, 123 aa, Setaria italica
  Transcript Sequence Number=SeqID_40516
  Gene Ontology: Cellular component=plasma membrane
  Homolog annotation: Hit_ID=UPI000034EDB7; Match level="QueryCoverage =88%, HitCoverage=14%, E-value=9e-37, Identity=67%"; Hit description =pleckstrin homology (PH) domain-containing protein / lipid-binding START domain-containing protein
LHYFLIGHYVHFRLSRRNSRMHSIDWTLFSSAHNDPMASDVIAPSPWSIFGCKNGLRFFTEANDGGSRGTYWDDHPAIMAVGVVDANSEAVFQTLMSLCQSRSEWDFCLQEGKVVEHLDGHTD

SEQ ID NO: 106491 - protein, 58 aa, Setaria italica
  Transcript Sequence Number=SeqID_40517
GSFYGVAHDKHHTTTGINYQQYHTMYYTSNFPFVHLKPCKDDFSCPRIHIQCNYVICI

SEQ ID NO: 106492 - protein, 143 aa, Setaria italica
  Transcript Sequence Number=SeqID_40518
  Gene Ontology: Mol. function=protein serine/threonine kinase activity; Biological process=protein amino acid phosphorylation
  Homolog annotation: Hit_ID=Q0Q5D6; Match level="QueryCoverage=99%, HitCoverage=15%, E-value=2e-47, Identity=65%"; Hit description =Receptor kinase 1
  Pfam annotation: Domain name=Pkinase_Tyr; Domain location=1-140; Score=-147.5; E_value=0.00064; Accession=PF07714.9; Description =Protein tyrosine kinase
FGNVYIGTFIIDENLATVAIKVINLNLRGASRSFLTECNALRRIRHRNLVKVITVCSGLDHNGDEFKALVLEFICNGSLDEWLHPNTMENSMTAKRLSLMRRLCIALDVAVALEYLHHNIEPPIVHSDIKSSSINLDDDLVAS

SEQ ID NO: 106493 - protein, 179 aa, Setaria italica
  misc_feature (159)..(159): Xaa can be any naturally occurring amino acid
  Transcript Sequence Number=SeqID_40519
  Gene Ontology: Mol. function=protein binding
  Homolog annotation: Hit_ID=Q6J9V5; Match level="QueryCoverage=94%, HitCoverage=32%, E-value=1e-29, Identity=40%"; Hit description=Cf2 -like protein
  Pfam annotation: Domain name=LRR_1; Domain location=11-33; Score =15.4; E_value=0.24; Accession=PF00560.25; Description=Leucine Rich Repeat
  Pfam annotation: Domain name=LRR_1; Domain location=110-132; Score =12.0; E_value=1.6; Accession=PF00560.25; Description=Leucine Rich Repeat
  Pfam annotation: Domain name=LRR_1; Domain location=133-155; Score =7.5; E_value=11; Accession=PF00560.25; Description=Leucine Rich Repeat
  Pfam annotation: Domain name=LRR_1; Domain location=35-58; Score =14.8; E_value=0.36; Accession=PF00560.25; Description=Leucine Rich Repeat
  Pfam annotation: Domain name=LRR_1; Domain location=60-81; Score=7.1; E_value=14; Accession=PF00560.25; Description=Leucine Rich Repeat
  Pfam annotation: Domain name=LRR_1; Domain location=87-108; Score =10.3; E_value=3.3; Accession=PF00560.25; Description=Leucine Rich Repeat
  Pfam module annotation: Pfam domain module=LRR_1::LRR_1::LRR_1::LRR _1::LRR_1::LRR_1; Domain location=11-33::110-132::133-155::35-58::60 -81::87-108
ERTIPAPLSSPLREINLRGNQLTGPIPKSLFQLTNLEHLVLGSNKLTGTIELGSIWRLKNLTDLDLGNNMISLVEKEGDTIFSYSLKIQNLFLASCNLTKFPESLKYLDTIQYLDLSNNQIEGAIPSWVWEKPLVMLNLSHNMFTTLERSPTFQMTDFXIFLISVFNRIQGSIPIPSTP

SEQ ID NO: 106494 - protein, 213 aa, Setaria italica
  Transcript Sequence Number=SeqID_40520
  Gene Ontology: Mol. function=binding
  Homolog annotation: Hit_ID=B9T2B9; Match level="QueryCoverage=84%, HitCoverage=90%, E-value=4e-26, Identity=27%"; Hit description =Pentatricopeptide repeat-containing protein, putative
  Pfam annotation: Domain name=PPR; Domain location=130-164; Score =15.6; E_value=0.13; Accession=PF01535.12; Description=PPR repeat
  Pfam annotation: Domain name=PPR; Domain location=165-199; Score =20.1; E_value=0.0091; Accession=PF01535.12; Description=PPR repeat
  Pfam annotation: Domain name=PPR; Domain location=60-94; Score=21.2; E_value=0.0042; Accession=PF01535.12; Description=PPR repeat
  Pfam annotation: Domain name=PPR; Domain location=95-129; Score=30.8; E_value=5.7e-06; Accession=PF01535.12; Description=PPR repeat
  Pfam module annotation: Pfam domain module=PPR::PPR::PPR::PPR; Domain location=130-164::165-199::60-94::95-129
VVASMPNHFTFLILLRHLLKRRLAEHVPLKATRVWTTIELADIFELFELMKKNGVPSSARAYLIILEGFSEDRRLDEVTSLVSRMKEDNVPLNEDICTALVNCFCKLRMYPDAWALLCSMIGRGFLPNLLSYQHLLSGLTAEGQEDRAKEIFRDSRWKDYNPDEIVWKVIIDGFIRKGRSDMCHDMISTLEQMNCKLSDQTYAMLTEELSTRE

SEQ ID NO: 106495 - protein, 202 aa, Setaria italica
  Transcript Sequence Number=SeqID_40521
MGEASPESGAAAAGGAAGPAPPRKGKSCKGCLYYSSVLKSRGYNPICVGIPRSIPQVPNYVVDEPKEEAMSQGHDLRQFRYGCAGYSMYVDNRDSRGGESEGKTLLPYCRGLELLVDSRLVEKQPSTAQQAPAHVSKDAATTRSHQEGQQRPAHLARQEFLGRFKRSAGLVASGVAKNLNKTANYIKENIQDIFYPDRRPPK

SEQ ID NO: 106496 - protein, 340 aa, Setaria italica
  misc_feature (157)..(157): Xaa can be any naturally occurring amino acid
  misc_feature (191)..(191): Xaa can be any naturally occurring amino acid
  Transcript Sequence Number=SeqID_40522
  Gene Ontology: Mol. function=nucleic acid binding
  Subcellular localization annotation: CTP_CleavageSite=40; ConfidenceScore=5.54e-01
PDIIEKLVPGNHKQLSESTASHRSTAVQSMSSRPVPSNLSTSNAKSEATAGPNNLSDLKRKLASRNQLQLVNQQDAPTSNTGITRASLCHSTLNKQLPSTDGKQQDSAQGGHESFYNRQMVRSGDIVPSHCSDSTTLSRPVSAVSSTDVAAPDRKEXKRQACPPGFEKPHHISDSDKFVYVSSPACSGLCXASGALVQDSCGITDQQDLPSWATDCLKDDADVTNNLNVTTSSRSTDTNQRHAQFQGTFFPGWSNQPRLSPYPPHHKPEYWDGTTGSYMFTGGYDTFCQRTTSGMRGGMAGTLLQQPTMPSPHGSWTDGNTDSGMNCPQVDIAYPMYTLF

SEQ ID NO: 106497 - protein, 103 aa, Setaria italica
  Transcript Sequence Number=SeqID_40523
  Gene Ontology: Mol. function=iron-sulfur cluster binding; Cellular component=cytoplasm; Biological process=rRNA processing
  Homolog annotation: Hit_ID=B5JY16; Match level="QueryCoverage=82%, HitCoverage=21%, E-value=3e-14, Identity=48%"; Hit description =Radical SAM enzyme, Cfr family
LDGVNDQEEHAHQLGKLLETFKAVVNLIPFNPIGSSSNFKTSSDQNVKKFQKVIRGIYNIRTTVRQQMGQDIAGACGQLVVSLPDERSTGGATLLSDIEDFRI

SEQ ID NO: 106498 - protein, 123 aa, Setaria italica
  Transcript Sequence Number=SeqID_40524
RQLGIRITLDPVVQHQLAWTHLASMMALCAMSTQLIQGLDHNKNAILYILQIYGSAQPNLVFRCSFFESDLSYQYIISVNEIFILKDKCWTVHSLLIASSYMLIIYINLKKDQLMVHDSVHNS

SEQ ID NO: 106499 - protein, 106 aa, Setaria italica
  Transcript Sequence Number=SeqID_40525
FTGLITNCGFFFHRQNLTLESITRYPKELTDFGPTMQGQTTLECVSESSIVHVSKKQQHTMQEMVVVGAVTWQGFAIMSGRWRCHNKQKKLGTIIRNVGEKLTAMS

SEQ ID NO: 106500 - protein, 90 aa, Setaria italica
  Transcript Sequence Number=SeqID_40526
QVKISLLVTWPCRSAALLQQWVSLGSGLLVWSRCERAGGRGQGAEHVGVLECQEECLCRERCICSLPAVFCARREPSNGERGVGVIVTEP

SEQ ID NO: 106501 - protein, 55 aa, Setaria italica
  Transcript Sequence Number=SeqID_40527
PAYDANKLIATLVNCYAYPAASPYARSLVLLDWLKAQPIAVAAIANSGVVGVCPK

SEQ ID NO: 106502 - protein, 100 aa, Setaria italica
  Transcript Sequence Number=SeqID_40528
  Pfam annotation: Domain name=DUF1677; Domain location=5-92; Score =138.5; E_value=2.1e-38; Accession=PF07911.5; Description=Protein of unknown function (DUF1677)
ALKMDIESARCACCGLKEDCTQEYIDNVKGNFGGKWLCGLCSEAVRDELSKDRNSQDGIEEAIKAHKEFCRMPLSSPAVRVADGMKQMLRRRSGDKMRPA

SEQ ID NO: 106503 - protein, 274 aa, Setaria italica
  Transcript Sequence Number=SeqID_40529
  Gene Ontology: Mol. function=shikimate kinase activity; Cellular component=chloroplast; Biological process=aromatic amino acid family biosynthetic process
  Homolog annotation: Hit_ID=B6TNV8; Match level="QueryCoverage=95%, HitCoverage=95%, E-value=1e-135, Identity=90%"; Hit description =Shikimate kinase family protein
  Pfam annotation: Domain name=SKI; Domain location=90-258; Score=38.4; E_value=6e-09; Accession=PF01202.14; Description=Shikimate kinase
  Subcellular localization annotation: CTP_CleavageSite=46; ConfidenceScore=5.80e-01
MAMRAAPAAATGFFSSPSTVSPRRFSFATPPASLSAGRRIRLHRLRAFPSSELPLEELNPSVDLLRKTAEAVGDFRKTPIYIVGTDCTAKRNIGKLLANSIIYRYLCSEELLEDVLGGKDALRAFKESDEKGYLEVETEGLKQLTSMGSLVLCCGDGAVMNSTNLGLLRHGVSIWIDVPLEMAANDMLKSTGTQATTDPDSFSQAMSKLRQQHDDLKERYGISDITVSVQNVASQLGYSSVDSVTLEDMVLEIVRQIERLIRTKAMMEAAGKPF

SEQ ID NO: 106504 - protein, 54 aa, Setaria italica
  Transcript Sequence Number=SeqID_40530
SNVRAAPVGADDACRCAAAAAAHVVVVVTRSHQQHCHHHHHQPPPAAAAAPALK

SEQ ID NO: 106505 - protein, 155 aa, Setaria italica
  misc_feature (88)..(88): Xaa can be any naturally occurring amino acid
  Transcript Sequence Number=SeqID_40531
  Gene Ontology: Mol. function=diaminohydroxyphosphoribosylaminopyrimidi ne deaminase activity; Biological process=riboflavin biosynthetic process
  Homolog annotation: Hit_ID=Q6K6I4; Match level="QueryCoverage=94%, HitCoverage=23%, E-value=2e-71, Identity=90%"; Hit description =Putative riboflavin biosynthesis protein ribD
  Pfam annotation: Domain name=RibD_C; Domain location=74-155; Score= -37.8; E_value=0.0027; Accession=PF01872.9; Description=RibD C -terminal domain
HRHRIPRPGIARVVVGLRHPLKHLRGKAIQALRSEGIQVDVVGEDLQTKPFEGALKSCLTVNAPLLYRAAFNVPFSVLKYAMTADGKXAASSGHASWVSGKASRGRVFELRGRSDAVIVGGNTVRFDDPRLTARHVKGHVPVRIVMSQSLNLPEE

SEQ ID NO: 106506 - protein, 93 aa, Setaria italica
  Transcript Sequence Number=SeqID_40532
SLNLELHQIHYPSRTHLVDYLADYNTKGLLLLGQLLFEMLTTNGAWCCNMEALSCSCRNQTIKLLLRNRLFYSVFSLSLYLFFVPCILAPSDV

SEQ ID NO: 106507 - protein, 95 aa, Setaria italica
  Transcript Sequence Number=SeqID_40533
  Subcellular localization annotation: CTP_CleavageSite=39; ConfidenceScore=5.01e-01
AYARSITMKPSKLTTFSKRETNDMMKLNIALTCARTYFAAASKKTCGSSMHPVGSEKLSCLLKLLPCTHKHTKAAQARRARWRRRGTCISASGAS

SEQ ID NO: 106508 - protein, 76 aa, Setaria italica
  misc_feature (18)..(18): Xaa can be any naturally occurring amino acid
  misc_feature (43)..(43): Xaa can be any naturally occurring amino acid
  Transcript Sequence Number=SeqID_40534
  Subcellular localization annotation: CTP_CleavageSite=65; ConfidenceScore=5.53e-01
PLVASSFSASKLPKPPPXPSIPHPPLAHPPRPSCAPPPPPPPXSSSPRLSWVPPPPPGPGSHPPRAQLEPLRWWLP

SEQ ID NO: 106509 - protein, 105 aa, Setaria italica
  Transcript Sequence Number=SeqID_40535
FSSYLFRSTGAEIVGEQREKAVDYFRKNDIMLNEAAKRSVRSLFQRLDCIHIENKCISSPIVVRNILASRTGVLGFSEEETVALIAEGINKNYVDLKICLDSIMT

SEQ ID NO: 106510 - protein, 492 aa, Setaria italica
  misc_feature (10)..(10): Xaa can be any naturally occurring amino acid
  misc_feature (204)..(204): Xaa can be any naturally occurring amino acid
  Transcript Sequence Number=SeqID_40536
  Gene Ontology: Mol. function=oligopeptide transporter activity; Cellular component=integral to membrane; Biological process =oligopeptide transport
  Homolog annotation: Hit_ID=Q1EP05; Match level="QueryCoverage=99%, HitCoverage=65%, E-value=0.0, Identity=84%"; Hit description =Oligopeptide transporter OPT family protein
  Pfam annotation: Domain name=OPT; Domain location=1-456; Score=348.8; E_value=1e-101; Accession=PF03169.7; Description=OPT oligopeptide transporter protein
SSTSITAQQXGSGYHGLGIGAFTLDWAGISAYHGSPLVAPWASIANTAVGFVMFIYIIVPLCYWQFNTFDARRFPIFSNQLFTAAGQKYDTTKVLTKDFDLNVAAYDSYGKLYLSPLFAISIGSGFLRFTSTIVHVLLFHGSDMWKQSRSAMNAVKLDVHAKLMQRYKQVPQWWFLVLLLGSVVVSLLMAFVWKEEVQLPWWGXLFAFALAFVVTLPIGVIQATTNQQPGYDIIAQFMIGYALPGKPIANLLFKIYGRISTVHALSFLADLKLGHYMKIPPRCMYTAQLVGTVVAGVVNLAVAWWMLDNIENICDVEALHPDSPWTCPKYRVTFDASVIWGLIGPGRLFGRHGLYRNLVWLFVVGAVLPVPVWLLSRAFPEKKWIALINIPVISYGFAGMPPATPTNIATWLVTGTIFNYFVFRYRKGWWQKYNYVLSAALDAGTAFMGVLIFFALQNAHHELKWWGTEVDHCPLASCPTAPGIVVKGCPVF

SEQ ID NO: 106511 - protein, 87 aa, Setaria italica
  misc_feature (66)..(87): Xaa can be any naturally occurring amino acid
  Transcript Sequence Number=SeqID_40537
  Subcellular localization annotation: CTP_CleavageSite=46; ConfidenceScore=5.87e-01
HQVSNASLALASPSASCSFQGLYLSTLSPLAGSTSFTLPSCTITILASLVGSSFTTPMYLTKIKRXXXXXXXXXXXXXXXXXXXXXX

SEQ ID NO: 106512 - protein, 207 aa, Setaria italica
  Transcript Sequence Number=SeqID_40538
  Gene Ontology: Mol. function=electron carrier activity; Biological process=oxidation reduction
  Homolog annotation: Hit_ID=C0KHL8; Match level="QueryCoverage=99%, HitCoverage=40%, E-value=1e-106, Identity=87%"; Hit description =Putative ferulate 5-hydroxylase
  Pfam annotation: Domain name=p450; Domain location=1-196; Score= -165.0; E_value=0.0011; Accession=PF00067.14; Description=Cytochrome P450
FAGGTGTSASAMEWGMSELMRNPEVMKKLQGQIREAFHGKSVVTEADLQASNLRYLKLVVKEALRLHPPAPLLVPRESIEPCELDGYTIPAKSRVVINAFAIGRDPKYWDDAEEFKPERFEDGGVDFMGGSFEFLPFGAGRRMCPGFNYGLASMELALVGMLYHFDWSLPEGVAEVDMEEAPGLGVRRRSPLMLCATPFVPVAGSTK

SEQ ID NO: 106513 - protein, 55 aa, Setaria italica
  Transcript Sequence Number=SeqID_40539
HVNQLKLVRQQSMILFWMLLYKFLSHLGQGVKCVPLMFHSEIQVDLLPSSHFIAM

SEQ ID NO: 106514 - protein, 64 aa, Setaria italica
  Transcript Sequence Number=SeqID_40540
ISQGLCANYHCQSQSTLTYYDVLGWQTMSYNLVLFMLYTSQPAYYIFLDNSTFYVSFKAYNHLA

SEQ ID NO: 106515 - protein, 45 aa, Setaria italica
  Transcript Sequence Number=SeqID_40541
  Subcellular localization annotation: CTP_CleavageSite=37; ConfidenceScore=5.17e-01
PYFFFCCQLVSLSSAFSSLSVPFVFTASAWPSGSLVPCAGKQRRN

SEQ ID NO: 106516 - protein, 220 aa, Setaria italica
  Transcript Sequence Number=SeqID_40542
  Gene Ontology: Cellular component=chloroplast
  Homolog annotation: Hit_ID=Q8DLL4; Match level="QueryCoverage=45%, HitCoverage=65%, E-value=2e-10, Identity=41%"; Hit description =Tlr0472 protein
  Subcellular localization annotation: CTP_CleavageSite=42; ConfidenceScore=5.37e-01
MAPPQPLRTLRLSAPAGHAAVCRCSAAPLFGKRLPAIVAFPRAGSGGAVALCSAVQQESSTSTTVSKKKDAADGEKKEATAAAAAKPAAAAKPKKAPAKPLPEMMQEEIIPPLKDALEAEENVSQVQLSFQNNTLEGSFIKDDVPYYFWAFFPKGDLTGPKGFALSSYSNEVSTIEPFLIDEKRITSQYVVFWVYKRLAGQGILPVWKEEEGEEEAAGAK

SEQ ID NO: 106517 - protein, 83 aa, Setaria italica
  Transcript Sequence Number=SeqID_40543
  Gene Ontology: Mol. function=cyanate hydratase activity; Biological process=cyanate metabolic process
  Homolog annotation: Hit_ID=B6TTW1; Match level="QueryCoverage=60%, HitCoverage=30%, E-value=1e-20, Identity=92%"; Hit description =Cyanate hydratase
  Pfam annotation: Domain name=Cyanate_lyase; Domain location=22-69; Score=30.3; E_value=2.8e-07; Accession=PF02560.6; Description =Cyanate lyase C-terminal domain
MIYQMLKLYYISYLCEMTFMLSYFHNFIASYCSMSAIDFYCSVDKVQGADGKDRVVVTFDGKYLPHTEQKSEHMMSRLARKTS

SEQ ID NO: 106518 - protein, 166 aa, Setaria italica
  Transcript Sequence Number=SeqID_40544
  Gene Ontology: Mol. function=cyanate hydratase activity; Biological process=cyanate metabolic process
  Homolog annotation: Hit_ID=B6TTW1; Match level="QueryCoverage=100%, HitCoverage=100%, E-value=1e-75, Identity=81%"; Hit description =Cyanate hydratase
  Pfam annotation: Domain name=Cyanate_lyase; Domain location=79-152; Score=169.4; E_value=1e-47; Accession=PF02560.6; Description=Cyanate lyase C-terminal domain
  Pfam annotation: Domain name=HTH_3; Domain location=14-68; Score =15.6; E_value=0.094; Accession=PF01381.14; Description=Helix-turn -helix
  Pfam module annotation: Pfam domain module=Cyanate_lyase::HTH_3; Domain location=79-152::14-68
MEESGVRAAVVRRLMAAKAESGKSFSDVAAETGLTNVYVAQLLRRQAQLKPDTAPKLRAALPALTDDLVDLMMQPPFRSYHPDIVHEPAIYRLNEAVMHFGESIKEIINEEFGDGIMSAIDFYCSVDKVQGADGKDRVVVTFDGKYLPHTEQKSEHMMSRLARKTS

SEQ ID NO: 106519 - protein, 120 aa, Setaria italica
  Transcript Sequence Number=SeqID_40545
  Gene Ontology: Mol. function=sequence-specific DNA binding; Cellular component=intracellular; Biological process=DNA metabolic process
  Homolog annotation: Hit_ID=Q8GT06; Match level="QueryCoverage=88%, HitCoverage=16%, E-value=4e-35, Identity=70%"; Hit description =Endonuclease-like
SIMEYYDANFSIHAKTSPVCPTYDEFERKCCDLKKTTVSQIFALQLMQVPQVTEEAALAVIEHYPTPFLLAQAYYILDGDTPTQEAMLKNKSEVVDAGASRSIFELFGGGRIFRNSFRLA

SEQ ID NO: 106520 - protein, 290 aa, Setaria italica
  misc_feature (15)..(15): Xaa can be any naturally occurring amino acid
  misc_feature (134)..(134): Xaa can be any naturally occurring amino acid
  Transcript Sequence Number=SeqID_40546
  Homolog annotation: Hit_ID=Q1RSI3; Match level="QueryCoverage=96%, HitCoverage=27%, E-value=7e-40, Identity=34%"; Hit description =Contains similarity to Chlamydia outer membrane protein , related
GIVDEKSIAAMFKFXISLINMYGTAPDSVKDHLAKHISSMLDIISNTRHLCAFSEMEKLTLQLHTLFLSTSDNSNAVLSQCKPSMASFMAILGHLNVTEDDANELCSAMWDLYHLLLKERHWALIHLVMGSFGXLDYAQSFTQLWKFVPGDAALSYNASTGTSIEENGFMLELRAYLQKEAALHTDRWSEEQLRFLVSEGRSLKKLVEAYSEITVVSEPEKVVITKDASTRKRKVPDGICEGMLLLQNGLKVIRGAFDEADSAELKDRFAAHLSRLEDAVSQIATLSDEI

SEQ ID NO: 106521 - protein, 56 aa, Setaria italica
  Transcript Sequence Number=SeqID_40547
DPFRAPGAPTTPHEPENVWSQYYHHGHGKIKRMLVVTVLIRPSNYTIGWYCHAMKI

SEQ ID NO: 106522 - protein, 193 aa, Setaria italica
  Transcript Sequence Number=SeqID_40548
  Subcellular localization annotation: CTP_CleavageSite=48; ConfidenceScore=5.48e-01
LGHNQSNNASCPSYICILYVSNPFLQRLEGSNMRTMPTPGSQTQSACRVSPNARGVVVPACPWSGGLGRPSPSLGPSPTLSVASSTCIGDRSSSLRPSLCLCPSPMGCIPRSFVLHLAATSCQRVIDPISSQVLFTRSLSRPGWTLLFHTTFRNAYYGCSNDTELAVPAAATVPLSSTLTTHWWTTDDTATAR

SEQ ID NO: 106523 - protein, 75 aa, Setaria italica
  Transcript Sequence Number=SeqID_40549
  Gene Ontology: Mol. function=hydrolase activity, acting on acid anhydrides, catalyzing transmembrane movement of substances; Cellular component=integral to membrane; Biological process=metal ion transport
  Homolog annotation: Hit_ID=B9HH79; Match level="QueryCoverage=80%, HitCoverage=7%, E-value=9e-12, Identity=61%"; Hit description=Heavy metal ATPase (Fragment)
ENLQLCCISLGLLLIAAVCPHVALLSSVGRLQATLIAVAFPLVGVSAALDALVNIADGRINIHVLMALAAFASII

SEQ ID NO: 106524 - protein, 56 aa, Setaria italica
  Transcript Sequence Number=SeqID_40550
NLWFITRALMNQCMRMKSFEHIICAHYILISQICTSYITLTNLLENILITSMPYMF

SEQ ID NO: 106525 - protein, 50 aa, Setaria italica
  Transcript Sequence Number=SeqID_40551
IRSMETILLMRQRKQKKSSKEFIYYQERREALWIPAYVTQKKTMYKDRFV

SEQ ID NO: 106526 - protein, 77 aa, Setaria italica
  Transcript Sequence Number=SeqID_40552
  Gene Ontology: Mol. function=protein binding
  Homolog annotation: Hit_ID=C1JCL8; Match level="QueryCoverage=100%, HitCoverage=21%, E-value=6e-22, Identity=59%"; Hit description=MAB1
AADRYGLERMKLICQEKLCRRIRADSVARMLALADRHHCPGLKEACFDFLSSSTNLEEFIETDGFEELTDTCPAVLK

SEQ ID NO: 106527 - protein, 102 aa, Setaria italica
  Transcript Sequence Number=SeqID_40553
KRATSPHRRRRENGRKKRRNNFMALKFLCTTRASPDHTNVHSIHAPYNQNTRGVSGRLSPNQLLVGLDSLLNRINEATGKTKIPEQSPRGGGRSVHGAVEVT

SEQ ID NO: 106528 - protein, 268 aa, Setaria italica
  misc_feature (261)..(261): Xaa can be any naturally occurring amino acid
  Transcript Sequence Number=SeqID_40554
  Gene Ontology: Mol. function=DNA-directed RNA polymerase activity; Cellular component=chloroplast; Biological process=transcription, DNA-dependent
  Homolog annotation: Hit_ID=Q01923; Match level="QueryCoverage=99%, HitCoverage=17%, E-value=1e-137, Identity=89%"; Hit description=DNA -directed RNA polymerase subunit beta''
EEDNLQLRLVNFISHENSKLTQRIYHTNSQFVRTCLVVNWEQEEKEGARASLVEVRTNDLIRDFLRIELVKSTTSYTRRRYDRTSVGLIPNNRLDRNNTNSFYSKAKIQSLSQHKEAIGTLLNRNKEYPSLMILSASNCSRIGLFKNSKYPNAVKESNPRIPIRDIFGLLGAIVPSISNFSSSYYLLTHNQILLKKYLFLENLKQTFQVLQGLKYSLIDENKRISTFDSNIMLEPFHLNWHFLHHDSWEETSAIIHLGQFXICENVCT

SEQ ID NO: 106529 - protein, 100 aa, Setaria italica
  Transcript Sequence Number=SeqID_40555
QWTAVKVSSAICLTMLLMALLLAPSCGSKEVCDEWLSDTYRMLLLCSSYICNEHCIGEGATRGNAACSSSGPSASAPKNATESSDLSCDGDFPFFSCDGH

SEQ ID NO: 106530 - protein, 191 aa, Setaria italica
  Transcript Sequence Number=SeqID_40556
  Gene Ontology: Mol. function=binding
  Homolog annotation: Hit_ID=B9RZX3; Match level="QueryCoverage=93%, HitCoverage=24%, E-value=5e-29, Identity=42%"; Hit description=Yth domain-containing protein, putative
  Pfam annotation: Domain name=YTH; Domain location=1-78; Score=83.1; E_ value=1e-21; Accession=PF04146.7; Description=YT521-B-like family
AEMVGPVDYQNDMDFWCRKNKWIGSFPVKWHIIKNVHNSTFRSILLQNNEDKPVTSSRDTQEIHYTPGTTMLELFKYTRAEGCVLDDFMVHEEEEARSGQLERFKLRQGAPHFIPAWHGPCTKRPMLPKSDSVLKDRIVSETNNLTDKLQNLNLDGHQSSCQEFGNRTSEASTTNTQKGAIAMETRFLIIL

SEQ ID NO: 106531 - protein, 102 aa, Setaria italica
  Transcript Sequence Number=SeqID_40557
ANPDGGTLSAASIRKKAIEVGSRVDALQTGMMVAPPHHRERQRHHHHHHGHHLPQLQLHADEEEHRQQQEQKQQQQQRAAWSGRAKNPDLNRAPSPESSDAE

SEQ ID NO: 106532 - protein, 56 aa, Setaria italica
  Transcript Sequence Number=SeqID_40558
  Subcellular localization annotation: CTP_CleavageSite=19; ConfidenceScore=5.03e-01
KIKCVKTLFSFQSSKKNVMCVKKDVHCVLPNSCNNSVICQNLTVVKRQNNAYQVCL

SEQ ID NO: 106533 - protein, 484 aa, Setaria italica
  Transcript Sequence Number=SeqID_40559
  Homolog annotation: Hit_ID=Q7XQ91; Match level="QueryCoverage=40%, HitCoverage=17%, E-value=2e-19, Identity=35%"; Hit description =OSJNBa0018M05.17 protein
  Pfam annotation: Domain name=DUF789; Domain location=299-484; Score= -24.5; E_value=3.9e-10; Accession=PF05623.4; Description=Protein of unknown function (DUF789)
PNGTVELESTKEEQDALDSCQTFSGPIYKKQAPFLRQQRSSSSKQGSQLSRNYYTPRNSIPKVPKDSLQQEELPVLQLVHANDIVVLTGDCSNCPTEGNESSQSGIDVAPSVSCNLVPDLTLQAASDDSHIFSRSLLFMSPQDKGVYTSWSSNNLCTDPCAAEIEEVRCVKLTTEDNSQESCKWYSAAGHLSQKWVPVGKKEASSVIHLDISEASVVEGLVSANDISDSVGPVSANGEDSKLASEMTPKLNSSEHVDLRSQAYNVIETGYSKIKEAISCVYTAQQRAEDIQLRIGRPLADFEHFVNSASPVLHCNPCPAGCKSYLQKCVEDGLCFHQTPYITLRSVWQWYEEPGCYGLEVKAQDFRRSKGLWNSHCQFTSYFVPYLSAVQLFRQTKRTNGGSIVKETMDRDMPCETSPYENLPPIFAKLLPQQSNPTNRSSTLHTEDDEQLKSGELIFEFFESEQPYSRRQLFDKVNEADCWCE

SEQ ID NO: 106534 - protein, 205 aa, Setaria italica
  Transcript Sequence Number=SeqID_40560
  Gene Ontology: Mol. function=structural constituent of ribosome; Cellular component=intracellular; Biological process=translation
  Homolog annotation: Hit_ID=B6TK08; Match level="QueryCoverage=89%, HitCoverage=54%, E-value=9e-52, Identity=58%"; Hit description =Ribosomal protein S15 containing protein
  Pfam annotation: Domain name=Ribosomal_S15; Domain location=95-175; Score=66.6; E_value=8.9e-17; Accession=PF00312.14; Description =Ribosomal protein S15
RFSLEELSARLGRLRESDKEERERAPLDRLGIGKLRDALETQAHPTKDQKKAGGAPSMATLMGFVGQTVQGKPQEELVERYFHPDHMSSAEKMKLELKRVRDQFKMSENDCGSARVQVAQLTTKIKHLSATLHKKDKHSRKGLQEMVQRRKKYLKYLRRTDWDSYCLVLKSLGLRDVPEYKAPDYKSKSNTKSKTKKKSKRKMKA

SEQ ID NO: 106535 - protein, 314 aa, Setaria italica
  Transcript Sequence Number=SeqID_40561
  Gene Ontology: Mol. function=zinc ion binding
  Homolog annotation: Hit_ID=A6N1N1; Match level="QueryCoverage=33%, HitCoverage=100%, E-value=3e-52, Identity=96%"; Hit description=Zinc finger, c3hc4 type family protein (Fragment)
  Pfam annotation: Domain name=zf-C3HC4; Domain location=27-74; Score =44.3; E_value=4.8e-10; Accession=PF00097.17; Description=Zinc finger, C3HC4 type (RING finger)
KKASSPLIPPPSEIDLEAGGGGDQLQCRICLETDGRDFIAPCKCKGTSKYVHRDCLDHWRAVKEGFAFSHCTTCKAPYYLRVHSHTDRKWRTLKFRFFVTRDILFIFALVQMVISALAYLVHFIDGYQQYWLRTAWGFDNEVSFYYICGALLFFALLGLSGCFITCYDRRVRNDLAQPCRELCLCCCQPGMCADCHLPGTLCMWTDCTTCFEGCATTAGECGGCLGGAGEAGLPLLLIMGVIVLGLFTVIGIFYSVLVATMVGQRIWQRHYHILAKRMLTKEYVVEDVDGERTDWCPPPLPAEHISQLKSLGLL

SEQ ID NO: 106536 - protein, 146 aa, Setaria italica
  misc_feature (11)..(11): Xaa can be any naturally occurring amino acid
  Transcript Sequence Number=SeqID_40562
  Gene Ontology: Mol. function=ubiquitin-protein ligase activity; Cellular component=ubiquitin ligase complex; Biological process =ubiquitin-dependent protein catabolic process
  Homolog annotation: Hit_ID=Q6K5K9; Match level="QueryCoverage=100%, HitCoverage=31%, E-value=1e-49, Identity=65%"; Hit description =Avr9/Cf-9 rapidly elicited protein-like
VDLLDNGNIIXKKDAASAIFNLCLLHENKSRATKNGIVDVAMRAIDDQLLVDGSLAILALLSSNHEVVEMITEFDGTACMLRAIRESECSRSKENAVVVLFAICMFNRMKLKEVEVDEKINGSLALLAQGGTSRARRKAVGILEKM

SEQ ID NO: 106537 - protein, 51 aa, Setaria italica
  misc_feature (1)..(17): Xaa can be any naturally occurring amino acid
  Transcript Sequence Number=SeqID_40563
XXXXXXXXXXXXXXXXXLYKRIEILTSEQQLREFTSQEQRSRETESYIYSS

SEQ ID NO: 106538 - protein, 116 aa, Setaria italica
  Transcript Sequence Number=SeqID_40564
FHCNAACRASSIFCILTCKCAISSFFCISTLLATLSIRFNRFPLFCRDICCCTAACTVWEEEDDPDEAAGEGGAGGAADGGESPGTRLTSRRTAVERLWRLLVRFPFPHESKTTRT

SEQ ID NO: 106539 - protein, 68 aa, Setaria italica
  Transcript Sequence Number=SeqID_40565
  Subcellular localization annotation: CTP_CleavageSite=29; ConfidenceScore=5.23e-01
PKVKHTTKLSATMAAKIFALLALLALSISAATAFVIPQCSSLLSAAIIPQFFPSVIGVGSAQSIVQSS

SEQ ID NO: 106540 - protein, 163 aa, Setaria italica
  Transcript Sequence Number=SeqID_40566
RLSYQNSKGQKSTGSSNKEGFHLGSPKVPQVEVKVGQIIGNKDLKVQEKVPLSVDSSCHPHTSLSTSNLCVKKIPENVKSLDIWSNERHEAPVVDLKISDMADPKGSRIPSVTSLSANSSKAACEPGEDKGATEPQLNALNRKVTEISSISLNQEINLNGERQ

SEQ ID NO: 106541 - protein, 187 aa, Setaria italica
  Transcript Sequence Number=SeqID_40567
  Gene Ontology: Mol. function=DNA binding; Cellular component =chloroplast; Biological process=regulation of transcription, DNA -dependent
  Homolog annotation: Hit_ID=B2LXS7; Match level="QueryCoverage=100%, HitCoverage=70%, E-value=1e-101, Identity=94%"; Hit description=DNA -binding protein p24
  Pfam annotation: Domain name=Whirly; Domain location=12-150; Score =329.5; E_value=6.5e-96; Accession=PF08536.3; Description=Whirly transcription factor
GAHEGRVFTSYSIYKGKAALSFDPRPPQFVPLDSGAYKVAKEGFVLLQFAPAVATRQYDWTRKQVFSLSVWEIGTLLTLGPTDSCEFFHDPFKGRSEEGKVRKVLKVEPTPDGNGRFFNLSVQNRLLNVDESIYIPITKGEFAVIVSTFNYIIPHLMGWSTFTSSIKPEDSRSYNRPQSTPEYEWRR

SEQ ID NO: 106542 - protein, 102 aa, Setaria italica
  Transcript Sequence Number=SeqID_40568
  Gene Ontology: Mol. function=hydrolase activity
PHTLKMSTTERFITSCAAEQGKQSLRKRNLIHGTGASEVNGSDEAAAEGVLVMEKHKAPKILCEDELLQVLGMERHLVQFEAMGSSRIEAAVEWELKRAEAA

SEQ ID NO: 106543 - protein, 182 aa, Setaria italica
  Transcript Sequence Number=SeqID_40569
SASSQDVQVRDLMSSGWTNERHSSYLSSMEASFVDQLYGHQNHGIHANKKHLGNNGFKVIQEGVCKNIRFERNQPCTRDAGMNYLPENPWVRRFRPRSAGVSRRDDCAEAMADDYGSGTDTVREKVRMHGGEVKPCARQNLIGKSKEVSDQNFAEEEVDASNEPCKKQRPTSSSGAPNDPGT

SEQ ID NO: 106544 - protein, 95 aa, Setaria italica
  Transcript Sequence Number=SeqID_40570
SFVHDLQLTLDWIINHCFSLRDVSDMKEAIMKHLELNNSDGLEIVAVTGHTGIHTSDEPRTAENAQTSILSDSCCINMGSKDDVRIQKTSNKVAV

SEQ ID NO: 106545 - protein, 670 aa, Setaria italica
  Transcript Sequence Number=SeqID_40571
  Homolog annotation: Hit_ID=B9SCB4; Match level="QueryCoverage=97%, HitCoverage=74%, E-value=4e-30, Identity=37%"; Hit description =Myosin-9, putative
  Pfam annotation: Domain name=DUF869; Domain location=7-534; Score =272.7; E_value=8.7e-79; Accession=PF05911.3; Description=Plant protein of unknown function (DUF869)
LLLLFYRLPGTAAIAKMRSEVETVGSDTTTTRMRKLNSAASQNSCVSVQNSHDALHGNSPLLARLHAIEDENKAIKESLSRKDGELQFSRTMLARTTSKLSQVEAQLEELSRGRAGAELVKGSPTVVENPLSSISENGCNEDNVSCSGSWASALLSELEHFKKGKPTAHSSKSTALSDMSFMDDFAEIEKLASGCNDKPLEPYVSKKEVTESSGKELVPVDVSAGTTDQIHQPKIEKAVLKLIELIEGVIQKSSKDCSKTVVLSGGEENNGQEMLSGYVARAFLWNISELTSVLQNFVFVCNELLYGSTDVESFVHDLQLTLDWIINHCFSLRDVSDMKEAIMKHLELNNSDGLEIVAVTGHTGIHTSDEPRTAENAQTSILSDSCCINMGSKDDVSTQKTSNEVAVSKFQGIEEKASHLRAELNELKESGKITAHVDGKSTMNECSTRESIFTSGLNKGKQEGISCPESKHQLECCSAKEGSKNVADNEEKHLQMQLEISTASEKLIECRETILNLGKQLKALASPKDAILFDQVLQTAARSERKPRSQSLSEMLSMEDGGFYVPSSPKTKEIICTEPRASTERNLSADEGDDGSAAACSSSHPMPVAQPVKQACRVNGTCKGEADVKVVTLAVVPRKQKGNGSLLKRIMTGRRKEANAMAKPQVVLSS

SEQ ID NO: 106546 - protein, 101 aa, Setaria italica
  Transcript Sequence Number=SeqID_40572
LLELAKQAIRGAKLFLARRHEIYSTSIGNLSKRTSSSLYTISQLIDQHGREHMHTLQRSVSCYAAGATSKSSSSSSPVAPPQPLRLLLPSTMGSAHTKGSY

SEQ ID NO: 106547 - protein, 143 aa, Setaria italica
  Transcript Sequence Number=SeqID_40573
  Gene Ontology: Mol. function=methyltransferase activity; Cellular component=nucleus; Biological process=chromatin modification
  Homolog annotation: Hit_ID=B9GR10; Match level="QueryCoverage=96%, HitCoverage=21%, E-value=2e-25, Identity=45%"; Hit description=SET domain protein
VKTPEGVFSTKFFLQDGEKQTATRLVRKENHQEKVLPAKVSDCLAARCLAYEILKYKKEPREAIAHRIMGPRHHSQDFIDGLNACMDHKDDQSFSTFKERLCYLQKTENKRVSCGLSGIHGWGLFAARNIQEGQMLLDNLVKS

SEQ ID NO: 106548 - protein, 396 aa, Setaria italica
  misc_feature (344)..(344): Xaa can be any naturally occurring amino acid
  Transcript Sequence Number=SeqID_40574
  Gene Ontology: Mol. function=methyltransferase activity; Cellular component=nucleus; Biological process=chromatin modification
  Homolog annotation: Hit_ID=B9I5A8; Match level="QueryCoverage=99%, HitCoverage=37%, E-value=1e-118, Identity=52%"; Hit description=SET domain protein (Fragment)
  Pfam annotation: Domain name=PHD; Domain location=154-203; Score =34.5; E_value=4.4e-07; Accession=PF00628.21; Description=PHD-finger
LTCNNMEDLENADYFCPDCKSKRKPVVATEKMNASNSSECASTSKEKLTGMIPVCCNGEEALYVPEKHMMLCKCKSCKERMMSLNEWEKHTGSRKKNWKMSIKLKSTGEPLINLLDDIPCGTSKSSTPGIKKEELLQLQANAYSPVCAKWTTERCAVCRWVEDWDYNKIIICNRCQIAVHQECYGARAVQDLTTWLCRACESPQRKRECCLCPIKGGALKPTDIDGLWVHVTCAWFQPKVSFPVEETMEPAMGILNIPAEYFKKTCVICKQMHGACTQCYKCSTYYHSMCASRAGYRMELQYSERNGRHITKMVSYCSFHSTPDRDNVLIVKTPEGVFSTKFFXQDGEKQTATRLVRKENHQEKVLPAKVSDCLAARCLAYEILKYKKRNQRRRTN

SEQ ID NO: 106549 - protein, 254 aa, Setaria italica
  Transcript Sequence Number=SeqID_40575
  Gene Ontology: Mol. function=endopeptidase activity; Cellular component=proteasome regulatory particle; Biological process =proteolysis
  Homolog annotation: Hit_ID=B4FCY9; Match level="QueryCoverage=100%, HitCoverage=95%, E-value=2e-81, Identity=59%"; Hit description=26S proteasome non-ATPase regulatory subunit 8
  Pfam annotation: Domain name=SAC3_GANP; Domain location=23-208; Score= 92.8; E_value=1.2e-24; Accession=PF03399.8; Description=SAC3GANP family
DSELGEATCKLAWLNFACARGDIDSCVALLSELKVLLTRLPSLPPSFEKTPNAVKELKIARAIYENAVILSLKIKDRGALERSLCQLKEFYISTCGIIAPSPNEYPFLGLNLLRLLAENRIAEFHTELELLPLEALNHPCIKYATELEQSFMEGAYNRFFNARQAVPHETYVYLMDLLAETVRDEVAECSVDAYDYLPISVAKKMLMFRSDQELLEYISEEQPEWEIKDCSVHFDMDKTQVSHELAIVKLFKQA

SEQ ID NO: 106550 - protein, 122 aa, Setaria italica
  Transcript Sequence Number=SeqID_40576
  Gene Ontology: Mol. function=diacylglycerol kinase activity; Biological process=activation of protein kinase C activity
  Homolog annotation: Hit_ID=Q69XF8; Match level="QueryCoverage=100%, HitCoverage=32%, E-value=2e-57, Identity=66%"; Hit description =Pentatricopeptide (PPR) repeat-containing protein-like
  Pfam annotation: Domain name=PPR; Domain location=43-77; Score=50.0; E_value=9.2e-12; Accession=PF01535.12; Description=PPR repeat
  Pfam annotation: Domain name=PPR; Domain location=78-112; Score=4.7; E_value=2.5; Accession=PF01535.12; Description=PPR repeat
  Pfam module annotation: Pfam domain module=PPR::PPR; Domain location =43-77::78-112
RYLRMRGCRDVIVESALVDLYAKCGAVEYAHRVFKRSSVRNMITWNAMICGFAQNGHGEQAISLFNKMVREGVRPDYISFIGVLFACSHTGMVEEGRNYFNSMTKDYGIAPGIEHYNCMVDL

SEQ ID NO: 106551 - protein, 58 aa, Setaria italica
  Transcript Sequence Number=SeqID_40577
LSNLHHKYIKCFKNKVLQGELQQLDERQQNNLAKCLKAKENYYSLHFKLLVVLGFIDT

SEQ ID NO: 106552 - protein, 109 aa, Setaria italica
  misc_feature (74)..(74): Xaa can be any naturally occurring amino acid
  Transcript Sequence Number=SeqID_40578
  Homolog annotation: Hit_ID=B9RTZ2; Match level="QueryCoverage=96%, HitCoverage=25%, E-value=5e-21, Identity=55%"; Hit description =Cyclin-L1, putative
KILQLVATAALFLAAKSEETACLLNTVLRASCEVSQNHEFNLLPYMLRGQDWFEQYRESVIQAEQMLLTTLCDXLEVVHPYASLSSALSKLGLSHTVLFNVAWNLINEG

SEQ ID NO: 106553 - protein, 297 aa, Setaria italica
  misc_feature (25)..(25): Xaa can be any naturally occurring amino acid
  Transcript Sequence Number=SeqID_40579
  Gene Ontology: Cellular component=nucleus; Biological process=cell division
  Homolog annotation: Hit_ID=B9RTZ2; Match level="QueryCoverage=78%, HitCoverage=57%, E-value=7e-66, Identity=55%"; Hit description =Cyclin-L1, putative
  Pfam annotation: Domain name=Cyclin_N; Domain location=61-206; Score =32.3; E_value=2e-06; Accession=PF00134.15; Description=Cyclin, N -terminal domain
  Subcellular localization annotation: CTP_CleavageSite=49; ConfidenceScore=5.26e-01
HLQERLFPPPSQPHPATGPPPPKRXARRAPDPRWDPPPPPPTPQPASVPAASERPREGGTAARALLSRDEIERRSPSRRDGIDSALEARLRVSYCAYLRCLGIRLGLPQTTIATAVVFCHRFFFHRSHACHDRFLVATAALFLAAKSEETACLLNTVLRASCEVSQNHEFNLLPYMLRGQDWFEQYRESVIQAEQMLLTTLDFELEVVHPYASLSSALSKLGLSHTVLFNVAWNLINEGLQSSLWLQFKPHHIAAGAAFLAAKFLRYDIMPHPNFWHEFKTTPYIVQDVVQQLKELL

SEQ ID NO: 106554 - protein, 113 aa, Setaria italica
  Transcript Sequence Number=SeqID_40580
FSRIEYPCHSCHLSHKISYLNIFCNSVVGVCSFSASISLLYSIVGKSKEICMKLLSIFISYLCKYNLRILSLRILLQHVIIHTFFSVYPECSDVLCTFFMINKKYYFIVTFVI

SEQ ID NO: 106555 - protein, 60 aa, Setaria italica
  Transcript Sequence Number=SeqID_40581
  Homolog annotation: Hit_ID=B9RTZ2; Match level="QueryCoverage=96%, HitCoverage=14%, E-value=9e-09, Identity=51%"; Hit description =Cyclin-L1, putative
CRLQSSLWLQFKPHHIAAGAAFLAAKFLRYDIMPHPNFWHEFKTTPYIVQDVVQQLKELL

SEQ ID NO: 106556 - protein, 75 aa, Setaria italica
  Transcript Sequence Number=SeqID_40582
LILKILNQMNFRPDCNCCPHCKEELPRRFFEVCNCGVHRCSLRGQQKCVAFLNHRGDIRKNHLVNACTYVDLLYF

SEQ ID NO: 106557 - protein, 172 aa, Setaria italica
  Transcript Sequence Number=SeqID_40583
  Homolog annotation: Hit_ID=Q8YUA0; Match level="QueryCoverage=62%, HitCoverage=98%, E-value=1e-16, Identity=46%"; Hit description =Alr2454 protein
KVWRCSVIRAAGDGRGGESSSGGQDDDDEEGGGDNEVPQSSSSSSSSREDLERLVGPDEDDKFNGLDLANLIRKKYGRSYDVTLIKKEFMGRNLLAMNVMWKYREQRSFPLSEEEYLLRLDEVANTLRCWGAVAHVRNTLEKLKERPRIGKAVSIFIDMDQTGGRANEWIYK

SEQ ID NO: 106558 - protein, 57 aa, Setaria italica
  Transcript Sequence Number=SeqID_40584
IRWDVNQNHFTWLYVIISTEHFAFQKTGHCSSKVSLLSDSLLVNIKTQISGSFELRC

SEQ ID NO: 106559 - protein, 92 aa, Setaria italica
  Transcript Sequence Number=SeqID_40585
  Homolog annotation: Hit_ID=Q2R211; Match level="QueryCoverage=91%, HitCoverage=16%, E-value=5e-24, Identity=57%"; Hit description=F-box domain containing protein, expressed
  Pfam annotation: Domain name=DUF295; Domain location=1-57; Score =34.7; E_value=3.6e-07; Accession=PF03478.10; Description=Protein of unknown function (DUF295)
TKRLSNHILFLGHNNSLCLSADEHPQLKENHAYYTDDRSEPPVALKNVHRDIGVIDLENSSRKKIVSHIWSNWPCPTWITPNLTKMNLAFSK

SEQ ID NO: 106560 - protein, 140 aa, Setaria italica
  Transcript Sequence Number=SeqID_40586
  Gene Ontology: Mol. function=nucleoside-triphosphatase activity; Cellular component=integral to membrane; Biological process=transport
  Homolog annotation: Hit_ID=Q8GU86; Match level="QueryCoverage=98%, HitCoverage=9%, E-value=1e-58, Identity=82%"; Hit description =Pleiotropic drug resistance protein 5
  Pfam annotation: Domain name=ABC_tran; Domain location=1-90; Score= -51.8; E_value=0.035; Accession=PF00005.19; Description=ABC transporter
LRDALVGLPGVSGLSTEQRKRLTIAVELVANPSIIFMDEPTSGLDARAAAIVMRTVRNTVNTGRTVVCTIHQPSIDIFEAFDELLLLKRGGRVIYAGQLGVQSRILVDYFEAIPGVPKITEGYNPATWMLEVSSPLAELA

SEQ ID NO: 106561 - protein, 219 aa, Setaria italica
  Transcript Sequence Number=SeqID_40587
  Homolog annotation: Hit_ID=B6UIQ2; Match level="QueryCoverage=65%, HitCoverage=45%, E-value=1e-48, Identity=68%"; Hit description =Harpin-induced protein
  Pfam annotation: Domain name=Hin1; Domain location=47-181; Score =149.2; E_value=1.3e-41; Accession=PF07320.5; Description=Harpin -induced protein 1 (Hin1)
  Subcellular localization annotation: CTP_CleavageSite=55; ConfidenceScore=5.07e-01
PKPAQSRPPPRRPRRSARGWCCACCLWLTLVLVGLVFLGAIAAGVFYVVYRPQPPSFAVTSLRLAALNVSDSDALTSRIDFTVTARNPNDKIAFAYGDIATSFSADGADVGAGVVPGFLHPAGNTTVIRGAASASAATIDPVQAAALRSKKSHAMSAEMDAKVGFQIGRFKSKRINVRVLCSGFSTGVLPTGVRPKTQPRPTGRPDDPTTGTTEDRTVR

SEQ ID NO: 106562 - protein, 237 aa, Setaria italica
  misc_feature (220)..(220): Xaa can be any naturally occurring amino acid
  Transcript Sequence Number=SeqID_40588
  Gene Ontology: Mol. function=oxidoreductase activity, acting on paired donors, with incorporation or reduction of molecular oxygen, 2-oxoglutarate as one donor, and incorporation of one atom each of oxygen into both ...
  Gene Ontology: Mol. function=donors; Biological process=protein metabolic process
  Homolog annotation: Hit_ID=B9SUL3; Match level="QueryCoverage=58%, HitCoverage=82%, E-value=9e-59, Identity=78%"; Hit description =Prolyl 4-hydroxylase alpha subunit, putative
  Pfam annotation: Domain name=2OG-FeII_Oxy; Domain location=144-237; Score=6.9; E_value=0.034; Accession=PF03171.12; Description=2OG -Fe(II) oxygenase superfamily
MARWRARRLLPLLTFVTLGMILGSLLQLALLHQLDDPSHLMHADNDPEAAVLRLGYVKPEVISWTPRIIVFHNFLSSEECDYLMAIARPRLQISTVVDVATGKGVKSDVRTSSGMFVNSEERKSPVIQAIEKRISVFSQIPKENGELIQVLRYEASQYYRPHHDYFSDTFNLKRGGQRVATMLMYLTDGVEGGETHFPQAGEGQCSCGGNIVRGLCVKPXNKGDAVLFWSMGLDGNT

SEQ ID NO: 106563 - protein, 104 aa, Setaria italica
  Transcript Sequence Number=SeqID_40589
  Gene Ontology: Mol. function=oxidoreductase activity, acting on paired donors, with incorporation or reduction of molecular oxygen, 2-oxoglutarate as one donor, and incorporation of one atom each of oxygen into both ...
  Gene Ontology: Mol. function=donors; Biological process=protein metabolic process
  Homolog annotation: Hit_ID=B9R8F4; Match level="QueryCoverage=69%, HitCoverage=24%, E-value=3e-11, Identity=52%"; Hit description =Prolyl 4-hydroxylase alpha subunit, putative
MHISLYLDVNFSMFGSSGKTFNDNIYSSEECDYLMAIARPRLQISTVVDVATGKGVKSDVRTSSGMFVNSEERKSPVIQAIEKRISVFSQIPKENRGKLTNLLS

SEQ ID NO: 106564 - protein, 138 aa, Setaria italica
  Transcript Sequence Number=SeqID_40590
  Gene Ontology: Mol. function=2 iron, 2 sulfur cluster binding; Cellular component=chloroplast envelope; Biological process =oxidation reduction
  Homolog annotation: Hit_ID=B6ST74; Match level="QueryCoverage=83%, HitCoverage=21%, E-value=3e-37, Identity=60%"; Hit description =Pheophorbide a oxygenase
PRTEPEYKDVLQRKRPPYMAELDDPSYFTVFGMRDLFMGYDVLVENLFDPAHVPYAHKGLLPSFRDEQDPGRVEHDQECGDPITMKIDQTDINGFLSTMKGGSIRFVAPCTFHGTRLPKVDADGKAAAGHARGLLHPC

SEQ ID NO: 106565 - protein, 106 aa, Setaria italica
  Transcript Sequence Number=SeqID_40591
VGPKLLEQVDSWDLSASSLPAQTYFWLSRRVYSTVESGKDTIEAAKSTASGLSTKEDQNLEAYPDPSGDPTKFFQRPDDGFNQDVYQIGLLLAVIYFIVQFLKTTL

SEQ ID NO: 106566 - protein, 283 aa, Setaria italica
  Transcript Sequence Number=SeqID_40592
  Homolog annotation: Hit_ID=Q9S9K3; Match level="QueryCoverage=73%, HitCoverage=93%, E-value=2e-69, Identity=62%"; Hit description =T23K8.14 protein
  Pfam annotation: Domain name=DUF2358; Domain location=109-214; Score=- 24.0; E_value=0.017; Accession=PF10184.1; Description=Uncharacterized conserved protein (DUF2358)
  Subcellular localization annotation: CTP_CleavageSite=61; ConfidenceScore=5.69e-01
MATPTATALSCSCRPSPSSSSSSTAAFRRLNIASVSSGPPPRRRRLRLAPLHVVDDSKEVQAEASAAADLPEERSQTDKMVDGMDFGKLCNDFECISSPYVESTARQIARDILELREDNRAFNCYAVSVKYKDPFRTFVGRDKYMRPLWITKALENPVVTVQEMSMQSTSNLTIKWAFRGKPKNPFFATIGGDVIVRVESQFVLNQISGQVLEQVDSWDLSASSLPAQTYFWLSRRVYSTVESGKDTIEAAKSTASGLSTKEDQNLEAYPDPSGDPTKVHQSF

SEQ ID NO: 106567 - protein, 156 aa, Setaria italica
  Transcript Sequence Number=SeqID_40593
  Gene Ontology: Mol. function=protein serine/threonine kinase activity; Biological process=protein amino acid phosphorylation
  Homolog annotation: Hit_ID=Q7F9F9; Match level="QueryCoverage=83%, HitCoverage=29%, E-value=1e-09, Identity=34%"; Hit description =OSJNBa0023J03.13 protein
MTPWTRNGPPATISLLMPMTHITAKVIALGGGVVAFVDPWRGILVCDLLHRGSERYLPLPRDLIRFGFRRDEILLHRDFAFSKGRLTLVEMHRSSDCQGWDISTWSISSPWEEQDSWRKECTVNTHSIIIDDDTANVELLPKLQDNGSTLRPSYSF

SEQ ID NO: 106568 - protein, 162 aa, Setaria italica
  Transcript Sequence Number=SeqID_40594
KRQRKRSEKLQAKNGSLTKGNKELQARNDSLTKRIEELQAKDDGLTKGNEELQAKINDSMRKWNKELQGLYKHIMKIMKILENEIDTKRKDLLQLEELYRTFFPIPQPEEVKSSVEVQSTSQGLNDGLTGCTDIGTKKLRGHYSGVCSVPQASRGNPLPSCI

SEQ ID NO: 106569 - protein, 173 aa, Setaria italica
  Transcript Sequence Number=SeqID_40595
  Gene Ontology: Mol. function=heat shock protein binding; Biological process=response to stress
  Homolog annotation: Hit_ID=Q7XKR2; Match level="QueryCoverage=98%, HitCoverage=23%, E-value=2e-67, Identity=62%"; Hit description =OSJNBa0053B21.9 protein
DDDPLSYNVPDPDFHDFDKDRTEESFQSDQIWATYDDEDGMPRYYAFIQKVLSLKPFKLRMCYLESKTNSEFGPLNWVSSGFTKTCGDFRTGKSETCDIVNMFSHQMKWEKGLRGVIKIYPQKGDIWAIYQNWSPDWDEETPDSVLHAYDVVEVLDGYDEDHGINVIPLVKVA

SEQ ID NO: 106570 - protein, 88 aa, Setaria italica
  Transcript Sequence Number=SeqID_40596
  Gene Ontology: Mol. function=heat shock protein binding; Biological process=response to stress
  Homolog annotation: Hit_ID=B9RIK9; Match level="QueryCoverage=94%, HitCoverage=11%, E-value=1e-20, Identity=60%"; Hit description=Heat shock protein binding protein, putative
DEDHGINVIPLVKVAGFRTVFERQQDLNATMKIPKEEMFRFSHQVPFYRMSGEESPNVPKDSYELDPAAISKELLQGNTETVEANGTS

SEQ ID NO: 106571 - protein, 215 aa, Setaria italica
  misc_feature (181)..(181): Xaa can be any naturally occurring amino acid
  Transcript Sequence Number=SeqID_40597
DTSDQNRYLPLKCTTENFMHQTSVDNGQFEPENSSTVLLQSTKSEPIDYGNLVVDQLEQRTPNTNTASCKEVLEDGSCTLASHKADASTVSSLDKEENSKASSGLPVQALEKPDASIAISLNKEEHAKTASGASMQAEGARHIKYTFNRRKRKCVSIYSTPQRAVPEKSSDLGSPPKKAKXHPNPVMQEHPVGSPQRDNHLVHIAQQLILLSEHK

SEQ ID NO: 106572 - protein, 158 aa, Setaria italica
  Transcript Sequence Number=SeqID_40598
  Homolog annotation: Hit_ID=Q9XI82; Match level="QueryCoverage=38%, HitCoverage=32%, E-value=2e-17, Identity=62%"; Hit description =F7A19.14 protein
  Pfam annotation: Domain name=GCK; Domain location=32-108; Score =123.4; E_value=7.6e-34; Accession=PF07802.3; Description=GCK domain
RRWRRPADSAETVVLEASAGAGEAEEGEEEQGECGFCLFMKGGGCKEEFTAWEKCVEEAEAETGGVDVVERCQDITAALRKCMDAHADYYEPILRAERAMAADTEAFQAQEADSASAAPASEGGDKKQAADAAAPPPEEGQEKQAAETAVSENRDPAA

SEQ ID NO: 106573 - protein, 251 aa, Setaria italica
  misc_feature (121)..(121): Xaa can be any naturally occurring amino acid
  Transcript Sequence Number=SeqID_40599
  Gene Ontology: Mol. function=structural constituent of cell wall
  Homolog annotation: Hit_ID=B6T564; Match level="QueryCoverage=64%, HitCoverage=59%, E-value=2e-64, Identity=75%"; Hit description =Proline-rich protein
  Pfam annotation: Domain name=DUF1210; Domain location=34-242; Score =283.9; E_value=3.5e-82; Accession=PF06735.3; Description=Protein of unknown function (DUF1210)
  Pfam annotation: Domain name=Pollen_Ole_e_I; Domain location=34-154; Score=-23.8; E_value=0.005; Accession=PF01190.9; Description=Pollen proteins Ole e I family
  Pfam module annotation: Pfam domain module=DUF1210::Pollen_Ole_e_I; Domain location=34-242::34-154
MEIQARQRLLGVCAIVMAMGFANAVQGETELPVVVGLAKCSDCARKNMNAEAAFKGLQVAVKCRNSNGEYESTAVGPVDKSGAFSVPLAADLVGDDGELKRECFAQLHSASSEPCPGQEPXSKIVAAPAVQGGGDKTFVALGGEVHRSSSECASAILCYPFLHKHHHVGIHTPVVVPHVPDHGHSLPPVTKPPVVVPEHKPPVPVPEHSAPPSTPVYTPPSTPVPVPEHKPPSTRTPIYHPPAQRKTVADP

SEQ ID NO: 106574 - protein, 63 aa, Setaria italica
  Transcript Sequence Number=SeqID_40600
  Subcellular localization annotation: CTP_CleavageSite=51; ConfidenceScore=5.38e-01
SATDAGTSNHVQRARSKALSVFGALVSPKLRTAQISFETALELIVELANSRSNMLASFSQLKE

SEQ ID NO: 106575 - protein, 226 aa, Setaria italica
  Transcript Sequence Number=SeqID_40601
MTAATEEPRLLGSAPGVEDAGEIDGAVVGKQGRPRGDDDKEILRFMDSVDGYLFLMDSLSSALRQGWLDLASARHSMGPSRVSSTLFDHKEQSAATKLQVVDHAGLKPSESKPHFALSKWCLKEECHSTYDVGKQASTEPKLRHRGSATTPDGNPESDATTADSATDAGTSNHVQRARSKALSVFGALVSPKLRTAQISFETALELIVELANSRSNMLASFSQLKE

SEQ ID NO: 106576 - protein, 91 aa, Setaria italica
  Transcript Sequence Number=SeqID_40602
STLYILVMVSFISKQGEEDSMSTKQISSHSWCPGSHVPAAGSHVPAAYLAFFPLLWLQVMTTGNLHKLAEHENGRKLAQVYPQHSLLISEP

SEQ ID NO: 106577 - protein, 139 aa, Setaria italica
  Transcript Sequence Number=SeqID_40603
  Homolog annotation: Hit_ID=Q8S811; Match level="QueryCoverage=96%, HitCoverage=61%, E-value=2e-31, Identity=47%"; Hit description=F-box domain containing protein, expressed
NDTLVDDIRQFLLGLSCARKMDLYFGQTKLAILGNNLQWCPKFNNLKLLTLGTWCLDANFYGLIVFLQNSPNLEKLTLELKEYVGAPKALMGEQGNRSFACEHLMTVEIICSEHGPMIDRLKELLLGSGMTPCQIHIRH

SEQ ID NO: 106578 - protein, 179 aa, Setaria italica
  misc_feature (32)..(32): Xaa can be any naturally occurring amino acid
  misc_feature (60)..(60): Xaa can be any naturally occurring amino acid
  misc_feature (63)..(63): Xaa can be any naturally occurring amino acid
  Transcript Sequence Number=SeqID_40604
  Gene Ontology: Mol. function=transporter activity; Cellular component= integral to membrane; Biological process=transport
  Homolog annotation: Hit_ID=B9T0L8; Match level="QueryCoverage=98%, HitCoverage=33%, E-value=6e-56, Identity=64%"; Hit description =Glycerol-3-phosphate transporter, putative
PIHLSQTPIGGEHMSAASAGYLSVLFDVGGMXGILAGFISDQLNARATTAAVFMYLAIPXLFXFHAYGSISKATNIGLMMISGLFVNGPYALITTAVSADLGTHKSLKGDSRALATVTAIIDGTGSLGAALGPFLTGFISRRGWDSVLIMLALCAFVAAALLSSHVRTEIPQIIHKWRN

SEQ ID NO: 106579 - protein, 429 aa, Setaria italica
  Transcript Sequence Number=SeqID_40605
  Gene Ontology: Mol. function=ATP-dependent helicase activity; Cellular component=intracellular; Biological process=RNA processing
  Homolog annotation: Hit_ID=Q8LMR2; Match level="QueryCoverage=100%, HitCoverage=22%, E-value=0.0, Identity=89%"; Hit description =Endoribonuclease Dicer homolog 1
  Pfam annotation: Domain name=Ribonuclease_3; Domain location=120-233; Score=157.9; E_value=3.1e-44; Accession=PF00636.18; Description =RNase3 domain
  Pfam annotation: Domain name=dsrm; Domain location=260-320; Score =43.5; E_value=8.2e-10; Accession=PF00035.17; Description=Double -stranded RNA binding motif
  Pfam annotation: Domain name=dsrm; Domain location=345-417; Score =45.7; E_value=1.8e-10; Accession=PF00035.17; Description=Double -stranded RNA binding motif
  Pfam module annotation: Pfam domain module=Ribonuclease _3::dsrm::dsrm; Domain location=120-233::260-320::345-417
YDDYADSMQEDGEIEADSSCYRVLSSKTLADVVEALIGVYYVAGGKMAANHLMRWIGIHAELDPQEIPPSKAYIIPESIMKSINFDTLEGALGIKFQSKGLLVEAITHASRPSSGVSCYQRLEFVGDAVLDHLITKHLFFTYTDLPPGRLTDLRAAAVNNENFARIAVKHKLHVHLRHGSSALETQIREFVKDVQEELSKPGFNSFGLGDCKAPKVLGDIFESIAGAIFLDSGYNTSIVWKVFQPLLDPMVTPDTLPMHPVRELQERCQQQAEGLEYKASRTANVATVEVFVDGIQIGVGQNPQKKMAQKLAARNALVVLKEKETAAKKDSEKDSEKKNGSQMFTRQTLNDICLRRQWPMPQYRCINEGGPAHAKRFVYAVRVNTSDRGWTDECIGEPMPSVKKAKDSAAILLLELLNRNYRDKPDGKK

SEQ ID NO: 106580 - protein, 229 aa, Setaria italica
  misc_feature (2)..(2): Xaa can be any naturally occurring amino acid
  Transcript Sequence Number=SeqID_40606
  Gene Ontology: Mol. function=ATP-dependent helicase activity; Cellular component=intracellular; Biological process=gene silencing by RNA
  Homolog annotation: Hit_ID=Q8LMR2; Match level="QueryCoverage=99%, HitCoverage=12%, E-value=1e-115, Identity=87%"; Hit description =Endoribonuclease Dicer homolog 1
  Pfam annotation: Domain name=Ribonuclease_3; Domain location=66-212; Score=141.3; E_value=3e-39; Accession=PF00636.18; Description=RNase3 domain
YXQLCLVHPLPGSLIRGAQRLPSIMRRVESMLLAIQLKDIIGYPVPANKILEALTAASCQETFCYERAELLGDAYLKWVVSRFLFLKYPQKHEGQLTRMRQQMVSNMILYHYALNKSLQSYIQADRFAPSRWAAPGVLPVFDEETRDSERSIFDEESTPSSELQKDSYDDYADSMQEDGEIEADSSCYRVLSSKTLADVVEALIGVYYVAGGKMAANHLMRCIALCSQV

SEQ ID NO: 106581 - protein, 95 aa, Setaria italica
  Transcript Sequence Number=SeqID_40607
  Subcellular localization annotation: CTP_CleavageSite=41; ConfidenceScore=5.59e-01
AVAVSMESAVSSDSPMAAAAAAAATVVLLAARPSSACCSPSVAALSKSSALPPPPPPHRALLSSESLHEHQLATRLHTSLASIRRPRGKWSVASS

SEQ ID NO: 106582 - protein, 142 aa, Setaria italica
  Transcript Sequence Number=SeqID_40608
  Subcellular localization annotation: CTP_CleavageSite=35; ConfidenceScore=5.58e-01
GSSLEPSWVPPAPLPSLAAAVLLAARPSSACCSPSVAALSKSSALPPPPPPHRALLSSESLHEHQLATRLHTSLASIRRPRGKWSVASSTYAGPRNPELSNRGTAEPPPNDEGPERSPPCCALQSNQIIRNRIGEGSSRVDG

SEQ ID NO: 106583 - protein, 89 aa, Setaria italica
  Transcript Sequence Number=SeqID_40609
GNRSCYLYHNQKPNRTKAERPPTPSASSIMGQAWLRKARSICRGAALAHRRKHFGQQKYCPAGWVIYRTKGRAVLLGCSACTDRLNRVN

SEQ ID NO: 106584 - protein, 338 aa, Setaria italica
  Transcript Sequence Number=SeqID_40610
  Gene Ontology: Mol. function=sequence-specific DNA binding; Cellular component=nucleus; Biological process=regulation of transcription, DNA-dependent
  Homolog annotation: Hit_ID=P46605; Match level="QueryCoverage=99%, HitCoverage=45%, E-value=1e-124, Identity=70%"; Hit description =Homeobox protein HOX1A
  Pfam annotation: Domain name=Homeobox; Domain location=175-229; Score= 10.8; E_value=0.001; Accession=PF00046.21; Description=Homeobox domain
KKESNSDESDLAFDSDDFCEEIAKTGGHDEVSSPPLPDGKVDDMEKSTSQANTANSNDDPMETEMDQSVVLPVSGRRQTERLDYKKLYDEAYGEAPSNSSDDEEWSGKSTPRKGHEESEADSPAGKSSRSTRIVHHSDELTPQSAQKSLHPDSLHGSVDEKHEDLTSNGSNSTSKKGHFGPVINQKLHEHFKTEPYPSRSVKENLAEELGLTFRQVSKWFESRRHFTRAASSMKGICPDNHSPENTNSPVATSKQLNEPEGMEMEKTNACGNKDATISRKVGSPKVGSRKNRRKNASASDVRGSKVDSAEDQVPGLDLADKARQKAIQREMMKKKKGR

SEQ ID NO: 106585 - protein, 259 aa, Setaria italica
  misc_feature (200)..(200): Xaa can be any naturally occurring amino acid
  Transcript Sequence Number=SeqID_40611
  Gene Ontology: Mol. function=binding; Cellular component =intracellular; Biological process=RNA processing
  Homolog annotation: Hit_ID=Q8GTX9; Match level="QueryCoverage=100%, HitCoverage=38%, E-value=7e-78, Identity=55%"; Hit description=Cell cycle control crn (Crooked neck) protein-like
  Pfam annotation: Domain name=HAT; Domain location=133-164; Score =25.1; E_value=0.00029; Accession=PF02184.8; Description=HAT (Half-A -TPR) repeat
  Pfam annotation: Domain name=HAT; Domain location=63-95; Score=17.2; E_value=0.029; Accession=PF02184.8; Description=HAT (Half-A-TPR) repeat
  Pfam annotation: Domain name=HAT; Domain location=97-131; Score=0.5; E_value=27; Accession=PF02184.8; Description=HAT (Half-A-TPR) repeat
  Pfam module annotation: Pfam domain module=HAT::HAT::HAT; Domain location=133-164::63-95::97-131
YRECLNLIPHKRFTFAKIWLMAAQFEIRQRNLSAARRILGNSIGVAPKPKVFNKYIEMEVSLGNFDRVRTLYQKFIECYAANSYAWRKYADLEKNLGESDRAQAVYELAIAQPTLDNPELIWKEYLEFEIDGNEFDRARKLYERLLGRTKHLKVWLSYAEFEATAGSCGEDSTNRQMERAQRCRGVFQRAFDHFRTSSPXIKGGRAMLLEEWLNREVSFGHLGDVSVVQTKVPTKVKRKRSIPSEDGSTFVCEEFIDYI

SEQ ID NO: 106586 - protein, 96 aa, Setaria italica
  Transcript Sequence Number=SeqID_40612
HLSMHLLALGQAQHDWEQQLQLVQKCKTAVSTNDKAQERSCLTEAVRPFSPQVLHHCIDVAMRRIWGNRKNGSPAKEIGGGEAEHADFLHFRLSSR

SEQ ID NO: 106587 - protein, 401 aa, Setaria italica
  Transcript Sequence Number=SeqID_40613
  Gene Ontology: Mol. function=DNA photolyase activity; Biological process=DNA repair
  Homolog annotation: Hit_ID=B4FP11; Match level="QueryCoverage=98%, HitCoverage=97%, E-value=1e-138, Identity=66%"; Hit description =Peptidase S8 and S53, subtilisin, kexin, sedolisin
  Pfam annotation: Domain name=PPR; Domain location=153-187; Score =18.1; E_value=0.036; Accession=PF01535.12; Description=PPR repeat
  Pfam annotation: Domain name=PPR; Domain location=188-222; Score =18.8; E_value=0.022; Accession=PF01535.12; Description=PPR repeat
  Pfam annotation: Domain name=PPR; Domain location=223-257; Score =40.0; E_value=9.3e-09; Accession=PF01535.12; Description=PPR repeat
  Pfam annotation: Domain name=PPR; Domain location=258-292; Score =38.2; E_value=3.2e-08; Accession=PF01535.12; Description=PPR repeat
  Pfam annotation: Domain name=PPR; Domain location=293-327; Score =31.6; E_value=3.1e-06; Accession=PF01535.12; Description=PPR repeat
  Pfam annotation: Domain name=PPR; Domain location=328-362; Score =19.7; E_value=0.012; Accession=PF01535.12; Description=PPR repeat
  Pfam module annotation: Pfam domain module=PPR::PPR::PPR::PPR::PPR::PP R; Domain location=153-187::188-222::223-257::258-292::293-327::328 -362
  Subcellular localization annotation: CTP_CleavageSite=50; ConfidenceScore=5.10e-01
MLPLPPAISPARLHKLVTSQPNPLLALELVTITSPTTTPHPATLHSLLLRLARRRDHLPHALALLRRLPSPPSPRLLLPLILAVLRLRRQPQLFLSTFNSLFVSGRSPLPLHPQVLLRLLGVLSSTVSHFPSALHLLRLVSSRLPLPTPLVLASHNLLIEAAARSGYVAVSLSLFHRLRSLHVSPDADTYRILTQSLCRKAQVRTAATLLDEMLHRGIPADPLAYTTVLNALCRKKQLREAYRLLCLMRGRGVSPDIVHYNTVIVGMCREGRPLDACKVVGDMVDSGCTPNAATYATLVNGLCVSGLYEKAEAYLVDMVGKGIVPHFSLFHSVIKGYCGVGKVEEAAQIMTWMLDLGVTPHVESWSSVIRCVCNDEDCVEAVLLQLVTGRRHGLSTSSTLK

SEQ ID NO: 106588 - protein, 61 aa, Setaria italica
  Transcript Sequence Number=SeqID_40614
YTIQIHRYRLLKIGNMIARKCCKHSPKCHMCQFQILPVADVILKTSTYRFYVARHRFCFSL

SEQ ID NO: 106589 - protein, 133 aa, Setaria italica
  Transcript Sequence Number=SeqID_40615
LRMQRRNNVTGTISPCGQGVPAHLCDRSPLVQRDFLLVLVSKLLADICDVCSPHILAADTFLRRKRAAHIFLDVKPAVFHDVVFQVLHLVRGGGTTHGCQDDGEAAQVRSCHSCTASHLNFFFACCNVFSLFV

SEQ ID NO: 106590 - protein, 210 aa, Setaria italica
  Transcript Sequence Number=SeqID_40616
MASHPYLKKVRWLFSCLLFSFEIDPSLSMIIIAFWMFVQENGCVDFLECISAFDEHHILDMIAFVRNYVGVLVHLESSYSNTSSPSRKQVIDGIDFYINNICYEAVGDLLNDFEIQELIYEYAQDHDECLEEEIYTRLGLVTNLAESSSQADNTQDQGTSAHILETIEEETTSSPSTDSLGETLDALGIIDNAKELQLQQDKHSKGRESF

SEQ ID NO: 106591 - protein, 91 aa, Setaria italica
  Transcript Sequence Number=SeqID_40617
KKSKKPYTDRTCGFLRIRMTTLGRNGKIPGVEVEAHMFIVAHPGDGERELCRVPWAHGKDTKILGKPLLGKRPTAKIVNGKLSFSSGLGKV

SEQ ID NO: 106592 - protein, 275 aa, Setaria italica
  misc_feature (218)..(218): Xaa can be any naturally occurring amino acid
  misc_feature (257)..(257): Xaa can be any naturally occurring amino acid
  Transcript Sequence Number=SeqID_40618
  Gene Ontology: Mol. function=protein transporter activity; Cellular component=membrane; Biological process=Golgi organization and biogenesis
  Homolog annotation: Hit_ID=B9RAH9; Match level="QueryCoverage=98%, HitCoverage=37%, E-value=1e-113, Identity=70%"; Hit description =Conserved oligomeric Golgi complex component, putative
LPSAPSDSSNAEVPSIDAQNVEAGTGVRETQSILLERIASEMNRLKFYISHAQNLPFIENMEKRAQGATKLLDGSLERCFVDGLEHRDAKVIYNCLRAYAAIDNTSSAEELFRTTVVSPLIQKIVPQNYAKAVAGASSDGLEDDYEQIKQCVEKDCKFILEISSSENSGLHVFDFLGNSILKEVLSAIQKGKPGAFSPGKPREFLKNYKASLGFLDFXGYCQSKSAVTKFRSEPAYTDFMRQWNVGVYFSLRFQEIXGGLDSTLTNTISPVGMNE

SEQ ID NO: 106593 - protein, 398 aa, Setaria italica
  Transcript Sequence Number=SeqID_40619
  Gene Ontology: Mol. function=receptor activity; Cellular component =membrane; Biological process=Golgi organization and biogenesis
  Homolog annotation: Hit_ID=B9RAH9; Match level="QueryCoverage=100%, HitCoverage=52%, E-value=1e-128, Identity=56%"; Hit description =Conserved oligomeric Golgi complex component, putative
LQKGKPGAFSPGKPREFLKNYKASLGFLDFLEGYCQSKSAVTKFRSEPAYTDFMRQWNVGVYFSLRFQEIAGGLDSTLTNTISPVGMNEAQGKPLLLKQSIKLLESLQACWSDEVLVFSHCDKFLRLSLQLISRYTAWLSSGLSARKASDGSPNSPADAEWALSIPIDDFIYIMHDVHAVIGELSESGSFIGHVNQLLASCPIEVLNLVKQSILQAVEPLEEVLPVIMNVMIGIIVKKSNEDLKHLKGITATYRMTNKLPVRHSPYVSGILHPLKVFLEGERVSYLSEDDKTKLCRGSTDKITAIYYDLVSEVVTVARKTESSLQRLRQGAQRRVGASTDASDNIISDTDKICMQLFLDIQEYARNLRTIGIDAREIDSYRALWQCVAPKDKQENIQF

SEQ ID NO: 106594 - protein, 259 aa, Setaria italica
  Transcript Sequence Number=SeqID_40620
  Gene Ontology: Mol. function=transferase activity, transferring glycosyl groups; Biological process=metabolic process
  Homolog annotation: Hit_ID=B9UYP6; Match level="QueryCoverage=91%, HitCoverage=48%, E-value=1e-56, Identity=48%"; Hit description =Flavonoid glucosyltransferase
PRQETCKATILVNSCQELEVGALAAVGPHDVLPIGPVLPTGEEASILKPDDAKYMEWLDTKPASSVVYVSFGSLATMAREQLDELLHGLEESGRPYLLVVRKDNKAMLAGAEAEMGERLKNGIAVEWCDQARVLSHAAVGCFVTHCGWNSVAESVASGVPMVGVPKVSEQSMNARLRAHEWRVGVRAEVDSGGVLRAAELRRCVEEVMGDGTDAAEVRRKAEEWKLVVAEAMRNGGSSYCSLLAPSTNATRLQYDDPPL

SEQ ID NO: 106595 - protein, 192 aa, Setaria italica
  Transcript Sequence Number=SeqID_40621
  Gene Ontology: Mol. function=phosphatidylinositol phosphate kinase activity; Biological process=phosphatidylinositol metabolic process
  Homolog annotation: Hit_ID=Q6ZLF2; Match level="QueryCoverage=100%, HitCoverage=11%, E-value=2e-65, Identity=63%"; Hit description=1 -phosphatidylinositol-3-phosphate 5-kinase-like
VPSIDYLSSQKLGRCDLFHVEKYVEEHGTAGEGGKKMLKTLMFFEGCPKPFGCTILLKGANGDELKKVKHVVQYGVFAAYHLALETSFLVDEGATLPELPLKSPIIVALPDKPSSADRSISTIPILPIPSASSPNSSLEALELRNDDLTFSSTKRMEQTALGVRSDEINVQNGHITRLLDVAPQSSIGPLVQ

SEQ ID NO: 106596 - protein, 382 aa, Setaria italica
  Transcript Sequence Number=SeqID_40622
  Gene Ontology: Mol. function=phosphatidylinositol phosphate kinase activity; Biological process=phosphatidylinositol metabolic process
  Homolog annotation: Hit_ID=Q6ZLF2; Match level="QueryCoverage=99%, HitCoverage=21%, E-value=1e-146, Identity=69%"; Hit description=1 -phosphatidylinositol-3-phosphate 5-kinase-like
RTPLKSPIIVALPIIMRSAYRERSSWHILPIPSASSPNSSLEALELRNDDLTFSSTKRMEQTALGVRSDEINVQNGHITRLLDVAPQSSIGPLVQHSNISSCQCPDCTRDVNRNMNLQYSQPGTTRHVLVNDLGALPSDSTNLLSVKSDNSFAKNSEIGYKVEDMPAAPLNVQISHDDDNAKDNSVAKTDEIPASPADNQSILVSLSSRCVWRETLCERPHLLRIKYYGNFDKPLGRFLRDQLFDQSNLCQSCELPPEAHVYCYVHPQGSLTISVRKLSVKLPGDSEHDGRIWMWHRCLRCPRVNGLPPATKRVVMSDAAWGLSFGKFLELSFSNHAAASRVASCGHSLHRDCLRFYGFGEMVACFRYASIKVHSVYLPPPK

SEQ ID NO: 106597 - protein, 178 aa, Setaria italica
  misc_feature (173)..(173): Xaa can be any naturally occurring amino acid
  Transcript Sequence Number=SeqID_40623
  Gene Ontology: Mol. function=protein serine/threonine kinase activity; Biological process=protein amino acid phosphorylation
  Homolog annotation: Hit_ID=C4P7S9; Match level="QueryCoverage=98%, HitCoverage=38%, E-value=5e-73, Identity=83%"; Hit description=CBL -interacting protein kinase 20
  Pfam annotation: Domain name=NAF; Domain location=35-94; Score=106.3; E_value=1.1e-28; Accession=PF03822.6; Description=NAF domain
VLQGSNSLKDVQVAFSTDHKYNEANKVEQPDSPLKPTSLNAFDIISHSKGFDLSGLFGDREQKANSRFMTQKPASAIVSKLEQIAETERFMVKKQDGLVTLQGSKEGRKGQLAINAEIFEVTPAFYVVEVKKSAGDTLEYERFCNKDLRPSLRDICWSSQSEEKLPSMTESSXLKPSS

SEQ ID NO: 106598 - protein, 43 aa, Setaria italica
  Transcript Sequence Number=SeqID_40624
LFSCALNQNFRCENGSFKPSYFPVRSTKTSDVKMEINYAYNYS

SEQ ID NO: 106599 - protein, 88 aa, Setaria italica
  misc_feature (80)..(80): Xaa can be any naturally occurring amino acid
  Transcript Sequence Number=SeqID_40625
  Gene Ontology: Mol. function=transporter activity; Cellular component= integral to membrane; Biological process=transport
  Homolog annotation: Hit_ID=Q5Z6F0; Match level="QueryCoverage=100%, HitCoverage=35%, E-value=7e-37, Identity=92%"; Hit description =Probable aquaporin TIP2-2
  Pfam annotation: Domain name=MIP; Domain location=1-88; Score=-95.8; E_value=0.0018; Accession=PF00230.12; Description=Major intrinsic protein
PPVTFGLALGGQITILTGLFYWIAQLLGAIVGAVLVQYSTGVATPTHGLSGIGALEGVVMEIIVTFGLVYTVYATAADPXKGSLGTIA

SEQ ID NO: 106600 - protein, 76 aa, Setaria italica
  Transcript Sequence Number=SeqID_40626
  Homolog annotation: Hit_ID=Q53LU3; Match level="QueryCoverage=100%, HitCoverage=19%, E-value=8e-27, Identity=76%"; Hit description =Leucine Rich Repeat family protein, expressed
NKLRVLHVNRCRNICDQSLIALGDGCPHLEVLHINGCAKITNNGLAFFTISRPHVNLRVDEVMSIGPSIENLFRMQ

SEQ ID NO: 106601 - protein, 174 aa, Setaria italica
  Transcript Sequence Number=SeqID_40627
  Gene Ontology: Mol. function=transferase activity, transferring glycosyl groups; Cellular component=integral to membrane; Biological process=protein amino acid glycosylation
  Homolog annotation: Hit_ID=B6SXL2; Match level="QueryCoverage=100%, HitCoverage=27%, E-value=3e-98, Identity=96%"; Hit description =Galactosyltransferase family
  Pfam annotation: Domain name=Gal-bind_lectin; Domain location=1-173; Score=50.4; E_value=7e-12; Accession=PF00337.14; Description =Galactoside-binding lectin
GLAAGSSVTVVATPRAAHREYVPQLARMRQGDGTVMVSQFMVELQGLRAVDGEEPPRILHLNPRLRGDWSQHPILEHNTCYRMQWGAAQRCDGTPTDDNEDKVDGFPKCEKWIRNDIVDTKESKTTSWLKRFIGRAKKPAMTWPFPFVEERLFVLTIQAGVEGFHIYVGGRHVT

SEQ ID NO: 106602 - protein, 76 aa, Setaria italica
  Transcript Sequence Number=SeqID_40628
ILPGFVGQQRDGDSEMGPMTWLPILTGATGVQEGTSCPPNFGSNCLKLASSLASPSHEPVHHRNRSRRYSEMSFAL

SEQ ID NO: 106603 - protein, 125 aa, Setaria italica
  Transcript Sequence Number=SeqID_40629
  Gene Ontology: Mol. function=metal ion binding; Biological process =metal ion transport
VCSLIGSNSVSSGAERTCFFDGGSLFVGDMEARSSTQYEPGSTSTPTKLPVMLFSGLHPMGPGFPSVSMILPGFVGQQRDGDSEMGPMTWLPILTGATGVQEGTSCPPNFGSNCLKLASSLASPR

SEQ ID NO: 106604 - protein, 273 aa, Setaria italica
  misc_feature (7)..(7): Xaa can be any naturally occurring amino acid
  Transcript Sequence Number=SeqID_40630
  Pfam annotation: Domain name=PRCC_Cterm; Domain location=233-273; Score=76.5; E_value=9.5e-20; Accession=PF10253.1; Description =Mitotic checkpoint protein PRCC_Cterm
IDTAAPXRSNLGAPVPSGSIANTGAPEKPDVASDDDDSEDSGSEEDMPVPEQLEEGQEEQQGLEAAAGEQQQQGYYAAAGSTSGYEAYAWDPNYYAQYGANYGWDPSANPNYVAGAQYAASGGEQSGGYVHSHGGEHGGGYEYVAAAPYGVDYTGGYVHEVAAPTQEPVLPPEMGRIGGKRGRNDMPAQILEVDQAELMKNRPKQDTSKLTGLAFGPSYQPAPSAKGKPSKLHKRKHQIGSLYFDMKSKEMELAERRSKGILTKAETQAKYGW

SEQ ID NO: 106605 - protein, 363 aa, Setaria italica
  misc_feature (264)..(264): Xaa can be any naturally occurring amino acid
  Transcript Sequence Number=SeqID_40631
  Gene Ontology: Mol. function=transferase activity, transferring glycosyl groups; Biological process=metabolic process
  Homolog annotation: Hit_ID=Q7XKK4; Match level="QueryCoverage=98%, HitCoverage=75%, E-value=1e-105, Identity=47%"; Hit description =OSJNBa0038O10.3 protein
  Pfam annotation: Domain name=UDPGT; Domain location=2-361; Score= -129.3; E_value=0.00018; Accession=PF00201.10; Description=UDP -glucoronosyl and UDP-glucosyl transferase
LVVRLRSLGAGRVSCLVIDLLASWAIPVAARCGLPVVGFWPAMLASYRTVAAIPELMDKGLISESDFNCNKDQNIADLDILPAKLNLRFQDLPWLISNSAVSQKSRLAFWLQIANRAKSLSYILVNSIPSEGGDSDKYDPPQGQEILPIGPVLLNDDSTKATAVWQTDQTCIDWLDQHSVGSVIYVSFGSWAAPMEPEKISGFAHGLEASGQPFLWALKNHPSWRAGLPDGYMEKVAGRGKIVSWAPQDDILKHEAVGCYITHXGWNSALEAVRHGVRMICYPINSDHFVNCAYMVNMLEIGILLVSSDSSDVKDCIERVIKGNEGRHLQQMVNKMRETITVGEAMCVAKRNLSLFMERMKNN

SEQ ID NO: 106606 - protein, 134 aa, Setaria italica
  Transcript Sequence Number=SeqID_40632
AHSQGASSSAGPSLRQPHGVPNPDELELLSQWPEQPHTAPTVSAGRVGMENLDLNSQQEDFPYIEEYSALLDRGRGRADGGRAASFQPPRQSASGIPIGRGRSATRGSGRARGRSVCASHSPPAGASPPLRQSL

SEQ ID NO: 106607 - protein, 86 aa, Setaria italica
  misc_feature (84)..(84): Xaa can be any naturally occurring amino acid
  Transcript Sequence Number=SeqID_40633
  Gene Ontology: Mol. function=metal ion binding; Cellular component =nucleus; Biological process=regulation of transcription, DNA -dependent
  Homolog annotation: Hit_ID=A9PI21; Match level="QueryCoverage=65%, HitCoverage=17%, E-value=3e-26, Identity=89%"; Hit description=F-box family protein
  Pfam annotation: Domain name=zf-Dof; Domain location=7-69; Score =135.7; E_value=1.5e-37; Accession=PF02701.7; Description=Dof domain, zinc finger
GVSPAAAAPEAVKCPRCESTNTSFCYYNNYNLSQPRHFCKSCRRYWTKGGVLRNVPVGGGCRKAKRSSSSSSPLLRTSTPTVGXDA

SEQ ID NO: 106608 - protein, 362 aa, Setaria italica
  Transcript Sequence Number=SeqID_40634
  Gene Ontology: Mol. function=zinc ion binding; Cellular component =nucleus; Biological process=regulation of transcription
  Homolog annotation: Hit_ID=Q8RVK0; Match level="QueryCoverage=80%, HitCoverage=66%, E-value=4e-80, Identity=53%"; Hit description=Dof zinc finger protein
  Pfam annotation: Domain name=CbtB; Domain location=121-172; Score= -14.4; E_value=0.044; Accession=PF09489.2; Description=Probable cobalt transporter subunit (
  Pfam annotation: Domain name=zf-Dof; Domain location=64-126; Score =141.5; E_value=2.7e-39; Accession=PF02701.7; Description=Dof domain, zinc finger
  Pfam module annotation: Pfam domain module=CbtB::zf-Dof; Domain location=121-172::64-126
  Subcellular localization annotation: CTP_CleavageSite=32; ConfidenceScore=5.05e-01
MDMISSTTSNTTAPSTLLNKQEAAMVASPLPREEAVAARNVKAKQARQQQVVASGSGERKPRPQQDQALNCPRCNSTNTKFCYYNNYSLQQPRYFCKTCRRYWTEGGSLRNVPVGGGSRKNKRSSSAVSSAATAAASTSAAVSGTIPVGLAAKHPKLMHEGAHDLNLAFPHHNGRGLHPPEFSAFPSLESSSVCNPGATMAGNGAAGRGVGALSAMELLRSTGCYVPLQHVQLGMPAEYAAAGFALGDFRMPPPPHSQSVLGFSLDTHGTGGVGGAGGYSAGLGVQESAAGRLLFPFEDLKPAVSAAGGANNNGADQYEHSKDQAGDGSGASGVTTGGHETPGFWSNSIIGNGSSNGGGGPW

SEQ ID NO: 106609 - protein, 302 aa, Setaria italica
  Transcript Sequence Number=SeqID_40635
  Gene Ontology: Mol. function=metal ion binding; Cellular component =nucleus; Biological process=regulation of transcription, DNA -dependent
  Homolog annotation: Hit_ID=O24463; Match level="QueryCoverage=45%, HitCoverage=43%, E-value=2e-31, Identity=49%"; Hit description=Dof zinc finger protein PBF
  Pfam annotation: Domain name=zf-Dof; Domain location=45-107; Score =126.5; E_value=8.5e-35; Accession=PF02701.7; Description=Dof domain, zinc finger
GVFYLFTGVASPREEAAAARNIKAKQERQQQVVASGADERKPRPQQEQGLNCPRCNSTNTKFCYYNNNSMTQPRYFCKACRRNWTQGGTLRNVPVGGGSRKNKQNRAGGSSSSSSAPPAPSSSSNDSKKMNLTQQLSMMPTATAPMPADFPNVLPTFMSTGGGFELPSSDHHSLPFPPLSPLFNPGTTPSLLDILTGGFLDSGNNRMAAPPLLGTMQHGHGMVGGSPDPQLVGLLQGVDQALELPMPAAGGGFQQWPSLAAQEQQVVGGDGSADMDDNNNNNNGGGASGGSSGVEYYWQGSI

SEQ ID NO: 106610 - protein, 313 aa, Setaria italica
  Transcript Sequence Number=SeqID_40636
  Gene Ontology: Mol. function=metal ion binding; Cellular component =nucleus; Biological process=regulation of transcription, DNA -dependent
  Homolog annotation: Hit_ID=O24463; Match level="QueryCoverage=49%, HitCoverage=54%, E-value=8e-30, Identity=43%"; Hit description=Dof zinc finger protein PBF
  Pfam annotation: Domain name=zf-Dof; Domain location=64-126; Score =131.8; E_value=2.2e-36; Accession=PF02701.7; Description=Dof domain, zinc finger
LLAAGLVEGEGTHGQDLQHYQQHYYAIHYPEQAGGGSDTPPAAAGNVKKAKQQQAGGERMPRPQQEQALNCPRCQSTNTKFCYYNNYSVTQPRYLCKACRRYWTKGGTLRNVPVGGRCRKKKQNPSAPSASSSSSSDSKKMNSSTQQLLMMMPPPTAANLSNVLPTFMSATGVGGFELPSSDHHSLPFAPLSLPSNPGTTPSSFLDLLPFLPTPSSFGAMMLQHGPGMTGAAGGLQQQWLPSSQHGNDGGLFAAGGSSAAASVQEPQQQQEEVGGGDGGSAADAAGNDDDDMGGGGGGASAGIISTYWSSSHI

SEQ ID NO: 106611 - protein, 47 aa, Setaria italica
  Transcript Sequence Number=SeqID_40637
LESNLDNFSITRFYHYLKYYFLKDNFFLSTRKDTQFQIFFIKIKKVI

SEQ ID NO: 106612 - protein, 89 aa, Setaria italica
  Transcript Sequence Number=SeqID_40638
YAASLGPKTTEFTKLSYSISWVCPLMVQLSFLVLWVLLIQQNLNNQLTFLQKAYHFNNMTYHLHGNSEQKKGHKPTSRKIIHKHSYNWV

SEQ ID NO: 106613 - protein, 69 aa, Setaria italica
  Transcript Sequence Number=SeqID_40639
DLHSWLEEVKKLRGSCYLCGSSDNLNLRSVHLVKMCQLNKITLELLCEKLINNHPHFVIIYNCRECNSI

SEQ ID NO: 106614 - protein, 73 aa, Setaria italica
  Transcript Sequence Number=SeqID_40640
LFMPVTLCIVLGGKCQCQQRHIIFLETIVSFLYIDISSGNEWYLCLLRAAYLMMQHHILSSFGHVKLVKDNSY

SEQ ID NO: 106615 - protein, 53 aa, Setaria italica
  Transcript Sequence Number=SeqID_40641
RTLLFLKIQTNTRKQISQIKLLQEKERNKIIIFSYVENQKIKWKYGCAYLWYS

SEQ ID NO: 106616 - protein, 70 aa, Setaria italica
  Transcript Sequence Number=SeqID_40642
  Gene Ontology: Mol. function=protein dimerization activity; Cellular component=nucleus; Biological process=regulation of transcription, DNA-dependent
  Homolog annotation: Hit_ID=Q2QMJ8; Match level="QueryCoverage=61%, HitCoverage=20%, E-value=4e-11, Identity=79%"; Hit description=BZIP transcription factor family protein, expressed
DLVTNSNIIDYDDFRGKPANSGTSKEQSDDDGDLEENTDPTNTKKMEEQSKTDVILASIQMPNMILNTTT

SEQ ID NO: 106617 - protein, 110 aa, Setaria italica
  misc_feature (22)..(22): Xaa can be any naturally occurring amino acid
  misc_feature (78)..(78): Xaa can be any naturally occurring amino acid
  Transcript Sequence Number=SeqID_40643
  Gene Ontology: Mol. function=nucleotide binding; Cellular component =myosin complex
  Homolog annotation: Hit_ID=Q337J0; Match level="QueryCoverage=97%, HitCoverage=10%, E-value=7e-31, Identity=69%"; Hit description =Myosin head family protein, expressed
NQILIKASVLRLEVNKKDGIIXKAEATVREKDEENEMLHQRLQQYENRWLEYEQKMKAMEEMWQKQMRSLQSSLSVAXKKSLALDETPRMSDSSVDQSWEINGNHVGRWV

SEQ ID NO: 106618 - protein, 53 aa, Setaria italica
  Transcript Sequence Number=SeqID_40644
SLHSETASTFSSDPESFAHRSQLGAYLSTGQRNFCILEVELGLTVLKWRTYVT

SEQ ID NO: 106619 - protein, 43 aa, Setaria italica
  misc_feature (21)..(21): Xaa can be any naturally occurring amino acid
  Transcript Sequence Number=SeqID_40645
DYEEKGWFILTASHIFVIVFXKLERLVHLNCITHFCYCLLLNF

SEQ ID NO: 106620 - protein, 183 aa, Setaria italica
  misc_feature (177)..(177): Xaa can be any naturally occurring amino acid
  Transcript Sequence Number=SeqID_40646
  Gene Ontology: Mol. function=nucleotide binding; Cellular component =myosin complex
  Homolog annotation: Hit_ID=Q337J0; Match level="QueryCoverage=100%, HitCoverage=14%, E-value=3e-61, Identity=69%"; Hit description =Myosin head family protein, expressed
  Pfam annotation: Domain name=IQ; Domain location=21-41; Score=8.4; E _value=3.5; Accession=PF00612.19; Description=IQ calmodulin-binding motif
  Pfam annotation: Domain name=IQ; Domain location=47-67; Score=27.5; E_ value=5.3e-05; Accession=PF00612.19; Description=IQ calmodulin -binding motif
  Pfam annotation: Domain name=IQ; Domain location=70-90; Score=17.3; E_ value=0.063; Accession=PF00612.19; Description=IQ calmodulin-binding motif
  Pfam module annotation: Pfam domain module=IQ::IQ::IQ; Domain location=21-41::47-67::70-90
ILRVQSCFRGHQARYHARERIRGVLDLQSFIRGENARQIYSSLSRKHRAAIILQRSVRCWLARRYFTNIRRASVVIQSGIRGSLVRRCNGNIDLINVLREFESKQVCKMGALYRAAGSHMLRTVASDPSDLIQNYMNFTLLLFQEAEGDQILIKASVLAELQRRILKAEATVREKDXEENEML

SEQ ID NO: 106621 - protein, 88 aa, Setaria italica
  Transcript Sequence Number=SeqID_40647
KPRVLAAPSPLPLCCCDVYVSPFFQEAKSQESSLGYPNTQASNTSQLISQASFDGIYDLFTIAYMSVYEATRAKCLCQKGLAGRFWRQ

SEQ ID NO: 106622 - protein, 177 aa, Setaria italica
  misc_feature (58)..(58): Xaa can be any naturally occurring amino acid
  Transcript Sequence Number=SeqID_40648
  Gene Ontology: Mol. function=protein dimerization activity; Cellular component=nucleus; Biological process=regulation of transcription, DNA-dependent
  Homolog annotation: Hit_ID=Q99090; Match level="QueryCoverage=86%, HitCoverage=42%, E-value=5e-17, Identity=37%"; Hit description=Light- inducible protein CPRF2
RKRKQEHLTDLESQVSRLTSENASLLKRLADMTQKYKDATLDNRNLIVDVETMRRKVXSSEEAVRRLTGTTLLLPTTSDKPASSMRLTSCASDAASASVAIEDSMEHFLRAPFQDSQTKLDLQNAEIPLASGEIGTKLAPMRRVASLENLQKRMHGDSLHSETASTFSSDPESFAHR

SEQ ID NO: 106623 - protein, 183 aa, Setaria italica
  Transcript Sequence Number=SeqID_40649
  Gene Ontology: Mol. function=protein binding; Cellular component =chloroplast; Biological process=protein metabolic process
  Homolog annotation: Hit_ID=B6SZN2; Match level="QueryCoverage=100%, HitCoverage=79%, E-value=7e-93, Identity=91%"; Hit description=ATP -dependent Clp protease ATP-binding subunit clpA
  Pfam annotation: Domain name=Clp_N; Domain location=123-176; Score =18.0; E_value=0.04; Accession=PF02861.12; Description=Clp amino terminal domain
  Pfam annotation: Domain name=Clp_N; Domain location=46-98; Score =37.5; E_value=5.3e-08; Accession=PF02861.12; Description=Clp amino terminal domain
  Pfam module annotation: Pfam domain module=Clp_N::Clp_N; Domain location=123-176::46-98
PRLPFHLRGRRVGAVVAQLPTTHPEVASGDKKIRWSSRAVRSFAMAELEARKMRYPTTGTEGLLMGILVEGTSGAAKLLRANGINLLKVREEAANVLGKSEMFYFSPMHPPLTEAAQRALDWAASEKLKSGEDGEVTANHLLLGIWSDKESAGHKILASLGFDDEKARLLAQTADEEAAMSPR

SEQ ID NO: 106624 - protein, 995 aa, Setaria italica
  Transcript Sequence Number=SeqID_40650
  Gene Ontology: Mol. function=nucleotide binding; Cellular component =myosin complex; Biological process=actin filament-based movement
  Homolog annotation: Hit_ID=Q337J0; Match level="QueryCoverage=100%, HitCoverage=100%, E-value=0.0, Identity=92%"; Hit description=Myosin head family protein, expressed
  Pfam annotation: Domain name=IQ; Domain location=669-689; Score=17.3; E_value=0.065; Accession=PF00612.19; Description=IQ calmodulin -binding motif
  Pfam annotation: Domain name=IQ; Domain location=692-712; Score=8.4; E_value=3.5; Accession=PF00612.19; Description=IQ calmodulin-binding motif
  Pfam annotation: Domain name=IQ; Domain location=718-738; Score=27.5; E_value=5.3e-05; Accession=PF00612.19; Description=IQ calmodulin -binding motif
  Pfam annotation: Domain name=IQ; Domain location=741-761; Score=17.3; E_value=0.063; Accession=PF00612.19; Description=IQ calmodulin -binding motif
  Pfam annotation: Domain name=Myosin_head; Domain location=1-654; Score=942.8; E_value=1.6e-280; Accession=PF00063.13; Description =Myosin head (motor domain)
  Pfam module annotation: Pfam domain module=IQ::IQ::IQ::IQ::Myosin _head; Domain location=669-689::692-712::718-738::741-761::1-654
MQLSYLSEPSVLYNLQYRYSQDLIYTKAGPVLVAVNPFKKVSLYGNEYIDAYRNKTMDSPHVYAIADAALREMKRDEVNQSIIISGESGAGKTETAKIAMQYLASLGGGSGIEYEILQTNPILEAFGNAKTLRNDNSSRFGKLIEIHFSTTGRICGAMIQTFLLEKSRVVQCAVGERSYHIFYQLCAGAPASLREKLNLKKVDEYKYLKQSCCYSIAGVDDAQMFRTVTEAMNIVHISKEDQENVFAMVSAVLWLGDVSFTVIDNENHVEIIVDEASKTVAELLGCSIEDLNLALSKRHMKVNNENIVQKLTLAQATDTRDALAKSVYASLFEWLVEQINKSLSVGKRRTGRSISILDIYGFESFDKNSFEQFCINYANERLQQHFNRHLFKLEQEEYVEDGIDWAKVDFEDNQDCLNLFEKKPLGLLSLLDEESTFPNATDLTFANKLKQHLNSNSCFRGERGKAFAVRHYAGEVAYDTSGFLEKNRDLLHMDSIQLLAKCKSSLPQFFASKMLAQSDNSISVPYRSSAADSQKLSVAMKFKGQLFQLMQRLESTTPHFIRCIKPNNLQLPAIYEQGLVLQQLKCCGVLEVVRISRSGYPTRMTHQKFARRYGFLLLEDVASQEPLSVSVAILHQFNILPEMYQVGYTKLFFRTGQIGKLEDTRNRTLHGILRVQSCFRGHQARYHARERIRGVLDLQSFIRGENARQIYSSLSMKHRAAIILQRSVRCWLARRYFTNIRRASVVIQSGIRGSLVRRCNGNIDLINVLREFESKQEAEGDQILIKASVLAELQRRILKAEATVREKDEENEMLHQRLQQYENRWLEYEQKMKAMEEMWQKQMRSLQSSLSVAKKSLALDETPRMSDSSVDQSWEINGNHVGSGSQLVPRTTGREMNAGLSVINRLTEEFEQRSQVFADDATFIVEVKSGQADASLNPDMELRRLKQNFDSWKKDFGGRIRETKVILNKLGSGNESSPNSVKRKWWGRLNTSKFS

SEQ ID NO: 106625 - protein, 297 aa, Setaria italica
  Transcript Sequence Number=SeqID_40651
  Gene Ontology: Mol. function=protein dimerization activity; Cellular component=nucleus; Biological process=regulation of transcription, DNA-dependent
  Homolog annotation: Hit_ID=Q2QMJ8; Match level="QueryCoverage=56%, HitCoverage=79%, E-value=1e-60, Identity=75%"; Hit description=BZIP transcription factor family protein, expressed
  Pfam annotation: Domain name=bZIP_1; Domain location=119-179; Score =51.5; E_value=3.2e-12; Accession=PF00170.13; Description=bZIP transcription factor
  Pfam annotation: Domain name=bZIP_2; Domain location=119-173; Score =44.9; E_value=3.1e-10; Accession=PF07716.7; Description=Basic region leucine zipper
  Pfam module annotation: Pfam domain module=bZIP_1::bZIP_2; Domain location=119-179::119-173
MAGGCAEDDVVEVSCGGGGRDPGAYAAVLKRRLDLYCAAVAKSMEAKSQESSLGYPNTQASNTSQLISQASFDDDGDGADLVTNSNIIDYDDFRGKPANSGTSKEQSDDDGDLEENTDPTNTKKMRRMLSNRESARRSRKRKQEHLTDLESQVSRLTSENASLLKRLADMTQKYKDATLDNRNLIVDVETMRRKVNIAEEAVRRLTGTTLLLPTTSDKPASSMRLTSCASDAASASVAIEDSMEHFSPGAISMATEAEAASDAHEVKRMLLAGLSDVVGNRRVVPVSLLTASSAMFT

SEQ ID NO: 106626 - protein, 600 aa, Setaria italica
  misc_feature (587)..(587): Xaa can be any naturally occurring amino acid
  Transcript Sequence Number=SeqID_40652
  Gene Ontology: Mol. function=oxidoreductase activity; Cellular component=chloroplast; Biological process=metabolic process
  Homolog annotation: Hit_ID=B6U0L0; Match level="QueryCoverage=99%, HitCoverage=88%, E-value=0.0, Identity=84%"; Hit description =Zeaxanthin epoxidase
  Pfam annotation: Domain name=DAO; Domain location=12-330; Score= -41.1; E_value=0.0055; Accession=PF01266.16; Description=FAD dependent oxidoreductase
  Pfam annotation: Domain name=FAD_binding_3; Domain location=10-368; Score=-76.0; E_value=2.6e-07; Accession=PF01494.11; Description=FAD binding domain
  Pfam annotation: Domain name=FHA; Domain location=489-565; Score =69.6; E_value=1.2e-17; Accession=PF00498.18; Description=FHA domain
  Pfam module annotation: Pfam domain module=DAO::FAD_binding_3::FHA; Domain location=12-330::10-368::489-565
GGRKEEEKRKPRVLVAGGGIGGLVFALAARRKGYEVTVFERDLSAVRGEGQYRGPIQIQSNALAALEAIDMSVAEEVMRAGCVTGDRINGLVDGISGSWYCKFDTFTPAAERGLPVTRVISRMTLQQILARAVGDDAILNGSHVVDFIDDGSKVTAILEDGRRFEGDLLVGADGIWSNVRKTLFGHSEATYSGYTCYTGIADFVPPDIDTVGYRVFLGHKQYFVSSDVGAGKMQWYAFHKEEAGGTDPENGKKKRLLEIFSGWCDNVIDLINATEEEAILRRDIYDRPPTINWGKGRVTLLGDSVHAMQPNLGQGGCMAIEDGYQLAVELENAWQESVKSGTPMDIVSSLKRYEKERRLRVAIIHGLARMAAIMATTYRPYLGVGLGPLSFLTKLRIPHPGRVGGRFFIMIGMPAMLSWVLGGNSSKLEGRPLSCRLSDKANDQLYRWFEDDDALEQAMGGEWYLFPISEGNSNSLQPVRLIRDEQRAISFGNRSDPSDSASSLALPMPQISERHATITCKNKAFYLTDLGSEHGTWITDNEGRRYRVPPNYPVRFHPSDVIEFGSDQKAMFRVKVLNTLPYESARXGRQQQQQQVLQAA

SEQ ID NO: 106627 - protein, 82 aa, Setaria italica
  Transcript Sequence Number=SeqID_40653
  Subcellular localization annotation: CTP_CleavageSite=15; ConfidenceScore=5.14e-01
FLNTYPPCLPQPPYRGESRSATWTYETLRSSPPHPNHLFSSAMATFFTILLVLLSLLPLLSSAAPRDTLLLGSSLSVEKDQT

SEQ ID NO: 106628 - protein, 138 aa, Setaria italica
  Transcript Sequence Number=SeqID_40654
  Homolog annotation: Hit_ID=B6SWH5; Match level="QueryCoverage=66%, HitCoverage=19%, E-value=7e-41, Identity=89%"; Hit description=Beta -catenin-like protein 1
  Pfam annotation: Domain name=DUF1716; Domain location=8-115; Score =160.5; E_value=4.9e-45; Accession=PF08216.3; Description=Eukaryotic domain of unknown function (
MDSAAAAAAHKRKRPDGEVDLSAADAVEVLDLRAGKRLLLAFERRLRDNLEARMKYPDDPARFADSEIALHAEADRLRLLAGAPELFPDLVPIGLASSLASLLTHDNADLAAAAASLLADLTDSDDPDDLAAVQALAD

SEQ ID NO: 106629 - protein, 82 aa, Setaria italica
  Transcript Sequence Number=SeqID_40655
  Gene Ontology: Mol. function=structural constituent of ribosome; Cellular component=intracellular; Biological process=translation
  Homolog annotation: Hit_ID=Q0QG42; Match level="QueryCoverage=95%, HitCoverage=79%, E-value=4e-34, Identity=91%"; Hit description =Mitochondrial ribosomal protein S14 (Fragment)
  Pfam annotation: Domain name=Ribosomal_S14; Domain location=27-81; Score=91.3; E_value=3.5e-24; Accession=PF00253.13; Description =Ribosomal protein S14pS29e
  Subcellular localization annotation: CTP_CleavageSite=52; ConfidenceScore=5.04e-01
MSLRGKLYKSVCRDPDLPLDMREKFRYKLSKLPRNSSMTRLRNRCIFTGRSRAVYKKFRMSRIMFRTLANKGELTGVKKASW

SEQ ID NO: 106630 - protein, 81 aa, Setaria italica
  Transcript Sequence Number=SeqID_40656
  Subcellular localization annotation: CTP_CleavageSite=67; ConfidenceScore=5.25e-01
FRLGNVIFLKWTIAACLSCILDRVSSMHSSSHKQTRYPETISFNATPFFSLNYMLFSFTLSKLSRVLEKTTSHSMQWLSSC

SEQ ID NO: 106631 - protein, 128 aa, Setaria italica
  misc_feature (105)..(105): Xaa can be any naturally occurring amino acid
  Transcript Sequence Number=SeqID_40657
  Subcellular localization annotation: CTP_CleavageSite=91; ConfidenceScore=5.10e-01
ANAGQDLTLTKSAGCGSGCGGGCGSGTVIEGSKTSHATSGGCGSGCGGSCGALFNSSTAAGQGLAKSAGCGSGCGGGCGSGMIIEGSKTTQAKSGGCGSGCGGGXGGGALFNSSCAAGQGPQVGWLWF

SEQ ID NO: 106632 - protein, 80 aa, Setaria italica
  Transcript Sequence Number=SeqID_40658
TKSLLVCQLPCRLNQKQESLLFFSRYQVSFTCSSKTQLIAPRKYASDDLRVCDNQSDMTPAQLIGLAFQKLLKHLCPSTR

SEQ ID NO: 106633 - protein, 129 aa, Setaria italica
  Transcript Sequence Number=SeqID_40659
SLLLWSVLQLFFSRYQVSFTCSSKTQLIAPRKYASDDLRVHFLQSRLPIFIEAEAVRFKRVVSSSSSSCCTLWTQPLVIAATAATSGTRTEERWREGCGEQNGRATGGRGQAGRRGRRGMSVVAARTLD

SEQ ID NO: 106634 - protein, 104 aa, Setaria italica
  Transcript Sequence Number=SeqID_40660
VVVTEVLESGPSTSRPAIQLAEVPDMVKMLISDGVFHGASGVLTSVATHYPDLDFEAVCRGYTDIRSFKKIQALGQSLAQSAQTIATQGLQHGSVEARAVDGCT

SEQ ID NO: 106635 - protein, 70 aa, Setaria italica
  Transcript Sequence Number=SeqID_40661
LQHQTVAKQKNNSFQKDECRIKYQLHTYIGDGDIIKNNSCSHHKCYLFYTTELCSHSKYVMFANGQNYIQ

SEQ ID NO: 106636 - protein, 124 aa, Setaria italica
  misc_feature (1)..(13): Xaa can be any naturally occurring amino acid
  misc_feature (31)..(31): Xaa can be any naturally occurring amino acid
  Transcript Sequence Number=SeqID_40662
XXXXXXXXXXXXXLEPSTCLRLVMDLYLLDXFIHKTRHAEIYINKKIQLKRGYKGKGSPKNRFFHKAESAAATAYTTYSRRVADWPDLQSASSSAFPVASTLKTNNNLKPVTYQSSMAILEFLL

SEQ ID NO: 106637 - protein, 247 aa, Setaria italica
  Transcript Sequence Number=SeqID_40663
  Gene Ontology: Cellular component=chloroplast envelope
  Homolog annotation: Hit_ID=Q31IL6; Match level="QueryCoverage=41%, HitCoverage=49%, E-value=1e-11, Identity=39%"; Hit description =UPF0114 protein
  Pfam annotation: Domain name=UPF0114; Domain location=81-208; Score =183.2; E_value=7.4e-52; Accession=PF03350.8; Description =Uncharacterized protein family, UPF0114
MKLRPLTCVAAGCAGWAWRPRSRVRSEAVSPKRSHAAAAAAGAVHSEEHRRGGMREVLFRPVGLPTETKFGAGLEDRIEKVICACRFMTFLGIGGLLAGCVPCFLKGCVYVMDAFVEYYLHGGGMLILMLLEAIDMFLIGTVMFVFGTGLYELFISEMDMSYGSNLFGLFSLPERPKWLVIQSVNDLKTKLGHVIVMSLLVGIFEKSWRVTITSCTDLLCFAASIFLSSGCLYLLSRLSNTKGGSHT

SEQ ID NO: 106638 - protein, 152 aa, Setaria italica
  misc_feature (22)..(22): Xaa can be any naturally occurring amino acid
  Transcript Sequence Number=SeqID_40664
  Gene Ontology: Mol. function=phosphotransferase activity, carboxyl group as acceptor
  Homolog annotation: Hit_ID=B5SVV3; Match level="QueryCoverage=82%, HitCoverage=18%, E-value=2e-59, Identity=81%"; Hit description =Mutant low phytic acid protein 1
GSGVSSSSNIDYEKSGALTEKXVDGKAIGKKQMAIEGYKAQSEMVIDSLDRLITAWEDRKESVVVEGVHLSLNFVMGLMRKHPSIIPFMIYISNEGKHTERFAVRAKYMTLDPTKNKYVKYISNIRTIQEYLCSRAVKYLVPKVNNTNVDRS

SEQ ID NO: 106639 - protein, 92 aa, Setaria italica
  Transcript Sequence Number=SeqID_40665
  Homolog annotation: Hit_ID=B5SVV3; Match level="QueryCoverage=98%, HitCoverage=13%, E-value=4e-41, Identity=81%"; Hit description =Mutant low phytic acid protein 1
LFQMGLMRKHPSIIPFMIYISNEGKHTERFAVRAKYMTLDPTKNKYVKYISNIRTIQEYLCSRADKYLVPKVNNTNVDRSVASIHATVFSCL

SEQ ID NO: 106640 - protein, 140 aa, Setaria italica
  Transcript Sequence Number=SeqID_40666
  Gene Ontology: Cellular component=integral to membrane
  Homolog annotation: Hit_ID=B6TV85; Match level="QueryCoverage=91%, HitCoverage=46%, E-value=9e-50, Identity=78%"; Hit description =Embryogenesis transmembrane protein
VFFYFNSTAFVTSVVIIVLLMNESFYHSEAKVEALEVIVVLDMAGLMGAYIAGCTREVSSSIYIIVLTVVVFLYVLYTAQFLPKLWGLLVHVPFLHKAAQGGALPVPHDILHTARPRVDIGRTKSAPPGSVGLVTRPEDE

SEQ ID NO: 106641 - protein, 104 aa, Setaria italica
  Transcript Sequence Number=SeqID_40667
IALNLQGTGTGLLMEQITNSQEKETYLDVPEANFEMVNFMSHGNIIVYKWFHDNLNKEVLKILQNEPATYMDILTKRYGFEVRIYMNLDKYDIIKNRGHYIRRI

SEQ ID NO: 106642 - protein, 137 aa, Setaria italica
  misc_feature (106)..(106): Xaa can be any naturally occurring amino acid
  Transcript Sequence Number=SeqID_40668
MAAESTAPPPPSLPPPATAAALRHPRLSGFEQLDARVKELTSSQAELLERIQKLKQEVQNWRSNVETQVRTCQNELQGLKKGLDSEVEQLKLEMKEIRSAIQKEKXNNDTEQALQTQDKALKVDTDASMEEQTATQA

SEQ ID NO: 106643 - protein, 136 aa, Setaria italica
  Transcript Sequence Number=SeqID_40669
MVCVPVLVRDLQRLSGFEQLDARVKELTSSQAELLERIQKLKQEVQNWRSNVETQVRTCQNELQGLKKGLDSEVEQLKLEMKEIRSAIQKEKGNLPTQITTLEMSNNDTEQALQTQDKALKVDTDASMEEQTATQA

SEQ ID NO: 106644 - protein, 81 aa, Setaria italica
  Transcript Sequence Number=SeqID_40670
PNFQLVKHMICYNWYSDCVVPENFSWRQPWSVQPVDIFPDLTPRAQLKSATGSSFLRIILFMWMKLRGFSKVICFPYVIIL

SEQ ID NO: 106645 - protein, 572 aa, Setaria italica
  Transcript Sequence Number=SeqID_40671
  Gene Ontology: Mol. function=binding; Cellular component=plasma membrane; Biological process=cellular iron ion homeostasis
  Homolog annotation: Hit_ID=B6U2D5; Match level="QueryCoverage=100%, HitCoverage=80%, E-value=0.0, Identity=88%"; Hit description =Calmodulin-binding protein MPCBP
  Pfam annotation: Domain name=TPR_1; Domain location=181-214; Score =13.7; E_value=0.13; Accession=PF00515.20; Description=Tetratricopepti de repeat
  Pfam annotation: Domain name=TPR_1; Domain location=302-335; Score =0.2; E_value=5.6; Accession=PF00515.20; Description=Tetratricopeptide repeat
  Pfam annotation: Domain name=TPR_1; Domain location=427-460; Score =7.1; E_value=0.83; Accession=PF00515.20; Description=Tetratricopeptid e repeat
  Pfam annotation: Domain name=TPR_1; Domain location=461-494; Score =11.8; E_value=0.22; Accession=PF00515.20; Description=Tetratricopepti de repeat
  Pfam annotation: Domain name=TPR_1; Domain location=531-564; Score =13.5; E_value=0.14; Accession=PF00515.20; Description=Tetratricopepti de repeat
  Pfam annotation: Domain name=TPR_2; Domain location=181-214; Score =15.0; E_value=0.31; Accession=PF07719.9; Description=Tetratricopeptid e repeat
  Pfam annotation: Domain name=TPR_2; Domain location=302-335; Score =9.9; E_value=2; Accession=PF07719.9; Description=Tetratricopeptide repeat
  Pfam annotation: Domain name=TPR_2; Domain location=337-370; Score =11.3; E_value=1.3; Accession=PF07719.9; Description=Tetratricopeptide repeat
  Pfam annotation: Domain name=TPR_2; Domain location=427-460; Score =11.1; E_value=1.4; Accession=PF07719.9; Description=Tetratricopeptide repeat
  Pfam annotation: Domain name=TPR_2; Domain location=461-494; Score =9.3; E_value=2.3; Accession=PF07719.9; Description=Tetratricopeptide repeat
  Pfam annotation: Domain name=TPR_2; Domain location=531-564; Score =20.6; E_value=0.0065; Accession=PF07719.9; Description =Tetratricopeptide repeat
  Pfam module annotation: Pfam domain module=TPR_1::TPR_1::TPR_1::TPR _1::TPR_1::TPR_2::TPR_2::TPR_2::TPR_2::TPR_2::TPR_2; Domain location =181-214::302-335::427-460::461-494::531-564::181-214::302-335::337 -370::427-460::461-494::531-564
YLKSMSLQKLGKAMEAAKQCKSVLDAVESIFQCGIPGVMVEQKLQETVSKSVELLPELWKQAGAYQEALASYRRALLSQWNLDDECCTRIQKRFAVFLLYGGVEASPPSLASQTEGSFVPRNNLEEAILLLMILLKKWFLGKTHWDPSVMEHLTFALSVCGQTSVLAKHLEEVLPGIYPRTERWYSLALCYFAASHNEAALNLLKRSLNKNESPNDIMALLLAAKICSSSYLLASEGVDYARRAVKDVESSDGHLKSVALHFLGSCLAKKSRVASSDHQRSLLQTEALKSLNEAFSLDRHNPELIYDMGIEYAEQRNLHAALKYAKEFIDATGGSVSKGWRLLSLVLSAQQRYSEAEVVTDAALDETAKWEQGPLLRIRAKLKVAQSLPMEAVEAYRTLLALVQAQRKAYGSIKNGAEEDEDKVSEFEVWQGLANLYSSLSYWRDAEICLQKAKALKTYSATTLHAEGNIHEVREKIQDALAAYFNALSTEIEHVPSKVSIGALLAKKGPKYLPVARCFLSDALRLEPTNRMAWFYLGKVHKHDGRLVDAADCFQAASMLEDSDPVESFRSL

SEQ ID NO: 106646 - protein, 76 aa, Setaria italica
  Transcript Sequence Number=SeqID_40672
FMSTSSCTIFKINIILQMYMPLFWALNIAEALLLKLVNPTRNSSCAGSNPEESTCTSRGQQKNPVAPANTVSSLII

SEQ ID NO: 106647 - protein, 139 aa, Setaria italica
  misc_feature (16)..(16): Xaa can be any naturally occurring amino acid
  Transcript Sequence Number=SeqID_40673
  Gene Ontology: Mol. function=protein serine/threonine kinase activity; Cellular component=nucleoplasm; Biological process=protein amino acid phosphorylation
  Homolog annotation: Hit_ID=Q336S1; Match level="QueryCoverage=100%, HitCoverage=14%, E-value=2e-55, Identity=76%"; Hit description =Protein kinase domain containing protein, expressed
ECFVLEHVEHDRPEIXKEIALLELQWYGYCLFRALASLHRQGVVHRDVKPGNFLFCRKLKKGYLIDFNLANDLHQKFLKNSKSETISCGKDTASQTLSKFAPVVHAKEAVDDSKQPLPLKRKRSSKNPVDSAPKIDNKS

SEQ ID NO: 106648 - protein, 171 aa, Setaria italica
  misc_feature (109)..(109): Xaa can be any naturally occurring amino acid
  misc_feature (138)..(138): Xaa can be any naturally occurring amino acid
  misc_feature (156)..(156): Xaa can be any naturally occurring amino acid
  Transcript Sequence Number=SeqID_40674
  Gene Ontology: Cellular component=vacuole
  Pfam annotation: Domain name=DUF231; Domain location=19-171; Score =91.7; E_value=2.6e-24; Accession=PF03005.7; Description=Arabidopsis proteins of unknown function
WVEACSFHDVLIFNTGHWWWAPSKFDPIESPMLFFENGKPVVPPLLPSAGLDLALQHMITFVNKAMRPNVRKNFSALSPRHFEGGDWNEGGSCQRNQPLSSEEVEEFFXLDNNGTNMEARLVNKHLMKALEQSTFRVXLDITRMSEFRADAHPSTXGGKKHDDCMHWCLPG

SEQ ID NO: 106649 - protein, 111 aa, Setaria italica
  Transcript Sequence Number=SeqID_40675
  Homolog annotation: Hit_ID=Q9LP35; Match level="QueryCoverage=42%, HitCoverage=12%, E-value=5e-11, Identity=61%"; Hit description =F28N24.24 protein
  Pfam annotation: Domain name=DUF231; Domain location=1-106; Score =15.3; E_value=4e-08; Accession=PF03005.7; Description=Arabidopsis proteins of unknown function
ILPSFQSPPSKCLGDCQRNQPLSSEEVEEFFSLDNNGTNMEARLVNKHLMKALEQSTFRVLDITRMSEFRADAHPSTTGGKKHDDCMHWCLPGLTDTWNDLLAVNLEAVES

SEQ ID NO: 106650 - protein, 75 aa, Setaria italica
  Transcript Sequence Number=SeqID_40676
IAVSWANFDLKYKNAQLFAVHRPLVILSIGNNDERLNAVTYLKLADSFKHQLLVIQHWVHFTIAYPDCIALNFIQ

SEQ ID NO: 106651 - protein, 302 aa, Setaria italica
  Transcript Sequence Number=SeqID_40677
  Gene Ontology: Mol. function=nucleic acid binding; Cellular component= intracellular; Biological process=regulation of transcription from RNA polymerase III promoter
  Homolog annotation: Hit_ID=B9RAP0; Match level="QueryCoverage=50%, HitCoverage=9%, E-value=3e-52, Identity=61%"; Hit description =Nucleic acid binding protein, putative
  Pfam annotation: Domain name=zf-C2H2; Domain location=183-205; Score =7.0; E_value=2.1; Accession=PF00096.18; Description=Zinc finger, C2H2 type
  Pfam annotation: Domain name=zf-C2H2; Domain location=206-230; Score =10.0; E_value=0.99; Accession=PF00096.18; Description=Zinc finger, C2H2 type
  Pfam annotation: Domain name=zf-C2H2; Domain location=236-260; Score =21.8; E_value=0.0028; Accession=PF00096.18; Description=Zinc finger, C2H2 type
  Pfam annotation: Domain name=zf-C2H2; Domain location=266-292; Score =19.7; E_value=0.012; Accession=PF00096.18; Description=Zinc finger, C2H2 type
  Pfam module annotation: Pfam domain module=zf-C2H2::zf-C2H2::zf -C2H2::zf-C2H2; Domain location=183-205::206-230::236-260::266-292
IRKRPTRTQVLKGEKDDKRNNNFYERHNDSDDHDYRLGIDSTENTTVGDCDNSPPQGLDVVKVKSGTQLQGSKKKSSKCKASDDLSNVEKRLQKMVKKVSTKKHKNDKTNRQFQEKHSKDNNVDLLHEDNGDEATQENWDGVQQKTNDVKVKSRGKMHSGKKKASKCQTTSDGLRNGDKGAKFSCDIEGCDMSFSTQQDLALHKRDICPVKGCKKKFFCHKYLLQHRKVHLDERPLMCSFTGCKKTFKWPWARTEHMRVHTGVRPYACTEPGCTQTFRFVSDFSRHKRKTGHSCDKKKKNST

SEQ ID NO: 106652 - protein, 78 aa, Setaria italica
  misc_feature (33)..(33): Xaa can be any naturally occurring amino acid
  Transcript Sequence Number=SeqID_40678
GGGYLARWKDKRDWSETGNNSERRKGRAWRLAXESSATVASVVSSIASWASSSMVMDWASPEEVEMQRGDGFSLLIYA

SEQ ID NO: 106653 - protein, 159 aa, Setaria italica
  misc_feature (118)..(118): Xaa can be any naturally occurring amino acid
  Transcript Sequence Number=SeqID_40679
MRYGTNSMNTFSTDLDIISPQQQKNIGMNISSGLDIHDLESLFNNCTISPQFLSEWDNTFPQSSTMNMDPYVHSPVPQDDRTLFVTFSIGYPLTKKEVYNFFMSNFGDVESLSIEEPXELRPPQYAVVIFGSLETLLLILSGKEKVKFVIGGETILLGS

SEQ ID NO: 106654 - protein, 214 aa, Setaria italica
  misc_feature (114)..(114): Xaa can be any naturally occurring amino acid
  Transcript Sequence Number=SeqID_40680
  Gene Ontology: Mol. function=receptor activity; Cellular component =endoplasmic reticulum lumen; Biological process=auxin mediated signaling pathway
  Homolog annotation: Hit_ID=Q56B53; Match level="QueryCoverage=77%, HitCoverage=79%, E-value=8e-87, Identity=89%"; Hit description=Auxin- binding protein (Fragment)
  Pfam annotation: Domain name=Auxin_BP; Domain location=48-214; Score =392.4; E_value=7.7e-115; Accession=PF02041.8; Description=Auxin binding protein
  Pfam annotation: Domain name=Cupin_2; Domain location=94-174; Score =36.3; E_value=1.3e-07; Accession=PF07883.3; Description=Cupin domain
  Pfam module annotation: Pfam domain module=Auxin_BP::Cupin_2; Domain location=48-214::94-174
SETAGTKTKTYSAGEQTWPPRQPRGPHLAGVGRALLLLAAAAHFLPAAESSCPRDNSLVRDISRMHQSNYGREGFSHITVAGALAHGMKEVEVWLQTFGPGKRTPIHRHSCEEXIFVVLKGKGTLFLGLSSLKYPGQPQEIPVFQNSTFTIPVNDPHQVWNSDEHEDLQVLVIISRPPIKIFIYDDWSVPHTAAKLKFPYYWDEECLPAPKDEL

SEQ ID NO: 106655 - protein, 299 aa, Setaria italica
  misc_feature (204)..(204): Xaa can be any naturally occurring amino acid
  Transcript Sequence Number=SeqID_40681
  Gene Ontology: Mol. function=electron carrier activity; Cellular component=integral to membrane; Biological process=oxidation reduction
  Homolog annotation: Hit_ID=B6SW13; Match level="QueryCoverage=94%, HitCoverage=53%, E-value=1e-108, Identity=71%"; Hit description =Cytochrome P450 CYP86E2
  Pfam annotation: Domain name=p450; Domain location=1-299; Score= -183.9; E_value=0.0088; Accession=PF00067.14; Description=Cytochrome P450
DNIYDWGAAALARTGGTFHYRGTWGGGSSGVITSVPANVEHVLKTNFANYPKGPYYRERFVELLGEGIFNADGEAWSAQRRAASTEMHSARFLEFSAGTIGGLVRGKMLPLLDRIAERGEAVDMQDLLLRFTFDNICAAAFGIDAGCLAEGLPDVPFASAFERATELSLARFVTPPFVWKAKRLLGVGSERALVEATRAVREFXAERTVAERRAELRKTGTLAGRCDLLSRLMSSPPADLPGGYSDEFLRDFCISFILAGRDTSSVALAWFFWLLASHPDVESRVLADVVRAADADDKS

SEQ ID NO: 106656 - protein, 167 aa, Setaria italica
  misc_feature (45)..(45): Xaa can be any naturally occurring amino acid
  misc_feature (57)..(57): Xaa can be any naturally occurring amino acid
  misc_feature (90)..(90): Xaa can be any naturally occurring amino acid
  misc_feature (140)..(140): Xaa can be any naturally occurring amino acid
  Transcript Sequence Number=SeqID_40682
  Homolog annotation: Hit_ID=Q7XWU6; Match level="QueryCoverage=91%, HitCoverage=33%, E-value=9e-23, Identity=47%"; Hit description =OSJNBa0065B15.5 protein
MKCCQQVKNLAPYKCCFQGDKYKDQEPDAFDLFKECHYSKEKRKXYTPIIQLAITQXWKNKLSAPTEGEQPNFATQVVADVLGENTKKNXIQIAQPRCSVKNVKADLETEKRANAELQSIVNSQRAQVDDLSKKVQETEXARIRDQEEIKMKQAEMEAKLEVLLGQS

SEQ ID NO: 106657 - protein, 322 aa, Setaria italica
  misc_feature (22)..(22): Xaa can be any naturally occurring amino acid
  Transcript Sequence Number=SeqID_40683
  Gene Ontology: Mol. function=electron carrier activity; Cellular component=integral to membrane; Biological process=oxidation reduction
  Homolog annotation: Hit_ID=C0KHM0; Match level="QueryCoverage=97%, HitCoverage=59%, E-value=1e-120, Identity=65%"; Hit description =Putative ferulate 5-hydroxylase
  Pfam annotation: Domain name=p450; Domain location=1-322; Score= -45.2; E_value=1.8e-09; Accession=PF00067.14; Description=Cytochrome P450
FASRACSSVNDILYYGSSDVAXPPYGENWRQVKKIATTHLLTSKRVRAYRHAREQEVRLVIAKIRKAAAAGMAVDLSGLLNSFANDIVCHAVSGKFFREEGRNELFRELIEANSALMGGFNIEDYFPGLVKVGMIKRMVCAKAQKVNEGWNELLDKLIDDHERRWESQLGDEESDFIDVLLSVQKEYNLTRDHVKAQLAIMFEAGTDTSFIVLEYAMIKLMQNPHLMTKLQTKVRMAIPKGKDMITEDDLNANDIAFLKAVIKETLRLHAPAPLLAPHLSMADCDIEGYTIPSGTRVIVNAWALARDPNYWESAEVVSIVRL

SEQ ID NO: 106658 - protein, 177 aa, Setaria italica
  Transcript Sequence Number=SeqID_40684
  Gene Ontology: Cellular component=mitochondrion
  Subcellular localization annotation: CTP_CleavageSite=51; ConfidenceScore=5.54e-01
SKGKIFISGPRNRLAAAVPASPGRHRSSLPRPVAMATGGKPDPAAPPQAPSAAKGVFMRRIFPFLLATNVFIGVYVFAKTYKRDQDKKNAEAAAASAAVAALSSPASATAKAADPAPAPAPKRVLPPLSEDEQRHVFKWMLEEMRKIKPRDSSEKNKINEEKALLKEFIRAESLPRL

SEQ ID NO: 106659 - protein, 45 aa, Setaria italica
  Transcript Sequence Number=SeqID_40685
LVMIPGDSGKCLSSTQIQITYWPMCLYLKCVKVILKLSMLQVSVL

SEQ ID NO: 106660 - protein, 124 aa, Setaria italica
  Transcript Sequence Number=SeqID_40686
LSEHFGSFACCAWHIILFIFLLSEWSWRYMLAFCRSSYRTKSDGERTERGTKTLHVLFLGDRFQWAPYMMRMPVLFVVQPLEDHTDTKLGGCTSLYVLMKHSIFTFKTIFLHGFQIQVLKRQDG

SEQ ID NO: 106661 - protein, 129 aa, Setaria italica
  Transcript Sequence Number=SeqID_40687
DLRLEGEMACPGSMGKETRIEAGGDEAAGRQGSSEDRTRTTPQGQQQGDLNSSPEMAKIQKLGVTMHAPAPCRSQYCGFYSGCLDSALQLGTARTFETTVLRLVDFRPRQGYGRDQINSVPMSWLLFYS

SEQ ID NO: 106662 - protein, 200 aa, Setaria italica
  Transcript Sequence Number=SeqID_40688
  Subcellular localization annotation: CTP_CleavageSite=64; ConfidenceScore=5.23e-01
AQPHAFQTAQVPPGDRVSAGTFQSYQPQPHSGAPIGFQGDRYRPLSYPQPPPNMLVGTGVPLSRSASVASQGTQYQQVPPADARLKEKEKLASLARKLGVSDYNTYEPLGQQSASTPQSLHPSQLLAQAKARQWVQAKKSYVAATPQMRSSSGHNSSNHASGGTVLSSGSIQIQQPLCQLNSQSSRTLSGTTPSNLLDGK

SEQ ID NO: 106663 - protein, 115 aa, Setaria italica
  misc_feature (12)..(12): Xaa can be any naturally occurring amino acid
  Transcript Sequence Number=SeqID_40689
  Homolog annotation: Hit_ID=B4FDP2; Match level="QueryCoverage=32%, HitCoverage=10%, E-value=1e-11, Identity=91%"; Hit description=Cell division control protein 50
IAWQSDKNKKFXGSDVYPRNFQNGNLIGGAKLNESIPKDPSAIELCCSAVSVCIPHCSPQRMTLQTKVETVLARSGTDVCTDKKEQKYLGTKWSCHELSIQFEERKHRQKESEVS

SEQ ID NO: 106664 - protein, 148 aa, Setaria italica
  misc_feature (10)..(10): Xaa can be any naturally occurring amino acid
  Transcript Sequence Number=SeqID_40690
  Gene Ontology: Cellular component=membrane
  Homolog annotation: Hit_ID=B4FDP2; Match level="QueryCoverage=99%, HitCoverage=43%, E-value=3e-66, Identity=84%"; Hit description=Cell division control protein 50
  Pfam annotation: Domain name=CDC50; Domain location=1-141; Score =87.5; E_value=4.8e-23; Accession=PF03381.7; Description=LEM3 (ligand- effect modulator 3) family  CDC50 family
KDIAWQSDKXQKFGSDVYPRNFQNGNLIGGAKLNESIPLSEQEDLIVWMRTAALPTFRKLYGRIETDIMANDQLTVVIQNNYNTYSFGGSKALVLSTTSWIGGKNNFIGVAYLIVGGLCLFLALVFVVLYMFKPRTLGDPSFLSWNRD

SEQ ID NO: 106665 - protein, 160 aa, Setaria italica
  misc_feature (7)..(7): Xaa can be any naturally occurring amino acid
  misc_feature (131)..(131): Xaa can be any naturally occurring amino acid
  misc_feature (140)..(140): Xaa can be any naturally occurring amino acid
  Transcript Sequence Number=SeqID_40691
  Gene Ontology: Mol. function=nucleotide binding; Biological process =defense response
  Homolog annotation: Hit_ID=Q53MV4; Match level="QueryCoverage=93%, HitCoverage=10%, E-value=1e-42, Identity=58%"; Hit description=NB -ARC domain containing protein
GDENYQXKKLMRIAKEIATKLKGNPLAAKSVGTLLRRNIDEIHWRKISDSDEWKLENGIDGIVPALMLSYNHLSYHLQLLFSYCALFPKGYKFDKDQLIRMWIALGFVMDERKKLEDAGSDSFDDLVDRSXFFQKDEHYXVVHDLIHDVARERSHYMNAY

SEQ ID NO: 106666 - protein, 61 aa, Setaria italica
  Transcript Sequence Number=SeqID_40692
TIRSNIGTMRISKTLCFYSTTHSHVTGKQYNKKNKRHKLHVYIGEETLELLDSKQYLNSCC

SEQ ID NO: 106667 - protein, 555 aa, Setaria italica
  misc_feature (229)..(229): Xaa can be any naturally occurring amino acid
  misc_feature (240)..(240): Xaa can be any naturally occurring amino acid
  Transcript Sequence Number=SeqID_40693
  Gene Ontology: Mol. function=aspartic-type endopeptidase activity; Cellular component=chromatin; Biological process=DNA integration
  Homolog annotation: Hit_ID=Q6ATH4; Match level="QueryCoverage=71%, HitCoverage=26%, E-value=1e-148, Identity=64%"; Hit description =Putative polyprotein
  Pfam annotation: Domain name=rve; Domain location=137-299; Score =119.6; E_value=1e-32; Accession=PF00665.18; Description=Integrase core domain
  Subcellular localization annotation: CTP_CleavageSite=27; ConfidenceScore=5.14e-01
LPTPSRHSALNNILVAPSIVRNLLSVRQFTRDNSCSFEFDAHGFSVKDLRTGRVILRCNSDGDLYTMPAGTPVAPSHAFLAASSTLWHQRLGHPAPAALERLNKIHVVSCNKVDRSLCHSCQLGKHTRLPFSSSHSITHAPFELVHCDVWTSPINSLSGFSYYLVCLDDYSHYCWVFPLGKKSEVHQHIVELAALAKTQFSLPLKCVQADNGTEFINTATTKFLAAQGXTVRLSCPYTSXPQKLGKAERIIRTLNNSIRTMLLHASLPPPYWAEGLLTACYLHNRRPSSSIKHEIPYTRLHNQPPTYSHLRVFGCLCYPNMQATSKHKLAPRSTACVFLGYPPSHKGYRCLDLSTRRIIISRHVIFDETTFPFTATLDTSFPASLDFLLDDDMVSVPCPTVVAGGTLSSTPVEQPPSDVAASPSSPPGGRGHVPPLGPSVVPFPRVYVRRSRTTTTSEPAAAPAAPAAPAAPAPPTAPLPAPAASPAPPPPPPPRVTRTMTGAIPRVSYEGLAATTSSSPSPIPTNYRSALADANWRAAMMDEYQALVDNNTWQL

SEQ ID NO: 106668 - protein, 80 aa, Setaria italica
  misc_feature (76)..(76): Xaa can be any naturally occurring amino acid
  Transcript Sequence Number=SeqID_40694
CLGTCYVCCIYLWLLGPLFCLSVLYARIMCACFLCFRSSHGLGCIPCIAFEFILYSLFLQSFPLVLSKWSSWLIFXIAFL

SEQ ID NO: 106669 - protein, 56 aa, Setaria italica
  Transcript Sequence Number=SeqID_40695
LNDNVPLDLLSTAMIMIFVPLVYSASYLYVLLILLCSSILLIMFASLPIVVCISLS

SEQ ID NO: 106670 - protein, 122 aa, Setaria italica
  Transcript Sequence Number=SeqID_40696
  Subcellular localization annotation: CTP_CleavageSite=36; ConfidenceScore=5.73e-01
QPSPPRHRRARPPAQTSHCWWRTCPPPPRRRISSAPAATRPASGGRMPPGRATSSCSRTPRPSTAATTGPPSPSPPSWCPSSRTSPRTCARSARPANWKGASGCLTRPSPGPGIRCCRRSTA

SEQ ID NO: 106671 - protein, 63 aa, Setaria italica
  Transcript Sequence Number=SeqID_40697
LYGCLAGLLLTDLGQILEEFGDGGRVLLDPGHLAPLLDQNLRLIITHQKRSTKDMFQSLRFSA

SEQ ID NO: 106672 - protein, 176 aa, Setaria italica
  Transcript Sequence Number=SeqID_40698
  Homolog annotation: Hit_ID=Q9SMK5; Match level="QueryCoverage=75%, HitCoverage=62%, E-value=2e-30, Identity=54%"; Hit description =Plasma membrane intrinsic polypeptide
  Pfam annotation: Domain name=DREPP; Domain location=1-176; Score =181.2; E_value=3e-51; Accession=PF05558.4; Description=DREPP plasma membrane polypeptide
MDIWKSKVLPKIKLVFAKSGGKKAAAAAELLKSFDESKEGINGEFEEKKEDLQPKVVEIYESAPAPLKVLIKERGKVSGIKKNSAAITKFFEDLAKIEFPGAKQVSEGISKVGPALLSGPIFATFEKVSTLLPAAAEEAAAEEKDAAAAATEEAAAEKKDAAAVEEKKEEAPAGEE

SEQ ID NO: 106673 - protein, 258 aa, Setaria italica
  misc_feature (28)..(28): Xaa can be any naturally occurring amino acid
  misc_feature (67)..(67): Xaa can be any naturally occurring amino acid
  Transcript Sequence Number=SeqID_40699
  Gene Ontology: Mol. function=ubiquitin thiolesterase activity; Biological process=ubiquitin-dependent protein catabolic process
  Homolog annotation: Hit_ID=Q6ZKX7; Match level="QueryCoverage=99%, HitCoverage=31%, E-value=1e-39, Identity=41%"; Hit description =Ubiquitin carboxyl-terminal hydrolase
  Pfam annotation: Domain name=UCH; Domain location=35-258; Score=-4.7; E_value=5.8e-07; Accession=PF00443.21; Description=Ubiquitin carboxyl- terminal hydrolase
PSKNGEQMVGSANEDTKVVGDHTEQSDXRTVRSNEKSSGLSNLSVECKSSSNRQPHASDEQSLIIQXVDSITEGTSSGMSCGEKDSTARSITSKEHELQHNKFRANNSEVYQDMTEQLAMDHSSYQLKDKKNEQEDNVGDGIQTNLFKKLPPVLTLQLKRAFTCYEVRLKMSEHVRFKEYLDVGRFMDPSSVDKGNSLYRLAGVVEHRGSKSLVTGHYVAYVRARKLGNQQQQSSCSSSWFCADDRYISQVTLEEVLK

SEQ ID NO: 106674 - protein, 81 aa, Setaria italica
  misc_feature (17)..(17): Xaa can be any naturally occurring amino acid
  Transcript Sequence Number=SeqID_40700
  Pfam annotation: Domain name=PH_2; Domain location=1-67; Score=38.3; E_value=3.1e-08; Accession=PF08458.2; Description=Plant pleckstrin homology-like region
LVIVVVYGVYSELPTWXEPGKDSMEETCSFGLSTAQGLVEFECESSASKQKWVDDVQNLLRQVALQDQVGNNWITKTQLAQ

SEQ ID NO: 106675 - protein, 243 aa, Setaria italica
  Transcript Sequence Number=SeqID_40701
  Gene Ontology: Cellular component=plasma membrane
  Homolog annotation: Hit_ID=B9RS23; Match level="QueryCoverage=76%, HitCoverage=45%, E-value=3e-22, Identity=36%"; Hit description=Ice binding protein, putative
  Pfam annotation: Domain name=DUF828; Domain location=1-108; Score =58.1; E_value=3.4e-14; Accession=PF05703.3; Description=Plant protein of unknown function (DUF828)
  Pfam annotation: Domain name=PH_2; Domain location=123-231; Score =211.8; E_value=1.8e-60; Accession=PF08458.2; Description=Plant pleckstrin homology-like region
  Pfam module annotation: Pfam domain module=DUF828::PH_2; Domain location=1-108::123-231
SVARVAAAVAAVAAATSCDAQATKMAAAMASATELLASHCVEAAQHAGARHEQVAGAVQAAVGVRSPGDLMTLTAAAATALRGAATLKQRVQRETRSNASVLPYEKGSEKGHSWSTDIWCKEGELLKRTRKGDLHKTRLSIYINKRSQVMLKLKSKHIGGALSKNNKIVVYGVYSELPTWAEPGKDSMEETCSFGLSTAQGLVEFECESSASKQKWVDDVQNLLRQVALQDQVGNKLGLLKLN

SEQ ID NO: 106676 - protein, 75 aa, Setaria italica
  Transcript Sequence Number=SeqID_40702
KDATTERAVTLLHLVPSHKSGSRRARLAPRANRARVEQRQQHTTEQTGYGHVHDSTESKRNAKKVTDSTATDTPG

SEQ ID NO: 106677 - protein, 100 aa, Setaria italica
  Transcript Sequence Number=SeqID_40703
  Homolog annotation: Hit_ID=B4FNP5; Match level="QueryCoverage=100%, HitCoverage=28%, E-value=1e-44, Identity=86%"; Hit description=CXC domain containing TSO1-like protein 1
QWQAPPRSWHCSNKRNSNDRAMDDSANYKNSHNDWLLPKPEDSYSISKCVQILNGMVELSQVEKSVAPDVFLLPGNREIFISLGGDVRALWLKRKIQHLT

SEQ ID NO: 106678 - protein, 58 aa, Setaria italica
  Transcript Sequence Number=SeqID_40704
MGRSGSGAGSCLGLAAVAAVSTSIILISYHLHRRLVANMKDKIVGEGGADKDRRRRSC

SEQ ID NO: 106679 - protein, 134 aa, Setaria italica
  Transcript Sequence Number=SeqID_40705
CCFICIDAADHRVTMVEGLISFVFGTIKKRRRERRAMDYERLSSGGAPSTQGRLERLTSAAYGGVSRSQSCRFVARPPADDLDLSHGERLLLGGRAPPEGLPENELLPAGRRRAGPRVSRSRRFSSMRLFGCGA

SEQ ID NO: 106680 - protein, 312 aa, Setaria italica
  Transcript Sequence Number=SeqID_40706
  Gene Ontology: Mol. function=transferase activity, transferring glycosyl groups; Cellular component=integral to membrane; Biological process=cell wall organization and biogenesis
  Homolog annotation: Hit_ID=Q84S18; Match level="QueryCoverage=100%, HitCoverage=35%, E-value=1e-161, Identity=85%"; Hit description =Probable mixed-linked glucan synthase 8
  Pfam annotation: Domain name=Cellulose_synt; Domain location=1-312; Score=-289.3; E_value=0.012; Accession=PF03552.6; Description =Cellulose synthase
AAMCFMLDRRDGDNTAFVQFPQRFDDVDPTDRYCNHNRVFFDATLLGLNGIQGPSYVGTGCMFRRIAVYGIDPPRWRSDDFKIVDNANKFGNSMSFINSIPSAANQEWSMTSPPADEESIKEELDNVMKCAYEEGTEFGKEIGWVYNIATEDVVTGFRLHRTGWRSMYCRIEPDAFRGTAPINLTERLYQILRWSGGSLEMFFSHCPLLAGRRLNFMQQVAYTNMTAYPISSVFLVFYLLFPVIWIFRGEFYIQKPFPTYVLYLVIVIVMTELIGMVEIKWAGLTLLDWIRNEQFYIIGATAVYPLATLHIV

SEQ ID NO: 106681 - protein, 58 aa, Setaria italica
  Transcript Sequence Number=SeqID_40707
NNEFILLKVYRHWEQHQFNSASFFFFSKSKQNHHFYCSLKVLIIIQKSKSPFYKVQRF

SEQ ID NO: 106682 - protein, 79 aa, Setaria italica
  Transcript Sequence Number=SeqID_40708
  Gene Ontology: Mol. function=hydrolase activity; Biological process =metabolic process
  Homolog annotation: Hit_ID=B6TKK2; Match level="QueryCoverage=91%, HitCoverage=20%, E-value=4e-19, Identity=62%"; Hit description =Gibberellin receptor GID1L2
VELAGTFPPAMVAVGGFDLLKDWHARYVDTLRRKGKMVRVVEYPDAFHGFYAFPELADSGKFMDDMKLFVNEHRCKRPV

SEQ ID NO: 106683 - protein, 717 aa, Setaria italica
  Transcript Sequence Number=SeqID_40709
  Gene Ontology: Mol. function=glutamate-tRNA ligase activity; Cellular component=cytoplasm; Biological process=tRNA aminoacylation for protein translation
  Homolog annotation: Hit_ID=B6SRU1; Match level="QueryCoverage=99%, HitCoverage=100%, E-value=0.0, Identity=91%"; Hit description =Glutamyl-tRNA synthetase, cytoplasmic
  Pfam annotation: Domain name=tRNA-synt_1c; Domain location=209-514; Score=445.7; E_value=7.2e-131; Accession=PF00749.13; Description =tRNA synthetases class I (E and Q), catalytic domain
  Pfam annotation: Domain name=tRNA-synt_1c_C; Domain location=516-692; Score=178.3; E_value=2.1e-50; Accession=PF03950.10; Description=tRNA synthetases class I (E and Q), anti-codon binding domain
  Pfam module annotation: Pfam domain module=tRNA-synt_1c::tRNA-synt_1c_ C; Domain location=209-514::516-692
MTMEAKLAFSQDSPPISIICAAKVAGLPLTIDPSLASGSAPTLWFGSGESLHGVNPILHFIARGASFSSFSGQNAIEFGHVAEWLEYAPMFLSGSEFENACSFVDGYLTSRTFVVGHGLTIADIAVWSNLAGIGQRWESLRKSKKYQNLVRWFNSIDAEYKDTLNEIVAAYVGKRGIGKSPAPSLKEKVHDSKDPSAPEVDLPGAKVGQVCVRFAPEPSGYLHIGHAKAALLNKYFAERYQGRLIVRFDDTNPSKESNEFVENLLKDIETLGIKYDAVTYTSDYFPKLMEMAESLIKQGKAYIDDTPKEEMRKERMDGIESRCRNNTVEENLSLWKEMVNGTERGKQCCVRGKLDMQDPNKSLRDPVYYRCNTDPHHRVGSKYKAYPTYDFACPFVDAFEGVTHALRSSEYHDRNAQYYRILQDMGLRRVEIYEFSRLNMVYTLLSKRKLLWFVQNKKVEDWTDPRFPTVQGIVRRGLKVEALIQFILQQGASKNLNLMEWDKLWTINKKLIDPVCARHTAVLKDQRVIFTLTNGPEKPFVRILPRHKKCEAAGKKATTFANRIWLDYADASAISKGEEVTLMDWGNAIIKEIKMENGVITELVGELHLEGSVKTTKLKTTWLADIEELVPLSLVEFDYLISKKKLEEDEDFLDNLNPCTRRETPALGDANMKNLKHGEVIQLERKGYYRCDAPFIRSSKPVVLFAIPDGRQQASLN

SEQ ID NO: 106684 - protein, 123 aa, Setaria italica
  misc_feature (19)..(19): Xaa can be any naturally occurring amino acid
  Transcript Sequence Number=SeqID_40710
  Gene Ontology: Mol. function=transcription regulator activity; Cellular component=nucleus
  Homolog annotation: Hit_ID=B6TX00; Match level="QueryCoverage=91%, HitCoverage=24%, E-value=9e-16, Identity=45%"; Hit description=F-box domain containing protein
  Pfam annotation: Domain name=F-box; Domain location=7-54; Score=32.9; E_value=1.3e-06; Accession=PF00646.25; Description=F-box domain
SGTAAPAPAAGLPDDSIVXILSRVPVRSIHRFKCVSKAWRDLIANPLHRKRLPQTLEGFICSDAEIRHGAGGAGAPWNSRRHVNRSFISLPGRLSPLGDPSFSILTKQPTVRNEIRLLGCCNG

SEQ ID NO: 106685 - protein, 109 aa, Setaria italica
  Transcript Sequence Number=SeqID_40711
ISRHNNIMLITIAPLLQESCTVNCVDKDCYHLLYKNPVNHFKENSMLIEVIGPNEGLHMLLTSNPKWSRLLTNGGKFSMKSLKDLMVQAHREGWTLGKEQFSLENLIVS

SEQ ID NO: 106686 - protein, 168 aa, Setaria italica
  misc_feature (17)..(17): Xaa can be any naturally occurring amino acid
  misc_feature (109)..(109): Xaa can be any naturally occurring amino acid
  Transcript Sequence Number=SeqID_40712
  Gene Ontology: Mol. function=helicase activity
  Homolog annotation: Hit_ID=Q1EPC6; Match level="QueryCoverage=100%, HitCoverage=10%, E-value=1e-81, Identity=85%"; Hit description=DNA helicase homolog, putative
KDILGKVRAFVYVVEFXKRGLPHAHFLLIMQRKYKITCPEQYDLLISAELPNKKKYLDLYRMVTKHMMHGPCGMLNPLCPCTRGRTSCKNRYPRPFYDSTSQGKDSYPXYRRRDDGRKEIIRGHILDNQWVVPYNPCLLRTFNCHINVEACSSIKSVKYLFKYIYKGH

SEQ ID NO: 106687 - protein, 79 aa, Setaria italica
  Transcript Sequence Number=SeqID_40713
TYTKVTSSFTSQKYVCKNLSDTYKLKYIYIYIFIYINDVLKRILLHHESIDFSIEYPSLHQRLRVDNPSNSKNRFHSNQ

SEQ ID NO: 106688 - protein, 91 aa, Setaria italica
  Transcript Sequence Number=SeqID_40714
  Subcellular localization annotation: CTP_CleavageSite=58; ConfidenceScore=5.30e-01
EPPLLLKKTKPYCKLPTHSSSPPIPSSIAPPSNAAYPPPPTQPLVPPQLPSACPQPPLAGAAHRRLAALPAPTNTAPLDPSSPNPTVEPPP

SEQ ID NO: 106689 - protein, 340 aa, Setaria italica
  misc_feature (176)..(176): Xaa can be any naturally occurring amino acid
  Transcript Sequence Number=SeqID_40715
  Gene Ontology: Mol. function=sugar:hydrogen symporter activity; Biological process=carbohydrate transport
  Homolog annotation: Hit_ID=Q69M22; Match level="QueryCoverage=99%, HitCoverage=98%, E-value=1e-155, Identity=79%"; Hit description =Integral membrane protein-like
  Pfam annotation: Domain name=DUF6; Domain location=17-143; Score =20.5; E_value=0.0052; Accession=PF00892.12; Description=Integral membrane protein DUF6
  Pfam annotation: Domain name=TPT; Domain location=147-298; Score= -33.9; E_value=0.062; Accession=PF03151.8; Description=Triose -phosphate Transporter family
  Pfam annotation: Domain name=UAA; Domain location=5-307; Score= -143.9; E_value=0.0037; Accession=PF08449.3; Description=UAA transporter family
  Pfam module annotation: Pfam domain module=DUF6::TPT::UAA; Domain location=17-143::147-298::5-307
MAKQAYATSSLVVGYGVCSSLLAIINKYAITKFSYPGLLTALQYLTSVVGVWLLGKLGFLYHDPFNFQTAKKFAPAAVVFYLAIFTNTHLLKHANVDTFIVFRSLTPLLVAIADTTFRKQPRPSKLTFMSLVIILGGAVGYVMTDSAFTLTAYSWALAYLITITTEMVYIKHMVTXLGLNTWGFVLYNNLLSLLMAPVFGLLTGEHLSVFRAIESRGQSWFELDAFVAVSLSCVFGLLISFFGFAARKAISATAFTVTGVVNKFLTVAINVMIWDKHASVFGLVCLLFTLAGGVLYQQSVTIKGNSPAQREVAAKQGTDDNDTAGLDEENQRLVSSPKVV

SEQ ID NO: 106690 - protein, 52 aa, Setaria italica
  Transcript Sequence Number=SeqID_40716
  Gene Ontology: Mol. function=peptidase activity
  Homolog annotation: Hit_ID=Q2R1V5; Match level="QueryCoverage=100%, HitCoverage=13%, E-value=3e-10, Identity=67%"; Hit description =Intracellular protease, PfpI family protein, expressed
VPMRVVSRLAGAEVVETEGAVADGKIVTAAGWPDLAPFVARLVDLLGITVSF

SEQ ID NO: 106691 - protein, 149 aa, Setaria italica
  misc_feature (23)..(23): Xaa can be any naturally occurring amino acid
  misc_feature (59)..(59): Xaa can be any naturally occurring amino acid
  misc_feature (115)..(115): Xaa can be any naturally occurring amino acid
  Transcript Sequence Number=SeqID_40717
  Gene Ontology: Mol. function=aspartic-type endopeptidase activity; Cellular component=chromatin; Biological process=RNA-dependent DNA replication
  Homolog annotation: Hit_ID=Q8SA91; Match level="QueryCoverage=89%, HitCoverage=5%, E-value=4e-28, Identity=48%"; Hit description =Putative gag-pol polyprotein
LDKFASLRAYRRARGLCDKCAEXWHHGHKCSATVQLNAIQKSPRDLTVSIMLVLIIIFXEQLFLALSKDTSAGTEGPRTMQLEGSIQNIPLKILVDSGSSHTFLSHHITHKLDGXVPLSDSVRVQVANGAVLQCVAISQMGHGLFRSSV

SEQ ID NO: 106692 - protein, 159 aa, Setaria italica
  misc_feature (12)..(12): Xaa can be any naturally occurring amino acid
  misc_feature (63)..(63): Xaa can be any naturally occurring amino acid
  Transcript Sequence Number=SeqID_40718
  Gene Ontology: Mol. function=ATP-dependent helicase activity; Cellular component=intracellular
  Homolog annotation: Hit_ID=B9S9D0; Match level="QueryCoverage=98%, HitCoverage=10%, E-value=1e-24, Identity=40%"; Hit description=ATP -dependent RNA helicase, putative
VNDALELEAKMXRNECDERRPGCSVLSLFGSGAEIKHLELGKRYLTVEILHQNAWDIDEKDMXCLVDAHVPGISNFYKFGNFQATSDEMKWGKITFLKPENAEDAVSKLNGMEFHGSLLKVVPVCSYKNPGLPFPAVKAKVSWPRKPSRGLAIVTCASW

SEQ ID NO: 106693 - protein, 37 aa, Setaria italica
  Transcript Sequence Number=SeqID_40719
EIVHLTCSFVVACATYLKGADGYSNPAVSVSSWSIMD

SEQ ID NO: 106694 - protein, 123 aa, Setaria italica
  Transcript Sequence Number=SeqID_40720
  Homolog annotation: Hit_ID=B6TNJ3; Match level="QueryCoverage=52%, HitCoverage=79%, E-value=3e-19, Identity=64%"; Hit description =Membrane protein LEM1
VNVVVVYLLKAAAATLLMALVVAAAVTVVPSGAARPDDSATVGTFGHGHGHVGGRTWRDHHGGNRSPLAGLTECVTVCGSGVTKCMLDCYKPAISFDPLQLPVCLLKCTNDAMVCGSSCATNL

SEQ ID NO: 106695 - protein, 84 aa, Setaria italica
  Transcript Sequence Number=SeqID_40721
LVHPWHPFMSILPDSFIIGSKELHVLLLLTVLRNHILISSLITLNDSHIFRSIHVHNPSQVFGSQHADQFFSGVLHSACDWWMS

SEQ ID NO: 106696 - protein, 176 aa, Setaria italica
  Transcript Sequence Number=SeqID_40722
  Gene Ontology: Mol. function=hydrolase activity, acting on ester bonds; Biological process=lipid metabolic process
  Homolog annotation: Hit_ID=Q672R1; Match level="QueryCoverage=98%, HitCoverage=44%, E-value=8e-40, Identity=46%"; Hit description =Lipase 1
  Pfam annotation: Domain name=Lipase_GDSL; Domain location=1-174; Score=1.5; E_value=0.0054; Accession=PF00657.14; Description=GDSL -like LipaseAcylhydrolase
TKSLVPEVVKAICRGIERLVEEGVRYVVVSGTLPAGCLPMALAKYGGAGEAGNATTAEYDRRTGCLRRLNGLAQYHNWMLREAVGHMRAKYPATKLVYADFYRPVARLVRRPRKFGFTEEPLRACCGGGGPYNYNTEAACGSPDATVCGDPSKYVHWDGIHLTEAAYKYIADGWLD

SEQ ID NO: 106697 - protein, 279 aa, Setaria italica
  misc_feature (73)..(73): Xaa can be any naturally occurring amino acid
  misc_feature (119)..(119): Xaa can be any naturally occurring amino acid
  Transcript Sequence Number=SeqID_40723
  Gene Ontology: Mol. function=aspartic-type endopeptidase activity; Cellular component=chromatin; Biological process=RNA-dependent DNA replication
  Homolog annotation: Hit_ID=Q9FW76; Match level="QueryCoverage=94%, HitCoverage=16%, E-value=2e-35, Identity=33%"; Hit description =Putative gag-pol polyprotein
ELVLRQTGSVAEYLEKFEELSHGVLLYNSAYDDTYFVTRFMGGLKEEIRVPISLHRPSNVMDASALAFVQEEXLASQVSRSITKENHKAVSKSNFPVDKFKHTGAEKGFVPKLKSEKRXESEDRVQSLLQFRKKNGLCFKCGEKWGRNHKCPAQVAIHVIEELWDALEQPLMEELDSIDSEGENTDVVMTIGDSASPNTIKRKTMRLHGLVANQEILILVDSGSVGSFVSDKLPAQLQYPLQSCAPSHFVTADGSPMVCQQRIPNLQWECVPLKVVAYG

SEQ ID NO: 106698 - protein, 275 aa, Setaria italica
  Transcript Sequence Number=SeqID_40724
  Gene Ontology: Mol. function=protein binding
  Homolog annotation: Hit_ID=B6SGI6; Match level="QueryCoverage=99%, HitCoverage=76%, E-value=1e-60, Identity=45%"; Hit description =Speckle-type POZ protein
  Pfam annotation: Domain name=BTB; Domain location=93-208; Score =108.2; E_value=2.8e-29; Accession=PF00651.23; Description=BTBPOZ domain
LRASYELRLVDQSTGLLVSVHKEAPREFQRDKDFHSAISFFRAKRSIFESPTCLRGDCLTMECTVTVIKEPWRTATKTIPKIQVPQSDMAGHYAKLLEEKVGVDVTFSVGGEEFAAHKVVLATRSPVFKAQLYGPLREDKAVPITIDDMQPDVFRELLHFIYTDSLPPLDYLKADARTDMIRHLLVAADRYGMERLTLMCQSILCENLCVQTVATTFALADQHQCDMLKDACLEFITCSIARDAVQRTQGYRNLKRTCPPDVIEVFEKACRFRKA

SEQ ID NO: 106699 - protein, 168 aa, Setaria italica
  Transcript Sequence Number=SeqID_40725
  Gene Ontology: Mol. function=ubiquitin thiolesterase activity
  Homolog annotation: Hit_ID=Q2R140; Match level="QueryCoverage=80%, HitCoverage=5%, E-value=2e-16, Identity=36%"; Hit description =Retrotransposon protein, putative, unclassified
  Pfam annotation: Domain name=DUF594; Domain location=90-148; Score =55.8; E_value=1.7e-13; Accession=PF04578.5; Description=Protein of unknown function, DUF594
SPFTGDLAAVTPHYITAVSLSNYCAYLVTQGLVPDNGLVANKVFHAVSDEVRDALRGCSTMTEIRNKLTVTPENGAATTILGMGAQLSEKLMSLYKRDDELWERLGRFWAGFLLHLSASTRAAKHRIHLQGRGELTTLLWVLLSHAGFLGNTSHGEQLLDPEDLNDVC

SEQ ID NO: 106700 - protein, 83 aa, Setaria italica
  Transcript Sequence Number=SeqID_40726
IPRPLALKNPCGKTSQKMLTCTFQIIKVGYTKCVTKSSFETLHYCDAKLRTVMTQNHISRQSKDPNHQVRKNFGRWGEGEGVY

SEQ ID NO: 106701 - protein, 184 aa, Setaria italica
  Transcript Sequence Number=SeqID_40727
  Gene Ontology: Mol. function=oxidoreductase activity, acting on NADH or NADPH, quinone or similar compound as acceptor; Cellular component=integral to membrane; Biological process=ATP synthesis coupled electron transport
  Homolog annotation: Hit_ID=P12125; Match level="QueryCoverage=100%, HitCoverage=36%, E-value=1e-101, Identity=99%"; Hit description =NAD(P)H-quinone oxidoreductase chain 2, chloroplastic
IDLTSDQKDRPWFYFISSTSLVISITALLFRWREEPIISFSGNFQTNNFNEIFQFLILLCSTLCIPLSVEYIECTEMAITEFLLFVLTATLGGMFLCGANDLITIFVAPECFSLCSYLLSGYTKRDLRSNEATMKYLLMGGASSSILVYGFSWLYGLSGGEIELQEIVNGLINTQMYNSPGISI

SEQ ID NO: 106702 - protein, 105 aa, Setaria italica
  Transcript Sequence Number=SeqID_40728
MEEDDEATADRALYSVASSARPGRGATDGSRLASYLAATPHESKPLRARAPQPPPLSTSAAGRSPARDHAHHHNSDSSDTTSPTSTGGGGGGAVVGDVLLQWGHN

SEQ ID NO: 106703 - protein, 69 aa, Setaria italica
  Transcript Sequence Number=SeqID_40729
  Pfam annotation: Domain name=Homeobox; Domain location=7-53; Score =5.8; E_value=0.0033; Accession=PF00046.21; Description=Homeobox domain
MSLSVTEHPLFSLSVGVLFGFEQKQKVALAKQLNLRPRQVEVWFQNRRARLVLAPIPSTACPCSMHGKI

SEQ ID NO: 106704 - protein, 247 aa, Setaria italica
  Transcript Sequence Number=SeqID_40730
  Gene Ontology: Mol. function=sequence-specific DNA binding; Cellular component=nucleus; Biological process=regulation of transcription, DNA-dependent
  Homolog annotation: Hit_ID=B6TAL5; Match level="QueryCoverage=100%, HitCoverage=100%, E-value=4e-69, Identity=61%"; Hit description =Homeobox-leucine zipper protein HAT22
  Pfam annotation: Domain name=HALZ; Domain location=154-198; Score =67.3; E_value=5.7e-17; Accession=PF02183.10; Description=Homeobox associated leucine zipper
  Pfam annotation: Domain name=Homeobox; Domain location=99-153; Score =63.7; E_value=6.7e-16; Accession=PF00046.21; Description=Homeobox domain
  Pfam module annotation: Pfam domain module=HALZ::Homeobox; Domain location=154-198::99-153
MEQEEVGLALGLSLGSSGHHELKEQPSPSSRSWARLEPSLSLSLPTKDSRLSAPVRIAAVKRELPMEEDDEATADRALYSVASSALVAADDDEGCNSRKKLRLTKEQSALLEDRFKEHSTLNPKQKAALAKQLNLRPRQVEVWFQNRRARTKLKQTEVDCELLKRCCETLTEENRRLHRELQQLRALNHPHPATFFMPAATLSICPSCERLAGAPATTTTGADRPKAGGGPGRAAHLFSPFTHSTAC

SEQ ID NO: 106705 - protein, 77 aa, Setaria italica
  Transcript Sequence Number=SeqID_40731
ILMGTSMFFGARTCIQIGQFEVVVLGVLINPQASCIQTPSNFNCIHDQIFNKMPGPFVSSSGNYFEVLRYLLLFGVP

SEQ ID NO: 106706 - protein, 127 aa, Setaria italica
  misc_feature (96)..(96): Xaa can be any naturally occurring amino acid
  Transcript Sequence Number=SeqID_40732
PSLVCLKQPYPLPQEYPQSILPSGCTTQDPTEGAKFTANQSYPLSSGYLHSGLLTSGYATQNSTYKGRTHLNPTPYGHLYTDLLCLIHKVTMKVIXTSALTKDAPVHIIMTYMSVSVSVSAKEHLRN

SEQ ID NO: 106707 - protein, 78 aa, Setaria italica
  Transcript Sequence Number=SeqID_40733
  Gene Ontology: Mol. function=oxidoreductase activity
  Homolog annotation: Hit_ID=B6ST56; Match level="QueryCoverage=91%, HitCoverage=12%, E-value=1e-35, Identity=98%"; Hit description=L -ascorbate oxidase
FDAVHLHQVYPRSWTAIYMPLDNVGMWNVRSESWARQYLGQQFYLRVYSPANSWRDENPIPKNALLCGRASGRRTRPL

SEQ ID NO: 106708 - protein, 395 aa, Setaria italica
  Transcript Sequence Number=SeqID_40734
  Gene Ontology: Mol. function=oxidoreductase activity
  Homolog annotation: Hit_ID=B6U7J6; Match level="QueryCoverage=99%, HitCoverage=72%, E-value=0.0, Identity=86%"; Hit description=L -ascorbate oxidase
  Pfam annotation: Domain name=Cu-oxidase; Domain location=108-246; Score=192.9; E_value=8.9e-55; Accession=PF00394.14; Description =Multicopper oxidase
  Pfam annotation: Domain name=Cu-oxidase_2; Domain location=326-395; Score=-20.4; E_value=0.09; Accession=PF07731.6; Description =Multicopper oxidase
  Pfam annotation: Domain name=Cu-oxidase_3; Domain location=1-98; Score=133.8; E_value=5.6e-37; Accession=PF07732.7; Description =Multicopper oxidase
  Pfam module annotation: Pfam domain module=Cu-oxidase::Cu-oxidase _2::Cu-oxidase_3; Domain location=108-246::326-395::1-98
TNQFPGPQIEAVTNDNLIINVFNKLNEPFLLSWSGLQQRRNSFEDGVAGTTCPIPPGGNFTYIMQAKDQIGTYYYFPSLAFHKAAGGFGGIRVLSRPQIPVPFPPPASDYTVLIGDWYKANHTDLRYMLDSGKALGFPDGLLINGRSWNGYTFTVEPGRTYRFRISNVGLATSLNIRFQGHTMKLVEVEGSHTMQTTYSSLDVHLGQSYSVLLTADQPGFDYAVVVSTRFTTKIISTTAVLHYTNSAGKAPGPLPGGPTIQIDWSLNQARSIRWNLTASGPRPNPQGSYHYGLVPVTRTIRLANSAAIINGKQRYAVNSVSYVSPDTPLKVADYYKIGGVFSVGTIADSPSYGSAYLQTSVMGANYRDYVEVVFENNEDEVQSWHIDGYAFWVVG

SEQ ID NO: 106709 - protein, 403 aa, Setaria italica
  Transcript Sequence Number=SeqID_40735
  Gene Ontology: Mol. function=oxidoreductase activity
  Homolog annotation: Hit_ID=B6ST56; Match level="QueryCoverage=100%, HitCoverage=73%, E-value=0.0, Identity=93%"; Hit description=L -ascorbate oxidase
  Pfam annotation: Domain name=Cu-oxidase; Domain location=20-158; Score=183.6; E_value=5.7e-52; Accession=PF00394.14; Description =Multicopper oxidase
  Pfam annotation: Domain name=Cu-oxidase_2; Domain location=238-378; Score=125.2; E_value=2.2e-34; Accession=PF07731.6; Description =Multicopper oxidase
  Pfam module annotation: Pfam domain module=Cu-oxidase::Cu-oxidase_2; Domain location=20-158::238-378
GGIRVLSRPRIPVPFDPPAGDFTILAGDWFKLNHTDLKGILDSGNDLPFPDGLLINGQGWNGNRFTVDQGKTYRFRVSNVGIATSVNIRIQGHSMLLVEVEGSHSMQSTFTSIDIHLGQSYSFLVTADQPPADYSIIVSTRFTTPVLTTNAILHYSNANGAATVPPPPAPTTEIDFSLNQARSIRWNLTASGPRPNPQGSYHYGLVNTTRTIRLANSRATINGKLRYAVNSVSFIPADTPLKVADFYNISGVFTLGSMPDNPTGGGAYLQTSVMAANMREYVEVIFENAENFVQSWHIDGYAFWVVGMDGGQWTPASRQGYNLRDAIARYTLQVYPQSWTAIYMPLDNVGMWNVRSESWARQYLGQQFYLRVYSPANSWRDENPIPKNALLCGRASGRRTRPL

SEQ ID NO: 106710 - protein, 209 aa, Setaria italica
  Transcript Sequence Number=SeqID_40736
FDYLLDYRQDFNPSTKLRRTGKSSSSDASDDAREFMALPWGYNQGLPSFIDWKNDVPCGDSKARECMALPWVCVNDISSSDWKRGKQVSNLLLEDVEPCVHRRTASANELSLNVQTASNDQHGWNPMLSVKLTESFRDRLSFPYQIEEQHHAVPYAVFNTSWQPDYHSSTKQCVSSSVRLEREDPKEAGSFDHDNSDARFATTFEYKLT

SEQ ID NO: 106711 - protein, 62 aa, Setaria italica
  Transcript Sequence Number=SeqID_40737
SNTHFFLRDVLLFCYLVFNLLCSSVCDRFLCPDVRPLFEEHGDVLEVALIKDRKTGEQQGAL

SEQ ID NO: 106712 - protein, 697 aa, Setaria italica
  Transcript Sequence Number=SeqID_40738
  Gene Ontology: Mol. function=nucleic acid binding; Cellular component= ribonucleoprotein complex; Biological process=multicellular organismal development
  Homolog annotation: Hit_ID=B6E012; Match level="QueryCoverage=85%, HitCoverage=84%, E-value=1e-146, Identity=63%"; Hit description =Flowering time control protein
  Pfam annotation: Domain name=RRM_1; Domain location=112-183; Score =69.2; E_value=1.5e-17; Accession=PF00076.14; Description=RNA recognition motif. (a.k.a. RRM, RBD, o
  Pfam annotation: Domain name=RRM_1; Domain location=203-273; Score =68.6; E_value=2.3e-17; Accession=PF00076.14; Description=RNA recognition motif. (a.k.a. RRM, RBD, o
  Pfam annotation: Domain name=WW; Domain location=576-605; Score=42.0; E_value=2.3e-09; Accession=PF00397.18; Description=WW domain
  Pfam module annotation: Pfam domain module=RRM_1::RRM_1::WW; Domain location=112-183::203-273::576-605
MHRGGGDRSGGRFQRGPSRWSSGGGGGGGGGGGSPPHRYSRGGEEGGGGGGRFHPYRGSSDYSGGGGGGGGYRGGGGVDDFGKQRHRYGGGNRGGGRGDFQDHDSRSNYVKLFVGSVPRTATEEDVRPLFEEHGDVLEVALIKDRKTGEQQGCCFVKYATSEEADRAIRGLHNQYTLPGAMGPVQVRYADGERERHGAIEHKLFVASLNKQATPKEIEEIFAPYGHVEDVYIMRDGMRQSRGCGFVKFSSKEPAVAAMNALSGTYIMRGCEQPLVIRFADPKRPRPGESRGGPAFGGPGFSPRSDAALVIRPTANLDEPRGRHMPSDSWRPSSPRSMASNQYNNFGSDNPLALGGAVTSADTAGFRPPMFPGNGSLSTQTAVPTSSHVGMNPPMVQGHHLGSQQIPPMQKPPGPPQNFPVQLQNAQQGQPLQGSIQQIGQLQVPQSTGPVSYGQNMPSMQLPGQPPASQPLMQQNASLGALQAPSSVQSNPMQGQQQLPTSVAPQMLQQSMQQMPSQAPQLLLQQQAALQSSYQSSQQAIYQLQQQLQLMQQQTNLNQQPPAQVPKQQVGSPAVSSTCNWTEHTSPEGFKYYYNSVTRESKWEKPEEFVLYEQQQQKLLLLQQHQQKIAAQQLQSPPQGQSLPSMQPIQQLSQAQGQTQMPMKQQELNYSQLQAAGSIDPSRIQQGIQAAQERAWKS

SEQ ID NO: 106713 - protein, 109 aa, Setaria italica
  Transcript Sequence Number=SeqID_40739
  Gene Ontology: Mol. function=RNA polymerase II transcription factor activity; Cellular component=transcription factor TFIIA complex; Biological process=transcription initiation from RNA polymerase II promoter
  Homolog annotation: Hit_ID=Q0DLD3; Match level="QueryCoverage=95%, HitCoverage=98%, E-value=1e-46, Identity=83%"; Hit description =Transcription initiation factor IIA subunit 2
  Pfam annotation: Domain name=TFIIA_gamma_C; Domain location=52-101; Score=114.0; E_value=5e-31; Accession=PF02751.6; Description =Transcription initiation factor IIA, gamma subunit, beta-barrel domain
  Pfam annotation: Domain name=TFIIA_gamma_N; Domain location=2-50; Score=117.6; E_value=4.1e-32; Accession=PF02268.8; Description =Transcription initiation factor IIA, ga
  Pfam module annotation: Pfam domain module=TFIIA_gamma_C::TFIIA_gamma_ N; Domain location=52-101::2-50
MATFELYRRSTIGTCLTDTLDELVSSGAVSPELAIQVLVQFDKSMTDALDSQVKSKVNIKGHLHTYRFCDNVWTFILTDATFKSEEISETLSKVKIVACDSKLLQPPQP

SEQ ID NO: 106714 - protein, 80 aa, Setaria italica
  Transcript Sequence Number=SeqID_40740
VYNINLFSIQQNRFTIFLTNHAEELPIILKENKHSHSKQQITTPAGWIRTSTRTAQHCRLDWDINHTAPSNLLLNSTNII

SEQ ID NO: 106715 - protein, 115 aa, Setaria italica
  Transcript Sequence Number=SeqID_40741
  Homolog annotation: Hit_ID=B0BLJ6; Match level="QueryCoverage=71%, HitCoverage=54%, E-value=2e-25, Identity=63%"; Hit description =CM0545.540.nc protein
  Pfam annotation: Domain name=Cupin_3; Domain location=28-106; Score =26.5; E_value=4.4e-05; Accession=PF05899.4; Description=Protein of unknown function (DUF861)
GGALLGRPLEDVYKVRVERGAVARARAEALRVMETWSSWRTGGRCRMPWDWQVDQLVYIVSGEVKVIPAGAVHGDDYMHFVAGDLVRYPRWFEADLYFDGPYEERYRFLAYGDDN

SEQ ID NO: 106716 - protein, 81 aa, Setaria italica
  Transcript Sequence Number=SeqID_40742
  Gene Ontology: Mol. function=ATP binding
  Homolog annotation: Hit_ID=Q84T10; Match level="QueryCoverage=82%, HitCoverage=2%, E-value=2e-12, Identity=56%"; Hit description=Unknow protein
GKTKGKRKFEENESPSSSCKLPKKQQKLQKHEASPNCFLSIGKLENFITTWKETCREHPVQQVCLVLMVKSMFFLHNCKSK

SEQ ID NO: 106717 - protein, 134 aa, Setaria italica
  misc_feature (72)..(72): Xaa can be any naturally occurring amino acid
  Transcript Sequence Number=SeqID_40743
  Gene Ontology: Mol. function=ATP binding
  Homolog annotation: Hit_ID=Q84T10; Match level="QueryCoverage=100%, HitCoverage=5%, E-value=2e-37, Identity=67%"; Hit description=Unknow protein
ERLGLKSETNKKPALEISKARESGKKGKLREKRKFEENESPSSSCKLPKKQQKLQKHEASPNCFLSIGKLEXFITTWKETCREHPVQQVLEMIANYYGRTPSEKKKIINFCSQYPGIGLLNVAVKSMGCGLLDS

SEQ ID NO: 106718 - protein, 37 aa, Setaria italica
  Transcript Sequence Number=SeqID_40744
YGLKFFPPLFYCMYVEAIGNFCACLQCGDYIRSIAAD

SEQ ID NO: 106719 - protein, 79 aa, Setaria italica
  Transcript Sequence Number=SeqID_40745
  Gene Ontology: Mol. function=DNA binding; Biological process =regulation of transcription
  Homolog annotation: Hit_ID=B6U2E0; Match level="QueryCoverage=88%, HitCoverage=37%, E-value=4e-33, Identity=95%"; Hit description=DNA binding protein
  Pfam annotation: Domain name=Myb_DNA-binding; Domain location=9-56; Score=49.6; E_value=1.2e-11; Accession=PF00249.23; Description=Myb -like DNA-binding domain
VSNEYDRRGVPWTEEEHRLFLEGLEKYGRGDWRNISRWSVKTRTPTQVASHAQKYFIRQASAGSRGDTKRKSIHDITTP

SEQ ID NO: 106720 - protein, 57 aa, Setaria italica
  Transcript Sequence Number=SeqID_40746
  Subcellular localization annotation: CTP_CleavageSite=48; ConfidenceScore=5.39e-01
MGSAVQLIGLLGVSSPPLAQSHCSCSGGAKKQVCSLRAPRQQSRRRLRVAHAVEMGA

SEQ ID NO: 106721 - protein, 86 aa, Setaria italica
  Transcript Sequence Number=SeqID_40747
LAHGNHSSSTETCLVAGAVQQRIGNYQKQIDHPCKFFRTGIYNALLVNFGLLPAGTFTTWHRNQQVSFLQRHTNQEKEYIKPCSGG

SEQ ID NO: 106722 - protein, 107 aa, Setaria italica
  Transcript Sequence Number=SeqID_40748
SKSHVDIPVDKRNSESPPSKRKLKDLEHTTRRASRMPVVPMTRDLKNDSTPCAKAHASSVRNPFRNSRLALPSGSTNPLPNKAASNSKLEAISSIAGPSLHWRETRA

SEQ ID NO: 106723 - protein, 84 aa, Setaria italica
  Transcript Sequence Number=SeqID_40749
  Subcellular localization annotation: CTP_CleavageSite=43; ConfidenceScore=5.18e-01
FFKKKCPFIANNNNNNILQRPQLQMPQHDSTNRKGSSQLQACNSKTGSQLAKYARLLKEKSFCYRHELYIGVVMDHSPHASFTI

SEQ ID NO: 106724 - protein, 215 aa, Setaria italica
  Transcript Sequence Number=SeqID_40750
  Gene Ontology: Mol. function=protein binding; Cellular component =integral to membrane; Biological process=protein amino acid phosphorylation
  Homolog annotation: Hit_ID=B9SW31; Match level="QueryCoverage=92%, HitCoverage=90%, E-value=4e-63, Identity=59%"; Hit description =Serine-threonine protein kinase, plant-type, putative
  Pfam annotation: Domain name=LRRNT_2; Domain location=29-69; Score =57.2; E_value=6.5e-14; Accession=PF08263.4; Description=Leucine rich repeat N-terminal domain
  Pfam annotation: Domain name=LRR_1; Domain location=121-143; Score =13.4; E_value=0.83; Accession=PF00560.25; Description=Leucine Rich Repeat
  Pfam annotation: Domain name=LRR_1; Domain location=145-167; Score =17.5; E_value=0.057; Accession=PF00560.25; Description=Leucine Rich Repeat
  Pfam annotation: Domain name=LRR_1; Domain location=169-201; Score =5.1; E_value=33; Accession=PF00560.25; Description=Leucine Rich Repeat
  Pfam annotation: Domain name=LRR_1; Domain location=73-95; Score=7.0; E_value=14; Accession=PF00560.25; Description=Leucine Rich Repeat
  Pfam annotation: Domain name=LRR_1; Domain location=97-119; Score =15.1; E_value=0.3; Accession=PF00560.25; Description=Leucine Rich Repeat
  Pfam module annotation: Pfam domain module=LRRNT_2::LRR_1::LRR_1::LRR_ 1::LRR_1::LRR_1; Domain location=29-69::121-143::145-167::169-201::73- 95::97-119
MAAPVAKRTLSLAACAAVLMAVSLAPVAANEEGDALMALRHSVEDPDGVLASWDPNLVNPCTWVHVGCNDDNRVNRIELANMRLSGPLPAELGKLEQLQYMEMSGNNLQGPIPEEFGDLKNLISMDLYNNDISGHLPRTLGNLKSLQFLRIDHNRLTGPIPRELSELPNLANVDFSSNDLCGTPETSGPFQNVPLSSFSNNPRLRQGPGAYDAHC

SEQ ID NO: 106725 - protein, 64 aa, Setaria italica
  Transcript Sequence Number=SeqID_40751
  Gene Ontology: Mol. function=zinc ion binding; Cellular component =intracellular
  Homolog annotation: Hit_ID=B6U5R9; Match level="QueryCoverage=100%, HitCoverage=12%, E-value=2e-28, Identity=92%"; Hit description=C2H2 zinc finger protein
RKALLVCRVIAGRVHKPLENLREFAGQTGFDSLAGKVGPYSNIEELYLLNPRALLPCFVVICKP

SEQ ID NO: 106726 - protein, 368 aa, Setaria italica
  misc_feature (337)..(337): Xaa can be any naturally occurring amino acid
  Transcript Sequence Number=SeqID_40752
  Gene Ontology: Mol. function=kinase activity; Cellular component =mitochondrion
  Homolog annotation: Hit_ID=Q2HTV1; Match level="QueryCoverage=97%, HitCoverage=57%, E-value=1e-154, Identity=70%"; Hit description =Protein kinase-like
  Pfam annotation: Domain name=ABC1; Domain location=22-143; Score =144.0; E_value=4.7e-40; Accession=PF03109.8; Description=ABC1 family
  Pfam annotation: Domain name=APH; Domain location=36-264; Score= -22.3; E_value=0.1; Accession=PF01636.15; Description=Phosphotransfera se enzyme family
  Pfam module annotation: Pfam domain module=ABC1::APH; Domain location= 22-143::36-264
LAKLHSAAPAHGFAYSKAAIEKAFGRELSEIFESFDENPVASGSIAQIHRATLKHQHPGKHVAVKVRHPGVGESIKRDFLLINLLAKASNIVPGLSWLRLDESVRQFAVFMMSQVDLSREAAHLSRFIYNFRRWRHVSFPKPLYPLVHPSVLVETFENGESVSRFMDEIEGNARMKKDLAHIGTYAFLKMLLEDNFIHADMHPGNILVRLNESKLSRRRFFRAKPHIVFLDVGMTAELTRADRDNLQQFFKAVATRDGLTAAKCTLQLSKNQSCPNPVAFTEELDKTFTFWGTPEGDVFHPVECMHQLLDTVRRHKVNIDGNICTVMVTILVLEGWXQRKLDPGFDIMHTLKTLLLEKDVKQPVDFFS

SEQ ID NO: 106727 - protein, 47 aa, Setaria italica
  Transcript Sequence Number=SeqID_40753
  Pfam annotation: Domain name=DUF617; Domain location=1-47; Score= -58.4; E_value=4.9e-06; Accession=PF04759.5; Description=Protein of unknown function, DUF617
GGTFMYMRARFERVVGSRDSEAFYMMNPDSSTGGNGGPELSIYLLRV

SEQ ID NO: 106728 - protein, 117 aa, Setaria italica
  Transcript Sequence Number=SeqID_40754
  Gene Ontology: Mol. function=binding
  Homolog annotation: Hit_ID=Q8H9E4; Match level="QueryCoverage=60%, HitCoverage=6%, E-value=1e-30, Identity=85%"; Hit description =Putative TPR-containing nuclear phosphoprotein
SVKANKLLHPFHFILLVLTACLCFWVHCTPRSASFLEYEILLSASQARNLLKKAGEDVPVELLNGIGLLHFEKGEFEMAEQSFKEALGDGLWVSIMDGKVGSSMVNWSGQYKDQSFF

SEQ ID NO: 106729 - protein, 942 aa, Setaria italica
  misc_feature (37)..(37): Xaa can be any naturally occurring amino acid
  misc_feature (51)..(51): Xaa can be any naturally occurring amino acid
  Transcript Sequence Number=SeqID_40755
  Gene Ontology: Mol. function=binding; Cellular component=nuclear speck; Biological process=embryonic development ending in birth or egg hatching
  Homolog annotation: Hit_ID=Q8H9E4; Match level="QueryCoverage=99%, HitCoverage=87%, E-value=0.0, Identity=81%"; Hit description =Putative TPR-containing nuclear phosphoprotein
  Pfam annotation: Domain name=TPR_1; Domain location=182-215; Score =11.1; E_value=0.27; Accession=PF00515.20; Description=Tetratricopepti de repeat
  Pfam annotation: Domain name=TPR_1; Domain location=219-252; Score =20.6; E_value=0.0065; Accession=PF00515.20; Description =Tetratricopeptide repeat
  Pfam annotation: Domain name=TPR_1; Domain location=253-286; Score =27.6; E_value=5e-05; Accession=PF00515.20; Description =Tetratricopeptide repeat
  Pfam annotation: Domain name=TPR_1; Domain location=35-72; Score=3.3; E_value=2.4; Accession=PF00515.20; Description=Tetratricopeptide repeat
  Pfam annotation: Domain name=TPR_1; Domain location=439-472; Score =12.7; E_value=0.18; Accession=PF00515.20; Description=Tetratricopepti de repeat
  Pfam annotation: Domain name=TPR_1; Domain location=595-628; Score =29.4; E_value=1.5e-05; Accession=PF00515.20; Description =Tetratricopeptide repeat
  Pfam annotation: Domain name=TPR_1; Domain location=631-664; Score =14.1; E_value=0.12; Accession=PF00515.20; Description=Tetratricopepti de repeat
  Pfam annotation: Domain name=TPR_1; Domain location=74-107; Score =33.4; E_value=8.8e-07; Accession=PF00515.20; Description =Tetratricopeptide repeat
  Pfam annotation: Domain name=TPR_2; Domain location=182-215; Score =12.2; E_value=1; Accession=PF07719.9; Description=Tetratricopeptide repeat
  Pfam annotation: Domain name=TPR_2; Domain location=219-252; Score =14.9; E_value=0.33; Accession=PF07719.9; Description=Tetratricopeptid e repeat
  Pfam annotation: Domain name=TPR_2; Domain location=253-286; Score =25.7; E_value=0.00019; Accession=PF07719.9; Description =Tetratricopeptide repeat
  Pfam annotation: Domain name=TPR_2; Domain location=287-319; Score =1.9; E_value=19; Accession=PF07719.9; Description=Tetratricopeptide repeat
  Pfam annotation: Domain name=TPR_2; Domain location=35-72; Score=5.6; E_value=6.9; Accession=PF07719.9; Description=Tetratricopeptide repeat
  Pfam annotation: Domain name=TPR_2; Domain location=439-472; Score =14.0; E_value=0.61; Accession=PF07719.9; Description=Tetratricopeptid e repeat
  Pfam annotation: Domain name=TPR_2; Domain location=556-589; Score =7.9; E_value=3.5; Accession=PF07719.9; Description=Tetratricopeptide repeat
  Pfam annotation: Domain name=TPR_2; Domain location=595-628; Score =30.4; E_value=7.2e-06; Accession=PF07719.9; Description =Tetratricopeptide repeat
  Pfam annotation: Domain name=TPR_2; Domain location=631-664; Score =23.3; E_value=0.001; Accession=PF07719.9; Description=Tetratricopepti de repeat
  Pfam annotation: Domain name=TPR_2; Domain location=74-107; Score =33.3; E_value=9.5e-07; Accession=PF07719.9; Description =Tetratricopeptide repeat
  Pfam annotation: Domain name=TPR_4; Domain location=182-207; Score =3.1; E_value=18; Accession=PF07721.6; Description=Tetratricopeptide repeat
  Pfam annotation: Domain name=TPR_4; Domain location=595-620; Score =10.7; E_value=2.3; Accession=PF07721.6; Description=Tetratricopeptide repeat
  Pfam annotation: Domain name=TPR_4; Domain location=631-656; Score =1.4; E_value=30; Accession=PF07721.6; Description=Tetratricopeptide repeat
  Pfam annotation: Domain name=TPR_4; Domain location=74-99; Score=6.2; E_value=8; Accession=PF07721.6; Description=Tetratricopeptide repeat
  Pfam module annotation: Pfam domain module=TPR_1::TPR_1::TPR_1::TPR _1::TPR_1::TPR_1::TPR_1::TPR_1::TPR_2::TPR_2::TPR_2::TPR_2::TPR _2::TPR_2::TPR_2::TPR_2::TPR_2::TPR_2::TPR_4::TPR_4::TPR_4::TPR_4; Domain location=...
  Pfam module annotation: Domain location=182-215::219-252::253-286::35- 72::439-472::595-628::631-664::74-107::182-215::219-252::253-286::287- 319::35-72::439-472::556-589::595-628::631-664::74-107::182-207::595 -620::631-656::74-99
IGCYVAKGELQMASDSMKIVLDEDGNNFPALLGQASXYFLMGEAEQQHKKXLEHYRNALDLYKRALRAYSDCPAAVRLGIAFCRYKLGQVEKARQAFQRVLQLDPQNVDALVAVAIMDLQTNEAGGIRRGMEKMKIAFEIYPYCTLALNHLANHYFFTGQHFVVEQLTETALSSSNHGLLKSHAYYNLARSYHSKGDIETAGRYYMASVKEISKPQDFVLPYVGLGQIQLKFGDFKSSLTSFEKVLEVHPENCESLKAIGHIHAKSGETEKAIETFKKVTRIDPKDHQAFVELGELLVESDWAAAMEYLKTARNLLKKAGEDVPVELLNGIGLLHFEKGEFEEKGEFEMAEQSFKEALGDGLWVSIMDGKVGSSMVNWSGQYKDQSFFHQLEEEGVPLELHSNKVTTLFNYARLLEERHDSVRASLFYRFIIFKYPDYIDAYLRLAAIAKQRNNAQLSIELVGDALKIDEKNSNALSMLGSLELQSDETWLTAKEHFRNAKEATKGDAYSLLQLGNWNYFAANRPEKKAPKFEATHREKAMELYQSQVLKQHRSNMFAANGIGILYAEKAKWDVAKELFTQVHEAASGSIFVHMPDVWINLAHVYFAQGHFQQAVKMYQNCLRKFFNNTDATILLYLARTHYEAEQWQDCRKTLLRAIHLAPSNYLLRFNVGVSMQKFSASTLQKTKRTVDEVRATVSELQNAIRVFSLLSVASTYHSHGFDERKIETHVEYCKHLLDAAKVHRDAAEQAEQQNKQKMEVARQIALAEEARRRAEEQRKFQLERRREEDELKQIKQQEEHFERVKEQWKTSSHTPGKRKDRSKNEDEEGVSEKRRRRGNKRRKDHKTKMQYGEEGEDEYRDEPEGEDDYANLLRDNDGDNSERAPDHLLAAAGLEDSDAEDDMGHPQSAIERKRRAWSESEDDEPVQRPAAQASPGTNDLSE

SEQ ID NO: 106730 - protein, 175 aa, Setaria italica
  misc_feature (158)..(158): Xaa can be any naturally occurring amino acid
  Transcript Sequence Number=SeqID_40756
  Gene Ontology: Mol. function=zinc ion binding; Cellular component =intracellular
  Homolog annotation: Hit_ID=UPI0001A7B01D; Match level="QueryCoverage =78%, HitCoverage=72%, E-value=6e-39, Identity=58%"; Hit description =binding
  Pfam annotation: Domain name=PLATZ; Domain location=22-144; Score =235.4; E_value=1.4e-67; Accession=PF04640.6; Description=PLATZ transcription factor
MKREPVPSWLELLLATQFFTTCASHPLATRNECNLFCIQCEVSPAAFCYYCRSCDHSTHRVIQIRRSSYHNVVRVSEIEDILDISDVQTYIINSARVVFLNERPQQRGCGVSLCKAPTLSAHNCETCGRGLLDAFHFCSLGCHLRSTKKDMNRTTMVXNSSQCSEKDDVTRSDDV

SEQ ID NO: 106731 - protein, 79 aa, Setaria italica
  Transcript Sequence Number=SeqID_40757
  Subcellular localization annotation: CTP_CleavageSite=33; ConfidenceScore=5.29e-01
MSTSSSICSSSAASTRGTDRSWGAGRSRTERERAAANSSAVQDQTAKDAAESPVSVHERWFSDRSSPSSNSLLGNRSQH

SEQ ID NO: 106732 - protein, 170 aa, Setaria italica
  Transcript Sequence Number=SeqID_40758
MDTFDLPNAINSCIMHGRLALLFAWCFLLGMDPSLSIEIIALGLLAEGNSEVDFLRRINCFHGDHFLALVATGKQFIDALHGNPVDLKSRSAREFHSQVMLGICFFLNNVCYKVLTDLRQKAEHGVAIHDIEESPSSNYHVLPQHMKDRHHVSTSYHQYQGNHSKSRKCA

SEQ ID NO: 106733 - protein, 179 aa, Setaria italica
  misc_feature (121)..(121): Xaa can be any naturally occurring amino acid
  misc_feature (138)..(138): Xaa can be any naturally occurring amino acid
  misc_feature (156)..(156): Xaa can be any naturally occurring amino acid
  Transcript Sequence Number=SeqID_40759
  Gene Ontology: Mol. function=transferase activity, transferring glycosyl groups; Biological process=metabolic process
  Homolog annotation: Hit_ID=C4MF47; Match level="QueryCoverage=53%, HitCoverage=20%, E-value=5e-33, Identity=72%"; Hit description=UDP -glycosyltransferase UGT74H5
DLPTFLTDPDDRAYLDLLVNQFAGLDTADHVLVNSFYELQPQESEYMASAWRAKTVGPTVPSAYLDNRLPDDTSYGFHLYTPLTAMTRAWLVAMPQWSDQTMNAKYIEDVWQVGVRVRPDXGGVVRKEVERCVREVGXRSVECMQNPANWKEKARXAMREGGSSDKNILEFISKLGSKV

SEQ ID NO: 106734 - protein, 156 aa, Setaria italica
  misc_feature (19)..(19): Xaa can be any naturally occurring amino acid
  misc_feature (31)..(31): Xaa can be any naturally occurring amino acid
  Transcript Sequence Number=SeqID_40760
  Gene Ontology: Mol. function=protein serine/threonine kinase activity; Biological process=protein amino acid phosphorylation
  Homolog annotation: Hit_ID=B9T4K4; Match level="QueryCoverage=41%, HitCoverage=8%, E-value=4e-10, Identity=44%"; Hit description=Kinase, putative
VASEEVILDGNDISKEIIXYATSNAITDIVXASTKNTFIRRFRNPDVPTCLMKMAPDYCTVHVIHKAKAIQVKAAKAPAPFSTLPPKQYSQPNIESDVSRASRGDWRKTSHTSSPVANRNSVDRLSAYAKAPSRDRPLSGARTAPQKDFDDYIEEY

SEQ ID NO: 106735 - protein, 288 aa, Setaria italica
  misc_feature (99)..(99): Xaa can be any naturally occurring amino acid
  Transcript Sequence Number=SeqID_40761
  Gene Ontology: Mol. function=nucleotide binding; Biological process =defense response
  Homolog annotation: Hit_ID=Q8LJX9; Match level="QueryCoverage=97%, HitCoverage=29%, E-value=1e-116, Identity=71%"; Hit description =Putative stripe rust resistance protein Yr10
QSNTDQAIPCAHMNMLQVRSVVAFSLAFNLMPALGTFKVLRVLDLKSCHLSQDCDLKHLGNLFHLRYLGIGRTYSDQLPDDVGNLRYLQTLDVVGSSFXKLPSTVVQLRHLMCLCIDQNTRVPNGIGSLTSLEDLSTLYICDDSMNILEELCHLTKLRVLEIFLVPAGNVTLGKSLVMSLCKLQKVQSLTIWTTGGECNFDAWVAPRHLRRLQLQYCWFSRLPDWVNSSLQDLSSLWISVRELHQDDLEILGRLPALRYLYLMVDHENLKIPRRFVIGTSSFPCLVGC

SEQ ID NO: 106736 - protein, 196 aa, Setaria italica
  Transcript Sequence Number=SeqID_40762
  Gene Ontology: Mol. function=aspartic-type endopeptidase activity; Cellular component=apoplast; Biological process=proteolysis
  Homolog annotation: Hit_ID=B6TNN1; Match level="QueryCoverage=99%, HitCoverage=42%, E-value=1e-63, Identity=66%"; Hit description =Aspartic proteinase nepenthesin-2
MASVPKLLLLLFFCSCHSLIAHAGDDRSYTVLSLDSLKSDAVCSERKVPLPGAATVPLHHRHGPCSPLNITKMPTLKEMLRRDQLRAAYIQRKLSAGAKGGAGDVQQSDATVPTKLGTYLDTLEYLITVVIGSPGVTQTMLIDTGSDVSWVQCKPCSQCHSQADPLFDPSSSSTYSPFSCSSATCAQLGQEGNGCS

SEQ ID NO: 106737 - protein, 317 aa, Setaria italica
  Transcript Sequence Number=SeqID_40763
  Gene Ontology: Mol. function=aspartic-type endopeptidase activity; Biological process=proteolysis
  Homolog annotation: Hit_ID=B6TNN1; Match level="QueryCoverage=100%, HitCoverage=69%, E-value=1e-126, Identity=75%"; Hit description =Aspartic proteinase nepenthesin-2
  Pfam annotation: Domain name=Asp; Domain location=6-316; Score= -117.7; E_value=1.3e-06; Accession=PF00026.15; Description=Eukaryotic aspartyl protease
  Subcellular localization annotation: CTP_CleavageSite=47; ConfidenceScore=5.24e-01
TTIRTTGSDVSWVQCKPCSQCHSQADPLFDPSSSSTYSPFSCSSATCAQLGQEGNGCSNSQCQYIVRYGDGSSTTGTYSSDTLALGSNTVTNFQFGCSQVGSGFDDQTAGLMGLGGGTQSLVSQTAGTFGTAFSYCLPATSSSSGFLTLGAGTGSSGFVRTPMLRSSQVLTFYGVRLQAIRVGGRQLNIPSSAFSAGEIMDSGTVITRLQRTAYSALSSAFKAGMKQYPRAPSSGILDTCFDFSGQRSITIPTVALVFSGGAVVNLDANGIILGSCLAFAGNSDDSSFGIIGNVQQRTFEVLYDVGGGSVGFRAGAC

SEQ ID NO: 106738 - protein, 209 aa, Setaria italica
  Transcript Sequence Number=SeqID_40764
  Gene Ontology: Mol. function=lyase activity
  Homolog annotation: Hit_ID=B6TJY9; Match level="QueryCoverage=98%, HitCoverage=55%, E-value=1e-106, Identity=89%"; Hit description =Pectate lyase 4
  Pfam annotation: Domain name=Pec_lyase_C; Domain location=2-112; Score=18.4; E_value=2.4e-09; Accession=PF00544.11; Description =Pectate lyase
PGSTNIWIDRCTLADYDDGLIDITRQSTDITVSRCHFARHDKTMLIGADPTHIGDRCIRVTIHHCFFDGTRQRHPRLRFGKVHLYNNYTRNWGIYAVCASVEAQVVSQCNIYEAGGGPPKKTTVFKYMPEKAGDREDVVAGLVRSEGDAFLNGALPCLIGGPAPGAQEAVFRPEHYYPRWTMEPASPALKDTIQLCAGWQPVPRPPDEC

SEQ ID NO: 106739 - protein, 118 aa, Setaria italica
  Transcript Sequence Number=SeqID_40765
  Gene Ontology: Mol. function=serine-type endopeptidase inhibitor activity; Cellular component=extracellular region
  Homolog annotation: Hit_ID=P81713; Match level="QueryCoverage=61%, HitCoverage=98%, E-value=2e-17, Identity=61%"; Hit description =Bowman-Birk type trypsin inhibitor
  Pfam annotation: Domain name=Bowman-Birk_leg; Domain location=51-77; Score=28.1; E_value=3.6e-05; Accession=PF00228.12; Description =Bowman-Birk serine protease inhibitor family
  Pfam annotation: Domain name=Bowman-Birk_leg; Domain location=79-108; Score=1.8; E_value=3.9; Accession=PF00228.12; Description=Bowman-Birk serine protease inhibitor family
  Pfam module annotation: Pfam domain module=Bowman-Birk_leg::Bowman -Birk_leg; Domain location=51-77::79-108
PNYCRSLSIVLLVTLAVVAVLAALPLGKGHGGEEGGGAAPGNDANARAWPCCDTCGVCTRSLPPICSCRDLSPGGCHPACRNCLQSTTGGVRVAPLFQCTDFITNFCKRRCTPAAAGA

SEQ ID NO: 106740 - protein, 105 aa, Setaria italica
  Transcript Sequence Number=SeqID_40766
MAESKRFDTKSPGCLEGLFNFLALNQRLQMPKMIAYRKHSEGSNNTLRVKVEKPKNRSEKDEAIPKEANSNSPTGKARTFIWRTLMFKKKTPEKDQKKSSSPAST

SEQ ID NO: 106741 - protein, 110 aa, Setaria italica
  Transcript Sequence Number=SeqID_40767
RGWMDGWMGCGAARRGAVSKAGRAGNKSRCRWALLMPTKKKRDGDVSVGCGLGFIPGSHRVYICPRHASPRRPAFATCLMSRHGSPFTPSEASRQTPGEGKPAINGGLDD

SEQ ID NO: 106742 - protein, 252 aa, Setaria italica
  misc_feature (15)..(15): Xaa can be any naturally occurring amino acid
  Transcript Sequence Number=SeqID_40768
  Gene Ontology: Mol. function=nucleotide binding; Biological process =defense response
  Homolog annotation: Hit_ID=B9RGC6; Match level="QueryCoverage=96%, HitCoverage=21%, E-value=9e-33, Identity=40%"; Hit description =Leucine-rich repeat-containing protein, putative
  Pfam annotation: Domain name=LRR_1; Domain location=136-157; Score =7.5; E_value=11; Accession=PF00560.25; Description=Leucine Rich Repeat
  Pfam annotation: Domain name=LRR_1; Domain location=159-180; Score =12.2; E_value=1.4; Accession=PF00560.25; Description=Leucine Rich Repeat
  Pfam annotation: Domain name=LRR_1; Domain location=182-204; Score =7.4; E_value=11; Accession=PF00560.25; Description=Leucine Rich Repeat
  Pfam module annotation: Pfam domain module=LRR_1::LRR_1::LRR_1; Domain location=136-157::159-180::182-204
KDELVRLWMADGLSXEQRRKRVEMEAGRWFDELLWRSLFETSRSLSNHQKFRVPNLMLDLALRVSKYESLTLSPDDSQVPEHPELVRYATVLCPNDEPLAFDRIYHYQKLRLLKLYPTMKLPSNQVPSAPFSNLTCLRALDLSYTELEVLPDSVGCSIHLRYLNLRNTLIKTLPETVCNLFNLQTLDLRYCYWLMDLPEGMSRLVNMRHLCLHLDWDRVTAFRSMPSGIDKLQSLQTLSRFVVVSRDGGKCN

SEQ ID NO: 106743 - protein, 103 aa, Setaria italica
  misc_feature (83)..(83): Xaa can be any naturally occurring amino acid
  Transcript Sequence Number=SeqID_40769
  Homolog annotation: Hit_ID=B8Q8A1; Match level="QueryCoverage=89%, HitCoverage=52%, E-value=4e-24, Identity=80%"; Hit description=SKIP interacting protein 15
VLDQRVQSLERELDAAISAAARARTEKRQAEAGQRAAELRAQEVTKELENTARVFELHMEELRLKQEEIAKKDSDIKVLEAIXIRTLSSKDDTLVAKMMMDPA

SEQ ID NO: 106744 - protein, 193 aa, Setaria italica
  Transcript Sequence Number=SeqID_40770
  Homolog annotation: Hit_ID=B8Q8A1; Match level="QueryCoverage=66%, HitCoverage=73%, E-value=8e-44, Identity=82%"; Hit description=SKIP interacting protein 15
  Subcellular localization annotation: CTP_CleavageSite=34; ConfidenceScore=5.56e-01
MAAQREKSAAAVAPAPGAAAASGSPSPSSSSGAPAAAASGERWSAAIGNLGELGANVDGLQKLLARKAVFVDDDIFSKASLAADQARTIKVLDQRVQSLERELDAAISAAARARTEKRQAEAGQRAAELRAQEVTKELENTARVFELHMEELRLKQEEIAKKDSDIKVLEAIIRTLSSKDDTLSSKDDDGSSE

SEQ ID NO: 106745 - protein, 150 aa, Setaria italica
  Transcript Sequence Number=SeqID_40771
  Gene Ontology: Mol. function=cysteine-type peptidase activity; Biological process=proteolysis
  Homolog annotation: Hit_ID=Q10A52; Match level="QueryCoverage=69%, HitCoverage=29%, E-value=3e-10, Identity=33%"; Hit description=F-box domain containing protein, expressed
  Pfam annotation: Domain name=F-box; Domain location=27-77; Score =23.7; E_value=0.00077; Accession=PF00646.25; Description=F-box domain
MLSSPPHADIDRILYMEPPLHPHSSYPLMEALMEELIEEILLRIPPDEPAYLMRATLVCKAWRIILFNRGFLRRYREFHKTPPLLGYLFYYNTSIVPQFVPISLASTFSPPEAYDDRTCLDYRHGRAIYIYARRSYIIWDPITGDKHLIK

SEQ ID NO: 106746 - protein, 120 aa, Setaria italica
  Transcript Sequence Number=SeqID_40772
  Gene Ontology: Mol. function=single-stranded DNA binding; Cellular component=nucleus; Biological process=double-strand break repair via homologous recombination
  Homolog annotation: Hit_ID=Q5VQI6; Match level="QueryCoverage=100%, HitCoverage=13%, E-value=3e-40, Identity=68%"; Hit description =Breast cancer 2-like
IYLCDNQKRQWLFLTDGSKFISEQMSEEQDCLLAVSFSSPTTGEDSALFSYTLSGNTVGFSNLVKRQKDQMRQIWVAEATESSTYTLSHEIPRKSHLKEAAASAERWASRSCRKIEELKE

SEQ ID NO: 106747 - protein, 168 aa, Setaria italica
  misc_feature (67)..(67): Xaa can be any naturally occurring amino acid
  misc_feature (142)..(142): Xaa can be any naturally occurring amino acid
  misc_feature (145)..(145): Xaa can be any naturally occurring amino acid
  Transcript Sequence Number=SeqID_40773
  Gene Ontology: Mol. function=aspartyl esterase activity; Cellular component=cell wall; Biological process=cell wall modification
  Pfam annotation: Domain name=Pectinesterase; Domain location=2-163; Score=-15.7; E_value=2e-20; Accession=PF01095.11; Description =Pectinesterase
QVQDPGTQDTLFDNIGRHYLYNCDIQGSIDFIFGNARSLYQGCTLHAVATSYGAIAASQRSSPTEDXGFSFVGCRLTGSGMLYLGRAWGRYARVVYSYCDLSGIVVPQGWSDWGDRTRTKTVLFGEYSCKGPGASTRQRVPXSSXLTYEEARPFLGRSFINGEEWLRL

SEQ ID NO: 106748 - protein, 185 aa, Setaria italica
  misc_feature (59)..(59): Xaa can be any naturally occurring amino acid
  Transcript Sequence Number=SeqID_40774
  Gene Ontology: Mol. function=aspartyl esterase activity; Cellular component=cell wall; Biological process=cell wall modification
  Pfam annotation: Domain name=Pectinesterase; Domain location=1-184; Score=-17.6; E_value=2.8e-20; Accession=PF01095.11; Description =Pectinesterase
IGMGTGRTVITWNARASDIDRSGHQVGTFYSASVAVEADYFCASHITFENSAPAAPPGXRLGQQAVALRLSGDKTMLYRCRILGTQDTLFDNIGRHYLYNCDIQGSIDFIFGNARSLYQGCTLHAVATSYGAIAASQRSSPTEDSGFSFVGCRLTGSGMLYLGRAWGRYARVVYSYCDLRRTIRT

SEQ ID NO: 106749 - protein, 62 aa, Setaria italica
  Transcript Sequence Number=SeqID_40775
MFFHLCFKYVSGDEYDPLDFAFIMAKGGHELHLNSRIAARIPFFPWEVCRPATWSLHSFSEP

SEQ ID NO: 106750 - protein, 112 aa, Setaria italica
  misc_feature (101)..(101): Xaa can be any naturally occurring amino acid
  Transcript Sequence Number=SeqID_40776
  Gene Ontology: Mol. function=nucleic acid binding; Biological process= RNA-dependent DNA replication
  Homolog annotation: Hit_ID=Q60DM2; Match level="QueryCoverage=100%, HitCoverage=13%, E-value=3e-23, Identity=43%"; Hit description=F-box domain containing protein
WKKLWSVKVPSKMKIILRHIAYDFLATGYQLQRRNISAMPGCCFCGKNERVEHCFVMCQFAASIRKGVKHHFDINLGRKHLINANQWLFDLLHRCNEIKQXVVAVVCWHIWK

SEQ ID NO: 106751 - protein, 64 aa, Setaria italica
  Transcript Sequence Number=SeqID_40777
GCLRLVLENDLYAHMDKRLIGTCYVIRFTTKGQLFAATNHQTLYNGLSLFMGGLNGSQATILAL

SEQ ID NO: 106752 - protein, 68 aa, Setaria italica
  Transcript Sequence Number=SeqID_40778
MLLAAGCSIMGTFFLLLSMVDAIQLKFGIVSCGTPLAVGATFGLSVLVVGGLIFYGSTVAYALTHYLP

SEQ ID NO: 106753 - protein, 72 aa, Setaria italica
  Transcript Sequence Number=SeqID_40779
EIAFQQIMYKHASHINRKQTGSIMVQILMYGPWQATYKNSVRLTSTLKTTISPARTGSLFMCKNRMSPCKTE

SEQ ID NO: 106754 - protein, 404 aa, Setaria italica
  Transcript Sequence Number=SeqID_40780
  Gene Ontology: Mol. function=pyridoxal phosphate binding; Cellular component=cytoplasm
  Homolog annotation: Hit_ID=A5A152; Match level="QueryCoverage=100%, HitCoverage=88%, E-value=0.0, Identity=90%"; Hit description =Ornithine--oxo-acid aminotransferase
  Pfam annotation: Domain name=Aminotran_1_2; Domain location=5-368; Score=-110.4; E_value=0.099; Accession=PF00155.13; Description =Aminotransferase class I and II
  Pfam annotation: Domain name=Aminotran_3; Domain location=1-318; Score=476.2; E_value=4.6e-140; Accession=PF00202.13; Description =Aminotransferase class-III
  Pfam module annotation: Pfam domain module=Aminotran_1_2::Aminotran _3; Domain location=5-368::1-318
DPEGNKYIDFLSAYSAVNQGHCHPKVLRALIEQAERLTLSSRAFYNDKFPIFAEYLTSMFGYDMMLPMNTGAEGVETAIKLARKWGYEKKKIPKNEAMLVSCCGCFHGRTLGVISMSCDNDATRGFGPLVPGHLKVDFGDIDGLKKVFEEHGDRICGFLFEPIQGEAGVVIPPDGYLKAVRDLCSKHNILMIADEIQTGIARTGRMLACDWEGIRPDMVILGKALGAGVVPVSAVLADKDIMLCIRPGEHGSTFGGNPLASAVAVASLKVVRDECLVERAAKLGQEFRDQLQKVQQKFPQIIREVRGRGLLNAVDLNNDALSPASAYDICIKLKERGILAKPTHDTIIRLAPPLSISPEELAEASKALSDVLEHDLPQMQKEIKKPESEAEKPVCDRCGRDLYG

SEQ ID NO: 106755 - protein, 102 aa, Setaria italica
  misc_feature (28)..(28): Xaa can be any naturally occurring amino acid
  Transcript Sequence Number=SeqID_40781
MARELRRIGHIPATSEVLLDLDEEDKEXVRLQWHSEKLAIAFVLLRTPPGTQVRVVKNLRVCLDCHAAIKCISQVYNREIIVRDRSRFHRFKNGSCSCNDFW

SEQ ID NO: 106756 - protein, 116 aa, Setaria italica
  Transcript Sequence Number=SeqID_40782
  Gene Ontology: Mol. function=galacturonate binding; Cellular component=plasma membrane; Biological process=cell-cell signaling
  Homolog annotation: Hit_ID=Q5QT28; Match level="QueryCoverage=81%, HitCoverage=51%, E-value=5e-15, Identity=50%"; Hit description =Putative remorin 1 protein (Fragment)
  Pfam annotation: Domain name=Remorin_C; Domain location=51-116; Score= -14.7; E_value=0.021; Accession=PF03763.5; Description=Remorin, C -terminal region
  Pfam annotation: Domain name=Remorin_N; Domain location=1-49; Score =15.4; E_value=0.0087; Accession=PF03766.5; Description=Remorin, N -terminal region
  Pfam module annotation: Pfam domain module=Remorin_C::Remorin_N; Domain location=51-116::1-49
AAPAEDLAEEKAAVPAPPEESKALAVVESDEKPAAAGASQERDAFLTRVATEQRTSLIRACEESEKAKAENRAARRLANVTSWENSKVAQMEAELKKIHEQLEMKKAAQAEKLKNS

SEQ ID NO: 106757 - protein, 112 aa, Setaria italica
  misc_feature (48)..(48): Xaa can be any naturally occurring amino acid
  Transcript Sequence Number=SeqID_40783
LDMDKMKFFPAKNPPTHNLERFAIVELGEGRRGMFMLASNNIEGCVLXVFSASREIHGGCASEWLLEKEIPLSPSYKYDMLGAADGKLLMVLTHNASSATEVHCCLLDFETL

SEQ ID NO: 106758 - protein, 190 aa, Setaria italica
  misc_feature (137)..(137): Xaa can be any naturally occurring amino acid
  Transcript Sequence Number=SeqID_40784
PVCGSLSGGPGPVPGLLRGAPGCVGVLAGLLLGHVPGLPGPVGGVVPRLLGLVPGGVPGLPRLVRGGVHGLARLPGCRVLEIAELVLGRFRGLARLVRHGVLGLPRLLHGGVLVLTQLVPGGLRRLTGLPRHAVVGXLPGLLGGVVPVLAELVPRGLRRLGGLVGGRVLGAAEGAAHGAHEGLGALLHAP

SEQ ID NO: 106759 - protein, 80 aa, Setaria italica
  misc_feature (1)..(12): Xaa can be any naturally occurring amino acid
  Transcript Sequence Number=SeqID_40785
XXXXXXXXXXXXFFFRVKSILILSSNRCYSHHLHSYTKACTGSPNFTKLQLVPGTQRKGEDEPNSEHPTTDDRKEPDSTH

SEQ ID NO: 106760 - protein, 63 aa, Setaria italica
  Transcript Sequence Number=SeqID_40786
FYSQMRCDQSDKHLGSRSALAWYIRIQGNRGWRIISGYKSIRFHGYKTTRAHSSKQNVPERKC

SEQ ID NO: 106761 - protein, 107 aa, Setaria italica
  Transcript Sequence Number=SeqID_40787
  Gene Ontology: Mol. function=DNA-directed RNA polymerase activity; Cellular component=nucleoplasm; Biological process=regulation of transcription
  Homolog annotation: Hit_ID=B6T3H5; Match level="QueryCoverage=100%, HitCoverage=93%, E-value=1e-55, Identity=96%"; Hit description=DNA -directed RNA polymerase II 14.5 kDa polypeptide
  Pfam annotation: Domain name=RNA_POL_M_15KD; Domain location=1-51; Score=43.3; E_value=9.7e-10; Accession=PF02150.8; Description=RNA polymerases M15 Kd subunit
  Pfam annotation: Domain name=TFIIS_C; Domain location=67-106; Score =9.1; E_value=0.013; Accession=PF01096.10; Description=Transcription factor S-II (TFIIS)
  Pfam module annotation: Pfam domain module=RNA_POL_M_15KD::TFIIS_C; Domain location=1-51::67-106
RECNNILYPKEDRDKRTLFFACRNCEHQEVSDYNCVYRNEVHHTAGERTQVLQDVASDPTLPRTKTVRCALCGHGEAVFFQATARGEEGMTLFFVCCSPDCGHRWRE

SEQ ID NO: 106762 - protein, 109 aa, Setaria italica
  Transcript Sequence Number=SeqID_40788
  Gene Ontology: Mol. function=hydrolase activity
  Homolog annotation: Hit_ID=Q9FIZ7; Match level="QueryCoverage=96%, HitCoverage=8%, E-value=5e-49, Identity=86%"; Hit description=5 -oxoprolinase
KLEISAAPSTVKISEEVADVVQLSIFNHRFMGIAEQMGRTLQRTSISTNIKERLDFSCALFGPDGGLVANAPHVPVHLGAMSSTVRWQLNYWGDNLHEGDVLVTNIRVQ

SEQ ID NO: 106763 - protein, 110 aa, Setaria italica
  Transcript Sequence Number=SeqID_40789
  Gene Ontology: Mol. function=protein binding
  Homolog annotation: Hit_ID=B6UF67; Match level="QueryCoverage=100%, HitCoverage=56%, E-value=6e-56, Identity=94%"; Hit description =Holocarboxylase synthetase
MAGKKRKAEAARLEETDRALYGAFRGAANSLSQLYTLAMGAQKGSFHACERHAMEKLYEWILRQHENGLRLTVADIASHIQHEIQYGGDNASASPRSQYPSQITAPTVHI

SEQ ID NO: 106764 - protein, 195 aa, Setaria italica
  Transcript Sequence Number=SeqID_40790
  Gene Ontology: Mol. function=protein binding
  Homolog annotation: Hit_ID=B6UF67; Match level="QueryCoverage=90%, HitCoverage=90%, E-value=3e-85, Identity=86%"; Hit description =Holocarboxylase synthetase
MAGKKRKAEAARLEETDRALYGAFRGAANSLSQLYTLAMGAQKGSFHAGERHAMEKLYEWILRQHENGLRLTVADIASHIQHEIQYGGDNASASPRSQYPSQITAPTVHIPNTSNQQPSPSSFVPGNPGLAQSKNSMVFSNALSSPIRRSLQPYHLEQGGEAGYFANGASRDANPTASNDSSMDMHSDSPAHDSY

SEQ ID NO: 106765 - protein, 279 aa, Setaria italica
  misc_feature (249)..(249): Xaa can be any naturally occurring amino acid
  misc_feature (259)..(259): Xaa can be any naturally occurring amino acid
  Transcript Sequence Number=SeqID_40791
  Gene Ontology: Mol. function=zinc ion binding; Cellular component =intracellular
DNISYRDSTRGSEDEEFRMAETMGKGRDDKLSERESLPSSRVGFDDFDDEEDDIDSYELDLSKGSQTGGVSRMSYSDLENASDSEGLDELDNGRKSRYAAKDDTTVSADEDEFEDQPSLRSSHLADSWHKTRSRSGSNRYRRASLGSESDEGMNSDLDEDIDKGLGSRRSHSHGNPDRASVRHNALAYSDDEPFADDMDSGMVDRFQSRRTKSSSNISGNFRGRSHDMNDRQSRGDRYNRTKRNEQFNXFDMHRGGPVXDRGSAGVRGNQLDNGSRGSQ

SEQ ID NO: 106766 - protein, 109 aa, Setaria italica
  Transcript Sequence Number=SeqID_40792
  Gene Ontology: Mol. function=substrate-specific transmembrane transporter activity; Cellular component=integral to membrane; Biological process=transmembrane transport
  Homolog annotation: Hit_ID=B6TMZ9; Match level="QueryCoverage=80%, HitCoverage=16%, E-value=3e-43, Identity=96%"; Hit description=Sugar carrier protein A
MRAWTPNNSVCSWCRTQAVPLYLSEMAPAHLRGGLNMMFQLATTLGIFTANLINYGTQNIKPWGWRLSLGLAAAPAMLMTLGGLLLPETPNSLIERGRVEEGRRSTRAA

SEQ ID NO: 106767 - protein, 104 aa, Setaria italica
  Transcript Sequence Number=SeqID_40793
  Gene Ontology: Mol. function=substrate-specific transmembrane transporter activity; Cellular component=integral to membrane; Biological process=transmembrane transport
  Homolog annotation: Hit_ID=B6TMZ9; Match level="QueryCoverage=100%, HitCoverage=19%, E-value=8e-49, Identity=90%"; Hit description=Sugar carrier protein A
MAGGGVAALGVNTERAAQYKGRMTLAVAMTCLVAAVGGAIFGYDIGISGGVTSMDPFLKKFFPAVYHRKNSGSQNNYCKYDNQGLAAFTSSLYLAGLVSSLAAS

SEQ ID NO: 106768 - protein, 333 aa, Setaria italica
  Transcript Sequence Number=SeqID_40794
  Gene Ontology: Mol. function=substrate-specific transmembrane transporter activity; Cellular component=integral to membrane; Biological process=transmembrane transport
  Homolog annotation: Hit_ID=B6TMZ9; Match level="QueryCoverage=96%, HitCoverage=61%, E-value=1e-163, Identity=88%"; Hit description =Sugar carrier protein A
  Pfam annotation: Domain name=MFS_1; Domain location=12-333; Score =17.3; E_value=0.008; Accession=PF07690.8; Description=Major Facilitator Superfamily
  Pfam annotation: Domain name=Sugar_tr; Domain location=2-333; Score =149.5; E_value=1e-41; Accession=PF00083.16; Description=Sugar (and other) transporter
  Pfam annotation: Domain name=Trp_oprn_chp; Domain location=54-223; Score=-71.7; E_value=0.079; Accession=PF09534.2; Description =Tryptophan-associated transmembrane p
  Pfam module annotation: Pfam domain module=MFS_1::Sugar_tr::Trp_oprn _chp; Domain location=12-333::2-333::54-223
  Subcellular localization annotation: CTP_CleavageSite=63; ConfidenceScore=5.04e-01
TLKVCQSDWPNAAGGVTSMDPFLKKFFPAVYHRKNSGSQNNYCKYDNQGLAAFTSSLYLAGLVSSLAASPVTRNYGRKASIVCGGISFLVGATLNVAAVNLAMLILGRIMLGVGIGFGNQAVPLYLSEMAPAHLRGGLNMMFQLATTLGIFTANLINYGTQNIKPWGWRLSLGLAAAPAMLMTLGGLLLPETPNSLIERGRVEEGRRVLERIRGTADVDAEFTDMVEASELANTIEHPFRNILERRNRPQLVMAVCMPAFQILTGINSILFYAPVLFQSMGFGGNASLYSSVLTGAVLFSSTLISIGTVDRLGRRKLLISGGIQMIVCQVIVA

SEQ ID NO: 106769 - protein, 77 aa, Setaria italica
  Transcript Sequence Number=SeqID_40795
  Gene Ontology: Cellular component=mitochondrial matrix
  Homolog annotation: Hit_ID=B6TJH8; Match level="QueryCoverage=96%, HitCoverage=29%, E-value=3e-30, Identity=82%"; Hit description =Mitochondrial glycoprotein
AESWEGNMASKGGGEYRGRIFQELDEKVRDALHLYIEARGINEKLFPFLQAWLYVKDHRNLIRWFKSVATFISEPKP

SEQ ID NO: 106770 - protein, 69 aa, Setaria italica
  Transcript Sequence Number=SeqID_40796
GSFVVLTNDQVILPSCLLSLGPAKPGRLVGSPIGNIFYLCLACSGKAWVQPKTHMEIKLDVGSHVGVRP

SEQ ID NO: 106771 - protein, 338 aa, Setaria italica
  Transcript Sequence Number=SeqID_40797
  Subcellular localization annotation: CTP_CleavageSite=62; ConfidenceScore=5.68e-01
SLRASFASPRSQLLGVLLVTVITFTAVVDSARVSSAPTASKPVVKVYPSCSKTLMPKRCSVMLSALSKSLADNKAAIAGPQLAAGKFKGDPCISRCAKVLDATTSKATAATDAGGGGDALYQLKNYLVPLVIFDLYEKAPCECNCPGPCSPDEAAAVKKLGEATHAMRAIVGLIHGMSSQLTDEEKKAKVEPMEKSADSGILHVSCGLTKEPQKCADELSALAKTMEEAKHVVWELTSSDAATKLSSPIADCEAAMRELEEKVYSAEEKAVNLAEIRGAIHSYVQGDGKQPPRCKCSCPPPPEKPCSANETAVVDSLNGVYDAWVAVEKFLTELLPPN

SEQ ID NO: 106772 - protein, 73 aa, Setaria italica
  Transcript Sequence Number=SeqID_40798
QHQRTAVIMWLLNLSYLKKAGIVMVHCLPFPACIISFVSFDKFWVEIFLLRWLPLSFGRILSICLFKLQLHRG

SEQ ID NO: 106773 - protein, 266 aa, Setaria italica
  misc_feature (227)..(227): Xaa can be any naturally occurring amino acid
  Transcript Sequence Number=SeqID_40799
  Gene Ontology: Mol. function=ATP-dependent helicase activity; Cellular component=intracellular; Biological process=RNA processing
  Homolog annotation: Hit_ID=B9GRS6; Match level="QueryCoverage=100%, HitCoverage=14%, E-value=1e-127, Identity=82%"; Hit description =Dicer-like protein
  Pfam annotation: Domain name=DEAD; Domain location=5-176; Score=50.7; E_value=5.6e-12; Accession=PF00270.21; Description=DEADDEAH box helicase
  Pfam annotation: Domain name=ResIII; Domain location=1-172; Score =21.0; E_value=9.3e-07; Accession=PF04851.7; Description=Type III restriction enzyme, res subunit
  Pfam module annotation: Pfam domain module=DEAD::ResIII; Domain location=5-176::1-172
EEQARQYQLEVLEQAKSRNTIAFLETGAGKTLIAVLLIKSICDKMLKGNKKMLAVFLVPKVPLVYQQAEVIRERTGYRVGHYCGEMGQDFWDSRKWQREFESKQVLVMTAQILLNILRHSIIKMDAIHLLILDECHHAVKKHPYSLVMSEFYHTTPKDKRPVVFGMTASPVNLKGVTSQEDCAIKIRNLESKLDCIVSTIKDRKELEKHVPMPSEVIIHYDKAATSXSFHEQIKQMEATVEEAALSSSRELNGSSVGARDAGSRDE

SEQ ID NO: 106774 - protein, 119 aa, Setaria italica
  Transcript Sequence Number=SeqID_40800
EKNIFAYGQKPISLIEQGHEVDMTDFALNPVSPIHIIPCTSSSSTTYVYAPVKELPKVTLGELVLDPSVRPNRQFNLVSWESRLPPYTSFVHFVPNCTEGMPEGTHVSEEAQMSGFLRT

SEQ ID NO: 106775 - protein, 110 aa, Setaria italica
  Transcript Sequence Number=SeqID_40801
  Gene Ontology: Mol. function=protein serine/threonine kinase activity; Biological process=protein amino acid phosphorylation
  Homolog annotation: Hit_ID=Q1KMQ1; Match level="QueryCoverage=60%, HitCoverage=10%, E-value=3e-15, Identity=59%"; Hit description =Serine/threonine kinase-like protein ABC1036
LVVRTTKKSRSITGEDVSLGLEWKMRYQIIRGICEGLHHLHDKRIVHLDLKPGNILLDYNMVPKICDFENSMVFDEDRTYSICDFENSTVFDLLHEDRTYPGDIIRSQEY

SEQ ID NO: 106776 - protein, 235 aa, Setaria italica
  Transcript Sequence Number=SeqID_40802
  Gene Ontology: Mol. function=oxidoreductase activity; Cellular component=extracellular region; Biological process=oxidation reduction
  Homolog annotation: Hit_ID=Q2PAJ1; Match level="QueryCoverage=100%, HitCoverage=39%, E-value=1e-96, Identity=70%"; Hit description =Putative laccase
  Pfam annotation: Domain name=Cu-oxidase_2; Domain location=83-219; Score=195.0; E_value=2.1e-55; Accession=PF07731.6; Description =Multicopper oxidase
RLRSLASEAHPADVPARVDERMLVTVSVNVLPCGGGANSNETCDGPINGTRLSASLNNVSFVSPAVDVLDAYYSSIAGVYEPDFPDRPPVAFNFTDSEPAQELWFTRRGTKVKVVEYGAVVEVVFQGTGILGAEPHPIHLHGYAFYVVGRGFGNFDESKDPAAYNLVDPPYQNTVSVPAGGWAAIRFRAANPGVWFMHCHFDRHTVWGMDTVFIVKNGKTPDAQMLPRPPSMPKC

SEQ ID NO: 106777 - protein, 304 aa, Setaria italica
  Transcript Sequence Number=SeqID_40803
  Gene Ontology: Mol. function=metal ion binding; Cellular component =nucleus
  Homolog annotation: Hit_ID=O48794; Match level="QueryCoverage=78%, HitCoverage=29%, E-value=4e-23, Identity=29%"; Hit description =F24O1.3
  Pfam annotation: Domain name=C1_3; Domain location=47-75; Score=7.5; E_value=0.077; Accession=PF07649.4; Description=C1-like domain
  Pfam annotation: Domain name=zf-C3HC4; Domain location=49-94; Score =4.3; E_value=0.033; Accession=PF00097.17; Description=Zinc finger, C3HC4 type (RING finger)
  Pfam module annotation: Pfam domain module=C1_3::zf-C3HC4; Domain location=47-75::49-94
  Subcellular localization annotation: CTP_CleavageSite=37; ConfidenceScore=5.66e-01
QSDRQTRDLPNGLMTISPGSSGPAALSSPVTTKVVPRAMSMTKPIPRTCHRCGLTKAARVANCKNCEKNFCNSCINKWYSGITRKDIKTRCPVCRGLCDCKKCALGQTKGAMRKESPSGEGKILSIKISNHQFYKLLPVKLDQEQLDELELEAKIQGTKISDVRVQVAENGQSESLYCNNCKLSASQFLRCCPACPFKLCLSCCHKIREGNMSDSTPEDKFKNRLLQQESVHEDGSITCPSIELGGCGDAPLNLIYASPSGQSEELSSDDELHAPGNHSGVKVLSCRYAFIFQVGAQVDIHSVA

SEQ ID NO: 106778 - protein, 341 aa, Setaria italica
  misc_feature (101)..(101): Xaa can be any naturally occurring amino acid
  Transcript Sequence Number=SeqID_40804
  Gene Ontology: Mol. function=metal ion binding
  Pfam annotation: Domain name=C1_3; Domain location=300-328; Score =7.5; E_value=0.077; Accession=PF07649.4; Description=C1-like domain
  Pfam annotation: Domain name=WRC; Domain location=153-198; Score =59.9; E_value=9.8e-15; Accession=PF08879.2; Description=WRC
  Pfam module annotation: Pfam domain module=C1_3::WRC; Domain location= 300-328::153-198
DTEPEAKAGEAKAEAPAAEAEVKADASDASDDEGDETGSEREADAKVPDPKAKAEESDGGDEAEAAETDGESEEEAAEAGVENEDAAEDSDTEGDAAEESXPPSPPSRGRRRKRAATPDPTPEDDEAEEETPTPSRRRRRRKSGERGDSPPPPPDHLRCRRSDGKKWRCSGRALPTVSFCEYHYAKANKSKKLPADGEVLAVALQRQKNKRKGRKSINTPASPQATTSDRQTRDLPNGLMTISPGSSGPAALSSPVTTKVGVEIPAPIRRCYRSKNAEPLPVGPVKVVPRAMSMTKPIPRTCHRCGLTKAARVANCKNCEKNFCNSCINKWLVVDSLLLRY

SEQ ID NO: 106779 - protein, 69 aa, Setaria italica
  misc_feature (52)..(69): Xaa can be any naturally occurring amino acid
  Transcript Sequence Number=SeqID_40805
CPDQTVRKRNRCVVCGCTCARSALAGSRGAIGLLCLRCLGDLILFLSVHFNXXXXXXXXXXXXXXXXXX

SEQ ID NO: 106780 - protein, 43 aa, Setaria italica
  Transcript Sequence Number=SeqID_40806
LRHFVDWFVQYYKLDIKIAKGARSAADKPAKKKKAAAAMSAAS

SEQ ID NO: 106781 - protein, 82 aa, Setaria italica
  Transcript Sequence Number=SeqID_40807
  Gene Ontology: Mol. function=racemase and epimerase activity, acting on carbohydrates and derivatives; Cellular component=integral to membrane; Biological process=carbohydrate metabolic process
  Homolog annotation: Hit_ID=B6SPN6; Match level="QueryCoverage=100%, HitCoverage=16%, E-value=6e-37, Identity=92%"; Hit description =Protein capI
RGDGVVGLDNFNSYYDPSLKRARQALLASRGVAVVDADINDGLLLEKLFDVAAFTHVLHLAAQAGVRYAMEAPQTYVASNVA

SEQ ID NO: 106782 - protein, 123 aa, Setaria italica
  Transcript Sequence Number=SeqID_40808
  Gene Ontology: Mol. function=racemase and epimerase activity, acting on carbohydrates and derivatives; Cellular component=integral to membrane; Biological process=carbohydrate metabolic process
  Homolog annotation: Hit_ID=B6SPN6; Match level="QueryCoverage=100%, HitCoverage=25%, E-value=1e-60, Identity=94%"; Hit description =Protein capI
YDPSLKRARQALLASRGVAVVDADINDGLLLEKLFDVAAFTHVLHLAAQAGVRYAMEAPQTYVASNVAGLVSVFEVAAKHADPQPAIVWASSSSVYGLNTDAPFSEDHRTDRPASLYAATKKA

SEQ ID NO: 106783 - protein, 411 aa, Setaria italica
  misc_feature (16)..(16): Xaa can be any naturally occurring amino acid
  misc_feature (51)..(51): Xaa can be any naturally occurring amino acid
  misc_feature (148)..(148): Xaa can be any naturally occurring amino acid
  misc_feature (189)..(189): Xaa can be any naturally occurring amino acid
  Transcript Sequence Number=SeqID_40809
  Gene Ontology: Mol. function=racemase and epimerase activity, acting on carbohydrates and derivatives; Cellular component=integral to membrane; Biological process=carbohydrate metabolic process
  Homolog annotation: Hit_ID=B6SPN6; Match level="QueryCoverage=94%, HitCoverage=83%, E-value=1e-171, Identity=75%"; Hit description =Protein capI
  Pfam annotation: Domain name=3Beta_HSD; Domain location=74-344; Score= -106.3; E_value=0.0015; Accession=PF01073.11; Description=3-beta hydroxysteroid dehydrogenaseisomerase family
  Pfam annotation: Domain name=Epimerase; Domain location=73-313; Score= 151.5; E_value=2.7e-42; Accession=PF01370.13; Description=NAD dependent epimerasedehydratase family
  Pfam annotation: Domain name=NAD_binding_4; Domain location=75-283; Score=-83.9; E_value=0.0015; Accession=PF07993.4; Description=Male sterility protein
  Pfam annotation: Domain name=RmlD_sub_bind; Domain location=71-383; Score=-170.3; E_value=0.0094; Accession=PF04321.9; Description=RmlD substrate binding domain
  Pfam annotation: Domain name=adh_short; Domain location=71-223; Score= -44.1; E_value=0.011; Accession=PF00106.17; Description=short chain dehydrogenase
  Pfam module annotation: Pfam domain module=3Beta_HSD::Epimerase::NAD _binding_4::RmlD_sub_bind::adh_short; Domain location=74-344::73 -313::75-283::71-383::71-223
  Subcellular localization annotation: CTP_CleavageSite=47; ConfidenceScore=5.49e-01
LALVFLFTLHYPSLLXRSFHLSAGGGGPGGAHSASHRSLLMSSSSTSASTXGAAWEKEMRQSARPSRDGGISVLVTGAAGFVGTHCSLALKARGDGVVGLDNFNSYYDPSLKRARQALLASRGVAVVDADINDGRLLAKLFDVVPFTXVLHGVAHAGLVTLLEACKDADPQPAIVWASSSSVYGLNDNXPFSERDRTDQPASLYAATKKAGEAIAHTYNHIYGLSITGLRFFTVYGPWGRPDMAYFFFARSIVAGEPITLFRAADGSDARRDFTYIDDVVKGCLGALDTAGKSTGSKSGKKSGPAPLRVYNLGNTSPVPVTRMVAILEKLLGKKANKRIVTMPSNGDVPFTHANVSHAAHDFGYRPTTSLEAGLRHFVEWFVQYYKLDIKGSNVLAGKTTKRKSMAMSAAS

SEQ ID NO: 106784 - protein, 440 aa, Setaria italica
  misc_feature (73)..(73): Xaa can be any naturally occurring amino acid
  Transcript Sequence Number=SeqID_40810
  Gene Ontology: Mol. function=racemase and epimerase activity, acting on carbohydrates and derivatives; Cellular component=integral to membrane; Biological process=carbohydrate metabolic process
  Homolog annotation: Hit_ID=B9SQF3; Match level="QueryCoverage=98%, HitCoverage=99%, E-value=0.0, Identity=80%"; Hit description=UDP -glucuronate 5-epimerase, putative
  Pfam annotation: Domain name=3Beta_HSD; Domain location=101-388; Score=-83.1; E_value=6.9e-05; Accession=PF01073.11; Description=3 -beta hydroxysteroid dehydrogenaseisomerase family
  Pfam annotation: Domain name=Epimerase; Domain location=100-357; Score=193.3; E_value=6.5e-55; Accession=PF01370.13; Description=NAD dependent epimerasedehydratase family
  Pfam annotation: Domain name=NAD_binding_4; Domain location=102-328; Score=-68.6; E_value=0.00013; Accession=PF07993.4; Description=Male sterility protein
  Pfam annotation: Domain name=Polysacc_synt_2; Domain location=100 -404; Score=-185.1; E_value=0.023; Accession=PF02719.7; Description =Polysaccharide biosynthesis protein
  Pfam annotation: Domain name=RmlD_sub_bind; Domain location=98-427; Score=-158.0; E_value=0.0019; Accession=PF04321.9; Description=RmlD substrate binding domain
  Pfam annotation: Domain name=adh_short; Domain location=98-268; Score= -30.9; E_value=0.0015; Accession=PF00106.17; Description=short chain dehydrogenase
  Pfam module annotation: Pfam domain module=3Beta_HSD::Epimerase::NAD _binding_4::Polysacc_synt_2::RmlD_sub_bind::adh_short; Domain location=101-388::100-357::102-328::100-404::98-427::98-268
  Subcellular localization annotation: CTP_CleavageSite=46; ConfidenceScore=5.07e-01
MRVLEDDLFPSTPGKVKIERAGTMNRQLHRCFASTSTMFLWALFLVAMTASYLSFQSFVDTSSKYFAASWGGXLHWERQIRASAAPRRPPGSAAGAGMSVLVTGAAGFVGTHCSLALRKRGDGVVGIDNFNAYYDPSLKKARKALLSSHGVFVVEGDINDGRLLAKLFDVVPFTHVLHLAAQAGVRYAMENPASYVHSNIAGLVTLLEACKDADPQPAIVWASSSSVYGLNDKVPFSERDRTDQPASLYAATKKAGEEITHTYNHIYGLSITGLRFFTVYGPWGRPDMAYFSFTRNILQGKPITVYRGKDHVDLARDFTYIDDIVKGCLGSLDTAGKSTGTGGKKRGPAPYRIFNLGNTSPVTVPNLVSILEKHLRVKAKKNVVEMPGNGDVPFTHANISLAREQLGYKPTTNLDVGLKKFVKWYLSYYGYTRGSKNFRQ

SEQ ID NO: 106785 - protein, 86 aa, Setaria italica
  Transcript Sequence Number=SeqID_40811
  Subcellular localization annotation: CTP_CleavageSite=59; ConfidenceScore=5.23e-01
ADHGGILEAPKPPEAPPPPPLPHHRQSPPNPSPSPPAASSPRPILLPPPPPAPPPTSPSCQRPVAPPPPPLRLRRPGPREGPPRLQ

SEQ ID NO: 106786 - protein, 183 aa, Setaria italica
  Transcript Sequence Number=SeqID_40812
  Homolog annotation: Hit_ID=Q6YU47; Match level="QueryCoverage=89%, HitCoverage=45%, E-value=2e-48, Identity=59%"; Hit description=FAS1 -like protein
ATRGVTDEQRFLHRATEDALKIDMPLVISNLDHRKLDLKKAEGITAEKVCLQALCMKKYPSGPIIDVPVVAKVTIEDQEFRQSNKKSPRTPVPSKSISESDMPEFAKLVTSCSHGMGKLVDLLHERFPCVSKLQLKNRVREIADFTHNRWQVKKDILDMYSVCLSPDKVASVKMCKRQQLPTQ

SEQ ID NO: 106787 - protein, 104 aa, Setaria italica
  Transcript Sequence Number=SeqID_40813
  Subcellular localization annotation: CTP_CleavageSite=49; ConfidenceScore=5.36e-01
SHKGNLSSAAVTSSSRVCLSLSTGTIVDTLRVCVGCFPAECRPRGHASSCAARFHLFADQWFKVEDHCYRSFTETCIIAEDASCNGPAKWFLALSLPFEHICAP

SEQ ID NO: 106788 - protein, 141 aa, Setaria italica
  misc_feature (50)..(50): Xaa can be any naturally occurring amino acid
  Transcript Sequence Number=SeqID_40814
  Gene Ontology: Cellular component=microtubule organizing center; Biological process=microtubule cytoskeleton organization and biogenesis
  Homolog annotation: Hit_ID=Q4JF26; Match level="QueryCoverage=87%, HitCoverage=19%, E-value=7e-42, Identity=73%"; Hit description =OSJNBa0029H02.26 protein
  Subcellular localization annotation: CTP_CleavageSite=41; ConfidenceScore=5.24e-01
GRFHQEAKAAAAAQAPGSKPFSLDSFSRGSGASPGSVIGSYAVSVQELLXIDDLLSALLGIEGRYISIKRVRGKEGYVVFQIDSSMDLALQELTRRIFPLCEDYVLVSQFVESRSHFKNGLVNHALAAALRAYLLDVLKRY

SEQ ID NO: 106789 - protein, 99 aa, Setaria italica
  Transcript Sequence Number=SeqID_40815
EVNMEELLNAQRTVGLFSRLKCSVYLRALATQTRCSSLSFLCQKQQYFKKLKFLYVMMVQSLRRLCLMSYHSIKKTSPQAEVIVNRFTGYYSDDETDDE

SEQ ID NO: 106790 - protein, 81 aa, Setaria italica
  Transcript Sequence Number=SeqID_40816
  Subcellular localization annotation: CTP_CleavageSite=33; ConfidenceScore=5.12e-01
MASCPFFLAASQHNFLWPEVPFQLCLLFQLWFVVTNRSKLLRFQELLRKTKPSPGGFSATFVLLIFLLSFILGYYLFGSRA

SEQ ID NO: 106791 - protein, 238 aa, Setaria italica
  Transcript Sequence Number=SeqID_40817
  Gene Ontology: Mol. function=structural molecule activity; Cellular component=plasma membrane; Biological process=lipid transport
  Homolog annotation: Hit_ID=B6UGD8; Match level="QueryCoverage=91%, HitCoverage=90%, E-value=2e-43, Identity=43%"; Hit description =Vesicle-associated membrane protein-associated protein A
  Pfam annotation: Domain name=Motile_Sperm; Domain location=5-112; Score=123.2; E_value=8.2e-34; Accession=PF00635.18; Description=MSP (Major sperm protein) domain
MSNTLLRVSPSDLKMPFELKKQNSACLELVNKTDHRVAFKVKTTNPRKYAVRPASGFVPPRGSCGVSITMQAPKEIPPDYHCKDKFLVQSIVAEEGTTLKDIVPDMFSKVPGKLVEEFKLRVIYVPANPPSPVPEEAEEEDSLDSDVDHEVERPSTSNYISGHGHTSGSPTSHNEDVSMVSKSGEQESRYAEENKKMQKELELLRKTKPSPGGFSATFVLLIFLLSFILGYYLFGSRA

SEQ ID NO: 106792 - protein, 191 aa, Setaria italica
  Transcript Sequence Number=SeqID_40818
  Gene Ontology: Mol. function=nuclease activity; Cellular component =chloroplast; Biological process=nucleotide-excision repair
  Homolog annotation: Hit_ID=Q9SR38; Match level="QueryCoverage=76%, HitCoverage=56%, E-value=5e-30, Identity=46%"; Hit description =F3L24.12 protein
  Subcellular localization annotation: CTP_CleavageSite=60; ConfidenceScore=5.80e-01
PYPYTAMAATAAASPARASWRSAIPATSASAAGSCFRVGARRFAGLQTTSTCPHQATRLPAAHVKSGEAEGRPSTESAAAGTPDEESLRRELETAIQEEDYARAAALRDELRVLQQDGRSAVLAANTRFYTAFKNGDLVAMHQAWAKGDHVYVVHPSAGRISGYEMVMQSWEMVCDADYEFPLQIDLQDVE

SEQ ID NO: 106793 - protein, 73 aa, Setaria italica
  Transcript Sequence Number=SeqID_40819
SLLLHVAKQTKITADRIVCCSIQMFWILSVSTIKCSYNSEEPDEKSTTVQFQFIESILYKEKNIKASIYSLVH

SEQ ID NO: 106794 - protein, 143 aa, Setaria italica
  Transcript Sequence Number=SeqID_40820
  Gene Ontology: Mol. function=prephenate dehydrogenase (NADP+) activity; Biological process=tyrosine biosynthetic process
  Homolog annotation: Hit_ID=B6SRK3; Match level="QueryCoverage=51%, HitCoverage=20%, E-value=5e-37, Identity=98%"; Hit description =Arogenate dehydrogenase isoform 2
GCRMVEMSCAEHDAHAAETQFLTHSVGRMLAMLELRSTPINTKGYETLLRLVDNTCSDSFDLYNGLFMYNKNSTRCSPTPGPITRRSPPRWAPPSSPTRTTSASATRTWCSSPPPSSPPRPSSARSRPPPPPQHPLRRRALRQ

SEQ ID NO: 106795 - protein, 308 aa, Setaria italica
  Transcript Sequence Number=SeqID_40821
  Gene Ontology: Mol. function=prephenate dehydrogenase (NADP+) activity; Biological process=tyrosine biosynthetic process
  Homolog annotation: Hit_ID=B6SRK3; Match level="QueryCoverage=99%, HitCoverage=85%, E-value=1e-169, Identity=94%"; Hit description =Arogenate dehydrogenase isoform 2
  Pfam annotation: Domain name=2-Hacid_dh_C; Domain location=9-135; Score=-103.9; E_value=0.092; Accession=PF02826.11; Description=D -isomer specific 2-hydroxyacid dehydr
  Pfam annotation: Domain name=F420_oxidored; Domain location=33-214; Score=-41.6; E_value=0.0048; Accession=PF03807.9; Description=NADP oxidoreductase coenzyme F420-dependent
  Pfam annotation: Domain name=GFO_IDH_MocA; Domain location=32-121; Score=-18.2; E_value=0.044; Accession=PF01408.14; Description =Oxidoreductase family, NAD-binding Rossmann fold
  Pfam annotation: Domain name=NAD_binding_2; Domain location=31-172; Score=-79.2; E_value=0.015; Accession=PF03446.7; Description=NAD binding domain of 6-phosphogluconate dehydrogenase
  Pfam annotation: Domain name=PDH; Domain location=36-291; Score=-6.7; E_value=2.6e-09; Accession=PF02153.9; Description=Prephenate dehydrogenase
  Pfam module annotation: Pfam domain module=2-Hacid_dh_C::F420 _oxidored::GFO_IDH_MocA::NAD_binding_2::PDH; Domain location=9 -135::33-214::32-121::31-172::36-291
PVGPQRIRALDAAQPFDYESRAAGLLEERQRLKIAIVGFGNFGQFLARTFARQGHTLLAHSRTDHSALAATLGASFFTDPHDLCECHPDVVLLATSILSAEAVLRSLPVHRLRRNTLFVDVLSVKEFPKNLLLSSLPPDFDVICTHPMFGPESARDGWDGLPFVFDKVRVGDCPARRARAEAFLNIFEREGCRMVEMSCAEHDAHAAETQFLTHSVGRMLAMLELRSTPINTKGYETLLRLVDNTCSDSFDLYNGLFMYNKNSTELLNRLEWAMDSVKKKLFDGLHDVLRKQLFEGTAPAPNTTNVRK

SEQ ID NO: 106796 - protein, 147 aa, Setaria italica
  Transcript Sequence Number=SeqID_40822
KHCPDLEVYPQQQHIQILVAHLGPIYLPWQHTVQGKKQSEHKNKNMKGKLHQSDGLSGEIRNGRDQRWIGSIQGENHSAVLLWHGGQSSRHGQCTVLSPSLPKENCPAIRYNPASVLLSHQDAICKPMIEMDDATKVFHMRFKLLCK

SEQ ID NO: 106797 - protein, 81 aa, Setaria italica
  Transcript Sequence Number=SeqID_40823
  Subcellular localization annotation: CTP_CleavageSite=42; ConfidenceScore=5.26e-01
CYCAIFLSTLLIFTFLKLAKFQSILLTLGSPSNSFPNDVIIQANTSWSVMFTQDLILVTWTWRNGDLMTPVCHFLVASYNF

SEQ ID NO: 106798 - protein, 42 aa, Setaria italica
  Transcript Sequence Number=SeqID_40824
LLKHSKLTKIIDVNDSQELFLSSNVPRHIRKPLKLSPFLGPV

SEQ ID NO: 106799 - protein, 59 aa, Setaria italica
  Transcript Sequence Number=SeqID_40825
LVIDLILLNYFTRLFSVDYLLALCQPSNIWTVTWRQQRERLISQWAWHYVFTRHFTCSM

SEQ ID NO: 106800 - protein, 406 aa, Setaria italica
  Transcript Sequence Number=SeqID_40826
  Gene Ontology: Mol. function=binding; Cellular component=plasma membrane
  Homolog annotation: Hit_ID=B9T299; Match level="QueryCoverage=96%, HitCoverage=63%, E-value=1e-104, Identity=48%"; Hit description =Kinesin light chain, putative
  Pfam annotation: Domain name=TPR_1; Domain location=163-196; Score =3.7; E_value=2.1; Accession=PF00515.20; Description=Tetratricopeptide repeat
  Pfam annotation: Domain name=TPR_1; Domain location=246-279; Score =7.5; E_value=0.73; Accession=PF00515.20; Description=Tetratricopeptid e repeat
  Pfam annotation: Domain name=TPR_1; Domain location=288-321; Score =6.9; E_value=0.88; Accession=PF00515.20; Description=Tetratricopeptid e repeat
  Pfam annotation: Domain name=TPR_1; Domain location=43-76; Score=9.7; E_value=0.4; Accession=PF00515.20; Description=Tetratricopeptide repeat
  Pfam annotation: Domain name=TPR_1; Domain location=85-118; Score =4.1; E_value=1.9; Accession=PF00515.20; Description=Tetratricopeptide repeat
  Pfam annotation: Domain name=TPR_2; Domain location=163-196; Score =6.4; E_value=5.4; Accession=PF07719.9; Description=Tetratricopeptide repeat
  Pfam annotation: Domain name=TPR_2; Domain location=205-238; Score =8.9; E_value=2.6; Accession=PF07719.9; Description=Tetratricopeptide repeat
  Pfam annotation: Domain name=TPR_2; Domain location=246-279; Score =12.6; E_value=0.93; Accession=PF07719.9; Description=Tetratricopeptid e repeat
  Pfam annotation: Domain name=TPR_2; Domain location=288-321; Score =2.5; E_value=17; Accession=PF07719.9; Description=Tetratricopeptide repeat
  Pfam annotation: Domain name=TPR_2; Domain location=43-76; Score =10.1; E_value=1.9; Accession=PF07719.9; Description=Tetratricopeptide repeat
  Pfam annotation: Domain name=TPR_2; Domain location=85-118; Score =8.0; E_value=3.4; Accession=PF07719.9; Description=Tetratricopeptide repeat
  Pfam module annotation: Pfam domain module=TPR_1::TPR_1::TPR_1::TPR _1::TPR_1::TPR_2::TPR_2::TPR_2::TPR_2::TPR_2::TPR_2; Domain location =163-196::246-279::288-321::43-76::85-118::163-196::205-238::246 -279::288-321::43-76::85-118
TKEQRTRTRAKMAVGRRWDAVGDLRRALELKSGCLDEGSAELGDAYRDAAEAYAGVLDFDKALPLCSKALGIAEGRFGLDSKEVAKVRRLLAVVYTGLGRHVDALEQIELVKMVYEQLGLNVELSQVEIDGANIRILLGKSEEALNDLKRVMKRADKESEERALAYVAMAKILTSQERISDSKRCLEIARGIIDTNDSMNPGRVAEAYAEISLLHEAMAEFETSLSLMKKTLAILKDAKEMQHIEGSISARMGWLLLHSERVAEAVPYLETAVEKLKNCFGPQHFGLGFAYKNLGEAYLGMDRPESAVKFLMLAKGIIHATFGPTHEDSIDTTQSIANAYGVMGSYNLAMDFQEQVRHAYKTSGADSSDDLREACRLREQIKMKAKGLRHAVFPANSLPVLPDRND

SEQ ID NO: 106801 - protein, 366 aa, Setaria italica
  misc_feature (53)..(53): Xaa can be any naturally occurring amino acid
  misc_feature (98)..(98): Xaa can be any naturally occurring amino acid
  Transcript Sequence Number=SeqID_40827
  Gene Ontology: Mol. function=metal ion binding
  Homolog annotation: Hit_ID=B6SPK3; Match level="QueryCoverage=87%, HitCoverage=61%, E-value=1e-171, Identity=90%"; Hit description=Zinc ion binding protein
  Pfam annotation: Domain name=LIM; Domain location=57-115; Score=46.9; E_value=8.1e-11; Accession=PF00412.14; Description=LIM domain
NAESPPRQNVPVENVPPRRNVPIEDVPPQQYVPAKEPPPHVYPGSGFRNPFIXCRTCAGCHNPIGHGRFLSCMGSVWHPDCFRCFACNKPISEYEWCXFAMHDDQPYHRSCYKEFFHPKCDVCDNFIPTNRDGLIEYRAHPFWMQKYCPSHEDDGTPRCCSCERMEPREIKYITLDDGRKLCLECLNSSIMDTPECQHLYMDIQEFFEGLNMKVEQQIPLLLVERQALNEALEAEKNGHHLPETRGLCLSEEQIVRTILKRPQIGPGNRILDMITGPYKLSRRCEVTAILILYGLPRLQTGSILAHEMMHAYLRLKGFRNLSMAVEEGICQVLSHLWLESEIIAGSSSNVASSSAASSSSSSSSAP

SEQ ID NO: 106802 - protein, 452 aa, Setaria italica
  misc_feature (256)..(256): Xaa can be any naturally occurring amino acid
  Transcript Sequence Number=SeqID_40828
  Gene Ontology: Mol. function=metal ion binding
  Homolog annotation: Hit_ID=B6SPK3; Match level="QueryCoverage=100%, HitCoverage=100%, E-value=0.0, Identity=72%"; Hit description=Zinc ion binding protein
  Pfam annotation: Domain name=LIM; Domain location=136-191; Score =57.6; E_value=4.6e-14; Accession=PF00412.14; Description=LIM domain
  Pfam annotation: Domain name=UIM; Domain location=40-57; Score=17.4; E_value=0.059; Accession=PF02809.12; Description=Ubiquitin interaction motif
  Pfam annotation: Domain name=UIM; Domain location=72-89; Score=8.6; E_ value=3.1; Accession=PF02809.12; Description=Ubiquitin interaction motif
  Pfam module annotation: Pfam domain module=LIM::UIM::UIM; Domain location=136-191::40-57::72-89
MSWLNKIFKGSVNNRVSRGHYDGDWHEGHSSDYNRDTYGDSDNEDIDRAIALSLAEEDQNKGKAAIDTHYDLEEDEQLARALQESLNAESPPRQNVPVENVPPRRNVPIEDVPPQQYVPAKEPPPHVYPGSGFRTCAGCHNPIGHGRFLSCMGSVWHPDCFRCFACNKPISEYEFAMHDDQPYHRSCYKEFFHPKCDVCDNFIPTNRDGLIEYRAHPFWMQKYCPSHEDDGTPRCCSCERMEPREIKYITLDDGRXLVGSWVEAVQFSRGLCLSEEQIVRTILKRPQIGPGNRILDMITGPYKLSRRCEVTAILILYGLPRLQTGSILAHEMMHAYLRLKGFRNLSMAVEEGICQVLSHLWLESEIIAGSSSNVASSSAASSSSSSSSAPTSSKKGAKTEFEKKLGAFIKNQIETDSSEAYGDGFRAGYPAVERYGLRRTLDHIKLTGSFPY

SEQ ID NO: 106803 - protein, 53 aa, Setaria italica
  Transcript Sequence Number=SeqID_40829
KSGSIQGPIYDSSSKRSVGEHCSMVRFILKLAIREKRHYCAVKFQLHAKGCSL

SEQ ID NO: 106804 - protein, 137 aa, Setaria italica
  misc_feature (66)..(66): Xaa can be any naturally occurring amino acid
  Transcript Sequence Number=SeqID_40830
  Gene Ontology: Mol. function=nucleic acid binding; Cellular component= spliceosome; Biological process=nuclear mRNA splicing, via spliceosome
  Homolog annotation: Hit_ID=Q5N8W6; Match level="QueryCoverage=97%, HitCoverage=64%, E-value=3e-47, Identity=75%"; Hit description =Galactosyltransferase-like protein
  Pfam annotation: Domain name=RRM_1; Domain location=9-80; Score=66.8; E_value=8.3e-17; Accession=PF00076.14; Description=RNA recognition motif. (a.k.a. RRM, RBD, o
MARNPGRTVYIGNLDEKVSKRILYEILIQAGPIMDLHIPCDKENNRLKGYAFAEYETEEIAQYAVXLFSGLVRVNGKTLKFIAVPNLNPIPSSNGNNPVMPKLNPIPLPKQTQFAHCSDMPVSHTPAYPVVNGRIAG

SEQ ID NO: 106805 - protein, 152 aa, Setaria italica
  Transcript Sequence Number=SeqID_40831
  Gene Ontology: Mol. function=transferase activity, transferring glycosyl groups
  Homolog annotation: Hit_ID=Q5N8W6; Match level="QueryCoverage=41%, HitCoverage=30%, E-value=3e-15, Identity=69%"; Hit description =Galactosyltransferase-like protein
NFYEFIVNFHCFFKCASGLIICSDISRLIYLFSQYFSQIAGHEKPSSNSKNPVVPNLNPIPSSNGNNPVMPKLNPIPLPKQTQFAHCSDMPVSHTPAYPVVNGRIAGYGFSPTPYPYGVHPQGEIGRRDCPEPFGLSRAKGDLVLFHLSVYV

SEQ ID NO: 106806 - protein, 133 aa, Setaria italica
  Transcript Sequence Number=SeqID_40832
  Homolog annotation: Hit_ID=Q1SN04; Match level="QueryCoverage=99%, HitCoverage=17%, E-value=3e-33, Identity=46%"; Hit description =Tetratricopeptide-like helical
  Pfam annotation: Domain name=PPR; Domain location=33-67; Score=44.8; E_value=3.4e-10; Accession=PF01535.12; Description=PPR repeat
  Pfam annotation: Domain name=PPR; Domain location=68-102; Score=2.0; E_value=5.1; Accession=PF01535.12; Description=PPR repeat
  Pfam module annotation: Pfam domain module=PPR::PPR; Domain location =33-67::68-102
MLSNGLIDTYAKCGSLDDANKLFEIMGTGRDVFSWSSLIVGYAQFGYAKEALDLFARMRNLGIKPNHVTFVGVLTACSRVGLVDEGCYYYSIMEPEYGIVPTREHCSCVIDLLARAGRLSEAAKFVDQMPFEP

SEQ ID NO: 106807 - protein, 107 aa, Setaria italica
  Transcript Sequence Number=SeqID_40833
  Subcellular localization annotation: CTP_CleavageSite=93; ConfidenceScore=5.84e-01
LFLSFATPPFSLARRCSGSPGSPFLRPLPNPPHLGTSAPSQSVSPSHSAATAQPSPCRRSFSPPHHPAPAPPFVPELYVLHAPPRPLTPPAGRSSRRAGAPLPSSRR

SEQ ID NO: 106808 - protein, 88 aa, Setaria italica
  Transcript Sequence Number=SeqID_40834
AFVPIQLLEQGHGLQLIKQVRYVPVDSDFSGLSVLKSTEKLFALYGQMLTQCSVSINVSLKLWFFSNICIAILQLGHLSECVSNCCAA

SEQ ID NO: 106809 - protein, 504 aa, Setaria italica
  Transcript Sequence Number=SeqID_40835
  Gene Ontology: Mol. function=protein serine/threonine kinase activity; Cellular component=plasma membrane; Biological process =protein amino acid phosphorylation
  Homolog annotation: Hit_ID=O82107; Match level="QueryCoverage=92%, HitCoverage=72%, E-value=0.0, Identity=91%"; Hit description=Calcium- dependent protein kinase
  Pfam annotation: Domain name=Pkinase; Domain location=39-297; Score =353.9; E_value=2.9e-103; Accession=PF00069.17; Description=Protein kinase domain
  Pfam annotation: Domain name=Pkinase_Tyr; Domain location=39-295; Score=-50.9; E_value=2.4e-10; Accession=PF07714.9; Description =Protein tyrosine kinase
  Pfam annotation: Domain name=efhand; Domain location=344-372; Score =40.6; E_value=6.1e-09; Accession=PF00036.24; Description=EF hand
  Pfam annotation: Domain name=efhand; Domain location=380-408; Score =26.5; E_value=0.00011; Accession=PF00036.24; Description=EF hand
  Pfam annotation: Domain name=efhand; Domain location=416-444; Score =32.9; E_value=1.3e-06; Accession=PF00036.24; Description=EF hand
  Pfam annotation: Domain name=efhand; Domain location=450-478; Score =36.5; E_value=1e-07; Accession=PF00036.24; Description=EF hand
  Pfam module annotation: Pfam domain module=Pkinase::Pkinase _Tyr::efhand::efhand::efhand::efhand; Domain location=39-297::39 -295::344-372::380-408::416-444::450-478
SGEAPRPRPKVPQVKRVSSAGLLVGSVLKRKTENLKDKYSLGRRLGQGQFGTTYLCVERSTGKEFACKSILKRKLVTDDDVEDVRREIQIMYHLAGHPNVISIRGAYEDAVAVHLVMELCAGGELFDRIVQRGHYTERKAAELARVIVGVVEVCHSMGVMHRDLKPENFLFVDQKEEAALKTIDFGLSIFFRPGQIFTDVVGSPYYVAPEVLKKKYGPEADVWSAGVIIYILLCGVPPFWAENEQGIFEEVLHGKLDFESEPWPSISEGAKDLVRRMLIRDPKKRLTAHEVLRHPWVQVGGLAPDKPLDSAVLSRMKQFSAMNKLKKMALRVIAENLSEDEIAGLKEMFKMIDADNSGQITFEELKVGLKKVGANLQESEIYALMQAADVDNSGTIDYGEFIAATLHLNKVEREDHLFAAFQYFDKDGSGYITADELQLACEEFGLGDVKLEDMIGEVDQDNDGRIDYNEFVAMMQKPTLGLPKKTGGLQNSFSIGFREALRMS

SEQ ID NO: 106810 - protein, 85 aa, Setaria italica
  Transcript Sequence Number=SeqID_40836
CRPPTYSSVLTYIYCKVLCDYDLDIQRPSYYLQVLSLHPTGNILDKFFFNHDCLTTMHLSLETKEDNNMLLISKHAWGNFQLHNK

SEQ ID NO: 106811 - protein, 312 aa, Setaria italica
  misc_feature (164)..(164): Xaa can be any naturally occurring amino acid
  Transcript Sequence Number=SeqID_40837
  Gene Ontology: Mol. function=ATP binding; Biological process=apoptosis
  Homolog annotation: Hit_ID=Q53PM4; Match level="QueryCoverage=99%, HitCoverage=62%, E-value=1e-111, Identity=63%"; Hit description=NB -ARC domain containing protein
  Pfam annotation: Domain name=NB-ARC; Domain location=51-303; Score= -83.4; E_value=0.00035; Accession=PF00931.14; Description=NB-ARC domain
PSAAKLKCMLESLETKIQDMREFVILLASCPRLPHQPYSTYLFMDRCMFGRYSEKQQVISFLLCNDTHGCPNLDILPVLGPHRVGKKTLVQHACKDERVRNCFTDILFFKGHDLENGEFAANLKVNSRKCLFVIEFSWGVDEVAWMNFKSYLQNVVGAVVVVIXIGRTQEVAKFGTAHPIWMKSLSEEEYWYYFKALAFGSMDPDEHPRLASLGMQLATELKGSFLGANILGEMLRSNPNPQFWHAILSSVRALVQEHLFSSGVHSEDLLERNAPVDFPMAFVGAHGQRCLVYDLREADPGQDELPLPTSQE

SEQ ID NO: 106812 - protein, 60 aa, Setaria italica
  Transcript Sequence Number=SeqID_40838
LPFTIQTLITTRALHTQELSTQTTSFFSYLQESLSLGQGWGFLYTPAAATAGKEGAASMG

SEQ ID NO: 106813 - protein, 315 aa, Setaria italica
  misc_feature (60)..(60): Xaa can be any naturally occurring amino acid
  Transcript Sequence Number=SeqID_40839
  Homolog annotation: Hit_ID=Q8H2N8; Match level="QueryCoverage=62%, HitCoverage=38%, E-value=3e-37, Identity=42%"; Hit description =Proteophosphoglycan-like
  Pfam annotation: Domain name=DUF566; Domain location=1-280; Score =458.0; E_value=1.4e-134; Accession=PF04484.4; Description=Family of unknown function (DUF566)
  Subcellular localization annotation: CTP_CleavageSite=38; ConfidenceScore=5.51e-01
SNSGAGDPPRRGISVPARFWQETNSRLRRLPEPGLPLPSSGRRSFSDSPMSPRLPGRSPXSPCRGSRGAASPSRGRGGEASPNGHMMQAPANAPSIISFAAEVRRAKKGENRIEEAHRLRLLDNRHLQWRCINARTDASLLVQSFTAEKTLHSAWKEISRLRDNVSSKRCRLQLQKQKLKLFAILRGQMSYLEDWSHIEKHHSSALSAAIKALKASTLRLPVVDGAKGDVQGVKEAVNSAVDVMHTMTSSICNLLSKVEGTSSVVSELAKLATQEQMLLDQSKDLLSTVAAIHVKKCSLQAHMLQRNQKQCPTHL

SEQ ID NO: 106814 - protein, 216 aa, Setaria italica
  Transcript Sequence Number=SeqID_40840
MAAAGAAGDGEKSGFRWLDLARYAVAAVVTVVIIAVVVHAIQVVFRPDSLTLSVLGGSVSTNSLPPATDPSLSFSYTLRARNPSGRVRMYYFNINTFLFNSSTPATTPEPMADCLVSFQMPDMSVMQMRFTDSLIQRTVQRNPNDIMPFAFDALHKTGGSIKDVTMLVNGTLVTEIRFGFNTTPRVVKYYCRQLVVGLYDVATMKTDQETSCTTSS

SEQ ID NO: 106815 - protein, 1099 aa, Setaria italica
  misc_feature (718)..(718): Xaa can be any naturally occurring amino acid
  Transcript Sequence Number=SeqID_40841
  Gene Ontology: Mol. function=DNA-directed RNA polymerase activity; Cellular component=nucleus; Biological process=transcription
  Homolog annotation: Hit_ID=Q0IWP9; Match level="QueryCoverage=99%, HitCoverage=93%, E-value=0.0, Identity=82%"; Hit description=DNA -directed RNA polymerase
  Pfam annotation: Domain name=RNA_pol_Rpa2_4; Domain location=490-547; Score=83.9; E_value=5.9e-22; Accession=PF06883.4; Description=RNA polymerase I, Rpa2 specific domain
  Pfam annotation: Domain name=RNA_pol_Rpb2_1; Domain location=2-338; Score=-50.9; E_value=0.002; Accession=PF04563.7; Description=RNA polymerase beta subunit
  Pfam annotation: Domain name=RNA_pol_Rpb2_2; Domain location=89-288; Score=-4.4; E_value=0.00013; Accession=PF04561.6; Description=RNA polymerase Rpb2, domain 2
  Pfam annotation: Domain name=RNA_pol_Rpb2_3; Domain location=371-437; Score=109.0; E_value=1.6e-29; Accession=PF04565.8; Description=RNA polymerase Rpb2, domain 3
  Pfam annotation: Domain name=RNA_pol_Rpb2_6; Domain location=603-974; Score=511.1; E_value=1.4e-150; Accession=PF00562.20; Description=RNA polymerase Rpb2, domain 6
  Pfam annotation: Domain name=RNA_pol_Rpb2_7; Domain location=976 -1088; Score=92.1; E_value=2e-24; Accession=PF04560.12; Description =RNA polymerase Rpb2, domain 7
  Pfam module annotation: Pfam domain module=RNA_pol_Rpa2_4::RNA_pol _Rpb2_1::RNA_pol_Rpb2_2::RNA_pol_Rpb2_3::RNA_pol_Rpb2_6::RNA_pol_Rpb2_ 7; Domain location=490-547::2-338::89-288::371-437::603-974::976-1088
LPSSKWQARTTYHGEFKVDVCLQCNEDGAQIRHTFNFGHLPIMLMSKLCHLRDADPHKLVFHGEEATEMGGYFICGGMERLIRILILQKRNYPMGLVRGSFVKRGAGYTDKAVVIRCVHSDQSSVTIKLYYLQNGSARLGFWLGGREFLLPVGIVLKALIDTSDREIFTSLTCCYSDKYGRGKGVVSTQLIGERAQIILDEVRDLSLLTRMQCLVHIGKYFRSVMEGFEHYDYETVAKAVLKDYIFVHLENNHDKFNLLIFMLQKLYALVDQTASPDNADALQFQEALLPGHLITIFLKDRLQDWLRKSKRLIIEEATKNKSFDLNNALEVRKFLTKHTTFVGRAIESMIKIGKVNSQSGLDLPQRDGMTIHAERLNFHRYISHFRSVHRGSAFAKMRTTSVRKLLPESWGFLCPVHTPDGEPCGLLNHMTSTCRISSVYNSEGVVKDFGKIKKSLSFELVRVGMNPVLPKIERTGPPEVLHVHLDGCILGTIASARIEEAVNYLRMLKLLAHSGIPEDLEVGYVPLSLGGAYPGLYLFTNPARFVRPVKSLFGLPDGKQSIELIGPFEQAFMEIRCPDGGDGGRKEKFPATHEEIHPTAILSVVANLTPWSDHNQSPRNMYQCQMAKQTMGFCGQALKFRTDVKAFHLQTPQTPIVRTATYGKYCMDEFPSGTNAIVAVLAYTGYDMEDAMILNKSAVDRGMFRGHIYQTECIDLSXKNRENVPEIFAKSVLSRDTSTAIDSDGLPRLGQTVHPNEQYYSVYNRLTGAIRPVRLKGTEPAFIDYVAVNGASSKGDFQKANIRLRRVRNPIIGDKFSSRHGQKGVCSQLWPDIDMPFSANTGMRPDLIINPHAFPSRMTIAMLLESMAAKAGSLHGKFMDATPFASSVKKEGKDPRKPDSIVDELGPMLASYGFNYHGTETLYSGFFGTEMDCEIFIGPVYYQRLRHMVSDKFQVRTTGRIDQITRQPIGGRKHGGGIRFGEMERDALLAHGSSYLLHDRLHSCSDYHIADVCSFCGSLLTATVIKSDTQKKAKREMLGLPTVRPQKNFACQACKTSKGMETVAMPYVFRYLAAELAAMNIKLELRLSNKSELPPSQGS

SEQ ID NO: 106816 - protein, 254 aa, Setaria italica
  misc_feature (244)..(244): Xaa can be any naturally occurring amino acid
  Transcript Sequence Number=SeqID_40842
  Gene Ontology: Mol. function=pectate lyase activity
  Homolog annotation: Hit_ID=Q43862; Match level="QueryCoverage=99%, HitCoverage=57%, E-value=1e-117, Identity=81%"; Hit description =Pectate lyase homolog
  Pfam annotation: Domain name=Pec_lyase_C; Domain location=22-206; Score=289.7; E_value=6.3e-84; Accession=PF00544.11; Description =Pectate lyase
TVVIQGRPLWIVFARDMVVRLRQELIVSDNKTIDGRGAQVHITGAQITLQSVSHVIIHNVHIHHSAPHSGGIIRDSKRHYGLRTRSDGDGISVLSSSNVWIDHVSMYRCSDGLIDVVNGSTGITVSNSHFTKHDHVMLFGASNDNPQDRMMQVTVAFNHFGKGLVQRMPRCRYGFFHVVNNDYTHWQMYAIGGNKNPTIISQGNRSSPPRPQAKEVTKREYTPYSEYKDWVWKSQGDVMMNGAXFNESGGQNER

SEQ ID NO: 106817 - protein, 603 aa, Setaria italica
  Transcript Sequence Number=SeqID_40843
  Gene Ontology: Mol. function=sucrose transmembrane transporter activity; Cellular component=integral to plasma membrane; Biological process=sucrose transport
  Homolog annotation: Hit_ID=A4GXD0; Match level="QueryCoverage=98%, HitCoverage=97%, E-value=0.0, Identity=65%"; Hit description=Sucrose transporter protein
  Pfam annotation: Domain name=MFS_1; Domain location=68-551; Score =35.0; E_value=2.9e-07; Accession=PF07690.8; Description=Major Facilitator Superfamily
  Pfam annotation: Domain name=Sugar_tr; Domain location=66-561; Score=- 124.0; E_value=0.00043; Accession=PF00083.16; Description=Sugar (and other) transporter
  Pfam module annotation: Pfam domain module=MFS_1::Sugar_tr; Domain location=68-551::66-561
MDSGAGGGGVTAIRVPYRHLRDAEMELVSLNGTPRAGDAPPKDPEHRNGDAAHHEGSRGSSRTKLVLACMVAAGVQFGWALQLSLLTPYIQTLGIDHAMASFIWLCGPITGFVVQPCVGVWSDKCRSKYGRRRPFILAGCLMICAAVTLVGFSADLGYILGDTTEHCSTYKGSRFRAAIVFILGFWMLDLANNTVQGPARALLADLSGPDQCNSANAIFCSWMAVGNILGFSAGASGNWHRWFPFLTTRACCEACGNLKAAFLIAVVFLLFCMSVTLYFAEEIPLEPKDAQGLSDSAPLLNGSRDDGHTLNEQNNERLPNGHVDRNNVSANSNTEEFTDVNSNLNRDNGEVFNDGPGAVLVNILTSMRHLPPGMHSVLVVMALTWLSWFPFFLFDTDWMGREVYHGDPNGDLSERKAYENGVREGAFGLLLNSVVLGIGSFLVDPLCRMFGARLVWAISNFTVFICMMATTILSWISSDLYSSKLHHIIGANKTVKIAALVVFSILGLPLSITYSVPFSVTAELTAGTGGGQGLATGVLNLAIVVPQIVVSLGAGPWDALYGGGNIPAFALASIFSLAAGVLAVLKLPKLSNSYQSAGFHGFG

SEQ ID NO: 106818 - protein, 60 aa, Setaria italica
  Transcript Sequence Number=SeqID_40844
SVPAALLYCMGLSSSGQISPVIFPTASRFSFAISDFPQIEFIHGLAPIAVLGFTNKFSNH

SEQ ID NO: 106819 - protein, 126 aa, Setaria italica
  misc_feature (8)..(8): Xaa can be any naturally occurring amino acid
  Transcript Sequence Number=SeqID_40845
  Gene Ontology: Mol. function=protein binding; Cellular component =perinuclear region of cytoplasm; Biological process=nucleocytoplasmic transport
  Homolog annotation: Hit_ID=B6UHU4; Match level="QueryCoverage=92%, HitCoverage=43%, E-value=6e-30, Identity=59%"; Hit description =Acidic leucine-rich nuclear phosphoprotein 32 family member A
  Pfam annotation: Domain name=LRR_1; Domain location=1-21; Score=4.5; E_value=41; Accession=PF00560.25; Description=Leucine Rich Repeat
  Pfam annotation: Domain name=LRR_1; Domain location=23-43; Score=3.2; E_value=76; Accession=PF00560.25; Description=Leucine Rich Repeat
  Pfam annotation: Domain name=LRR_1; Domain location=50-73; Score =11.8; E_value=1.7; Accession=PF00560.25; Description=Leucine Rich Repeat
  Pfam annotation: Domain name=LRR_1; Domain location=74-105; Score =0.9; E_value=2e+02; Accession=PF00560.25; Description=Leucine Rich Repeat
  Pfam module annotation: Pfam domain module=LRR_1::LRR_1::LRR_1::LRR _1; Domain location=1-21::23-43::50-73::74-105
PLEELSVXGARLSSLAGLPRLPALRRLSLPDNRLSGAAALAAVAEACGATLRHLDLGNNRFAEVDELEPLAKLGVEALDLYQCPVSKIKGYREKVFALIPSLKYLDGVDAEGNERLETDDEEDVEE

SEQ ID NO: 106820 - protein, 69 aa, Setaria italica
  misc_feature (60)..(60): Xaa can be any naturally occurring amino acid
  Transcript Sequence Number=SeqID_40846
  Gene Ontology: Mol. function=metal ion binding
  Homolog annotation: Hit_ID=B6T7N2; Match level="QueryCoverage=81%, HitCoverage=22%, E-value=2e-23, Identity=92%"; Hit description =Inhibitor of growth protein 5
LLSGVESLPSMLHRNYSLMRELDKSLQGVQLENEQRCQQEIEDIKHGLESGSITYDPANXEISEEAIEE

SEQ ID NO: 106821 - protein, 233 aa, Setaria italica
  misc_feature (223)..(223): Xaa can be any naturally occurring amino acid
  Transcript Sequence Number=SeqID_40847
  Gene Ontology: Mol. function=metal ion binding; Cellular component =nucleus; Biological process=negative regulation of transcription, DNA-dependent
  Homolog annotation: Hit_ID=B6T7N2; Match level="QueryCoverage=100%, HitCoverage=96%, E-value=9e-91, Identity=72%"; Hit description =Inhibitor of growth protein 5
  Pfam annotation: Domain name=PHD; Domain location=189-233; Score =22.3; E_value=9.5e-05; Accession=PF00628.21; Description=PHD-finger
MGFLEDFQASVESLPSMLHRNYSLMRELDKSLQGVQLENEQRCQQEIEDIKHGLESGSITYDPAKLKFSEEAIEEQKHCVRIADEKVALATQTYDLVDAHIQQLDQFLRKLEEIRQEKEAAAAVAAGTVAPAAATPAASAGVSTADATPKTGRSGERGRGGRKKAKVPTEPPAPPIDLELPVDPNEPTYCICNQVSYGEMVACDNPNCKIEWYHIGLVGVKSXQGKWYCPSCV

SEQ ID NO: 106822 - protein, 210 aa, Setaria italica
  misc_feature (76)..(76): Xaa can be any naturally occurring amino acid
  Transcript Sequence Number=SeqID_40848
  Gene Ontology: Mol. function=SNAP receptor activity; Cellular component=membrane; Biological process=intracellular protein transport
  Homolog annotation: Hit_ID=B6TK09; Match level="QueryCoverage=87%, HitCoverage=58%, E-value=4e-88, Identity=90%"; Hit description =Syntaxin-related protein KNOLLE
  Pfam annotation: Domain name=SNARE; Domain location=117-179; Score =92.3; E_value=1.7e-24; Accession=PF05739.11; Description=SNARE domain
IRARLESLDRANAAQRRLSAGCREGTPLDRTRTAVTAGLRKKLKDLMLDFQALRQRMMSEYKETVERRYYTLTGEXVPEEEVIERIISDGRGEELLGAAVAEHGKGAVLAAVHEIQDRHDAAREVERSLLELHQVFLDMAVMVETQGEKLDDIESHVANASHYVQGGNKELGKAREYQRSSRKWLCIGIIILLLLILLVIVPIATSFRKS

SEQ ID NO: 106823 - protein, 108 aa, Setaria italica
  Transcript Sequence Number=SeqID_40849
LFQERDPAFMKLKILHRFIGDITKTTEEPRASVTEVQFTGSDETHERNNDTDSDCGDDGNNDHSDYGDSNSDGDTNNDDGTDTLCALCDDGGRLLSCIGQCKRSFHPR

SEQ ID NO: 106824 - protein, 150 aa, Setaria italica
  Transcript Sequence Number=SeqID_40850
VSRSINHTNSSAIQTQFIPFGHLSAFFSSSYSYRLPYKDRVWAWCYACQQSIQIRPIRDSIVGAIIYKQLPHGTRVPGLRRASNEGIDPGVMLACHCHPSAEACRAHHLKCTQEIDLRPESALRIGSTSSSSYKDMWLYYVFEKKNWIRV

SEQ ID NO: 106825 - protein, 286 aa, Setaria italica
  misc_feature (15)..(15): Xaa can be any naturally occurring amino acid
  misc_feature (33)..(33): Xaa can be any naturally occurring amino acid
  misc_feature (46)..(46): Xaa can be any naturally occurring amino acid
  Transcript Sequence Number=SeqID_40851
  Homolog annotation: Hit_ID=A2T1U2; Match level="QueryCoverage=86%, HitCoverage=78%, E-value=6e-86, Identity=65%"; Hit description=OR -LDel
  Subcellular localization annotation: CTP_CleavageSite=18; ConfidenceScore=5.43e-01
AWRPPAAASGGSPDXLPSSSSSSPPTPPFGVGXDQAAGSPGFCIIXGPETVQDFAKLDLQEIQDNIRSRRNKIFLHMEEIRRLRIQQRIKNAELGISVDEPDRELPDFPSFIPFLPPLSAANLKVYYATCFTLIAGIMVFGGFLAPILELKLGLGGTSYEDFIRSVHLPMQLSQVDPIVASFSGGAVGVISALMVVEINNVKQQEHKRCKYCLGTGYLACARCSSTGALVLTEPVSTFSDGDQPLSAPRTERCPNCSGAGKVMCPTCLCTGMAMASEHDPRIDPFI

SEQ ID NO: 106826 - protein, 100 aa, Setaria italica
  Transcript Sequence Number=SeqID_40852
QACLLLLPLRWFLVVEWPACGLLPLPSSNIWLHDIIFFVSQVKHFIGTTSHLHICLCTDGTRLATNASTNLSMPLLLSIPSSSLLPPTAISPITISSCKP

SEQ ID NO: 106827 - protein, 72 aa, Setaria italica
  Transcript Sequence Number=SeqID_40853
  Subcellular localization annotation: CTP_CleavageSite=57; ConfidenceScore=5.17e-01
WADVLYAVNTNDSVWSNNNEVNKFSSNQSLHMIVYTFQVQLGSYTQKVTTPMVFTINSSSSSDKIQKLTMGD

SEQ ID NO: 106828 - protein, 277 aa, Setaria italica
  Transcript Sequence Number=SeqID_40854
  Gene Ontology: Mol. function=protein binding; Cellular component =nucleus; Biological process=ribosome biogenesis
  Homolog annotation: Hit_ID=B9SW27; Match level="QueryCoverage=81%, HitCoverage=78%, E-value=4e-52, Identity=45%"; Hit description=rRNA -processing protein UTP23, putative
  Pfam annotation: Domain name=Fcf1; Domain location=51-152; Score =68.0; E_value=3.5e-17; Accession=PF04900.4; Description=Fcf1
MRVKKRSKNRKAVKFYSTCFGFREPYKVLIDGTFVHHLLTQRLLPADDALRDLLSASRTPALFTSKCIVAELRRLGKSHAESFDSAQLLATTKCEHDKVVSAVNCVLSLIGDKNPEHFFVATQDADLREKLREIPGVPVIYGLKNSLFIEQPSVQQRKFAQLDEEKRLNMDISEYKKLMKAASEGKTTASENGSDGEQHERPISSLVKNALGVADKSKFKRNRAKGPNPLSCKKKKPKPQPSAIQNQGATADGEAKRKRVRKRKRSQKDNKQAEMAS

SEQ ID NO: 106829 - protein, 225 aa, Setaria italica
  misc_feature (139)..(139): Xaa can be any naturally occurring amino acid
  Transcript Sequence Number=SeqID_40855
MDHQANQYDKVVYASGVLYWDYQEDLLWCDVAKSAGGIIKMPWMLQGSKSKEWDHHSIDTSSDGILMCTTTGTNGLAIYQLVEGGVYWKLKHKKGWTDIIEVSGDAFQFCHSMKLRNGWQSRFYERWLVKPLGLESERXLYLGVTEKWRAMDMVLLRYDLDSGKVEDIGKGLSNRFDMMPVFGYRNSMAALPQIAEPISSGGICDGNPGRCICATKGSAHHLYNS

SEQ ID NO: 106830 - protein, 81 aa, Setaria italica
  Transcript Sequence Number=SeqID_40856
PTRLPLVNTISLGILLGEMLQRYIYALADLFVIVQYTNKYFQCYCRGRHLVKSFYFVHVIFIVGRSLLKQANLDMSSLSLM

SEQ ID NO: 106831 - protein, 135 aa, Setaria italica
  misc_feature (6)..(6): Xaa can be any naturally occurring amino acid
  Transcript Sequence Number=SeqID_40857
  Gene Ontology: Mol. function=nucleic acid binding; Cellular component= ribonucleoprotein complex
  Homolog annotation: Hit_ID=B6TGB9; Match level="QueryCoverage=100%, HitCoverage=34%, E-value=1e-39, Identity=66%"; Hit description =Heterogeneous nuclear ribonucleoprotein A3
  Pfam annotation: Domain name=RRM_1; Domain location=59-127; Score =80.7; E_value=5.1e-21; Accession=PF00076.14; Description=RNA recognition motif. (a.k.a. RRM, RBD, o
MAGYPXEDNQHALNGYEEEEVDEEEGHPGRRGGRDGGSGYGDVGGEDGRGAGGDSSGKIFVGGVAWETTEETFSKHFEKYGAITDSVIMKDKHTKMPRGFGFVTFSDPSVIDKVLEDEHVIDGRTVEVKRTVPRE

SEQ ID NO: 106832 - protein, 65 aa, Setaria italica
  Transcript Sequence Number=SeqID_40858
VLHISLITQIHHNGHHHTKAEILHHQRKKGLGDMLCTYLYIARKVSCMVPAMEPAMYGQVFDIRS

SEQ ID NO: 106833 - protein, 292 aa, Setaria italica
  Transcript Sequence Number=SeqID_40859
  Homolog annotation: Hit_ID=Q2HSS2; Match level="QueryCoverage=82%, HitCoverage=77%, E-value=2e-55, Identity=44%"; Hit description =F5O11.19, related
  Pfam annotation: Domain name=SNARE_assoc; Domain location=117-238; Score=104.8; E_value=2.9e-28; Accession=PF09335.3; Description=SNARE associated Golgi protein
MGSPGSANGRHGEYVRIPEEVEVAVKGEADAATAVKAAAAAECPTVLRWRAIRWWAKVAVLGIFLAGAGAAAVVFLGPLVIKKVVAPILYWESTTFSRPAIALICFGAIALFPSVLLPSSPFMWLAGMTFGYLYGFLIITAGMSIGMSLPYFIGSAFHCRIHRWLEKWPKKAAFVRLAGEGDWHHQFKAVALLRISPFPYIVFNYASVATNVKYCPYIAGSMAGTIHETFLAIYSGKLLQSLALATSQGSFLSVDQIIYNGIGFTIAAASTAAITIYAKKALQKLQAEDEIF

SEQ ID NO: 106834 - protein, 84 aa, Setaria italica
  Transcript Sequence Number=SeqID_40860
VLVPSFLKAFLHMQAEIATVSRLVSERYTDIHLFHHHIFTTTKFGFKGLRLIAGYKNTRVLAAASTESPGGSSEFSDYSLQCRT

SEQ ID NO: 106835 - protein, 437 aa, Setaria italica
  Transcript Sequence Number=SeqID_40861
  Gene Ontology: Mol. function=nucleic acid binding; Cellular component= ribonucleoprotein complex
  Homolog annotation: Hit_ID=B6TGB9; Match level="QueryCoverage=45%, HitCoverage=51%, E-value=9e-97, Identity=89%"; Hit description =Heterogeneous nuclear ribonucleoprotein A3
  Pfam annotation: Domain name=NID; Domain location=144-217; Score= -1.4; E_value=0.065; Accession=PF04674.4; Description=NmiIFP 35 domain (NID)
  Pfam annotation: Domain name=RRM_1; Domain location=102-170; Score =75.8; E_value=1.6e-19; Accession=PF00076.14; Description=RNA recognition motif. (a.k.a. RRM, RBD, o
  Pfam annotation: Domain name=RRM_1; Domain location=191-261; Score =86.6; E_value=8.7e-23; Accession=PF00076.14; Description=RNA recognition motif. (a.k.a. RRM, RBD, o
  Pfam module annotation: Pfam domain module=NID::RRM_1::RRM_1; Domain location=144-217::102-170::191-261
MAGYGEENQDAMNGYEEEEEEEEVEEVEEVYEEEEEEGDGEAEDGAAAAAPEETEAAAPAGAAEMRSGGGGQGLAEVVGDADASGEEGRDVDSGGGDASGKIFVGGVAWETTEESFTKHFQKYGAITDSVIMKDKHTKMPRGFGFVTFSDPSVIDRVLEDEHVINGRTVEVKRTVPREEMTTKDGPKTRKIFIGGIPPSLTEDKLKEHFSSYGKVVEHQIMLDHSTGRSRGFGFVTFESEDAVERVISEGRMRDLGGKQVEIKKAEPKKHGSDHSSNGRSSHGGGGYRNSYRSGGAGSGSGGSGGGGAGGGGGYGYGGAYRSAAAGYGYDSGAGAAGYGYGRGYGYGGNAGFGSGFGGGYGGSMYGGAYGAYGAYGGGAYGGGAYGGGAYGGGAYGGAPGGYGASGYGGYGGAGGAGGAGGGSSGARGSSRYHPYGK

SEQ ID NO: 106836 - protein, 94 aa, Setaria italica
  Transcript Sequence Number=SeqID_40862
KKNEGCQAENSPKYLGYPCISEDVETSNWSKQPVGEEKINASRMEDNTQSHAESQMLTHEAKRDCRRQAFCSYKLQLLMALNNCYKLQQLTLNS

SEQ ID NO: 106837 - protein, 117 aa, Setaria italica
  Transcript Sequence Number=SeqID_40863
EGIGGEEELSILFSLRRRRTTAELDRAREEGRRSLFLASPAGRSREDRKKRGIQQGGLIGRRPAVASLPSDQILLSRAPQMVESEGEAAACAAAVLTPPLSLEGGLAAELRPANLVR

SEQ ID NO: 106838 - protein, 267 aa, Setaria italica
  misc_feature (41)..(41): Xaa can be any naturally occurring amino acid
  misc_feature (194)..(194): Xaa can be any naturally occurring amino acid
  Transcript Sequence Number=SeqID_40864
  Gene Ontology: Mol. function=hydrolase activity, hydrolyzing O -glycosyl compounds; Cellular component=extracellular region; Biological process=carbohydrate metabolic process
  Homolog annotation: Hit_ID=B6TTA1; Match level="QueryCoverage=68%, HitCoverage=33%, E-value=3e-42, Identity=49%"; Hit description =Cellulase containing protein
VLKLTFLISFVSYSFPSYPRYQAVLDKAFDWADKYNIGVNXHLHAAPWSQNGHEHSGSRDGTVGWGTSDGNIDQTVQVIEALAARYASRKSLLAIELLNEPSIEVQFDALKKYYKAGYEAVHRHVQRDDVYVIMSGRLIQNGATEMVDFASRFKKCVLDVHYYNLYDPKYESMSAGQNIDYVKTVRANHLNTLXEQNGALVFVGECRWADGLVLFTILLHIFTSYDISYQATQENMELDICNFPYHYYESSRILPNIKFKRCIMNHS

SEQ ID NO: 106839 - protein, 245 aa, Setaria italica
  Transcript Sequence Number=SeqID_40865
  Gene Ontology: Mol. function=hydrolase activity, hydrolyzing O -glycosyl compounds; Cellular component=integral to membrane; Biological process=cell wall organization and biogenesis
  Homolog annotation: Hit_ID=B6SSM4; Match level="QueryCoverage=99%, HitCoverage=39%, E-value=1e-101, Identity=74%"; Hit description=Endo- 1,4-beta-glucanase
  Pfam annotation: Domain name=Glyco_hydro_9; Domain location=66-245; Score=-104.5; E_value=5e-10; Accession=PF00759.11; Description =Glycosyl hydrolase family 9
SWLLAGPGDQGRKKKKYVDIGCRTISRKLFVWTLGVLLAAAVFAGVVAGIAKAIPRRHRPPPPPDDYTVALHKALMFFNAQRSGKLPKHNNVPWRGNSCMKDGLSDPAVRRSLVGGYYDAGNAVKFNFPAAFSMTLLSWSVIEYSAKYEAVGELGHVRDIIKWGADYFLKTFNSSADSIDRVIAQVGSAATSPGSTQPNDHYCWMRPEDIDYPRPVVECHACSDLAAEMAAALAAASIVFRDNLN

SEQ ID NO: 106840 - protein, 663 aa, Setaria italica
  misc_feature (215)..(215): Xaa can be any naturally occurring amino acid
  misc_feature (377)..(377): Xaa can be any naturally occurring amino acid
  Transcript Sequence Number=SeqID_40866
  Gene Ontology: Mol. function=binding
  Homolog annotation: Hit_ID=Q9LNE9; Match level="QueryCoverage=38%, HitCoverage=14%, E-value=2e-29, Identity=34%"; Hit description =T21E18.2 protein
MEVEGGGAGGGEEVVELEDAVKLLVDHLVLPALLRREEALKPENQETVARQMHATVLLYNYYHRKQFPQLEFADPERFCMTASLTAGDALLVYLNQVHDQRGNGAGAGLSVTDKAVVDACDIAEALDATKDSPEMTMWPISKVAVLLLDRAKKMCLLEHGSETKGVFSLLEKDIKSALGGSRSSDLSVQESTNKSVALPSEPYVLQQIAYSEVEXKTGIKRTSLRFLEEHRVYSLSKKGTATMLFVLQYEQNVNSKLKERPLEVLVDRMSGPIFRRDPYLATTYVVECYHSTTYEEVLLNVRNREWPLDCSLSVPKERLFQNRNPSSHSEIDESLKEQEANSRSKMKKIATNISTPKKNKQVVKAVGDSGNSKNKKXSNTNSKRKPETFRSTLATYTEHGDGESPTKETDSLAAPDVENLKFVSAKPTKSTNGGSVDLQARVQMDKDRTEKHSKSRNMPQDIFPALDVDPVTKNHALESQKEKVSEKSGGITGSMNVQKYATLQLLRKMRDDTLRELCMLGDRSAQYEMEIQTILTEGEMTPKVASILKKYENSWNMMEAANPTCSGEGCQTMNIKRKKLKEAILLRSKCQELDDICRDSNWILPRYKVLPSVTGDMYQASVYLTGPDFNLSADGDNKVTPHEARDSAASNMLYQLQQKAMES

SEQ ID NO: 106841 - protein, 117 aa, Setaria italica
  misc_feature (7)..(7): Xaa can be any naturally occurring amino acid
  misc_feature (23)..(23): Xaa can be any naturally occurring amino acid
  misc_feature (42)..(42): Xaa can be any naturally occurring amino acid
  misc_feature (111)..(111): Xaa can be any naturally occurring amino acid
  misc_feature (113)..(113): Xaa can be any naturally occurring amino acid
  Transcript Sequence Number=SeqID_40867
  Gene Ontology: Mol. function=protein dimerization activity
  Homolog annotation: Hit_ID=Q3LAG0; Match level="QueryCoverage=99%, HitCoverage=14%, E-value=2e-32, Identity=59%"; Hit description =Transposase-related protein w-gary2
GGKLQAXDCVHCHKRLSAISMGXRSHLSRHLQTCQARSHKGXFYPSSLPSLKSRGQDELSPSLTNGKIQTAEYNSKLLRSGSSGDNSPIVRPIQVVPAHQPLPTADFPSLXEXRTSF

SEQ ID NO: 106842 - protein, 203 aa, Setaria italica
  Transcript Sequence Number=SeqID_40868
  Pfam annotation: Domain name=Cgr1; Domain location=69-179; Score= -32.2; E_value=0.099; Accession=PF03879.6; Description=Cgr1 family
MASHLDFRYLDEGLGGERGKRKRREEAEEAEAAAADSMDLDADAPRPSKLRAMPSLSDPSKPASFGRPTYDGVIAGRVSGRRWKEPRTRRASAVVVSRKPTPLEQRVREKSLKRAYQARKAELKEEIRQNKVAKRKAREEREKRKQENVLRTGTKLQRVTNPKTIQKIAKSKKRKQLKVVPDEFLGGKKSEASRRIQVPGLEN

SEQ ID NO: 106843 - protein, 49 aa, Setaria italica
  misc_feature (15)..(15): Xaa can be any naturally occurring amino acid
  misc_feature (23)..(23): Xaa can be any naturally occurring amino acid
  Transcript Sequence Number=SeqID_40869
  Gene Ontology: Mol. function=RNA polymerase II transcription factor activity; Cellular component=transcription factor TFIIF complex; Biological process=transcription initiation from RNA polymerase II promoter
  Homolog annotation: Hit_ID=Q5N8X8; Match level="QueryCoverage=97%, HitCoverage=17%, E-value=2e-17, Identity=89%"; Hit description =Putative transcription initiation factor IIF beta subunit
QLMQETDQPEQFLKXILNDLCVXNKRGPNQGTHELKPEYKKSTEDNSAT

SEQ ID NO: 106844 - protein, 237 aa, Setaria italica
  Transcript Sequence Number=SeqID_40870
  Gene Ontology: Mol. function=protein serine/threonine kinase activity; Cellular component=integral to membrane; Biological process=protein amino acid phosphorylation
  Homolog annotation: Hit_ID=Q0ZA03; Match level="QueryCoverage=92%, HitCoverage=27%, E-value=1e-64, Identity=46%"; Hit description =Brassinosteroid-insensitive 1
  Pfam annotation: Domain name=LRR_1; Domain location=104-126; Score =15.9; E_value=0.17; Accession=PF00560.25; Description=Leucine Rich Repeat
  Pfam annotation: Domain name=LRR_1; Domain location=128-150; Score =12.8; E_value=1.1; Accession=PF00560.25; Description=Leucine Rich Repeat
  Pfam annotation: Domain name=LRR_1; Domain location=152-174; Score =9.4; E_value=4.8; Accession=PF00560.25; Description=Leucine Rich Repeat
  Pfam annotation: Domain name=LRR_1; Domain location=176-198; Score =14.2; E_value=0.55; Accession=PF00560.25; Description=Leucine Rich Repeat
  Pfam annotation: Domain name=LRR_1; Domain location=200-222; Score =10.3; E_value=3.3; Accession=PF00560.25; Description=Leucine Rich Repeat
  Pfam annotation: Domain name=LRR_1; Domain location=28-51; Score =15.2; E_value=0.28; Accession=PF00560.25; Description=Leucine Rich Repeat
  Pfam annotation: Domain name=LRR_1; Domain location=4-26; Score=15.7; E_value=0.2; Accession=PF00560.25; Description=Leucine Rich Repeat
  Pfam annotation: Domain name=LRR_1; Domain location=53-75; Score =10.6; E_value=2.9; Accession=PF00560.25; Description=Leucine Rich Repeat
  Pfam annotation: Domain name=LRR_1; Domain location=77-100; Score =10.8; E_value=2.6; Accession=PF00560.25; Description=Leucine Rich Repeat
  Pfam module annotation: Pfam domain module=LRR_1::LRR_1::LRR_1::LRR _1::LRR_1::LRR_1::LRR_1::LRR_1::LRR_1; Domain location=104-126::128 -150::152-174::176-198::200-222::28-51::4-26::53-75::77-100
  Subcellular localization annotation: CTP_CleavageSite=84; ConfidenceScore=5.10e-01
GCGSLSSLNLSGNHLVGAFPADIAHLTSLTALDLSSNNFSGDIPGKATVNLSQLRTLSLSFNYFNGSIPEAITILPELEILELSSNLFSGKIPSTLCSSNTSSKLQVLYLQNNYLTGRIPEAITNCTGLVSLDLSLNYISGHIPSTLGMLSSLRDLILWQNALEDEIPASLSRMLALENLILDYNALTGTIPPSLANCTKLKCMSLASNQLSGPLPSWLGQLVMLQILRLGNNSFTG

SEQ ID NO: 106845 - protein, 56 aa, Setaria italica
  Transcript Sequence Number=SeqID_40871
QHCFTIGQILRSEDSDFSLHANTLHKKMNCRYTVSYFGSHFLQACGLERVKPFSNS

SEQ ID NO: 106846 - protein, 208 aa, Setaria italica
  misc_feature (9)..(9): Xaa can be any naturally occurring amino acid
  Transcript Sequence Number=SeqID_40872
  Gene Ontology: Mol. function=transporter activity; Cellular component= mitochondrial inner membrane; Biological process=transport
  Homolog annotation: Hit_ID=B9SV37; Match level="QueryCoverage=100%, HitCoverage=67%, E-value=7e-77, Identity=54%"; Hit description =Mitochondrial deoxynucleotide carrier, putative
  Pfam annotation: Domain name=Mito_carr; Domain location=111-205; Score=108.1; E_value=2.9e-29; Accession=PF00153.19; Description =Mitochondrial carrier protein
  Pfam annotation: Domain name=Mito_carr; Domain location=16-106; Score= 108.0; E_value=3.1e-29; Accession=PF00153.19; Description =Mitochondrial carrier protein
  Pfam module annotation: Pfam domain module=Mito_carr::Mito_carr; Domain location=111-205::16-106
LQMLPGLEXNGGFGADVGVRLLGGGLSGVTAASVTYPLDLVRTRLAAQTNTAYYRGISHALFAICRDEGFRGLYKGLGATLLGVGPSIAVSFSVYETLRSHWQIERPYDSPVLISLACGSLSGIASSTFTFPLDLVRRRMQLEGAGGRARVYHTGLFGTFGHIVRTEGLRGLYRGILPEYCKVVPGVGIVFMTYEMLKAILTGLESDD

SEQ ID NO: 106847 - protein, 79 aa, Setaria italica
  Transcript Sequence Number=SeqID_40873
RWPPPPSADALVRAVEGVLQPEASDQVVGTGSECRDRIRAVHDGFDQFLLSRTQHCPAHCMYLCLSSCPVLLAIVYRGG

SEQ ID NO: 106848 - protein, 58 aa, Setaria italica
  Transcript Sequence Number=SeqID_40874
EGRENLATFLAMAISVQLLPTTHQSSSILCHCLPYVIGWSHMEVCLLVKSGFGKARFN

SEQ ID NO: 106849 - protein, 79 aa, Setaria italica
  Transcript Sequence Number=SeqID_40875
  Subcellular localization annotation: CTP_CleavageSite=41; ConfidenceScore=5.07e-01
MVTQGKSIKFSRRGMVSLRRRRPFQLMVLRRLRELKKIVPVGARRKADVDAVLRQTAEYICALELKVAILRRLSDIYGV

SEQ ID NO: 106850 - protein, 150 aa, Setaria italica
  Transcript Sequence Number=SeqID_40876
  Gene Ontology: Mol. function=sequence-specific DNA binding; Cellular component=nucleus; Biological process=regulation of transcription, DNA-dependent
  Homolog annotation: Hit_ID=B2KKQ7; Match level="QueryCoverage=98%, HitCoverage=44%, E-value=2e-57, Identity=75%"; Hit description=WRKY transcription factor 3
  Pfam annotation: Domain name=WRKY; Domain location=50-110; Score =114.1; E_value=4.6e-31; Accession=PF03106.7; Description=WRKY DNA -binding domain
RGDANNGSGNAEAAHADESPLSDGFEGSCRRIKVRRVCTRIDPSDTTLTVKDGYQWRKYGQKVTRDNPSPRAYFRCAFAPSCPVKKKVQFSTYFSSMLVATYEGEHNHPCPTRAAELPGSAATRTGSVPCSISINASGPTITLDLTKNGA

SEQ ID NO: 106851 - protein, 112 aa, Setaria italica
  Transcript Sequence Number=SeqID_40877
QRHVSYSSPCRTPPAFFKTCRAQQSGSERYFLGCQLKTKQVLLPSDCDWLNFNGESSCMARKIAYGADSPCTETSLICGVYSCNLCIYYCTSARTGFTSSYLVNIGSGIVHS

SEQ ID NO: 106852 - protein, 318 aa, Setaria italica
  Transcript Sequence Number=SeqID_40878
CGLLKSKHNFIRWGFLYVLDKFLMRCKLLLDDSDMQDHTATDHSKNCLDKAFAVIDIMNSALLLVVQNNETDHINILKMCDMLFSQLCLRIPSTNAMHAGGLQSLGQLFGCTTKNIDSHLETLASHRSVGNKNLYRSETLQDISMDQSAQSTLLCEASMAALLLRGLAIAPMQLVARVPTSLFFWPLIQLEGAASDDIALGIAVGSTGRGNLPGATSDIRAALLLLLIGKCTADQEALKEVEGNEFFRGLLDDTDSRVAYYSAAFLLKRMMTEEPEIYQRMLQSLISKAQQCNNEKLLENPYLQMRGILQLSNDLGVQ

SEQ ID NO: 106853 - protein, 103 aa, Setaria italica
  Transcript Sequence Number=SeqID_40879
  Homolog annotation: Hit_ID=B6TX33; Match level="QueryCoverage=69%, HitCoverage=55%, E-value=3e-10, Identity=46%"; Hit description=36.4 kDa proline-rich protein
  Pfam annotation: Domain name=Tryp_alpha_amyl; Domain location=42-100; Score=13.4; E_value=0.016; Accession=PF00234.14; Description=Protease inhibitorseed storageLTP f
MATRVAAATLAFLLLTAAAATVSAAASPASRKVLHWKDYLGCPRDAVKLGACVGALGAAGLQAGAQLGDKCCDVVQGLAAAEAAACFCTTIKESVLGIPTEWT

SEQ ID NO: 106854 - protein, 248 aa, Setaria italica
  Transcript Sequence Number=SeqID_40880
  Gene Ontology: Mol. function=electron carrier activity; Cellular component=integral to membrane; Biological process=oxidation reduction
  Homolog annotation: Hit_ID=B6U021; Match level="QueryCoverage=99%, HitCoverage=47%, E-value=1e-81, Identity=59%"; Hit description =Cytochrome P450 CYP76M15
  Pfam annotation: Domain name=p450; Domain location=1-248; Score= -66.9; E_value=2e-08; Accession=PF00067.14; Description=Cytochrome P450
RLDLQGRRRAAAWHLGEIYRILDGIIERRLAENADGRHGDDFLQVLLDLMSTGKIDRDTVKAIVFEIFFTGGDTITITVEWAMAELLRNPSTMARLRAEIAGALGGKETIEEPDVAGLPYLQAVFKESMRLHPVAPLLVPHKAVEDGVEVCGYAVPKGCTVFVNVWAIMRDTAVWDEPDRFMPERFLGKAAEVDYKGKEFEFFPFGYGRRQCPGMPMAERVVPHLLASLLHAFEWRLPEGMAAEQVDV

SEQ ID NO: 106855 - protein, 92 aa, Setaria italica
  Transcript Sequence Number=SeqID_40881
EKEHEKEVINASQSILLEESMCINESRLDGKTKENKISTPAATVNNSKETTIESSEPEGVQSICQKLNNNDWRRPLQRYTEASYQACIQKKR

SEQ ID NO: 106856 - protein, 166 aa, Setaria italica
  misc_feature (123)..(124): Xaa can be any naturally occurring amino acid
  Transcript Sequence Number=SeqID_40882
  Homolog annotation: Hit_ID=B6TK80; Match level="QueryCoverage=83%, HitCoverage=33%, E-value=2e-11, Identity=32%"; Hit description=F-box domain containing protein
MNCHCAHSCFYWTDYCQRVMLVLDTLEMNFSVVDLPPESKGKDKSIVGAADGRLGLLILHDFEFHLYSKTRQDNGVGTEEWRHDNTIPLPNCYWSISNGGASEGYVLVQGFHEINTTPVNFLXXPDAQYFTLQLKTLLFERLCVLKFETSHDYLYASFPPPFVLPS

SEQ ID NO: 106857 - protein, 98 aa, Setaria italica
  Transcript Sequence Number=SeqID_40883
LAATTTSPCLSRLLTDRPYISRSIITDEESKKEKKLHMQVVKLDTRMTVKRPAVLTLLCVACGHVFFSSIDPQALGTESRAAHAPSHGGARARRHGSR

SEQ ID NO: 106858 - protein, 112 aa, Setaria italica
  Transcript Sequence Number=SeqID_40884
MSQHQQEGHLLMPLTLDTLTDVWTLRCGSEKSTFPCSSMLRAANGLAGISGGGPKMSLPLSSLVLASESCLLVLESASSRVPLSSRCLATSGIDDGFFGERLPSALNEIWLI

SEQ ID NO: 106859 - protein, 57 aa, Setaria italica
  Transcript Sequence Number=SeqID_40885
IMQGQEMQTLCASVRRGASQSGFKQPITIRSVRCCSHHQELTGNNIFKEEAPASAEK

SEQ ID NO: 106860 - protein, 67 aa, Setaria italica
  Transcript Sequence Number=SeqID_40886
  Subcellular localization annotation: CTP_CleavageSite=34; ConfidenceScore=5.03e-01
MERAVPVRKPHTSTADLLTWSATGPDAPAGASPAASSRPSLKPAAGITPAMFGAPVSEQEAEDLSKS

SEQ ID NO: 106861 - protein, 267 aa, Setaria italica
  misc_feature (11)..(11): Xaa can be any naturally occurring amino acid
  Transcript Sequence Number=SeqID_40887
SSSRPSLKPAXGITPAMFGAPVSEQEAEDLSKSERKFCSGSKLKEMSGSGIFAEKGENGDSEDSKSANKTSLRMYQQTVTGISQISFSADGSLSPKKPSSIPEVAKQRELSGTLEDADSKTNKQLSEAKTKELSGSDIFGPPPEIPARPLAARNMELQGNVDFSLPQRSVHTSVKVSNPAGGPSNISFSEEPVVKTAKKIHNQKFQELTGNNIFKEEAPASAEKSLSSAKLKEMSGSDIFADGTPAPREYLGGVRKPPGGESSIALI

SEQ ID NO: 106862 - protein, 141 aa, Setaria italica
  Transcript Sequence Number=SeqID_40888
  Gene Ontology: Mol. function=transcription regulator activity; Cellular component=nucleus; Biological process=regulation of transcription
  Homolog annotation: Hit_ID=Q10N77; Match level="QueryCoverage=36%, HitCoverage=12%, E-value=5e-17, Identity=84%"; Hit description=Helix- loop-helix DNA-binding domain containing protein
  Pfam annotation: Domain name=HLH; Domain location=22-61; Score=2.1; E_ value=0.1; Accession=PF00010.18; Description=Helix-loop-helix DNA -binding domain
RYLNVLDYSEYFFGYCIQAPCKRSQKLGDKITALQQLVSPYGKTDTASVLHEAATCIKHLHEQIQILTLTSVTAGYWRGRRRDGSAPARPLPGAAVPGGRAACGDGRGGAPPPRHGRHGGSLALARHPVAGCLPWVQFVGV

SEQ ID NO: 106863 - protein, 53 aa, Setaria italica
  Transcript Sequence Number=SeqID_40889
LIQINNDVKVHWSYLIYLHLLSYKLDLYIYSWDPVKSSFEINSGSLFLYLSMF

SEQ ID NO: 106864 - protein, 91 aa, Setaria italica
  Transcript Sequence Number=SeqID_40890
  Subcellular localization annotation: CTP_CleavageSite=52; ConfidenceScore=5.48e-01
PPRAPSSPAPAAPPRRLPDLPPPDLPAPSPSPSASALSWLARAPAAAAHGSRCDAGSGGGWRRPVEHALRPALRCVACGFVFFVSPFFPGG

SEQ ID NO: 106865 - protein, 79 aa, Setaria italica
  Transcript Sequence Number=SeqID_40891
  Gene Ontology: Cellular component=integral to membrane
  Homolog annotation: Hit_ID=B9RP61; Match level="QueryCoverage=72%, HitCoverage=13%, E-value=2e-21, Identity=78%"; Hit description =Triose phosphate/phosphate translocator, non-green plastid, chloroplast, putative
MGRDGGGGGMSESVLRKVLLSYCYVAVWIFLSFSVIVYNKYILDPKMYNWPFPISLTMVHMAFCSSLAVALVRVLRVVD

SEQ ID NO: 106866 - protein, 97 aa, Setaria italica
  Transcript Sequence Number=SeqID_40892
  Gene Ontology: Cellular component=integral to membrane
  Homolog annotation: Hit_ID=Q59IV6; Match level="QueryCoverage=59%, HitCoverage=16%, E-value=4e-20, Identity=81%"; Hit description =Plastidic phosphate translocator-like protein1
VHLGVEDVLIVDDDGEGEEDPHRHVHVRDEHLADHRLRHAAVASVLPIGALYSLSLWFSNSAYIYLSVSFIQMLKALMPVAVYSIGVLFKKENFKSS

SEQ ID NO: 106867 - protein, 148 aa, Setaria italica
  Transcript Sequence Number=SeqID_40893
  Gene Ontology: Cellular component=integral to membrane
  Homolog annotation: Hit_ID=B9RP61; Match level="QueryCoverage=81%, HitCoverage=28%, E-value=5e-40, Identity=67%"; Hit description =Triose phosphate/phosphate translocator, non-green plastid, chloroplast, putative
MGKEGAGSGGGGDGGMSESVIRKVLVSYMYVAVWIFLSFSVIVYNKYILDPKMYNWPFPISLTMVHMAFCSSLAVALVRVLRVVDLPSSPAMTPQLYVASVLPIGALYSLSLWFSNSAYIYLSVSFIQMLKALMPVRRLTSYSGFLLS

SEQ ID NO: 106868 - protein, 116 aa, Setaria italica
  Transcript Sequence Number=SeqID_40894
  Gene Ontology: Cellular component=integral to membrane
  Homolog annotation: Hit_ID=Q59IV6; Match level="QueryCoverage=98%, HitCoverage=32%, E-value=8e-36, Identity=69%"; Hit description =Plastidic phosphate translocator-like protein1
  Pfam annotation: Domain name=TPT; Domain location=2-75; Score=0.7; E _value=0.00057; Accession=PF03151.8; Description=Triose-phosphate Transporter family
  Subcellular localization annotation: CTP_CleavageSite=30; ConfidenceScore=5.03e-01
PDLFVFGTNSLCAFALNLAVFLLTGPTSALTMNVAGVVKDWLLIAFSWSVIRDTVTPINLFGYGIAFLGVGYYNHVKLQALKAKEAQKKAAQADEEAGSLLQERDSHGDRKTDNQA

SEQ ID NO: 106869 - protein, 95 aa, Setaria italica
  Transcript Sequence Number=SeqID_40895
  Gene Ontology: Cellular component=integral to membrane
  Homolog annotation: Hit_ID=Q59IV6; Match level="QueryCoverage=98%, HitCoverage=26%, E-value=2e-26, Identity=68%"; Hit description =Plastidic phosphate translocator-like protein1
LLVGKTSALTMNVAGVVKDWLLIAFSWSVIRDTVTPINLFGYGIAFLGVAYYNHVKLQALKAKEAQKKAAQADEEAGSLLQERDGHGDRKSDNQA

SEQ ID NO: 106870 - protein, 140 aa, Setaria italica
  Transcript Sequence Number=SeqID_40896
  Gene Ontology: Cellular component=integral to membrane
  Homolog annotation: Hit_ID=Q59IV6; Match level="QueryCoverage=88%, HitCoverage=35%, E-value=5e-30, Identity=57%"; Hit description =Plastidic phosphate translocator-like protein1
  Pfam annotation: Domain name=TPT; Domain location=1-99; Score=42.6; E_ value=1.6e-09; Accession=PF03151.8; Description=Triose-phosphate Transporter family
  Subcellular localization annotation: CTP_CleavageSite=54; ConfidenceScore=5.55e-01
SLGSSTKAQGTTRKQRQRAVGTFQPDFFIFGTNSLCAFALNLAVFLLVGKTSALTMNVAGVVKDWLLIAFSWSVIRDTVTPINLFGYGIAFLGVAYYNHVKLQALKAKEAQKKAAQADEEAGSLLQERDGHGDRKSDNQA

SEQ ID NO: 106871 - protein, 200 aa, Setaria italica
  misc_feature (189)..(189): Xaa can be any naturally occurring amino acid
  Transcript Sequence Number=SeqID_40897
  Gene Ontology: Cellular component=integral to membrane
  Homolog annotation: Hit_ID=B9RP61; Match level="QueryCoverage=100%, HitCoverage=47%, E-value=2e-77, Identity=72%"; Hit description =Triose phosphate/phosphate translocator, non-green plastid, chloroplast, putative
  Pfam annotation: Domain name=DUF6; Domain location=21-155; Score=1.4; E_value=0.063; Accession=PF00892.12; Description=Integral membrane protein DUF6
MSESVIRKVLVSYMYVAVWIFLSFSVIVYNKYILDPKMYNWPFPISLTMVHMAFCSSLAVALVRVLRVVDLPSSPAMTPQLYVASVLPIGALYSLSLWFSNSAYIYLSVSFIQMLKALMPVAVYSIGVLFKKENFKSSAMLNMLSISFGVAIAAYGEARFDVRGVALQLAAVAFEATRLVLIQILLTSXGISLNPITSLY

SEQ ID NO: 106872 - protein, 376 aa, Setaria italica
  misc_feature (102)..(102): Xaa can be any naturally occurring amino acid
  Transcript Sequence Number=SeqID_40898
  Gene Ontology: Cellular component=integral to membrane
  Homolog annotation: Hit_ID=Q59IV6; Match level="QueryCoverage=93%, HitCoverage=93%, E-value=1e-119, Identity=64%"; Hit description =Plastidic phosphate translocator-like protein1
  Pfam annotation: Domain name=TPT; Domain location=195-335; Score =179.6; E_value=9.1e-51; Accession=PF03151.8; Description=Triose -phosphate Transporter family
  Pfam annotation: Domain name=UAA; Domain location=55-341; Score= -149.7; E_value=0.0071; Accession=PF08449.3; Description=UAA transporter family
  Pfam module annotation: Pfam domain module=TPT::UAA; Domain location =195-335::55-341
  Subcellular localization annotation: CTP_CleavageSite=76; ConfidenceScore=5.11e-01
MSTSTAPAPSPAPPPSVLRSVLLSYAYVAVWIFLSFSVIVYNKYILDPKMYNWPFPISLTMVHMAFCSSLAVALVRVLRVVDLPTSPAMILRSLEREKNGEXYIWCVQTPQLYAASVVPIGALYALSLWFSNSAYIYLSVSFIQMLKALMPVAVYSIGVLFKKENFKSSAMLNMLSISFGVAIAAYGEARFDLRGVALQLAAVAFEATRLVLIQILLTSKGISLNPITSLYYVAPCCLAFLVVPWVFVELPRLRAVGTFQPDLFVFGTNSLCAFALNLAVFLLVGKTSALTMNVAGVVKDWLLIAFSWSVIRDTVTPINLFGYGIAFLGVGYYNHVKLQALKAKEAQKKAAQADEEAGSLLQERDSHGDRKTDNQA

SEQ ID NO: 106873 - protein, 81 aa, Setaria italica
  Transcript Sequence Number=SeqID_40899
  Gene Ontology: Mol. function=cytochrome-c oxidase activity; Cellular component=mitochondrial respiratory chain; Biological process =oxidation reduction
  Homolog annotation: Hit_ID=Q9FNE0; Match level="QueryCoverage=64%, HitCoverage=80%, E-value=1e-12, Identity=57%"; Hit description =Putative cytochrome c oxidase subunit 5C-4
  Pfam annotation: Domain name=COX5C; Domain location=12-73; Score =91.2; E_value=3.6e-24; Accession=PF05799.4; Description=Cytochrome c oxidase subunit Vc (COX5C)
MSTTAHKVATHAAARTKTAGRRPPSVLREIAYGMGLGLFAGYLWKLHHWSNQRRTREFYSLLDQGKITVVADEPPRTGADD

SEQ ID NO: 106874 - protein, 136 aa, Setaria italica
  Transcript Sequence Number=SeqID_40900
VSQCEAGARSGCSITASRKCKPPWWKGLLGAARSLSEERERCEEREMAACLEAAKEACIKFAKGKCIGPFRDARIASGGLLENTDFDVWGAGGDKTASASSCALNNQQLFNPDHSMTNYRGSDLLDRLSAKDNDNA

SEQ ID NO: 106875 - protein, 132 aa, Setaria italica
  Transcript Sequence Number=SeqID_40901
  Gene Ontology: Mol. function=protein serine/threonine kinase activity; Cellular component=plasma membrane; Biological process =protein amino acid phosphorylation
  Homolog annotation: Hit_ID=Q64GC4; Match level="QueryCoverage=99%, HitCoverage=73%, E-value=1e-51, Identity=74%"; Hit description =Serine/threonine kinase (Fragment)
  Pfam annotation: Domain name=Pkinase; Domain location=1-131; Score= -93.8; E_value=0.0066; Accession=PF00069.17; Description=Protein kinase domain
  Pfam annotation: Domain name=Pkinase_Tyr; Domain location=1-131; Score=-84.5; E_value=4.1e-08; Accession=PF07714.9; Description =Protein tyrosine kinase
  Pfam module annotation: Pfam domain module=Pkinase::Pkinase_Tyr; Domain location=1-131::1-131
QLRGGDAQSQQGVKEFETEIEMLSRLRHRHLVSLIGYCDEQNEMILVYEHMANGTLRSHLYGSDLPALTWKQRLEICIGAARGLYYLHTGLDRGIIHRDVKTTNILLDDNFVAKMADFGISKDGPLDHTHVS

SEQ ID NO: 106876 - protein, 79 aa, Setaria italica
  misc_feature (15)..(15): Xaa can be any naturally occurring amino acid
  Transcript Sequence Number=SeqID_40902
  Gene Ontology: Mol. function=protein serine/threonine kinase activity; Cellular component=plasma membrane; Biological process =protein amino acid phosphorylation
  Homolog annotation: Hit_ID=Q94C42; Match level="QueryCoverage=74%, HitCoverage=14%, E-value=3e-14, Identity=65%"; Hit description =Serine/threonine protein kinase
CFNACRKPMVWCILXKYAKSGSPKGFLNRRQRVLVPLKLAVKQALEFRFCTWYGLGFNHRDLIVSCIHKLCYMCVSHLL

SEQ ID NO: 106877 - protein, 65 aa, Setaria italica
  Transcript Sequence Number=SeqID_40903
RNRSNGILDLVAQVLRIYNKDLRRTINSTAFPQKNLWLTPRSQQKYPTALVKHTLRLTNSILESH

SEQ ID NO: 106878 - protein, 155 aa, Setaria italica
  Transcript Sequence Number=SeqID_40904
  Gene Ontology: Mol. function=protein binding
  Homolog annotation: Hit_ID=B6TSC4; Match level="QueryCoverage=95%, HitCoverage=46%, E-value=9e-25, Identity=44%"; Hit description =Ubiquitin-protein ligase
  Pfam annotation: Domain name=LRR_2; Domain location=9-34; Score=7.9; E_value=1.6; Accession=PF07723.5; Description=Leucine Rich Repeat
  Pfam annotation: Domain name=LRR_2; Domain location=95-119; Score =14.4; E_value=0.22; Accession=PF07723.5; Description=Leucine Rich Repeat
  Pfam module annotation: Pfam domain module=LRR_2::LRR_2; Domain location=9-34::95-119
SNHVRRSASLKILSLTSCHEVSNKGFTDLVTKSPLLEDLSLELCPKVGGRNVYESTGKACRQLKRFSLRRECFRFSLNYPRRVAEALGIAATMSELRSLSLISSNITNEELVAIVDGCPRLEILCLRDCYKVIADDPLRAKCDRIKTLTLPEYDR

SEQ ID NO: 106879 - protein, 121 aa, Setaria italica
  Transcript Sequence Number=SeqID_40905
  Gene Ontology: Mol. function=hydrolase activity
  Homolog annotation: Hit_ID=B6UI84; Match level="QueryCoverage=78%, HitCoverage=28%, E-value=4e-43, Identity=87%"; Hit description=Zn -dependent hydrolases, including glyoxylases
  Subcellular localization annotation: CTP_CleavageSite=24; ConfidenceScore=5.30e-01
MALSLGAATPTAPPLPRRRVVPFRATASPPALDRRRRPQNVPGEFFVDHRCIDCQTCRWMAPEVFKGVDGKAAVAAQPSSQEDRTKALQALLSCPTSSIHTHKPPKDILQVQNMFPLEDDE

SEQ ID NO: 106880 - protein, 38 aa, Setaria italica
  Transcript Sequence Number=SeqID_40906
IQLPLMIIDFLLSFRDKKKSPIVAESFQRFLTCPMGLN

SEQ ID NO: 106881 - protein, 79 aa, Setaria italica
  Transcript Sequence Number=SeqID_40907
MDLVAKRFHDPEPKIAASIEDVPGELTESLRGVLMDRVHEHYLKAVSRFPMKDLQTHHHRGLLKAGYCFGPFDPVSNII

SEQ ID NO: 106882 - protein, 66 aa, Setaria italica
  Transcript Sequence Number=SeqID_40908
MELDSIECVSYSDGMEDDDDAAAVTSAQLPRPFLKSASSAGSAAAAAVNVVVVSDRAGGPVPGGTG

SEQ ID NO: 106883 - protein, 68 aa, Setaria italica
  Transcript Sequence Number=SeqID_40909
  Subcellular localization annotation: CTP_CleavageSite=28; ConfidenceScore=5.18e-01
LAKVLEIDLCPPQGTLFLPGQARTHRPRPRHGPSTRRRPSMPLDDDGFSPLTSPLNWSDGPDGGTGGL

SEQ ID NO: 106884 - protein, 372 aa, Setaria italica
  misc_feature (10)..(10): Xaa can be any naturally occurring amino acid
  misc_feature (22)..(22): Xaa can be any naturally occurring amino acid
  misc_feature (29)..(29): Xaa can be any naturally occurring amino acid
  misc_feature (49)..(49): Xaa can be any naturally occurring amino acid
  Transcript Sequence Number=SeqID_40910
  Gene Ontology: Mol. function=alpha-N-arabinofuranosidase activity; Biological process=L-arabinose metabolic process
  Homolog annotation: Hit_ID=Q2RAZ2; Match level="QueryCoverage=100%, HitCoverage=56%, E-value=1e-147, Identity=69%"; Hit description =Alpha-L-arabinofuranosidase C-terminus family protein, expressed
  Pfam annotation: Domain name=Alpha-L-AF_C; Domain location=167-355; Score=214.9; E_value=2.1e-61; Accession=PF06964.4; Description=Alpha- L-arabinofuranosidase C-terminus
NYWTDDGLGXFEFLQLAEDLGXAAPIWVXFNAGISHNEGVDTNSIAPFXVKDVLDSLEFAKGSAESNWGSVRAAMGHRKRFPLKYVAIGNEDCQKEFYQGNYLKFYNAIREAYPDIQMISNCDGSSEALDHPADLYDFHIYNSSTDIFLMKSKFDRTSRTGPKVFVSEYAVTEQKDAGNGSLLASLAEAAFLTGVEKNSDIVQMASYAPLFVNDNDPGWKWNPDAIVFNSWQQYGTPSYWMQTFFRESSGAVIHPITIASSYSDSLAASAITWRDTENSFLRVKIVNFGPHAVSLTISAQELQVGVDTMRSRVTVLTSSNVMDENSFSNPNNVVPVSRELPNAGEEMQALLAPYSFTSFDLALDQHERVAEM

SEQ ID NO: 106885 - protein, 131 aa, Setaria italica
  Transcript Sequence Number=SeqID_40911
  Gene Ontology: Mol. function=cysteine-type peptidase activity; Cellular component=nucleus; Biological process=ubiquitin-dependent protein catabolic process
  Homolog annotation: Hit_ID=Q6K8Z3; Match level="QueryCoverage=100%, HitCoverage=10%, E-value=4e-28, Identity=54%"; Hit description =Ubiquitin carboxyl-terminal hydrolase
MGEAAAPEGLLHRRIEFHAATKPPPPPPPAAAVVAVPGGFRMETSLFAGADKRVAAAARSGREGRRFETGESSGSGFDPELSAARVYLRRIGAGLHNLGNTCYLNSVLQCLTYTEPFVAYLQSSKHNSSCR

SEQ ID NO: 106886 - protein, 53 aa, Setaria italica
  Transcript Sequence Number=SeqID_40912
CKNGRLETRLNFPHLISLPTPPRPAPSPMHVLSGSLSSFIHPFTFSLLSLTRS

SEQ ID NO: 106887 - protein, 81 aa, Setaria italica
  Transcript Sequence Number=SeqID_40913
ESCELSYMCLKISQKISKFVGKSYIVSDDCIFLPNLITIVCNRKTTISCLYSDLYFFHCSISVFGFSKLQNQLFHKFEKII

SEQ ID NO: 106888 - protein, 195 aa, Setaria italica
  Transcript Sequence Number=SeqID_40914
  Gene Ontology: Mol. function=calcium ion binding; Cellular component =plasma membrane
  Homolog annotation: Hit_ID=Q259C3; Match level="QueryCoverage=98%, HitCoverage=47%, E-value=3e-37, Identity=49%"; Hit description =H0124B04.1 protein
  Pfam annotation: Domain name=efhand; Domain location=106-134; Score =12.6; E_value=0.9; Accession=PF00036.24; Description=EF hand
  Pfam annotation: Domain name=efhand; Domain location=144-172; Score =14.3; E_value=0.51; Accession=PF00036.24; Description=EF hand
  Pfam annotation: Domain name=efhand; Domain location=21-49; Score =8.5; E_value=2.5; Accession=PF00036.24; Description=EF hand
  Pfam annotation: Domain name=efhand; Domain location=60-88; Score =17.4; E_value=0.059; Accession=PF00036.24; Description=EF hand
  Pfam module annotation: Pfam domain module=efhand::efhand::efhand::efh and; Domain location=106-134::144-172::21-49::60-88
TTGTATAPSRSASTESRQPWGWLHKFATADGDGDGSLNAAELNDFLHPEDSSHETMQLWLLKDKLSEMDHDGDRRLSLEEFVHLSHALDHISIAHHLGDHGLARAQAEKKFQDLDADMDNYLTVEEARPVIQSLLTGEFSYATSQAKLLMKADSDGDGKLSLDEMLNDYTSFYNIVYMDDHYDSEEVDGDYRDEL

SEQ ID NO: 106889 - protein, 186 aa, Setaria italica
  misc_feature (148)..(148): Xaa can be any naturally occurring amino acid
  Transcript Sequence Number=SeqID_40915
  Gene Ontology: Mol. function=RNA-directed DNA polymerase activity; Cellular component=chromatin; Biological process=RNA-dependent DNA replication
  Homolog annotation: Hit_ID=A4GMN4; Match level="QueryCoverage=91%, HitCoverage=61%, E-value=1e-86, Identity=88%"; Hit description=Gag -pol polyprotein (Fragment)
MVATTQINLSENNGTTKLDLRSGYHQIRMKLGDEWKTAFKTKFGLYEWLVMPFGLTNAPSTFMRLINEVLRPFIGLFVVVYFDDILIYSKSMEEHLEHLRAVFDALRAAHLFANLEKCMFCTQRVSFLGYVVTPQGIEVDSSKIDAIXGWPTPTTVTQIRSFLGLAGFYRRFVRDFSSIAAPLHEL

SEQ ID NO: 106890 - protein, 534 aa, Setaria italica
  misc_feature (120)..(120): Xaa can be any naturally occurring amino acid
  Transcript Sequence Number=SeqID_40916
  Gene Ontology: Mol. function=transferase activity, transferring glycosyl groups
  Homolog annotation: Hit_ID=B6U4S0; Match level="QueryCoverage=91%, HitCoverage=77%, E-value=0.0, Identity=89%"; Hit description =Transferase, transferring glycosyl groups
  Pfam annotation: Domain name=Glyco_transf_8; Domain location=204-508; Score=151.7; E_value=2.2e-42; Accession=PF01501.12; Description =Glycosyl transferase family 8
LALNQKLSPLPKIEQPVLPPPKVEQPKPEVKPVPVPVQQKGDDRWIRPPRVQNADEVEKAKACQLEFGSYCLWSIEHKEVMRDTIVKRLKDQLFVARSYYPSIAKLKGKEALTRELKQNXIQEHERVLSESIVDADLPSFIKKKIEIMDQSIARAKSCTVDCNNVDRKLRQILHMTEDEAHFHMKQSAYLYNLGVHTMPKSHHCLNMRLTVEYFKSTPLDPDDSPAHKFNIPDHRHYVILSKNVLAASVVINSTVSSCEDTENVVFHVLTDAQNFYAMKHWFARNSYRESAVDVINYEQIIFENFPEFGTQPLYLPEEFRVFISSLERPIEKSRMEYLSVFSHSHFFIAEIFKDLKKVIILDDDVVVQRDLSFLWNLDMGDKVNGAVRFCGLKLGQLRNLLGRTMYDPQSCAWMSGVNIIDLDKWREHNVTENYLQLLRKFGNHDDEASLRAAALPISLLSFQHLLYPLDERFTLSGLGYDYGIKEEVAQSSISLHYNGNMKPWLELGIPDYRKYWKRFLTRDERFMDECNVSP

SEQ ID NO: 106891 - protein, 56 aa, Setaria italica
  Transcript Sequence Number=SeqID_40917
ERFRLAYVEREARLAPKRAKRERQQRRRAERDYMMNDIDARSIALASQASRNLRKS

SEQ ID NO: 106892 - protein, 136 aa, Setaria italica
  misc_feature (20)..(20): Xaa can be any naturally occurring amino acid
  Transcript Sequence Number=SeqID_40918
  Gene Ontology: Mol. function=protein serine/threonine kinase activity; Biological process=protein amino acid phosphorylation
  Homolog annotation: Hit_ID=B6TC07; Match level="QueryCoverage=100%, HitCoverage=35%, E-value=2e-57, Identity=83%"; Hit description=HT1 protein kinase
  Pfam annotation: Domain name=Pkinase_Tyr; Domain location=1-81; Score= -160.2; E_value=0.0044; Accession=PF07714.9; Description=Protein tyrosine kinase
KHHTRKVDVYSFGIVMWEIXLTALVPFSDMTPEQAAVAVALKNTRPPLPASCPVAISHLIMQCWATNPDKRPQFDDIVAILESYKEALDEDPSFVLSYIPPPPHHNHHHHHHHHNHHQSLLRCFPRSMRRSASMKV

SEQ ID NO: 106893 - protein, 365 aa, Setaria italica
  Transcript Sequence Number=SeqID_40919
  Gene Ontology: Mol. function=protein serine/threonine kinase activity; Biological process=protein amino acid phosphorylation
  Homolog annotation: Hit_ID=B6TC07; Match level="QueryCoverage=92%, HitCoverage=91%, E-value=0.0, Identity=92%"; Hit description=HT1 protein kinase
  Pfam annotation: Domain name=Pkinase; Domain location=65-319; Score =222.4; E_value=1.2e-63; Accession=PF00069.17; Description=Protein kinase domain
  Pfam annotation: Domain name=Pkinase_Tyr; Domain location=65-319; Score=255.8; E_value=1e-73; Accession=PF07714.9; Description=Protein tyrosine kinase
  Pfam module annotation: Pfam domain module=Pkinase::Pkinase_Tyr; Domain location=65-319::65-319
MKSLQCFKQSSGGGNGCGPGKRLERRLSLGDYKKAVSWSKYLIAPPGARIRGGGEELWSADLSKLEIRGKFASGRHSRVYSGRYAGREVAIKMVSQPEEDAALATELERQFASEVALLLRLHHPNIISFVAACKKPPVFCIITEYMAGGSLRKYLHQQEPHSVPIELVLKLSLDIARGMSYLHSQGILHRDLKSENILLGEDMSVKVADFGISCLESQCGSGKGFTGTYRWMAPEMIKEKHHTRKVDVYSFGIVMWEILTALVPFSDMTPEQAAVAVALKNTRPPLPASCPVAISHLIMQCWATNPDKRPQFDDIVAILESYKEALDEDPSFVLSYIPPPPHHNHHHHHHNQNKQNKQNKLKPKT

SEQ ID NO: 106894 - protein, 102 aa, Setaria italica
  Transcript Sequence Number=SeqID_40920
TTSHHYIMSDGFYLATFLFHLLAFVLPTNFDVWSAKQMQVLPRFLSSLQACPLHEKDLGLLSTPQKPQNIMRIFTRAQLSMLIMEIRRSTMKGSSPWQSLQI

SEQ ID NO: 106895 - protein, 70 aa, Setaria italica
  misc_feature (22)..(22): Xaa can be any naturally occurring amino acid
  Transcript Sequence Number=SeqID_40921
ISCYHALRLTFLQSEKGCQQQXVKTETGPVKSSSSHQHCTEICGNPLERSNCNMNQTELSTTTYIVSYVQ

SEQ ID NO: 106896 - protein, 205 aa, Setaria italica
  Transcript Sequence Number=SeqID_40922
  Gene Ontology: Cellular component=plasma membrane
  Homolog annotation: Hit_ID=Q5K2M9; Match level="QueryCoverage=79%, HitCoverage=21%, E-value=2e-73, Identity=82%"; Hit description=START domain-containing protein
  Pfam annotation: Domain name=PH; Domain location=21-127; Score=29.0; E_value=1.9e-05; Accession=PF00169.21; Description=PH domain
ARSGELPKGTSAGPAPAAAAVRHEGWLVRHGRRKIGRSFFHMRYFVLDNKLLAYYKKKPRDSMVPLKSILIDGNCRVEDRGLKTHHGQMIYFLCIYNKKQKENQITMGAYDIEDALTWKRKLEFLIDQQQDSMTAKNRKAFASLDFDIDLGGPFSFSDHDSGPEDEEEPRPTLLRRTTIGNGPPDWCHSDLTAQYQALWSSQVQN

SEQ ID NO: 106897 - protein, 151 aa, Setaria italica
  misc_feature (135)..(135): Xaa can be any naturally occurring amino acid
  Transcript Sequence Number=SeqID_40923
  Gene Ontology: Cellular component=plasma membrane
  Homolog annotation: Hit_ID=Q5K2M9; Match level="QueryCoverage=100%, HitCoverage=20%, E-value=4e-76, Identity=89%"; Hit description=START domain-containing protein
  Pfam annotation: Domain name=DUF1336; Domain location=37-151; Score =35.2; E_value=4.1e-10; Accession=PF07059.4; Description=Protein of unknown function (DUF1336)
KSDNEAKHTDEPPEKIDLSCFSGILHHDPDEKSRNCWTVPDSKLFKVRSKNFPHDKSKIPAASYLMELAAIDWFKDTKRMDNVGRQKNCVAQVAADKGMHTFVVNLQIPGSTHYSLVMYFVTSSLKKGSLLQRFXDGDDDFRNSRLKLIPS

SEQ ID NO: 106898 - protein, 642 aa, Setaria italica
  Transcript Sequence Number=SeqID_40924
  Gene Ontology: Cellular component=plasma membrane
  Homolog annotation: Hit_ID=Q5K2M9; Match level="QueryCoverage=97%, HitCoverage=87%, E-value=0.0, Identity=72%"; Hit description=START domain-containing protein
  Pfam annotation: Domain name=DUF1336; Domain location=425-629; Score =393.6; E_value=3.3e-115; Accession=PF07059.4; Description=Protein of unknown function (DUF1336)
  Pfam annotation: Domain name=START; Domain location=119-329; Score =24.3; E_value=5.3e-06; Accession=PF01852.11; Description=START domain
  Pfam module annotation: Pfam domain module=DUF1336::START; Domain location=425-629::119-329
MYIYITDMNTMPMLHFSSTSAHFQITMGAYDIEDALTWKRKLEFLIDQQQDSMTAKNRKAFASLDFDIDLGGPFSFSDHDSGPEDEEEPRPTLLRRTTIGNGPPDSVLDWTKEPDIGLSNQSDTNQAYSRKNWRLLRCQNGLRIFEELVEVEYLARSCSRAMRAVGVVEASCEAIFGLVMGMDVTRYEWDCSFQYGSLVEEVDGHTAILYHRLQLNWCSMVVWPRDLCYVRYWRRNDDGSYVVLFRSTEHQNCGPQPGFVRAIIESGGFKISPLKSLNGRPRTQVQHLMQIDLSGWGVNYLSSFQYHSLLQMLNCVAGLREYFSQTDEVHTVPRIPVMHAMVNTISMKKDQKLQEPDTKTKQTDKILDMVDEESEDDDDYQVPDADLEEEPTKSDSDAKSSDPIDLSWFSGIIRQDANEKSRNCWTVPDNKIFKVRSKNFPHDKSKVPAGKYLMELVAIDWFKDTKRMDHVARRKGCAAQVAAEKGMFTFLVNIQIPGSSHYSLVLYFVSSSLKKGSLLQRFADGDDDFRNSRLKLIPSVPKGSWIVRQSVGSTPCLLGKAVDCSYLRGPEYLEVDVDIGSSAVANGVLGLVFGVVTTLVVDMAFLIQANTYDELPEQLLGAARLSHIEPSAAVNPELDNIS

SEQ ID NO: 106899 - protein, 158 aa, Setaria italica
  misc_feature (49)..(49): Xaa can be any naturally occurring amino acid
  Transcript Sequence Number=SeqID_40925
  Gene Ontology: Mol. function=prenyltransferase activity; Cellular component=integral to membrane; Biological process=biosynthetic process
  Homolog annotation: Hit_ID=B6T4K7; Match level="QueryCoverage=100%, HitCoverage=31%, E-value=1e-55, Identity=70%"; Hit description=Para -hydroxybenzoate--polyprenyltransferase
ESLDPAVVLPLYTAGICWTLVYDTIYAHQVFQYSHSFIFILDEVFVLGXCDVLYKYFYPCTSQDKEDDLKVGVKSTALRFGDLTKYWISGFGAACICSLALSGYNADLGWPYYPFLSAAAVQLAWQISTVELSNRSDCNRKFVSNKWFGALVFSGILF

SEQ ID NO: 106900 - protein, 217 aa, Setaria italica
  Transcript Sequence Number=SeqID_40926
  Gene Ontology: Mol. function=prenyltransferase activity; Cellular component=integral to membrane; Biological process=biosynthetic process
  Homolog annotation: Hit_ID=B6T4K7; Match level="QueryCoverage=100%, HitCoverage=54%, E-value=1e-99, Identity=83%"; Hit description=Para -hydroxybenzoate--polyprenyltransferase
  Pfam annotation: Domain name=UbiA; Domain location=1-214; Score =100.5; E_value=5.8e-27; Accession=PF01040.10; Description=UbiA prenyltransferase family
  Subcellular localization annotation: CTP_CleavageSite=14; ConfidenceScore=5.01e-01
DNKVERTKSRPFASGALTPSQGVGFLGFQLLLGLGILLQLNNYSRILGASSLLLVFSYPLMKRFTFWPQAYLGLTFNWGALLGWAAIKESLDPAVVLPLYTAGICWTLVYDTIYAHQDKEDDLKVGVKSTALRFGDLTKYWISGFGAACICSLALSGYNADLGWPYYPFLSAAAVQLAWQISTVELSNRSDCNRKFVSNKWFGALVFSGILFGRLVS

SEQ ID NO: 106901 - protein, 73 aa, Setaria italica
  Transcript Sequence Number=SeqID_40927
  Gene Ontology: Mol. function=prenyltransferase activity; Cellular component=integral to membrane; Biological process=biosynthetic process
  Homolog annotation: Hit_ID=B6T4K7; Match level="QueryCoverage=75%, HitCoverage=13%, E-value=3e-20, Identity=87%"; Hit description=Para -hydroxybenzoate--polyprenyltransferase
RIVLCLLILTPDLKSYWTGWPYYPFLSAAAVQLAWQISTVELSNRSDCNRKFVSNKWFGALVFSGILFGRLVS

SEQ ID NO: 106902 - protein, 52 aa, Setaria italica
  Transcript Sequence Number=SeqID_40928
IIQFYTFDFSYVFHNEMMLLRCLMSIQTQCPFSKQASNNATKNSGSSYIYHE

SEQ ID NO: 106903 - protein, 164 aa, Setaria italica
  Transcript Sequence Number=SeqID_40929
  Homolog annotation: Hit_ID=B6TS67; Match level="QueryCoverage=100%, HitCoverage=27%, E-value=2e-49, Identity=64%"; Hit description=Amino acid permease
MRSPVSERSLIIESSDDEDTHSGAAVATSGRRRVVHDEEEKGAGSDSDSSSSSSSCATPRRGPCSSSPYAQQWPQSYRQSIDILSNVQSPNLSFLGTPSLSRLSNSFLAVTDSFRSKTPEIISNFVKPLLSPTTSDEQQQHEDTRKSSQYITPSRKPSLQQIPE

SEQ ID NO: 106904 - protein, 78 aa, Setaria italica
  Transcript Sequence Number=SeqID_40930
SFGTLGKDEMLWSLNMSISIGGFCFKECLLTLLFGSIELPLLKTFGHVGLAGQILYCNNLVSAFISLIYSQIYYNQKK

SEQ ID NO: 106905 - protein, 62 aa, Setaria italica
  misc_feature (60)..(60): Xaa can be any naturally occurring amino acid
  Transcript Sequence Number=SeqID_40931
  Gene Ontology: Mol. function=protein disulfide oxidoreductase activity; Cellular component=extracellular region; Biological process=electron transport chain
  Homolog annotation: Hit_ID=Q0J3L4; Match level="QueryCoverage=98%, HitCoverage=37%, E-value=5e-27, Identity=95%"; Hit description =Monothiol glutaredoxin-S10
  Pfam annotation: Domain name=Glutaredoxin; Domain location=1-46; Score=10.5; E_value=0.022; Accession=PF00462.16; Description =Glutaredoxin
SKRIGVQPHVIELDHLGAQGPQLQKVLERLTGQSTVPNVFIGGKHVGGCTDTVKLHRKGXLA

SEQ ID NO: 106906 - protein, 170 aa, Setaria italica
  Transcript Sequence Number=SeqID_40932
  Gene Ontology: Mol. function=protein disulfide oxidoreductase activity; Cellular component=extracellular region; Biological process=electron transport chain
  Homolog annotation: Hit_ID=B4FRD4; Match level="QueryCoverage=64%, HitCoverage=61%, E-value=4e-56, Identity=94%"; Hit description=Grx _S12-glutaredoxin subgroup I
  Pfam annotation: Domain name=Glutaredoxin; Domain location=78-141; Score=79.1; E_value=1.6e-20; Accession=PF00462.16; Description =Glutaredoxin
  Subcellular localization annotation: CTP_CleavageSite=49; ConfidenceScore=5.47e-01
MPPPIPMPPDMTLRRLPTAILGLSPSLPCLLSRPRLYLAARRPRAVAARASSSSSSPDSSFGARMEDSVKKTVADNPVVIYSKSWCSYSMEVKALFKRIGVQPHVIELDHLGAQGPQLQKVLERLTGQSTVPNVFIGGKHVGGCTDTVKLHRKGELASMLSELDININNS

SEQ ID NO: 106907 - protein, 47 aa, Setaria italica
  Transcript Sequence Number=SeqID_40933
  Gene Ontology: Mol. function=protein disulfide oxidoreductase activity; Cellular component=extracellular region; Biological process=electron transport chain
  Homolog annotation: Hit_ID=Q0J3L4; Match level="QueryCoverage=82%, HitCoverage=23%, E-value=8e-13, Identity=84%"; Hit description =Monothiol glutaredoxin-S10
SISGAQGPQLQKVLERLTGQSTVPNVFIGGKHVGGCTGIIHVLYVKY

SEQ ID NO: 106908 - protein, 190 aa, Setaria italica
  misc_feature (176)..(176): Xaa can be any naturally occurring amino acid
  Transcript Sequence Number=SeqID_40934
  Gene Ontology: Cellular component=plasma membrane
  Homolog annotation: Hit_ID=Q6Z3H8; Match level="QueryCoverage=73%, HitCoverage=15%, E-value=8e-36, Identity=57%"; Hit description =Putative bzip-related transcription factor
  Pfam annotation: Domain name=DUF632; Domain location=65-190; Score= -69.5; E_value=0.00014; Accession=PF04782.4; Description=Protein of unknown function (DUF632)
VHRKSESSDGSGSSEEETEGHVEFRSSTMDGVEESVVVEVEEQLNDDSGVADEPPAVPEIKTYTSDVEVAQEIKLQFDTASKSAGDVSKMLEVDKVPYYKKKNSGLKVPSMVICGQPSKAKAIMQYEEEKAMESGNLSSSLQKLYIWENKLLKEVKAMEKIRGLYDQKRKEQKKNXYYSGAESHKLEAME

SEQ ID NO: 106909 - protein, 261 aa, Setaria italica
  Transcript Sequence Number=SeqID_40935
  Gene Ontology: Mol. function=transcription regulator activity; Cellular component=nucleus; Biological process=regulation of transcription
  Homolog annotation: Hit_ID=B6SV31; Match level="QueryCoverage=100%, HitCoverage=72%, E-value=1e-109, Identity=78%"; Hit description =Symbiotic ammonium transporter
  Pfam annotation: Domain name=HLH; Domain location=80-129; Score=47.3; E_value=6.1e-11; Accession=PF00010.18; Description=Helix-loop-helix DNA-binding domain
SPTILSFGGHAAAAAFAKAEAHQVPSAPYYGAPAKAPKQEVVDAGAPSFHQERQAKRSYDAMVAEAAKVPVPATTRPASQNQDHILAERKRREKLSQRFIALSKIVPGLKKMDKASVLSDAIKYVKQLQDQVKGLEDEARRRPVEAAVLVKKSQLSADDDDGSSCDENFVGAEAAGTLPEIEARVSDRTVLVRIHCENRKGALIAALSEVERLGLTIMNTNVLPFTTSSLDITIMAMAGDDFCLSAKDIVKKLNQAFKSSF

SEQ ID NO: 106910 - protein, 71 aa, Setaria italica
  Transcript Sequence Number=SeqID_40936
DINQQQRITHHHQNIQHHPPPADSRPGATLVLNWLFIQQQQHQLDDGSHNGVKVPRGIGNLSSMHTLDVVN

SEQ ID NO: 106911 - protein, 106 aa, Setaria italica
  Transcript Sequence Number=SeqID_40937
  Gene Ontology: Mol. function=glutamate-ammonia ligase activity; Biological process=nitrogen compound metabolic process
  Homolog annotation: Hit_ID=Q5MD07; Match level="QueryCoverage=91%, HitCoverage=16%, E-value=4e-52, Identity=90%"; Hit description =Glutamine synthetase (Fragment)
IIWSDASGQHRCRVVPAGRFYEVTRNKGVGLTFAAMGMTSFCDGPADGTNLTGVGEIRLVPDMPTLLRLPWSMHEEMVMADMHIRPGEAWEYCPRNAFIVTLNSSN

SEQ ID NO: 106912 - protein, 75 aa, Setaria italica
  Transcript Sequence Number=SeqID_40938
  Gene Ontology: Mol. function=glutamate-ammonia ligase activity; Cellular component=cytoplasm; Biological process=nitrogen compound metabolic process
  Homolog annotation: Hit_ID=Q5MD07; Match level="QueryCoverage=94%, HitCoverage=12%, E-value=9e-29, Identity=83%"; Hit description =Glutamine synthetase (Fragment)
LILPFASTLSRPDLNDIGSGSHVHLSLWENDQNVFMGSSTDNFHGMSNTGEKFLAGVYHHLSSILAFTAPHPNSY

SEQ ID NO: 106913 - protein, 858 aa, Setaria italica
  Transcript Sequence Number=SeqID_40939
  Gene Ontology: Mol. function=glutamate-ammonia ligase activity; Cellular component=cytoplasm; Biological process=nitrogen compound metabolic process
  Homolog annotation: Hit_ID=Q337P3; Match level="QueryCoverage=98%, HitCoverage=99%, E-value=0.0, Identity=81%"; Hit description =Glutamine synthetase, putative, expressed
  Pfam annotation: Domain name=Amidohydro_2; Domain location=128-398; Score=79.2; E_value=1.5e-20; Accession=PF04909.6; Description =Amidohydrolase
  Pfam annotation: Domain name=Gln-synt_C; Domain location=520-780; Score=295.5; E_value=1.1e-85; Accession=PF00120.16; Description =Glutamine synthetase, catalytic domain
  Pfam annotation: Domain name=TatD_DNase; Domain location=34-397; Score=-60.6; E_value=0.00094; Accession=PF01026.13; Description=TatD related DNase
  Pfam module annotation: Pfam domain module=Amidohydro_2::Gln-synt _C::TatD_DNase; Domain location=128-398::520-780::34-397
AREAAETAGLRRGGREMEARYAALRRATEEVAAVDAHAHNLVELGSAFPFARCFCEADGDALALAPHSLSFKRSLRDIAALYNCEASLEKVEEFRKAEGLKSIASKCFQAANISAILIDDGIPFDKMLDLESHKAFAPIVSRVLRTERLAETIINDESFSGSSWTLDSFIESYVTKLKSVCNQIVALKSIAAYRSGLEINPNVSKTDAEDGLRKELTGPRPIRITNKNLIDYLFVCSLEIAVSFNLPVQIHTGFGDKDLDLRKCNPLHLRDVLEDKRFAKCQLVLLHASYPFSKEASYLASVYSQVYLDFGLAFPKLSVQGMTSSLKELLELAPIKKVMFSTDGYAFPETYYLGANRSRDVVYRVLAAACEDGDLSIQEAIEAVEDIFRRNALHLYKLNVANGSINHETAIAGDSVSLSSVEEDILFVRIIWSDASGQHRCRVVPAGRFYEVTRNKGVGLTFAAMGMTSFCDGPADGTNLTGVGEIRLVPDMPTLLRLPWSMHEEMVMADMHIRPGEAWEYCPRNALRKVTKVLLDEFNVTMKAGFENEFFLRRKLVSDGVEQWVPYDNTNYCSTSAFDGASSILQEIYSSLKASNIVVEQLHAEAGKGQFEIALKYILCTLAADKLIYARETIKSVARKHGLLATFLPKPDLNDIGSGSHVHLSLWENDQNVFMGSSTDNFHGMSNTGEKFLAGVYHHLSSILAFTAPHPNSYDRIQPNTWSGAYLCWGKENREAPLRTACPPGVPLDLVSNFEIKSFDACANPHLGLAAIVAAGIDGLRRGHKLPEPIESNPADYASKLKRLPQNLQESVESLAADKVLHELIGDKLVTAAIAIRKAEIDHYAKNPGAFNDLIYRY

SEQ ID NO: 106914 - protein, 122 aa, Setaria italica
  Transcript Sequence Number=SeqID_40940
GIISAYQVALHCNTNCKTSKNHKAHNGCTLLYRLPVKQEVAEARGPASKLLHQVFFSRFQEEIIWCALVRRYCTTAPSIIYAPFPWRDEEAMHGPIGPHVFTVREATHVPRLPTEAHTTHRS

SEQ ID NO: 106915 - protein, 53 aa, Setaria italica
  Transcript Sequence Number=SeqID_40941
ASMREFAAQTSYKFHGLIILISKILETRASCATTDDKQDMQNYRRKQVHRYIF

SEQ ID NO: 106916 - protein, 134 aa, Setaria italica
  misc_feature (100)..(100): Xaa can be any naturally occurring amino acid
  Transcript Sequence Number=SeqID_40942
  Gene Ontology: Mol. function=DNA binding; Cellular component=nucleus; Biological process=regulation of transcription
  Homolog annotation: Hit_ID=Q71KV1; Match level="QueryCoverage=95%, HitCoverage=37%, E-value=1e-65, Identity=89%"; Hit description =Transcription factor Myb
  Pfam annotation: Domain name=Myb_DNA-binding; Domain location=13-60; Score=49.3; E_value=1.5e-11; Accession=PF00249.23; Description=Myb -like DNA-binding domain
  Pfam annotation: Domain name=Myb_DNA-binding; Domain location=66-111; Score=40.0; E_value=9.6e-09; Accession=PF00249.23; Description=Myb -like DNA-binding domain
  Pfam module annotation: Pfam domain module=Myb_DNA-binding::Myb_DNA -binding; Domain location=13-60::66-111
MGHHCCSKQKVKRGLWSPEEDEKLVKYITAHGHSCWSAVPKHAGLQRCGKSCRLRWINYLRPDLKRGTFSDQEERTIIDVHRILGNRWAQIAKHLPGRTXNEVKNFWNSCIKKKLIAQGLDPKTHNLLPASRSL

SEQ ID NO: 106917 - protein, 138 aa, Setaria italica
  Transcript Sequence Number=SeqID_40943
LRDDDWNIFLLECFWFSLDDDWNIFPLDLLCFSVERDCPLMLMKKRHELKFRTFPVTWEKFRKFCHLIIWNMILVDTEVMKISETSIRIVCSTQIFICYYLKMGERSMDRASMKQGNLNSLHITLLFVKTKGTRSMYR

SEQ ID NO: 106918 - protein, 51 aa, Setaria italica
  Transcript Sequence Number=SeqID_40944
ERVIGMEYVNPLLAKDFHATCLDYLLFQCNLLEGILPTCGSFVVTKLVLKA

SEQ ID NO: 106919 - protein, 162 aa, Setaria italica
  Transcript Sequence Number=SeqID_40945
  Gene Ontology: Mol. function=ATP-dependent helicase activity; Cellular component=cytoplasm; Biological process=mRNA processing
  Homolog annotation: Hit_ID=Q53RK8; Match level="QueryCoverage=84%, HitCoverage=18%, E-value=3e-59, Identity=78%"; Hit description=DEAD -box ATP-dependent RNA helicase 21
FTLPFRAVEQKKAAAAHEKETRAELRRKAGVEDRPEDDVVDKKKAAAAEMYDAFDMRVDRHWSEKVLEEMTERDWRIFREDFNISYKGSRIPRPMRKWIESKLGTELLRAIDKAGYEKPSPIQMAAIPLGLQQRDVIGIAETGSGKTAAFVLPMLSYYARLP

SEQ ID NO: 106920 - protein, 730 aa, Setaria italica
  Transcript Sequence Number=SeqID_40946
  Gene Ontology: Mol. function=ATP-dependent helicase activity; Cellular component=cytoplasm; Biological process=mRNA processing
  Homolog annotation: Hit_ID=Q53RK8; Match level="QueryCoverage=79%, HitCoverage=79%, E-value=0.0, Identity=88%"; Hit description=DEAD -box ATP-dependent RNA helicase 21
  Pfam annotation: Domain name=DEAD; Domain location=333-524; Score =232.2; E_value=1.3e-66; Accession=PF00270.21; Description=DEADDEAH box helicase
  Pfam annotation: Domain name=DUF1777; Domain location=68-256; Score= -73.1; E_value=0.02; Accession=PF08648.4; Description=Protein of unknown function (DUF1777)
  Pfam annotation: Domain name=Helicase_C; Domain location=591-667; Score=128.2; E_value=2.6e-35; Accession=PF00271.23; Description =Helicase conserved C-terminal domain
  Pfam module annotation: Pfam domain module=DEAD::DUF1777::Helicase_C; Domain location=333-524::68-256::591-667
AKPVFLTKAERERLALERRQAAVSDQRRTALDLLQSLPRPPPPPPPGGPPPSGSNSAPRESSSSHRDSSDRDRDRDRDRDRRRDDDSRRDRDRDRERDRDDSSRRDRDRDRDRDRDRRDRDRDRDRERERDRDRERGDRGDRERDRQEKMAEREREKELDAIKEQYLGSKKPKKRVIKPSEKFRFSFDWENTEDTSRDMNTLYQSPHEARLLFGRGFLAGIDRREQKKAAAAHEKETRAELRRKAGVEDRPEDDVVDKKKAAAAEMYDAFDMRVDRHWSEKVLEEMTERDWRIFREDFNISYKGSRIPRPMRKWSESKLGTELLLGLKYEKPSPIQMAAIPLGLQQRDVIGIAETGSGKTAAFVLPMLSYITRLPPISEDNEAEGPYAVVMAPTRELAQQIEEETVKFATYLGIKVVSIVGGQSIEEQGFKIRQGCEIVIATPGRLLDCLERRYAVLNQCNYVVLDEADRMIDMGFEPQVVGVLDAMPSSNLKPENEDEELDEKRIYRTTYMFSATMPPAVERLARKYLRNPVVVTIGTAGKATDLITQNVIMVKEQEKMSRLQKILMDLGDKTAIVFCNTKKTADMRAKDLDKAGFRVTTLHGGKSQDQREISLDGFRNRRFNVLVATDVAGRGIDIPDVAHVINYEMPSSIDTYTHRIGRTGRAGKKGVATSFLTLENTDIFFDLKQMLIQSNSPVPPELARHEASKFKPGSIPDRPPRRNDTVFANH

SEQ ID NO: 106921 - protein, 148 aa, Setaria italica
  misc_feature (12)..(12): Xaa can be any naturally occurring amino acid
  Transcript Sequence Number=SeqID_40947
  Gene Ontology: Mol. function=binding
  Homolog annotation: Hit_ID=A5Y6I6; Match level="QueryCoverage=99%, HitCoverage=15%, E-value=6e-18, Identity=37%"; Hit description =ZIP4/SPO22
AKEKKHDVVSEXFQLAAEFFSSGNGEDDANRLLACKSLIMSVSAMLLAEELNKSPLSDSDLKKGVEMLSRAGKLLPLTLPSAPVTSDQLEDNNLLFLHTFNFYHLLNRMDTSAHPQQLQLVKNFAASKACTPGHLLRLEEIASQGTQP

SEQ ID NO: 106922 - protein, 137 aa, Setaria italica
  Transcript Sequence Number=SeqID_40948
  Gene Ontology: Mol. function=receptor activity
  Homolog annotation: Hit_ID=B6UEB9; Match level="QueryCoverage=65%, HitCoverage=22%, E-value=1e-16, Identity=47%"; Hit description=F-box domain containing protein
TPSQVYTRDFNDDRDLLSIWVLDYDTQKWALKHRVSRTHLFGSRFYTSDCDYNVVAIHPDSNMVFIFLNWKRQLISYSLDSKEVRALGTLEQDPGWFVPYVPCFLDFLSVVEHEEKLKGPGEQSAEDVARVGGGGQC

SEQ ID NO: 106923 - protein, 64 aa, Setaria italica
  Transcript Sequence Number=SeqID_40949
  Gene Ontology: Mol. function=GTP binding; Cellular component =intracellular; Biological process=small GTPase mediated signal transduction
  Homolog annotation: Hit_ID=B9S6C9; Match level="QueryCoverage=92%, HitCoverage=13%, E-value=2e-18, Identity=69%"; Hit description=GTP -binding protein era, putative
GKDFVQYRQEIPYSCQVNVVSYKSRPTAKDFIQVEILVEKESQRSIILGKDGKAIKMLSSRDAV

SEQ ID NO: 106924 - protein, 414 aa, Setaria italica
  Transcript Sequence Number=SeqID_40950
  Gene Ontology: Mol. function=nucleotide binding; Cellular component =intracellular; Biological process=small GTPase mediated signal transduction
  Homolog annotation: Hit_ID=B9S6C9; Match level="QueryCoverage=79%, HitCoverage=74%, E-value=1e-143, Identity=73%"; Hit description=GTP -binding protein era, putative
  Pfam annotation: Domain name=Dynamin_N; Domain location=119-237; Score=-22.9; E_value=0.012; Accession=PF00350.15; Description =Dynamin family
  Pfam annotation: Domain name=GTP_EFTU; Domain location=112-285; Score= -44.3; E_value=4.9e-06; Accession=PF00009.19; Description=Elongation factor Tu GTP binding domain
  Pfam annotation: Domain name=KH_2; Domain location=343-407; Score =86.1; E_value=1.3e-22; Accession=PF07650.9; Description=KH domain
  Pfam annotation: Domain name=MMR_HSR1; Domain location=117-238; Score= 137.0; E_value=5.8e-38; Accession=PF01926.15; Description=GTPase of unknown function
  Pfam annotation: Domain name=Miro; Domain location=118-238; Score =15.3; E_value=0.0004; Accession=PF08477.5; Description=Miro-like protein
  Pfam annotation: Domain name=Ras; Domain location=119-285; Score= -87.6; E_value=0.01; Accession=PF00071.14; Description=Ras family
  Pfam module annotation: Pfam domain module=Dynamin_N::GTP_EFTU::KH _2::MMR_HSR1::Miro::Ras; Domain location=119-237::112-285::343 -407::117-238::118-238::119-285
  Subcellular localization annotation: CTP_CleavageSite=40; ConfidenceScore=5.03e-01
MELGLALRFVAPPPPCLSRRCLALPPDLLSPCVLRGRSVRASRLEHGVGVVSNASMTYSGVEEEEMLEEEEEEEAEPAVNARPRLELIEKPDWSLALLDEYESEELSTSHCDNHRSGYVAVLGKPNVGKSTLINQVVGQKLSIVTDKPQTTRHRILGICSEPEYQIILYDTPGVIKKEMHKLDSMMMKNVRSAIGSADCVLVVVDARKAPEKIDEMLEEGVGNKGIGVPVLLVLNKKDLIKPGEIAKKLEWYQKFTNVDDAIPISAKFGHGVDDIKEWILSKLPLGPAYYPKDIASEHPERFFVGEIVREKIFVQYRQEIPYSCQVNVVSYKSRPTAKDFIQVEILVEKESQRSIILGKDGKAIKMLATASRLDIEDFLQKKVYLELEVKVKENWRQDERLLKRYGYGGEIQAL

SEQ ID NO: 106925 - protein, 364 aa, Setaria italica
  Transcript Sequence Number=SeqID_40951
  Gene Ontology: Mol. function=molecular_function; Cellular component =cellular_component; Biological process=response to oxidative stress
  Homolog annotation: Hit_ID=B6TJ62; Match level="QueryCoverage=100%, HitCoverage=100%, E-value=1e-176, Identity=83%"; Hit description=TLD family protein
  Pfam annotation: Domain name=TLD; Domain location=204-342; Score =125.4; E_value=1.9e-34; Accession=PF07534.8; Description=TLD
MGYLPALGSKAAHFVSDLTTVILNPVSERETSHLPEVDEVQENSEDDKDSEHNSDGLDGPDTSSFRAFLISFLSSSSSNNNDSMEIIPEQNVDTSYPTLTPMGKGSKGRSGLISRGKHSIGKIISKAARIGGFKQGTAEPKIDRETVNHTQPVASVSELEESKEVASVSALPTMSEPSILLSELMQSILYASLPVLAQGRNWVLLYSTWRHGISLSTLYRRSMLCPGFSLLVVGDKKGTVFGGLVEAPLQPSSSKKYQGTNNCFVFTNLHDRPVIYRPTGANNYFTVCSADYLALGGGGHFALYLDGDLLTGSSSNSETFNNECLSHSPDFSVKDVELWGFVYPSKYEEMLTLCRTEKPGICRW

SEQ ID NO: 106926 - protein, 64 aa, Setaria italica
  Transcript Sequence Number=SeqID_40952
CEWPLPQVLLSAFSIHNETLNVWTYVTPLPFSVLLLLGPIDASCLVRGEEREINFDVTDCNARN

SEQ ID NO: 106927 - protein, 412 aa, Setaria italica
  Transcript Sequence Number=SeqID_40953
  Gene Ontology: Mol. function=phosphatidylcholine-sterol O -acyltransferase activity; Cellular component=integral to membrane
  Homolog annotation: Hit_ID=A6MH02; Match level="QueryCoverage=90%, HitCoverage=92%, E-value=1e-164, Identity=73%"; Hit description =Hemolysin III-related family protein (Fragment)
  Pfam annotation: Domain name=HlyIII; Domain location=76-397; Score =229.7; E_value=7.4e-66; Accession=PF03006.12; Description=Haemolysin- III related
MAPTAVATAEEAERLAAAAWGEEGEEEGKRGAGMKRRKRYGLVEYRALPGYLRDNEYIHRHYRCEWPLPQVLLSAFSIHNETLNVWTHLIGFFIFLALTIYTATQVPNVVDIQSLKHLPDVLRNADIHKIQAELVSCLPSLPHLSDLEKLKDELKSSWNSMEVLPSLSRWHLLELLSNCLPHRFTHTNETSLSVLQSMKDDIANMIAPELIRPIARWPFFAFLGGAMFCLLASSTCHLLSCHSRRLAYIMLRLDYAGIAALIATSFYPPVYYSFMCYPFFCNLYLSFITILGVATIAFSLLPVFQNPEFRTIRACLFFGMGASGVIPVLHKLVLFWHQPEALHTTGYEVLMGLFYGLGALVYATRVPERWMPGKFDIAGHSHQLFHILVVAGAYTHYHAGLVYLKWRDLQGC

SEQ ID NO: 106928 - protein, 60 aa, Setaria italica
  Transcript Sequence Number=SeqID_40954
SFSMLIDIERSLVQVPLLYDKHVYLESWAFLVPVHIFVTKFTISLFIHVFALLHYNFAEC

SEQ ID NO: 106929 - protein, 258 aa, Setaria italica
  Transcript Sequence Number=SeqID_40955
  Gene Ontology: Mol. function=electron carrier activity; Cellular component=transcription factor complex; Biological process=positive regulation of transcription from RNA polymerase II promoter
  Homolog annotation: Hit_ID=Q336Y0; Match level="QueryCoverage=100%, HitCoverage=13%, E-value=1e-126, Identity=82%"; Hit description =Amine oxidase, flavin-containing family protein, expressed
IGLSLEDGLEYALRKHRAAQHMDIVERDDHLKSLTNAGAMDISKIASTEKEIAHCGKDDKVDVLSPLERRVMNWHFAHLEYGCAATLKSVSLPYWNQDDVYGGFGGPHCMIKGGYDTVLCSLAKGLDLRLNHIVTEVLYGHGESGASCKDGKHVKVSTSNGNEFIGDAVLITVPLGCLKAQTIKFSPSLPDWKLSSINRLGFGVLNKIVLEFPEVFWDDNVDYFGATAEETDLRGRCFMFWNLRKTVGAPVLIALLVG

SEQ ID NO: 106930 - protein, 94 aa, Setaria italica
  misc_feature (70)..(70): Xaa can be any naturally occurring amino acid
  Transcript Sequence Number=SeqID_40956
  Gene Ontology: Mol. function=calcium ion binding; Cellular component =oxygen evolving complex; Biological process=photosynthesis
  Homolog annotation: Hit_ID=Q41048; Match level="QueryCoverage=100%, HitCoverage=46%, E-value=2e-18, Identity=56%"; Hit description =Oxygen-evolving enhancer protein 3-1, chloroplastic
  Subcellular localization annotation: CTP_CleavageSite=31; ConfidenceScore=5.41e-01
MAQAMASMTGLSQGVLPSRRAASRARTAVVRASADGEAGRRAVLGLVATGIVGSVFSQAAHAEAVKTIKXGPPPPPSGGLPGTLNSDQARDFDL

SEQ ID NO: 106931 - protein, 89 aa, Setaria italica
  Transcript Sequence Number=SeqID_40957
  Gene Ontology: Mol. function=DNA binding; Cellular component=nucleus; Biological process=regulation of transcription, DNA-dependent
  Homolog annotation: Hit_ID=Q8LT05; Match level="QueryCoverage=80%, HitCoverage=15%, E-value=3e-32, Identity=95%"; Hit description =Transcription factor PCF7
  Pfam annotation: Domain name=TCP; Domain location=36-89; Score=70.7; E_value=5.6e-18; Accession=PF03634.5; Description=TCP family transcription factor
  Subcellular localization annotation: CTP_CleavageSite=34; ConfidenceScore=5.19e-01
QSRAAGAAGDGVSSGESTPVDALATAFGSGRIVRSAAGRKDRHSKVCTARGLRDRRVRLAAHTAIRFYDVQDRLGYDRPSKAVDWLIRN

SEQ ID NO: 106932 - protein, 59 aa, Setaria italica
  Transcript Sequence Number=SeqID_40958
RQEARPRDGRTDRGLNLSVNSCIGYRHQVSCRRADVGAARGPGGGGLFGIKGFFSKKVH

SEQ ID NO: 106933 - protein, 69 aa, Setaria italica
  Transcript Sequence Number=SeqID_40959
  Subcellular localization annotation: CTP_CleavageSite=7; ConfidenceScore=5.23e-01
TSQNRITIMQVSSSYSNKLPAQRIKPSHNLPPDRSAQVASTDHPNSASYHPHEPTSPTTARRTNLRRQG

SEQ ID NO: 106934 - protein, 87 aa, Setaria italica
  Transcript Sequence Number=SeqID_40960
  Gene Ontology: Mol. function=transporter activity; Cellular component= membrane; Biological process=oligopeptide transport
  Homolog annotation: Hit_ID=Q9LYR6; Match level="QueryCoverage=85%, HitCoverage=11%, E-value=2e-14, Identity=56%"; Hit description =Peptide transporter-like protein
SAYAAVAGGLGCFLASALNTAVDAATRDDAAGRPSWLAQNINVGRFDYLYWLLAVLSTVNLLVFVYVAKRYKYRVRIDAQAAVVNKQ

SEQ ID NO: 106935 - protein, 124 aa, Setaria italica
  Transcript Sequence Number=SeqID_40961
  Subcellular localization annotation: CTP_CleavageSite=30; ConfidenceScore=5.17e-01
PHLAVASSSSSSSVQSPRIVLLGLLEVCCFCAHSSTCCNNSLRRLGRRTGRREQDKPWHCADRAGSEEGGVLTVSPSYSIDRVPLPLPPHRPPPAPITGVIVTRNRPRCGSCLDQDGYLAPTCP

SEQ ID NO: 106936 - protein, 159 aa, Setaria italica
  Transcript Sequence Number=SeqID_40962
  Gene Ontology: Mol. function=metal ion binding; Biological process =metal ion transport
  Homolog annotation: Hit_ID=B6TF33; Match level="QueryCoverage=45%, HitCoverage=29%, E-value=1e-12, Identity=50%"; Hit description =Circumsporozoite protein
MADKISTIVLKVDLECERCYKKMRRVLCKIQDKMNIKTISFDEKSNAVTISGPFDAEKVCNKLCCEAGRVIKEMDIKGKEKAKDGGGDKPKAAAKGAENKPEKVKEAKGEKEGAKAEKKEDKKEGKGDKEAKPDKAEKGGKDAKAEAKKVQFNLDEAPP

SEQ ID NO: 106937 - protein, 94 aa, Setaria italica
  Transcript Sequence Number=SeqID_40963
WMRTTPSTITVVYVGYHVTMIIEMEHFFWRRILAVLEVLEITDGKTVFLKSISISTNVNKGCLALGSGRKCLNLQEIEHFTLLVFESRLFGNQQ

SEQ ID NO: 106938 - protein, 123 aa, Setaria italica
  Transcript Sequence Number=SeqID_40964
  Gene Ontology: Mol. function=zinc ion binding; Cellular component =nucleus; Biological process=transcription initiation
  Homolog annotation: Hit_ID=B9SS21; Match level="QueryCoverage=89%, HitCoverage=20%, E-value=4e-13, Identity=41%"; Hit description =Protein binding protein, putative
  Pfam annotation: Domain name=Plus-3; Domain location=30-122; Score =43.0; E_value=1.1e-09; Accession=PF03126.10; Description=Plus-3 domain
KKKPRNAVELKISKRVSEKNNRCFASLNENNIKLIYLRRSLVINLLNHLDTFDQKVVGCFVRVKNAPRVHMYEKPKMPYQLGLVTGIKKSSEEYRINDTCTNILLCVTGLWDDVRISMLSRTK

SEQ ID NO: 106939 - protein, 52 aa, Setaria italica
  Transcript Sequence Number=SeqID_40965
RKTFLRALRKSLTNYTTVMASFALILPEAQKAWLYRSTAAHISVVNIDHHAE

SEQ ID NO: 106940 - protein, 136 aa, Setaria italica
  misc_feature (109)..(109): Xaa can be any naturally occurring amino acid
  Transcript Sequence Number=SeqID_40966
RHGSTSSRAETAAAPARQQLAETAAARQHKAMPGCITFKTAPLEHEDLLRIMFDAISVTNETAYVPGQGGAAADSDGQGKGDREDEMTTQTVIPNSNARGKDKRTASWXSTSPKGKKKKTFRDQCMKRLVDANEMK

SEQ ID NO: 106941 - protein, 80 aa, Setaria italica
  Transcript Sequence Number=SeqID_40967
GTVRVRTEGGCEDAVVVGGRGEERDGVVVVGEGSGEKELGKEGGCVEGVLEGVSESGRAHGDEKDDEEVAEKAILVLDFE

SEQ ID NO: 106942 - protein, 82 aa, Setaria italica
  Transcript Sequence Number=SeqID_40968
IVCYRRANIRNYLPVNVAYELKYTVPRKSELDSLIEMTQTSTQANIFANFLCILEEMPVDLVYVFFVKVKQICKLDSLAEIQ

SEQ ID NO: 106943 - protein, 134 aa, Setaria italica
  Transcript Sequence Number=SeqID_40969
  Gene Ontology: Mol. function=structural molecule activity; Cellular component=clathrin coat of trans-Golgi network vesicle; Biological process=intracellular protein transport
  Homolog annotation: Hit_ID=Q39834; Match level="QueryCoverage=64%, HitCoverage=5%, E-value=1e-35, Identity=83%"; Hit description =Clathrin heavy chain
ERAEEFAFRVEEDAVWSQVAKAQLREGLVSEAIESFIRADDAAHFLDVIHAAEEANVYNDLVKYLLMVRQKAREPKVDGELIFAYAKIDRLSDIEEFILMPLSLSILAYAKMSSPSTLHMLRLTDSVTLKSSFY

SEQ ID NO: 106944 - protein, 90 aa, Setaria italica
  Transcript Sequence Number=SeqID_40970
MGDGGGADEVVVVGGGRGGGCEDAVVVGGRGEEQDGVVVVGEGSGEKELGKEGGCVEGVREGVSEPGRAHGDGKDDEEVAEKAILVPDFD

SEQ ID NO: 106945 - protein, 81 aa, Setaria italica
  Transcript Sequence Number=SeqID_40971
LVEYTGISLVKTYTRSTDISSRIHKKLANIFTCVEVCIISINEIKFHTFSWNSIFEFISNIHRQIVFGYFGPSITNNGTIA

SEQ ID NO: 106946 - protein, 58 aa, Setaria italica
  Transcript Sequence Number=SeqID_40972
KFELINNRKTFLHALRKSLTNYTTVMASFALILPEAQKAWLYRSTAAHTLVNINHHAE

SEQ ID NO: 106947 - protein, 163 aa, Setaria italica
  misc_feature (30)..(30): Xaa can be any naturally occurring amino acid
  Transcript Sequence Number=SeqID_40973
  Gene Ontology: Mol. function=structural molecule activity; Cellular component=clathrin coat of trans-Golgi network vesicle; Biological process=intracellular protein transport
  Homolog annotation: Hit_ID=Q9SRM1; Match level="QueryCoverage=71%, HitCoverage=6%, E-value=3e-50, Identity=77%"; Hit description =Clathrin heavy chain, putative; 28833-19741
KRVQKKDNMYKDCMETCLQSGDRELSEDLXYFIEQGKKECFASCLFICYDLIRPDIALELAWMNNMIDFAFPYLLQFIREYSSKVDDLVKDKIESQNEERAKEKEEKDLVAQQNMYAQLLPLALPAPPMPGMGGPPPPMGGMGMPPMGGMGMPPMGPSSFPLV

SEQ ID NO: 106948 - protein, 97 aa, Setaria italica
  misc_feature (4)..(4): Xaa can be any naturally occurring amino acid
  Transcript Sequence Number=SeqID_40974
  Gene Ontology: Mol. function=peptidase activity; Cellular component =signal peptidase complex; Biological process=signal peptide processing
  Homolog annotation: Hit_ID=B6SJA3; Match level="QueryCoverage=82%, HitCoverage=83%, E-value=2e-29, Identity=77%"; Hit description =Signal peptidase complex subunit 1
  Pfam annotation: Domain name=SPC12; Domain location=1-80; Score =118.3; E_value=2.5e-32; Accession=PF06645.5; Description=Microsomal signal peptidase 12 kDa su
MDWXGQKRAEMLMQVLLVAAAVAAFLVGYLRGDFQLMLLVYAGGVVLTALVTVPNWPFFNRNPLKWLDADEAERHPRPQVSAAGAAAGGKKKSGKNK

SEQ ID NO: 106949 - protein, 299 aa, Setaria italica
  misc_feature (46)..(46): Xaa can be any naturally occurring amino acid
  Transcript Sequence Number=SeqID_40975
  Gene Ontology: Mol. function=transposase activity; Biological process= transposition, DNA-mediated
  Homolog annotation: Hit_ID=B6U6W8; Match level="QueryCoverage=98%, HitCoverage=97%, E-value=6e-66, Identity=46%"; Hit description =Transposon protein CACTA, En/Spm sub-class
KKPAKVQAKWDPFAAKHFNEICVEEVLAHNRPHQCLNSLGYANLVXKFKERTNRSYTQEQMKNRWDSLKKKYTHWKTLNVRAAGFGRNPLTGCIIAGDDWWEEQNAAIPGCATFKTSPLEHEDLLQIMFEATSVTNETAYVPGCDDDDAHEGDGQGEGDVDGEGGHEGDGEDVSGTLLVTPSSGMCGMEKRPAPNFLPKGKKKKTFRDQCLKRLVDAYELRAQSSKNSATSQVVDHVRIEIATMLDQVIKDGAEEGSDEHYYATQLLRKKEYRDVFITLKTTNGRLNWLRRAWQDRERH

SEQ ID NO: 106950 - protein, 1346 aa, Setaria italica
  misc_feature (1266)..(1266): Xaa can be any naturally occurring amino acid
  Transcript Sequence Number=SeqID_40976
  Gene Ontology: Mol. function=structural molecule activity; Cellular component=clathrin coat of trans-Golgi network vesicle; Biological process=intracellular protein transport
  Homolog annotation: Hit_ID=Q9SRM1; Match level="QueryCoverage=100%, HitCoverage=78%, E-value=0.0, Identity=89%"; Hit description =Clathrin heavy chain, putative; 28833-19741
  Pfam annotation: Domain name=Clathrin; Domain location=1142-1283; Score=136.0; E_value=1.2e-37; Accession=PF00637.12; Description =Region in Clathrin and VPS
  Pfam annotation: Domain name=Clathrin; Domain location=551-693; Score= 68.3; E_value=2.8e-17; Accession=PF00637.12; Description=Region in Clathrin and VPS
  Pfam annotation: Domain name=Clathrin; Domain location=700-842; Score= 106.0; E_value=1.3e-28; Accession=PF00637.12; Description=Region in Clathrin and VPS
  Pfam annotation: Domain name=Clathrin; Domain location=847-986; Score= 126.0; E_value=1.2e-34; Accession=PF00637.12; Description=Region in Clathrin and VPS
  Pfam annotation: Domain name=Clathrin; Domain location=993-1138; Score=125.8; E_value=1.4e-34; Accession=PF00637.12; Description =Region in Clathrin and VPS
  Pfam annotation: Domain name=Clathrin-link; Domain location=344-367; Score=31.3; E_value=3.8e-06; Accession=PF09268.2; Description =Clathrin, heavy-chain linker
  Pfam annotation: Domain name=Clathrin_propel; Domain location=108 -139; Score=22.5; E_value=0.0018; Accession=PF01394.12; Description =Clathrin propeller repeat
  Pfam annotation: Domain name=Clathrin_propel; Domain location=154 -197; Score=20.0; E_value=0.0098; Accession=PF01394.12; Description =Clathrin propeller repeat
  Pfam annotation: Domain name=Clathrin_propel; Domain location=20-56; Score=21.1; E_value=0.0046; Accession=PF01394.12; Description =Clathrin propeller repeat
  Pfam annotation: Domain name=Clathrin_propel; Domain location=208 -248; Score=23.8; E_value=0.00069; Accession=PF01394.12; Description =Clathrin propeller repeat
  Pfam annotation: Domain name=Clathrin_propel; Domain location=266 -301; Score=18.7; E_value=0.024; Accession=PF01394.12; Description =Clathrin propeller repeat
  Pfam annotation: Domain name=Clathrin_propel; Domain location=309 -343; Score=24.7; E_value=0.00039; Accession=PF01394.12; Description =Clathrin propeller repeat
  Pfam annotation: Domain name=Clathrin_propel; Domain location=60-100; Score=21.7; E_value=0.0031; Accession=PF01394.12; Description =Clathrin propeller repeat
  Pfam module annotation: Pfam domain module=Clathrin::Clathrin::Clathri n::Clathrin::Clathrin::Clathrin-link::Clathrin_propel::Clathrin _propel::Clathrin_propel::Clathrin_propel::Clathrin_propel::Clathrin _propel::...
  Pfam module annotation: Pfam domain module=Clathrin_propel; Domain location=1142-1283::551-693::700-842::847-986::993-1138::344 -367::108-139::154-197::20-56::208-248::266-301::309-343::60-100
MAAANAPIAMREALTLTSLGIAPQFVTFTHVTMESEKYICVRETSPQNSVVIIDMAMPMQPLRRPITADSALMNPNTRILALKAQIPGTTQDHLQIFNIEAKTKIKSHQMPEQVVFWKWITPKLLGLVTQTSVYHWSIEGDSEPTKMFDRTANLANNQIINYRCDPAEKWLVLIGIAPGAPERPQLVKGNMQLFSVEQQRSQALEAHAASFATFKVAGNENPSTLICFASKTTNAGQITSKLHVIELGAQPGKPGFSKKQADLFFPPDFQDDFPVAMQVSQKYGLVYVITKLGLLFVYDLETAAAVYRNRISPDPIFLTAESSSTGGFYAINRRGQVLHATVNDATVVPFVSGQLNNLELAVNLAKRANLPGAENLVVQRFQELFAQTKYKEAAELAAESPQGLLRTPETVAKFQSVPVQAGQTPPLLQYFGTLLTRGKLNAFESLELSRLVVNQNKKNLLENWLAEDKLECSEELGDLVKTVDNDMALKIYIKARATPKVVAAFAERREFDKILIYSKQVGYTPDYLFLLQTILRTDPQGAVNFALMMSQMEGGCPVDYNTITDLFLQRNMIREATAFLLDVLKPNLPEHAFLQTKVLEINLVTYPNVADAILANGMFSHYDRPRIAQLCEKAGLYLRALQHYSELPDIKRVIVNTHAIEPQALVEFFGTLSREWALECMKDLLVVNLRGNLQIVVQAAKEYSEQLGVDACIKLFEQFKSYEGLYFFLGSYLSSSEDPDIHFKYIEAAARTGQIKEVERVTRESNFYDAEKTKNFLMEAKLPDARPLINVCDRFGFVPDLTHYLYTNNMLRYIEGYVQKVNPGNAPLVVGQLLDDECPEDFIKGLILSVRSLLPVEPLVDECEKRNRLRLLTQFLEHLVSEGSQDVHVHNALGKIIIDSNNNPEHFLTTNPFYDSRVVGKYCEKRDPTLAVVAYRRGQCDDELINVTNKNSLFKLQARYVVERMDGDLWDKVLQPENEYRRQLIDQVVSTALPESKSPEQVSAAVKAFMTADLPHELIELLEKIVLQNSAFSGNFNLQNLLILTAIKADPSRVMDYVNRLDNFDGPAVGEVAVEAQLYEEAFAIFKKFNLNVQAVNVLLDNIRSIERAEEFAFRVEEDAVWSQVAKAQLREGLVSEAIESFIRADDAAHFLDVIHAAEEANVYNDLVKYLLMVRQKAREPKVDGELIFAYAKIDRLSDIEEFILMPNVANLQNVGDRLYDEELYEAAKIIYAFISNWAKLAVTLVKLKQFQGAVDAARKANSAKXWKEVCFACVDAEEFRLAQICGLNIIVQVDDLEEVSEYYQNRGCFNELIALMESGLGLERAHMGIFTELGVLYARYRYEKL

SEQ ID NO: 106951 - protein, 721 aa, Setaria italica
  Transcript Sequence Number=SeqID_40977
  Gene Ontology: Mol. function=structural molecule activity; Cellular component=clathrin coat of trans-Golgi network vesicle; Biological process=intracellular protein transport
  Homolog annotation: Hit_ID=Q9C6U0; Match level="QueryCoverage=92%, HitCoverage=43%, E-value=0.0, Identity=85%"; Hit description =Clathrin heavy chain, putative
  Pfam annotation: Domain name=Clathrin; Domain location=153-294; Score= 138.0; E_value=3.1e-38; Accession=PF00637.12; Description=Region in Clathrin and VPS
  Pfam annotation: Domain name=Clathrin; Domain location=299-445; Score= 126.0; E_value=1.2e-34; Accession=PF00637.12; Description=Region in Clathrin and VPS
  Pfam annotation: Domain name=Clathrin; Domain location=4-149; Score =119.9; E_value=8.3e-33; Accession=PF00637.12; Description=Region in Clathrin and VPS
  Pfam annotation: Domain name=Clathrin; Domain location=448-607; Score= 87.4; E_value=5.1e-23; Accession=PF00637.12; Description=Region in Clathrin and VPS
  Pfam module annotation: Pfam domain module=Clathrin::Clathrin::Clathri n::Clathrin; Domain location=153-294::299-445::4-149::448-607
MNALPESKSPEQVSAAVKAFMTADLPHELIELLEKIVLQNSAFSGNFNLQNLLILTAIKADPSRVMDYVNRLDNFDGPAVGEVAVEAQLYEEGFAIFKKFNLNVQAVNVLLDNIRSIERAEEFAFRVEEDAVWSQVAKAQLREGLVSEAIESFIRADDAAHFLDVIHAAEEANVYNDLVKYLLMVRQKAREPKVDGELIFAYAKIDRLSDIEEFILMPNVANLQNVGDRLYDEELYEAAKIIYAFISNWAKLAVTLVKLKQFQGAVDAARKANSAKTWKEVCFACVDAEEFRLAQICGLNIIVQVDDLEEVSEYYQNRGCFNELIALMESGLGLERAHMGIFTELGVLYARYRYEKLMEHIKLFSTRLNIPKLIRACDEQQHWKELTYLYIQYDEFDNAATTIMNHSPDAWDHMQFKDVCVKVANVELYYKAVHFYLQEHPDLINDMLNVLALRLDHTRVVDIMRKAGQLHLVKPYMVAVQSNNVSAVNEALNELYVEEEDYERLRESVDMHDNFDQIGLAQKLEKHELLEMRRIAAYIYKKAGRWKQSIALSKKDNMYKDCMETCSQSGDRELSEDLLVYFIEQGKKECFASCLFICYDLIRPDVALELAWMNNMIDFAFPYLLQFIREYSSKVDDLVKDKIESQNEERAKEKEEKDLVAQQNMYAQLLPLALPAPPMPGMGGPPPPMGGMGMPPMGGMGMPPMGPGPMPAFGMPPMGSY

SEQ ID NO: 106952 - protein, 1712 aa, Setaria italica
  misc_feature (1185)..(1185): Xaa can be any naturally occurring amino acid
  misc_feature (1680)..(1680): Xaa can be any naturally occurring amino acid
  Transcript Sequence Number=SeqID_40978
  Gene Ontology: Mol. function=structural molecule activity; Cellular component=clathrin coat of trans-Golgi network vesicle; Biological process=intracellular protein transport
  Homolog annotation: Hit_ID=Q9SRM1; Match level="QueryCoverage=96%, HitCoverage=97%, E-value=0.0, Identity=87%"; Hit description =Clathrin heavy chain, putative; 28833-19741
  Pfam annotation: Domain name=Clathrin; Domain location=1142-1284; Score=125.7; E_value=1.5e-34; Accession=PF00637.12; Description =Region in Clathrin and VPS
  Pfam annotation: Domain name=Clathrin; Domain location=1289-1435; Score=126.0; E_value=1.2e-34; Accession=PF00637.12; Description =Region in Clathrin and VPS
  Pfam annotation: Domain name=Clathrin; Domain location=1438-1597; Score=87.4; E_value=5.1e-23; Accession=PF00637.12; Description =Region in Clathrin and VPS
  Pfam annotation: Domain name=Clathrin; Domain location=551-693; Score= 67.4; E_value=5.2e-17; Accession=PF00637.12; Description=Region in Clathrin and VPS
  Pfam annotation: Domain name=Clathrin; Domain location=700-842; Score= 106.0; E_value=1.3e-28; Accession=PF00637.12; Description=Region in Clathrin and VPS
  Pfam annotation: Domain name=Clathrin; Domain location=847-986; Score= 126.0; E_value=1.2e-34; Accession=PF00637.12; Description=Region in Clathrin and VPS
  Pfam annotation: Domain name=Clathrin; Domain location=993-1138; Score=119.9; E_value=8.3e-33; Accession=PF00637.12; Description =Region in Clathrin and VPS
  Pfam annotation: Domain name=Clathrin-link; Domain location=344-367; Score=31.3; E_value=3.8e-06; Accession=PF09268.2; Description =Clathrin, heavy-chain linker
  Pfam annotation: Domain name=Clathrin_propel; Domain location=108 -139; Score=22.8; E_value=0.0014; Accession=PF01394.12; Description =Clathrin propeller repeat
  Pfam annotation: Domain name=Clathrin_propel; Domain location=154 -197; Score=19.4; E_value=0.015; Accession=PF01394.12; Description =Clathrin propeller repeat
  Pfam annotation: Domain name=Clathrin_propel; Domain location=20-56; Score=21.1; E_value=0.0046; Accession=PF01394.12; Description =Clathrin propeller repeat
  Pfam annotation: Domain name=Clathrin_propel; Domain location=208 -248; Score=24.6; E_value=0.00041; Accession=PF01394.12; Description =Clathrin propeller repeat
  Pfam annotation: Domain name=Clathrin_propel; Domain location=266 -301; Score=19.1; E_value=0.019; Accession=PF01394.12; Description =Clathrin propeller repeat
  Pfam annotation: Domain name=Clathrin_propel; Domain location=309 -343; Score=24.7; E_value=0.00039; Accession=PF01394.12; Description =Clathrin propeller repeat
  Pfam annotation: Domain name=Clathrin_propel; Domain location=60-100; Score=21.7; E_value=0.0031; Accession=PF01394.12; Description =Clathrin propeller repeat
  Pfam module annotation: Pfam domain module=Clathrin::Clathrin::Clathri n::Clathrin::Clathrin::Clathrin::Clathrin::Clathrin-link::Clathrin _propel::Clathrin_propel::Clathrin_propel::Clathrin_propel::Clathrin _propel::...
  Pfam module annotation: Pfam domain module=Clathrin_propel::Clathrin _propel; Domain location=1142-1284::1289-1435::1438-1597::551 -693::700-842::847-986::993-1138::344-367::108-139::154-197::20 -56::208-248::266-301::309-343::60-100
MAAANAPIAMREALTLTSLGIAPQFVTFTHVTMESEKYICVRETSPQNSVVIIDMAMPMQPLRRPITADSALMNPNTRILALKAQIPGTTQDHLQIFNIEAKTKIKSHQMPEQVVFWKWITPKLVGLVTQTSVYHWSIEGDSEPTKMFDRTANLANNQIINYRCDPAEKWLVLIGIAPGAPERPQLVKGNMQLFSVDQQRSQALEAHAASFATFKVVGNENPSTLICFASKTTNAGQITSKLHVIELGAQPGKPGFSKKQADLFFPPDFQDDFPVAMQVSQKYGLIYVITKLGLLFVYDLETAAAVYRNRISPDPIFLTAESSSTGGFYAINRRGQVLHATVNDATVVPFVSGQLNNLELAVNLAKRANLPGAENLVVQRFQELFAQTKYKEAAELAAESPQGLLRTPETVAKFQSVPVQAGQTPPLLQYFGTLLTRGKLNAFESLELSRLVVNQNKKNLLENWLAEDKLECSEELGDLVKTVDNDMALKIYIKARATPKVVAAFAERREFDKILIYSKQVGYTPDYLFLLQTILRTDPQGAVNFALMMSQMEGGCPVDYNTITDLFLQRNMIREATAFLLDVLKPNLPEHAFLQTKVLEINLVTYPNVADAILANGMFSHYDRPRIAQLCEKAGLYLRALQHYSELPDIKRVMVNTHAIEPQALVEFFGTLSREWALECMKDLLVVNLRGNLQIVVQAAKEYSEQLGVDACIKLFEQFKSYEGLYFFLGSYLSSSEDPDIHFKYIEAAARTGQIKEVERVTRESNFYDAEKTKNFLMEAKLPDARPLINVCDRFGFVPDLTHYLYTNNMLRYIEGYVQKVNPGNAPLVVGQLLDDECPEDFIKGLILSVRSLLPVEPLVDECEKRNRLRLLTQFLEHLVSEGSQDVHVHNALGKIIIDSNNNPEHFLTTNPFYDSRVVGKYCEKRDPTLAVVAYRRGQCDDELINVTNKNSLFKLQARYVVERMDGDLWDKVLQPENEYRRQLIDQVVSTALPESKSPEQVSAAVKAFMTADLPHELIELLEKIVLQNSAFSGNFNLQNLLILTAIKADPSRVMDYVNRLDNFDGPAVGEVAVEAQLYEEGFAIFKKFNLNVQAVNVLLDNIRSIERAEEFAFRVEEDAVWSQVAKAQLREGLVSEAIESFIRADDAAHFLDVIHAAEEANVYNDLVKYLLMVRQKAREPKVDXKELIFAYAKIDRLSDIEEFILMPNVANLQNVGDRLYDEELYEAAKIIYAFISNWAKLAVTLVKLKQFQGAVDAARKANSAKTWKEVCFACVDAEEFRLAQICGLNIIVQVDDLEEVSEYYQNRGCFNELIALMESGLGLERAHMGIFTELGVLYARYRYEKLMEHIKLFSTRLNIPKLIRACDEQQHWKELTYLYIQYDEFDNAATTIMNHSPDAWDHMQFKDVCVKVANVELYYKAVHFYLQEHPDLINDMLNVLALRLDHTRVVDIMRKAGQLHLVKPYMVAVQSNNVSAVNEALNELYVEEEDYERLRESVDMHDNFDQIGLAQKLEKHELLEMRRIAAYIYKKAGRWKQSIALSKKDNMYKDCMETCSQSGDRELSEDLLVYFIEQGKKECFASCLFICYDLIRPDVALELAWMNNMIDFAFPYLLQFIREYSSKVDDLVKDKIESQNEERAKEKEEKDLVAQQNMYAQLLPLALPAPPMPGMGGPPPPRXGGMGMPPMGGMGMPPMGPGPMPAFGMPPMGSY

SEQ ID NO: 106953 - protein, 181 aa, Setaria italica
  misc_feature (28)..(28): Xaa can be any naturally occurring amino acid
  Transcript Sequence Number=SeqID_40979
  Gene Ontology: Mol. function=calcium ion binding; Cellular component =membrane
  Homolog annotation: Hit_ID=B6U6F8; Match level="QueryCoverage=100%, HitCoverage=100%, E-value=2e-87, Identity=88%"; Hit description =Calmodulin-related protein
  Pfam annotation: Domain name=efhand; Domain location=127-155; Score =35.5; E_value=2.2e-07; Accession=PF00036.24; Description=EF hand
  Pfam annotation: Domain name=efhand; Domain location=15-44; Score =12.7; E_value=0.87; Accession=PF00036.24; Description=EF hand
  Pfam annotation: Domain name=efhand; Domain location=52-80; Score =36.8; E_value=8.5e-08; Accession=PF00036.24; Description=EF hand
  Pfam annotation: Domain name=efhand; Domain location=91-119; Score =41.4; E_value=3.5e-09; Accession=PF00036.24; Description=EF hand
  Pfam module annotation: Pfam domain module=efhand::efhand::efhand::efh and; Domain location=127-155::15-44::52-80::91-119
MDEVEQQLSKQQIEEFREAFSLFDKDGXDGTITSKELGTVMRSLGQSPSEEELQEMVKEVDADGSGAIDFQEFLTLLARQMREANGADEEELREAFRVFDQDQNGFISRDELRHVLQNLGERLSDDELAEMLREADVDGDGQINYTEFAKVMLAKRRNQELEGHGSYLSHSKSFCPSCTIL

SEQ ID NO: 106954 - protein, 137 aa, Setaria italica
  Transcript Sequence Number=SeqID_40980
  Gene Ontology: Mol. function=nucleotide binding; Cellular component =myosin complex; Biological process=protein amino acid phosphorylation
  Homolog annotation: Hit_ID=B9S7I4; Match level="QueryCoverage=96%, HitCoverage=8%, E-value=9e-41, Identity=63%"; Hit description=Myosin XI, putative
RQFQDYLRRLEEKLANVESENKVLRQQAVSMAPSKILSGRSKSNLQRSSENVQVSSNDPKITLESNNTSSPKKEYDIDDKPQKSLNEKQQENQDLLIRCIAQHLGYAGNRPVAACIIYKCLLHWRSFEVEQTRTRNK

SEQ ID NO: 106955 - protein, 74 aa, Setaria italica
  Transcript Sequence Number=SeqID_40981
ILRFGSGLLRKVSTSVCTTKEPTLLSISMSFEEALLEIHSKDMFPLRSSYIKHELENTPGRFPIKDYSKFLLSY

SEQ ID NO: 106956 - protein, 61 aa, Setaria italica
  Transcript Sequence Number=SeqID_40982
EYICSIRSDSSYKRLDGLYFEIWKRVAKGKVSTSVCTTKEPTLLSISVGVSLCILIHMLAC

SEQ ID NO: 106957 - protein, 500 aa, Setaria italica
  Transcript Sequence Number=SeqID_40983
MPKWRQKKSRPGGPYMWIPTRLLWRFNGNVQAALKAYAEEEGIVPASLRKAEVESWLHDDSTSSSSRSGVAQEEAPFNGEETSLLLKMDKKPKSTCSRARGKIAHDEHEKPKSTCSRARGKIAHDEHEDGQSDKKPCSAVEDEQHSGKIGVHAIEEHKQEQGSARGDVQALLDMDDETIQEKIWCFSERLHLNFVDPEFCDYGPEYEPEQLRELYEQLALYRIRAYELTVDRKLTELDDVNLKLHYPPSKLYNNSFFEYYEDSLEWYFDLERCRNAQYDNYQRLVLRAPGYLDWDFYHKIIHTYEQDQAYVQYFEEVANRTKWVEDYLGDSTIQWERVRGLAYMQALEVAAGFPDVSPFLVSYGFPEYICSIRSDSSYKRLDGLYFEIWKRVAKGKMSFEEALLEIHSKDMFPLRSSYIKHELENTPGRFPIKDYYDAHVAGIDKMAADDKARQLIREAVVKIASPLKRKFYLDYARKKLEIARDIDLIPKGRRGSESLW

SEQ ID NO: 106958 - protein, 213 aa, Setaria italica
  misc_feature (72)..(72): Xaa can be any naturally occurring amino acid
  misc_feature (104)..(104): Xaa can be any naturally occurring amino acid
  Transcript Sequence Number=SeqID_40984
  Gene Ontology: Mol. function=nucleotide binding; Biological process =defense response
  Homolog annotation: Hit_ID=Q9SWT8; Match level="QueryCoverage=99%, HitCoverage=24%, E-value=1e-47, Identity=53%"; Hit description =HV1LRR1
RGIRNLTGLHALQYVKASLEILRDVATSIELRTFAVGDFTSEHSLNLCTAIMNMRHLVHLLIAASNEHEVTXEQLRLPETLSKLYLGGQLEKKWTPQIFSSWSXHLNNLTRLSLRLSKLDEDSFSNLIVLRGLCYLRLLNKSYNGKKMYFPALSFPRLRQLKISGAPQLNQVEIAEGALESLIVLWFSDCPRLNNIPHGIEHLTALEILYLED

SEQ ID NO: 106959 - protein, 423 aa, Setaria italica
  Transcript Sequence Number=SeqID_40985
  Gene Ontology: Mol. function=DNA binding; Cellular component =nucleoplasm; Biological process=regulation of transcription, DNA -dependent
  Homolog annotation: Hit_ID=Q287W4; Match level="QueryCoverage=59%, HitCoverage=26%, E-value=4e-81, Identity=56%"; Hit description =Transducin/WD-40 repeat family protein
GMGTQLAIVSHASDCLPTGDQVLDVRVFNISERAQSLSGRLLLTPSSQLSWFGFSDNGQLSSYDSKGILRVFSSQFGGSWLPVFSSVKARKSEDESHWVVGLDANNIFCILCKYPQSYPQVMPKPVLTILELSFPIASSDLGANSLENEFMMRKLYLSQIQNKMDEMAALGLDAAAYDDEAFNMEAALDRCILRLISSCCSGDKLVRATELAKLLILEKSMKGALTLVTRLKLPMLQEKFSSILEERMLNGKKIAGAVGFSSNATITRNAPVLTSHAALPSRFVQNGKKLMESSLPIPNPSNQESSLIEPKKPKGEQVRGITGSALKVSPPFTPLTKVPKNSETKRDSNGASVDQNKKGGMDQTGSKKMSTEDCNRKEPQRPVNPFAKSSSSKEQSPSLLDSIKKMNVETEKVEKPNSKKVKV

SEQ ID NO: 106960 - protein, 57 aa, Setaria italica
  Transcript Sequence Number=SeqID_40986
CVPYFAKSSINLSINCSSLHTLKHGIENGCESTEETKFMSVTYEQIENYAMTIMQQA

SEQ ID NO: 106961 - protein, 158 aa, Setaria italica
  misc_feature (23)..(23): Xaa can be any naturally occurring amino acid
  Transcript Sequence Number=SeqID_40987
  Gene Ontology: Mol. function=unfolded protein binding; Cellular component=endoplasmic reticulum; Biological process=protein folding
  Homolog annotation: Hit_ID=Q41798; Match level="QueryCoverage=60%, HitCoverage=22%, E-value=6e-50, Identity=96%"; Hit description =Calnexin (Fragment)
  Pfam annotation: Domain name=Calreticulin; Domain location=1-75; Score=-213.8; E_value=0.0012; Accession=PF00262.10; Description =Calreticulin family
GCGEWKRPMKQNPAYKGKWHAPXIDNPNYKGIWKPQEIPNPEYFELDKPDFDPIAAIGIEIWTMQDGILFDNILIADDEKVATSILEKTWKPKYEVEKERDFSSLIPVLWLLVIRVRNGLGWDNSWLKIISRQVSLPFFFSSPSIKILTSLSGFKIAV

SEQ ID NO: 106962 - protein, 213 aa, Setaria italica
  Transcript Sequence Number=SeqID_40988
  Gene Ontology: Mol. function=unfolded protein binding; Cellular component=endoplasmic reticulum; Biological process=protein folding
  Homolog annotation: Hit_ID=B9RA41; Match level="QueryCoverage=83%, HitCoverage=32%, E-value=8e-74, Identity=72%"; Hit description =Calnexin, putative
  Pfam annotation: Domain name=Calreticulin; Domain location=1-201; Score=121.7; E_value=2.3e-33; Accession=PF00262.10; Description =Calreticulin family
VEERLRKYAIIKELDEPVTLKDGTVVLQFEVRLQNGLECGGAYIKYIRPQDAGWDAKEFDNETPYTIMFGPDKCGSTNKVHFILKHKNPKTGKYVEHHLKFPPSVPYDKLSHVYTAILKPDNEVRILIDGEEKKKANFLSADDFEPAIIPPKNIPDPDDKKPEDWDERAKIPFPSQLHIWASRSSLGWRWQPSHHQQSKYCQTGCHPASSRFF

SEQ ID NO: 106963 - protein, 534 aa, Setaria italica
  misc_feature (328)..(328): Xaa can be any naturally occurring amino acid
  Transcript Sequence Number=SeqID_40989
  Gene Ontology: Mol. function=unfolded protein binding; Cellular component=endoplasmic reticulum; Biological process=protein folding
  Homolog annotation: Hit_ID=B9RA41; Match level="QueryCoverage=83%, HitCoverage=82%, E-value=1e-179, Identity=68%"; Hit description =Calnexin, putative
  Pfam annotation: Domain name=Calreticulin; Domain location=24-382; Score=767.1; E_value=1.2e-227; Accession=PF00262.10; Description =Calreticulin family
MMGGRALLLLLVSALLVQIRASDPLLYESFDEDFEGRWVVSRKDEYQGVWKHAKSDGHEDYGLLVSEKARKYAIIKELDEPVTLKDGTVVLQFEVRLQNGLECGGAYIKYIRPQDAGWDAKEFDNETPYTIMFGPDKCGSTNKVHFILKHKNPKTGKYVEHHLKFPPSVPYDKLSHVYTAILKPDNEVRILIDGEEKKKANFLSADDFEPAIIPPKTIPDPDDKKPEDWDERAKIPDPDAVKPDDWDEDAPMEIEDEEATKPEGWLDDEPEEIDDPEAAKPEDWDDEEDGEWEAPKIDNPKCEVAPGCGEWKRPMKQNPAYKGKWHAXPLIDNPNYKGIWKPQEIPNPEYFELDKPDFDPIAAIGIEIWTMQDGILFDNILIADDEKVATSILEKTWKPKYEVEKEKEKAEEAAAGADGLSEFQKKVFDILYKIADVPFLAPYKTKIIDVIEKGEKQPNITIGILVSVVVVFVTVLFRILFGGKKPVAPVKPAAEAKKPKVTETDGAGSSGDKEEKEDEKEETAAPRRRSRRET

SEQ ID NO: 106964 - protein, 54 aa, Setaria italica
  Transcript Sequence Number=SeqID_40990
FTYVSIDVLFTYVFFLHFIFLVNQALAYGWKRYEEIETSESFHVDNTHMVFKVL

SEQ ID NO: 106965 - protein, 135 aa, Setaria italica
  misc_feature (75)..(75): Xaa can be any naturally occurring amino acid
  Transcript Sequence Number=SeqID_40991
  Gene Ontology: Mol. function=transition metal ion binding
  Homolog annotation: Hit_ID=Q53L52; Match level="QueryCoverage=97%, HitCoverage=10%, E-value=1e-35, Identity=56%"; Hit description =Transposon protein, putative, CACTA, En/Spm sub-class
  Pfam annotation: Domain name=Transposase_21; Domain location=1-125; Score=33.7; E_value=2e-17; Accession=PF02992.6; Description =Transposase family tnp2
STVYLQPLIEELKQLWKGVKTMDATSKKSFPLRAALLWTLNDFPALAYLYGCSTSGTYACPSCAGSTKSKSLKKXKKLCYMGHRRWLPQGHPYRREKKFFYEKEDESAPEPLDGSSVLKCWKESVCAWKKGVSKQ

SEQ ID NO: 106966 - protein, 101 aa, Setaria italica
  Transcript Sequence Number=SeqID_40992
  Gene Ontology: Mol. function=protein binding
  Homolog annotation: Hit_ID=Q7XEE6; Match level="QueryCoverage=97%, HitCoverage=7%, E-value=2e-29, Identity=60%"; Hit description =Transposon protein, putative, CACTA, En/Spm sub-class
EVDKKEEAAMSQHLLEAADRFNLQRLRLLCEDKLCGCIDTSSVVTTLVLAEQHSCQGLKEKCFEFLKSTGLNAVMTTDGFNHLVSSCPTVLEELMSKLSLQ

SEQ ID NO: 106967 - protein, 201 aa, Setaria italica
  misc_feature (45)..(45): Xaa can be any naturally occurring amino acid
  Transcript Sequence Number=SeqID_40993
  Gene Ontology: Mol. function=nuclease activity; Cellular component =Mre11 complex; Biological process=response to DNA damage stimulus
  Homolog annotation: Hit_ID=A8IE00; Match level="QueryCoverage=100%, HitCoverage=15%, E-value=3e-80, Identity=75%"; Hit description=DNA repair protein Rad50
FEERIALLETKISKLGREMDDEATKGYLLSQTISELTRDIGKLQXAEADAHMSMKQERDSEIKKIFAKHNFGPVPEFPFTNDVALNLTNRIKARLSNLENDLQEKKKSNDDQLDVLWKHYLKVNARNSEVDGQIQSKIESMSGISRRTKDKEKERDAAEVELSKLNLSRIDERERHMQIEVERKTLALGERDYDSIINQKR

SEQ ID NO: 106968 - protein, 117 aa, Setaria italica
  Transcript Sequence Number=SeqID_40994
  Gene Ontology: Mol. function=hydrolase activity
MPTFASPRRRRWSTWPRAAADAAASALAAAVFALLDVVDVLLCLVYALLDGILEESPVGCYCHRSYESEAVATDGDGDEEVSDTLYARRSAVRDALVGLVRVVVRKSRAPEKGPAAA

SEQ ID NO: 106969 - protein, 93 aa, Setaria italica
  Transcript Sequence Number=SeqID_40995
AWIDMLPVIIPCDNPVAIFHICGSDAGGLCLLRVQGTFGCCLERNFLTLVYGRYCLEGMVFSSHELQNPCGNIVKNCYAESSTRALVSLVIQK

SEQ ID NO: 106970 - protein, 125 aa, Setaria italica
  misc_feature (105)..(105): Xaa can be any naturally occurring amino acid
  Transcript Sequence Number=SeqID_40996
  Gene Ontology: Mol. function=hydrolase activity, acting on acid anhydrides, catalyzing transmembrane movement of substances; Cellular component=integral to membrane; Biological process =metabolic process
  Homolog annotation: Hit_ID=Q03194; Match level="QueryCoverage=99%, HitCoverage=13%, E-value=1e-61, Identity=91%"; Hit description =Plasma membrane ATPase 4
VEIVPVVIATGVHTFFGKAAHLVDSTNNVGHFQLVLTAIGNFCIISIAVGMVIEIIVMYPIQHRAYRDGIDNLLVLLIGGIPIAMPTVLSVTMAIGSHRLSQQGXITKRMTAIEEMAGMDVLCSD

SEQ ID NO: 106971 - protein, 140 aa, Setaria italica
  Transcript Sequence Number=SeqID_40997
  Gene Ontology: Mol. function=catalytic activity; Cellular component =protein complex; Biological process=metabolic process
  Homolog annotation: Hit_ID=B4FEY2; Match level="QueryCoverage=100%, HitCoverage=100%, E-value=1e-72, Identity=92%"; Hit description =Proteasome maturation factor UMP1 family protein
  Pfam annotation: Domain name=UMP1; Domain location=2-131; Score =114.6; E_value=3.3e-31; Accession=PF05348.3; Description=Proteasome maturation factor UMP1
MASGGMKREISETHDALRFGINAGVKADLAPPHPLQATIQSETKFWADKKKFGTEAIYGSAFNIRKDLDAQILSRFQRPPGALPSSMLGYEALTGSLDDFGFEDYLNMPQDSDSFRQPDMHHGMEVRLGLSKGPICPSFN

SEQ ID NO: 106972 - protein, 65 aa, Setaria italica
  Transcript Sequence Number=SeqID_40998
SIFVVVYDKVHYYSNLSVTGLLKLYCKCVVFLEQVKLVFSNRCKQVKLVFQIDVKNTYLYICEVN

SEQ ID NO: 106973 - protein, 58 aa, Setaria italica
  misc_feature (11)..(11): Xaa can be any naturally occurring amino acid
  misc_feature (20)..(20): Xaa can be any naturally occurring amino acid
  misc_feature (36)..(36): Xaa can be any naturally occurring amino acid
  Transcript Sequence Number=SeqID_40999
  Subcellular localization annotation: CTP_CleavageSite=36; ConfidenceScore=5.19e-01
FHPPWCPPPGXPPPPYPPPXPPPPPYPPPPPYPPPXASAAPTPQWPPPPPSFSNSSFL

SEQ ID NO: 106974 - protein, 164 aa, Setaria italica
  Transcript Sequence Number=SeqID_41000
  Pfam annotation: Domain name=GRP; Domain location=1-153; Score=19.4; E_value=7.3e-07; Accession=PF07172.3; Description=Glycine rich protein family
MAVKFVALVGVVLLFLLVSQDLACARELTEANESEGKNVKPGGAPGLKDEKWGGGYNGGYGNGGGYGGGYGGGYGGGYEPRYGGGYHHGHGGGGYGPGYGGGYGGPGYGGGYGQPGYGGGYGGGYGGGYGGGYGGGGGYGGGGGYGGGYGGGGYPGGGHHGGWN

SEQ ID NO: 106975 - protein, 182 aa, Setaria italica
  Transcript Sequence Number=SeqID_41001
  Gene Ontology: Mol. function=nucleoside-triphosphatase activity; Biological process=defense response
  Homolog annotation: Hit_ID=Q84KC2; Match level="QueryCoverage=98%, HitCoverage=11%, E-value=2e-32, Identity=44%"; Hit description=NBS -LRR disease resistance protein homologue
NLLSLPRLPWTRAPCSLNIGNSDASKCFESLFYRKDESECSLKVDGLDGAWLKVLDFDNLTELKSLEAQRCPPLPPDHLQMLSSLKTLSIKNPNSGLWPVEGESHAGHQFPVENLMITECGASGKEFTQLLSHFPKLSNLYISGCQKITRAGVMGKQATIKSGPSPPPSAKMEGVQIGQNQL

SEQ ID NO: 106976 - protein, 121 aa, Setaria italica
  Transcript Sequence Number=SeqID_41002
MIPEAKNIWMMADQNHLYVHQCFSQCCYLLSGINLSSKLAVHGLSPQITSLLSQPLPPSRDIPAARSTSTFPHHANPALLPPPPWPFSTSRPPACGWQHPHRWPACYSGSRPSPDPENPLS

SEQ ID NO: 106977 - protein, 51 aa, Setaria italica
  Transcript Sequence Number=SeqID_41003
  Homolog annotation: Hit_ID=B6UHX3; Match level="QueryCoverage=100%, HitCoverage=39%, E-value=3e-14, Identity=77%"; Hit description =Embryonic protein DC-8
AADKTKLRGEESEEDVMMRVKAADQMTGQAFNDVGMMGEEGTGMPRRRRSG

SEQ ID NO: 106978 - protein, 118 aa, Setaria italica
  Transcript Sequence Number=SeqID_41004
  Subcellular localization annotation: CTP_CleavageSite=76; ConfidenceScore=5.13e-01
RTPKAKYIVRAQAQPFLTLFVASSMKETKSVTWILTCSSGVVWHYGSSSKIPTALCLLRCLKVISFFKFLGVGNTRLSAGKGKNNKGSVLQPECMMLLNLVLQRWHGTTNKPGAVPQF

SEQ ID NO: 106979 - protein, 131 aa, Setaria italica
  Transcript Sequence Number=SeqID_41005
YCNIRDQLHKVVNFRHHLANTPFGCRYCSPEFGIGIWCHQYRCLDDLRIGIGNLLQYQGVFGLLLQSITRYRALPLRISWNRPPSSLPYLSPSRILSSSPSLASLPQRGALAEGRAQLRRDGSGAVSSAGN

SEQ ID NO: 106980 - protein, 518 aa, Setaria italica
  Transcript Sequence Number=SeqID_41006
  Gene Ontology: Mol. function=substrate-specific transmembrane transporter activity; Cellular component=integral to membrane; Biological process=transmembrane transport
  Homolog annotation: Hit_ID=B9RTN4; Match level="QueryCoverage=93%, HitCoverage=93%, E-value=0.0, Identity=68%"; Hit description=Sugar transporter, putative
  Pfam annotation: Domain name=MFS_1; Domain location=35-441; Score =71.2; E_value=3.8e-18; Accession=PF07690.8; Description=Major Facilitator Superfamily
  Pfam annotation: Domain name=Sugar_tr; Domain location=29-489; Score =504.2; E_value=1.8e-148; Accession=PF00083.16; Description=Sugar (and other) transporter
  Pfam module annotation: Pfam domain module=MFS_1::Sugar_tr; Domain location=35-441::29-489
MAGGFGGGGAATGRAELYEGKITGYFILACIVGSFGGSLFGYDLGVSSGVTSMDDFLKKFFPDVYQRKQAHLHETDYCKYDNQVLTLFTSSLYFAGLVSTFGASYVTKRHGRRASIMVGATSFFLGGAINAAAMNIAMLIVGRVLLGVGIGFGNQAVPLYLSEIAPYRIRGAVNQLFQLTTCLGILVADVINYFTDRLHPWGWRLSLGLAMGPATAIFVGALFLPETPNSLVERGHLEEARRVLEKVRGTHKVDAEFEDLKEASEAARAVKGTFRNLLATRNRPQLIIGALGIPAFQQLSGMNSILFYSPVIFQSLGFGNSAALYSSIITGSMLVVGALVSMVTVDRLGRRFLFIEAGVQMIASMVVVAVILALKFGHGEDLTKGVSTVLVVAICLFVVAYGWSWGPLGWLVPSELFPLEMRSAGQSVVVCVNLFWTAAVAQCFLAALCHLRWGVFVLFASLIVVMSIFVILLLPETKQVPIEEIWMLFDRHWYWKRIVRKDPKYPGNLHEQQEMARA

SEQ ID NO: 106981 - protein, 205 aa, Setaria italica
  Transcript Sequence Number=SeqID_41007
  Gene Ontology: Mol. function=protein serine/threonine kinase activity; Cellular component=integral to membrane; Biological process=protein amino acid phosphorylation
  Homolog annotation: Hit_ID=Q6XAT2; Match level="QueryCoverage=92%, HitCoverage=47%, E-value=2e-74, Identity=44%"; Hit description =Leucine-rich repeat receptor-like protein kinase
  Pfam annotation: Domain name=LRRNT_2; Domain location=10-49; Score =41.1; E_value=4.3e-09; Accession=PF08263.4; Description=Leucine rich repeat N-terminal domain
  Pfam annotation: Domain name=LRR_1; Domain location=102-124; Score =16.4; E_value=0.12; Accession=PF00560.25; Description=Leucine Rich Repeat
  Pfam annotation: Domain name=LRR_1; Domain location=126-148; Score =10.9; E_value=2.5; Accession=PF00560.25; Description=Leucine Rich Repeat
  Pfam annotation: Domain name=LRR_1; Domain location=150-171; Score =13.8; E_value=0.69; Accession=PF00560.25; Description=Leucine Rich Repeat
  Pfam annotation: Domain name=LRR_1; Domain location=174-196; Score =9.9; E_value=3.9; Accession=PF00560.25; Description=Leucine Rich Repeat
  Pfam annotation: Domain name=LRR_1; Domain location=54-76; Score=1.1; E_value=1.9e+02; Accession=PF00560.25; Description=Leucine Rich Repeat
  Pfam annotation: Domain name=LRR_1; Domain location=78-100; Score =10.3; E_value=3.2; Accession=PF00560.25; Description=Leucine Rich Repeat
  Pfam module annotation: Pfam domain module=LRRNT_2::LRR_1::LRR_1::LRR_ 1::LRR_1::LRR_1::LRR_1; Domain location=10-49::102-124::126-148::150 -171::174-196::54-76::78-100
TDGREERGMGNGERRALMAVKAGFGNAANALVDWDGGRDHCAWRGVACDSASFAVVGLNLSNLNLGGEISPAIGELKSLQFVDLKLNKLTGQIPDEIGDCVSLKYLDLSGNLLYGDIPFSISKLKQLEDLILKNNQLTGPIPSTLSQIPNLKTLDLAQNKLTGDIPRLIYWNEVLQYLGLRGNSLTGTLSPDMCQLTGLWYFDVR

SEQ ID NO: 106982 - protein, 239 aa, Setaria italica
  misc_feature (22)..(22): Xaa can be any naturally occurring amino acid
  Transcript Sequence Number=SeqID_41008
  Gene Ontology: Cellular component=plasma membrane
  Homolog annotation: Hit_ID=B6U178; Match level="QueryCoverage=100%, HitCoverage=42%, E-value=1e-117, Identity=84%"; Hit description =Protein binding protein
PNQQSNLKQTVSDIRHDVQSQXQQTRQTKMQVHKIKKRLEKLHIGGLNNAINSNTVVAVLIATVAFAAIFTVPGNFVEDLSQAPPEMSLGQAYVASNPAFIVFLVFDALALFISLAVVVVQTSLIVVEQKAKKRMVFVMNKLMWLACLFISVAFIALTYVVVGRDDWWLAWCTMAIGTVIMLTTLGSMCYCIITHRLNEKNTRKIRKASASQSRGSWSRSVDSDEEILNSEYKTKMYAL

SEQ ID NO: 106983 - protein, 91 aa, Setaria italica
  Transcript Sequence Number=SeqID_41009
WPGRLCNMLMGSICCVVEIDSVLILFSVSVDGHSEALLIFWHLQSCRGTKDLRFNEISYTLAKWFSGYSYFFMAAYQPGTSGQILMCAFIS

SEQ ID NO: 106984 - protein, 73 aa, Setaria italica
  Transcript Sequence Number=SeqID_41010
TVLNIMNVDRMQYGSYFQIQLKTQEHVPKPTSTILLSYTSSHPICPLRFLFPQLTSYKSVCNFLEKKNKSQRL

SEQ ID NO: 106985 - protein, 107 aa, Setaria italica
  Transcript Sequence Number=SeqID_41011
  Gene Ontology: Mol. function=methyltransferase activity; Biological process=methylation
  Homolog annotation: Hit_ID=B6TML1; Match level="QueryCoverage=100%, HitCoverage=38%, E-value=3e-52, Identity=90%"; Hit description=HemK methyltransferase family member 2
TSSWAGGLNGRQVIDRILPAVREILSERGWLYMVALEDNDPLDICHLMSEMGYASRVVLKRCTEEESLFVLKFWRDPHTGTSASPKSPKSESWFSQLPFKSLWHKGS

SEQ ID NO: 106986 - protein, 228 aa, Setaria italica
  Transcript Sequence Number=SeqID_41012
  Gene Ontology: Mol. function=methyltransferase activity; Biological process=methylation
  Homolog annotation: Hit_ID=B6TML1; Match level="QueryCoverage=96%, HitCoverage=78%, E-value=1e-109, Identity=86%"; Hit description=HemK methyltransferase family member 2
  Pfam annotation: Domain name=MTS; Domain location=13-186; Score= -52.2; E_value=7.3e-05; Accession=PF05175.6; Description =Methyltransferase small domain
  Pfam annotation: Domain name=Methyltransf_12; Domain location=35-157; Score=16.3; E_value=0.016; Accession=PF08242.4; Description =Methyltransferase domain
  Pfam module annotation: Pfam domain module=MTS::Methyltransf_12; Domain location=13-186::35-157
IPSRLYEPCDDSFALVDALLSDKAQLLTLQPRLCMEVGCGSGYVITSLAIMLRQLASGTQYLATDINKHAAETTQATLEAHGVHADVIVTDIVSGLEKHLAGMVDVVVINPPYVPTPEEEIRCKGIASSWAGGLNGRQVIDRILPAVREILSERGWLYMVALEDNDPLDICHLMSEMGYASRVVLKRCTEEESLFVLKFWRDPHTGTSAFPLNSSLNSCSFFWFSFFL

SEQ ID NO: 106987 - protein, 60 aa, Setaria italica
  Transcript Sequence Number=SeqID_41013
IFPYFNKNIAVQCLFYQSCVCVTSGFFSLIRLARTSSKTLMNLIKIYKRQQHDYFSFQEE

SEQ ID NO: 106988 - protein, 147 aa, Setaria italica
  misc_feature (31)..(31): Xaa can be any naturally occurring amino acid
  Transcript Sequence Number=SeqID_41014
  Gene Ontology: Mol. function=structural constituent of ribosome; Cellular component=intracellular; Biological process=translation
  Homolog annotation: Hit_ID=B9T740; Match level="QueryCoverage=89%, HitCoverage=18%, E-value=1e-19, Identity=40%"; Hit description=60S ribosomal protein L34, putative
  Pfam annotation: Domain name=DUF1666; Domain location=4-147; Score =147.3; E_value=4.7e-41; Accession=PF07891.4; Description=Protein of unknown function (DUF1666)
RDPYPDLERAYVAQVCLTWEALNWNYTQASXRLNGGDGNIAARCCPARVAQEFQQFQVLLHRFIENEPYEHGRRPEVYARMKNSTPKLLLVPEFRDEDDEKDDLISAVQFLLILEESIRTFMTFLRADKRSHYEMFREMVKRRSSRP

SEQ ID NO: 106989 - protein, 277 aa, Setaria italica
  misc_feature (106)..(106): Xaa can be any naturally occurring amino acid
  misc_feature (208)..(208): Xaa can be any naturally occurring amino acid
  misc_feature (243)..(243): Xaa can be any naturally occurring amino acid
  Transcript Sequence Number=SeqID_41015
  Gene Ontology: Mol. function=protein binding; Biological process =embryonic development ending in birth or egg hatching
  Homolog annotation: Hit_ID=B6TGG5; Match level="QueryCoverage=100%, HitCoverage=69%, E-value=1e-131, Identity=82%"; Hit description=CePP protein
  Pfam annotation: Domain name=AAR2; Domain location=1-255; Score =164.7; E_value=2.8e-46; Accession=PF05282.3; Description=AAR2 protein
FDNQLGPYNLESYGDWKQLSNYLSQSTIERLEPIGGEITIAWESSWMDKAPQSDMERRLMEQLRESKFTKNVPVQSERRGCYYTSIPASVKHMNGNLTALNLDKQXLLESVLAKNYQGQEDLLLGELQFAFIAFMMGQSLEAFMQWKALVSLLLSCSEAPLHTRTNMFVKFLRTFYYQLKHGFQRTQDSSSRSEDVGNSPFLDEAWFXRDIFLYRLSKDFFTVVFEAPVVDGDLLSWARKLKXLLETTFGWDLEDNAVNLIDEDDEFAPVVVEMDGS

SEQ ID NO: 106990 - protein, 124 aa, Setaria italica
  misc_feature (48)..(48): Xaa can be any naturally occurring amino acid
  misc_feature (74)..(74): Xaa can be any naturally occurring amino acid
  misc_feature (87)..(87): Xaa can be any naturally occurring amino acid
  misc_feature (99)..(99): Xaa can be any naturally occurring amino acid
  Transcript Sequence Number=SeqID_41016
  Homolog annotation: Hit_ID=B6TGG5; Match level="QueryCoverage=87%, HitCoverage=26%, E-value=7e-46, Identity=84%"; Hit description=CePP protein
MKRSFTTAQEKTEQCLVKFLRTFYYQLKHGFQRTQDSSSRSEDVGNSXLDEAWFSRDIFLYRLSKDFFTVVFEXPVVDGDLLSWARXLKALLETTFGWXLEDNAVNLIDEDDEFAPVVVEMDGS

SEQ ID NO: 106991 - protein, 62 aa, Setaria italica
  Transcript Sequence Number=SeqID_41017
  Subcellular localization annotation: CTP_CleavageSite=46; ConfidenceScore=5.06e-01
MSSSWLHSSDRRWKRSSWTARALSSCSLPPPGLLAFFAIVVFFLAVSGYVDYKAIERRAEIR

SEQ ID NO: 106992 - protein, 69 aa, Setaria italica
  Transcript Sequence Number=SeqID_41018
  Gene Ontology: Mol. function=ubiquinol-cytochrome-c reductase activity; Cellular component=mitochondrial respiratory chain; Biological process=mitochondrial electron transport, ubiquinol to cytochrome c
  Homolog annotation: Hit_ID=B6U556; Match level="QueryCoverage=88%, HitCoverage=59%, E-value=7e-26, Identity=88%"; Hit description =Ubiquinol-cytochrome c reductase complex 7.8 kDa protein
  Pfam annotation: Domain name=UCR_hinge; Domain location=7-69; Score =107.4; E_value=4.9e-29; Accession=PF02320.8; Description=Ubiquinol -cytochrome C reductase hinge protein
MADAEPVDQKNKLEERCKPLCVKSLYEYERCVKRVENDGSGQKHCTGQYFDYWSCVDKCVAPKLLDKLK

SEQ ID NO: 106993 - protein, 797 aa, Setaria italica
  misc_feature (33)..(33): Xaa can be any naturally occurring amino acid
  Transcript Sequence Number=SeqID_41019
  Gene Ontology: Mol. function=ATP-dependent helicase activity; Cellular component=nucleus; Biological process=mRNA processing
  Homolog annotation: Hit_ID=Q6K4U8; Match level="QueryCoverage=99%, HitCoverage=64%, E-value=0.0, Identity=81%"; Hit description =Putative RNA helicase
  Pfam annotation: Domain name=DEAD; Domain location=147-304; Score= -11.3; E_value=0.00028; Accession=PF00270.21; Description=DEADDEAH box helicase
  Pfam annotation: Domain name=DUF1605; Domain location=659-760; Score =123.7; E_value=6e-34; Accession=PF07717.8; Description=Domain of unknown function (DUF1605)
  Pfam annotation: Domain name=HA2; Domain location=535-625; Score =111.2; E_value=3.4e-30; Accession=PF04408.15; Description=Helicase associated domain (HA2)
  Pfam annotation: Domain name=Helicase_C; Domain location=380-474; Score=46.7; E_value=9e-11; Accession=PF00271.23; Description =Helicase conserved C-terminal domain
  Pfam module annotation: Pfam domain module=DEAD::DUF1605::HA2::Helicas e_C; Domain location=147-304::659-760::535-625::380-474
PGIDEDDDGMLYQEEPEEELEIELNEDEPAFLXGKGRSTADLSPVRISKNPGGSMSRAAALQSALVKERRDIHTQEQRGMVDAIPKDLNRSWEDPMSGGRYLMQELMGMGLTAQSVPEWKVTCGKAGTYGQRSRLSIQEQRESLPIFRLKKELINAVHDNQVLVVIGETGSGKTTQVTQYLAESGYTATGKIACTQPRRVAAESIAKRVAEEFGCRLGEEVGYSIRFDDRTGPETVIKYMTDGMLLREILVDRDLSSYSVVMLDEAHERTIYTDILFGLLKQLIRRRSDLKLIVTSATLDAEKFSGYFFDCNIFTIPGRTFPVEILHTKQPESDYMDAALITVLQIHLTQPEGDILLFLTGQEEIEHACERLHERMKAFGGDIPELIICPVYSALPTEVQSKIFEPAPPGKRKVVVATNIAEASITIDGIYYVVDPGFAKLNVYNPKLGLDSLVITPISQASAKQRAGRAGRTGPGKCYRLYTESAYRNEMVPTTTPEIQMANLGWTVINMKAMGINDLLTFDFMDPPASQALVSAMEQLYSLGALDEEGLLTRLGRKMAEFPQEPPLSKMLLASVDLGCSDEILTIIAMIQTGNIFYRPREKQAQADRKRSNFFQPEGDHLTLLTVYEAWKAKGFSGPWCFENFIQVNSLRRAQDVRKQLLEIMDKYKLDVVSAGNNPTKIGKALAAGFFFHAARKDPSGGYRTLSDHQQVYIHPSSALFHQQPQWVIYHEIVMTTKEYMREVTAVDPRWLVELAPRFYRSVDPTKISKRKRQERIEPLYDRHSEPNSWRLSKRRW

SEQ ID NO: 106994 - protein, 251 aa, Setaria italica
  Transcript Sequence Number=SeqID_41020
  Gene Ontology: Mol. function=zinc ion binding; Cellular component =intracellular
  Homolog annotation: Hit_ID=Q8L4X3; Match level="QueryCoverage=79%, HitCoverage=61%, E-value=6e-51, Identity=59%"; Hit description =CONSTANS-like protein
  Pfam annotation: Domain name=CCT; Domain location=163-207; Score =90.6; E_value=5.4e-24; Accession=PF06203.6; Description=CCT motif
  Pfam annotation: Domain name=CCT_2; Domain location=160-187; Score =16.5; E_value=0.027; Accession=PF09425.2; Description=Divergent CCT motif
  Pfam annotation: Domain name=zf-B_box; Domain location=1-29; Score =4.2; E_value=0.05; Accession=PF00643.16; Description=B-box zinc finger
  Pfam module annotation: Pfam domain module=CCT::CCT_2::zf-B_box; Domain location=163-207::160-187::1-29
ADAAALCASCDADIHSANPLARRHERLPVAPFFGALADAPKPFASSAAAVPKAADDDGSNEAEAASWLLPEPDLGPKEESATTEVFFADSDPYLDLDFARSMDDIKAIGVQNGPAELDLTGAKLFYSDHSMNHSVSSSEAAVVPDAAAGAAPVVPVVSRGLEREARLMRYREKRKSRRFEKTIRYASRKAYAETRPRIKGRFAKRTAGAGADGEDPLEEHEEEMYSSAAAAVAALMAPGGADGDYGVVPTY

SEQ ID NO: 106995 - protein, 221 aa, Setaria italica
  misc_feature (7)..(7): Xaa can be any naturally occurring amino acid
  misc_feature (26)..(26): Xaa can be any naturally occurring amino acid
  Transcript Sequence Number=SeqID_41021
  Gene Ontology: Mol. function=oxidoreductase activity; Cellular component=extracellular region; Biological process=oxidation reduction
  Homolog annotation: Hit_ID=B6U4I6; Match level="QueryCoverage=100%, HitCoverage=39%, E-value=1e-119, Identity=89%"; Hit description =Pollen-specific protein NTP303
  Pfam annotation: Domain name=Cu-oxidase_2; Domain location=49-192; Score=127.6; E_value=4e-35; Accession=PF07731.6; Description =Multicopper oxidase
ASAARPXPQGSYHYGQINITRTIKLXVSRGHIDGKLKYGFNGVSHRDTETPLKLAEYFNVTDGVFSYNQMGDVPPAVNGPLSLIPNVITAEFRTFIEIIFENPEKSMDSLHLDGYAFFGVGMGPGTWSPELRKTYNLLDTVSRHTIQVYPRSWTAVMLTFDNAGMWNIRSNLWERHYLGEQLYVSVTSPARSLRDEYNMPETSLRCGKVVGLPMPPSYLPA

SEQ ID NO: 106996 - protein, 91 aa, Setaria italica
  Transcript Sequence Number=SeqID_41022
  Homolog annotation: Hit_ID=B6T144; Match level="QueryCoverage=94%, HitCoverage=98%, E-value=1e-25, Identity=63%"; Hit description=B12D protein
  Pfam annotation: Domain name=B12D; Domain location=2-88; Score=194.9; E_value=2.2e-55; Accession=PF06522.3; Description=B12D protein
MSSRWLKAEVYPLFATTGVAVGICVMQLVRNITTNPEVRVTKQNRAAGVLDNYDEGRRYSQHGVRRFWLSKRRDYMQAMDKVPTDPTPTSK

SEQ ID NO: 106997 - protein, 82 aa, Setaria italica
  Transcript Sequence Number=SeqID_41023
RQLWSTYRPTWVGGLEAKQIISRASKAVIGDKVHVCMNHPWILVLTGTKRTRVLLIHYSITITISTLTGIVEATEKAVTLCL

SEQ ID NO: 106998 - protein, 267 aa, Setaria italica
  misc_feature (145)..(145): Xaa can be any naturally occurring amino acid
  Transcript Sequence Number=SeqID_41024
  Homolog annotation: Hit_ID=B6SJC0; Match level="QueryCoverage=100%, HitCoverage=75%, E-value=1e-141, Identity=91%"; Hit description=F -box domain containing protein
  Pfam annotation: Domain name=F-box; Domain location=16-64; Score =21.8; E_value=0.0028; Accession=PF00646.25; Description=F-box domain
MHPKARIHADPVLEVDQFDCLPDSLVLLILNKVEDVRSLGRCSAVSKRFCGLVSLVHDVYVKIDRVVGVDGDAEDALNLSSPKPRNIFSHFLKLMLFTIIKPFHNMRNPNGNGRPLFAQLSQHSPAQVLRNFTHIRNLRVELPSXGDVGTEEGVLLKWRAEYGSTLQNCVILGGTRVDRRPVGGEHEPSLEDNGSMPESFYTNGGLKLRVVWTISSLIAASTRHYLLRSIIKDHPTLTSLVLTDADGQGTLCMGAEQLKEFRENQLS

SEQ ID NO: 106999 - protein, 337 aa, Setaria italica
  misc_feature (170)..(170): Xaa can be any naturally occurring amino acid
  Transcript Sequence Number=SeqID_41025
  Gene Ontology: Mol. function=ARF guanyl-nucleotide exchange factor activity; Cellular component=intracellular; Biological process =regulation of ARF protein signal transduction
  Homolog annotation: Hit_ID=B9S916; Match level="QueryCoverage=98%, HitCoverage=24%, E-value=1e-152, Identity=71%"; Hit description =Pattern formation protein, putative
QMENGNGSYMSETSTSDEKSADGRGLVVEPYGVPCMVEIFHFLCSLLNVVEQIGLDEDLPLFALKLINSAIELGGSSIQKHPKLLSLVQDELFRNLMQFGLSMNPLILSIVCSIALNLYHHLRTELKLQLEAFFACIIIRLAQPRFGATYHQQKSTREALVDFCRQKNFXMVEMYANLDCDITCRNVFEELANLLSKSAFPINCPLSSMHILALEGLIAVIQGMADRIGNATSRPELMPVELDEYTPFWTVKCENFSDPRHWVKFVRQRKYVKRRLMIGADHFNRDPKKGLEFLQGTHLLPEKLDPQSVACFFRYTAGLDKNLVGDFLGNHDVVLLF

SEQ ID NO: 107000 - protein, 51 aa, Setaria italica
  Transcript Sequence Number=SeqID_41026
  Gene Ontology: Mol. function=transferase activity, transferring nitrogenous groups; Biological process=biosynthetic process
  Homolog annotation: Hit_ID=B6TK79; Match level="QueryCoverage=76%, HitCoverage=8%, E-value=1e-16, Identity=100%"; Hit description =Aspartate aminotransferase
ILIYHIINVSFQVLSDEIYEHIIYQPAKHTSFASLPGMWERTLTVNGFSKA

SEQ ID NO: 107001 - protein, 82 aa, Setaria italica
  Transcript Sequence Number=SeqID_41027
  Subcellular localization annotation: CTP_CleavageSite=54; ConfidenceScore=5.53e-01
VSVSFPGDLPDQQQSPFAASASLPLPPRRRRCVPVGEGLLVSLIRRAREPQKCRARMAVRAEAVDTTISPRVSALRPSRPWP

SEQ ID NO: 107002 - protein, 110 aa, Setaria italica
  Transcript Sequence Number=SeqID_41028
  Gene Ontology: Mol. function=protein binding; Cellular component =clathrin adaptor complex; Biological process=intracellular protein transport
  Homolog annotation: Hit_ID=B9SPJ2; Match level="QueryCoverage=75%, HitCoverage=26%, E-value=9e-38, Identity=86%"; Hit description =Clathrin coat assembly protein ap-1, putative
  Pfam annotation: Domain name=Adap_comp_sub; Domain location=3-110; Score=8.4; E_value=5e-06; Accession=PF00928.13; Description=Adaptor complexes medium subunit family
VFSNKKLHLLQEWAVSKNGLPFCICSTATNVEIEVPVPSDATNPNIRTSMGSAAYAPERDAMVWKVKSFPGGKEYMCRAEFSLPSITAEEGAPEKKAPIRVKFEIPYFKF

SEQ ID NO: 107003 - protein, 245 aa, Setaria italica
  Transcript Sequence Number=SeqID_41029
  Gene Ontology: Mol. function=protein binding; Cellular component =clathrin adaptor complex; Biological process=intracellular protein transport
  Homolog annotation: Hit_ID=Q5N9S2; Match level="QueryCoverage=100%, HitCoverage=68%, E-value=1e-142, Identity=98%"; Hit description =Clathrin-associated protein unc-101-like
  Pfam annotation: Domain name=Adap_comp_sub; Domain location=160-245; Score=-2.2; E_value=4.4e-05; Accession=PF00928.13; Description =Adaptor complexes medium subunit family
MAGAVSALFLLDIKGRVLVWRDYRGDVSALQAERFFTKLLDKEGDAEVHSPVVYDDAGVTYMFIQHNNVFLLTAARQNCNAASILLFLHRVVDVFKHYFEELEEESLRDNFVVVYELLDEMMDFGYPQYTEAKILSEFIKTDAYRMEVSQRPPMAVTNAVSWRSEGIRYKKNEVFLDVVESVNILVNSNGQIVRSDVVGALKMRTYLSGMPECKLGLNDRVLLEAQGRATKGKAIDLDDIKFHQC

SEQ ID NO: 107004 - protein, 315 aa, Setaria italica
  Transcript Sequence Number=SeqID_41030
  Gene Ontology: Mol. function=protein binding; Cellular component =clathrin adaptor complex; Biological process=intracellular protein transport
  Homolog annotation: Hit_ID=B9SPJ2; Match level="QueryCoverage=98%, HitCoverage=100%, E-value=1e-173, Identity=92%"; Hit description =Clathrin coat assembly protein ap-1, putative
  Pfam annotation: Domain name=Adap_comp_sub; Domain location=46-314; Score=468.8; E_value=8e-138; Accession=PF00928.13; Description =Adaptor complexes medium subunit family
ELRLDEMMDFGYPQYTEAKILSEFIKTDAYRMEVSQRPPMAVTNAVSWRSEGIRYKKNEVFLDVVESVNILVNSNGQIVRSDVVGALKMRTYLSGMPECKLGLNDRVLLEAQGRATKGKAIDLDDIKFHQCVRLARFENDRTISFIPPDGSFDLMTYRLSTQVKPLIWVEAQIEKHSRSRIELMVKARSQFKERSTATNVEIEVPVPSDATNPNIRTSMGSAAYAPERDAMVWKVKSFPGGKEYMCRAEFSLPSITAEEGAPEKKAPIRVKFEIPYFTVSGIQVRYLKIIEKSGYQALPWVRYITMAGEYELRLI

SEQ ID NO: 107005 - protein, 69 aa, Setaria italica
  Transcript Sequence Number=SeqID_41031
LATCTYWISQWRGFLILCVKDAANEVSTLFFYVYVAEPNSIDFPDLSAKCADIVNGTKELSSYLLVPVS

SEQ ID NO: 107006 - protein, 111 aa, Setaria italica
  Transcript Sequence Number=SeqID_41032
  Gene Ontology: Mol. function=structural constituent of ribosome; Cellular component=large ribosomal subunit; Biological process =translation
  Homolog annotation: Hit_ID=B6T4X6; Match level="QueryCoverage=70%, HitCoverage=70%, E-value=2e-26, Identity=78%"; Hit description =Ribosomal protein L32 containing protein
  Pfam annotation: Domain name=Ribosomal_L32p; Domain location=56-111; Score=20.2; E_value=0.0011; Accession=PF01783.15; Description =Ribosomal L32p protein family
  Subcellular localization annotation: CTP_CleavageSite=9; ConfidenceScore=5.17e-01
MAAAGWLRRAAAVAVPRLPSGLPLVPPPPPAPLTEAQSLVVPGLGAAVGPSMELMAVPKKKVSKYKKGLRNGPKALKPVPVIVRCRCCGRVKLPHFYCCSGERGNPSESSS

SEQ ID NO: 107007 - protein, 42 aa, Setaria italica
  Transcript Sequence Number=SeqID_41033
AYLEKAVAYKANFTGADLSDTLMDRMVKPELVLLSFSFAMLL

SEQ ID NO: 107008 - protein, 217 aa, Setaria italica
  Transcript Sequence Number=SeqID_41034
  Homolog annotation: Hit_ID=A8J6G0; Match level="QueryCoverage=71%, HitCoverage=64%, E-value=2e-47, Identity=60%"; Hit description =Thylakoid lumenal protein
  Pfam annotation: Domain name=Pentapeptide; Domain location=111-150; Score=34.0; E_value=6.1e-07; Accession=PF00805.14; Description =Pentapeptide repeats (8 copies)
  Pfam annotation: Domain name=Pentapeptide; Domain location=61-100; Score=43.4; E_value=8.6e-10; Accession=PF00805.14; Description =Pentapeptide repeats (8 copies)
  Pfam module annotation: Pfam domain module=Pentapeptide::Pentapeptide; Domain location=111-150::61-100
PQQPRWRAAVSAAIAAAVVAAAMPAYADLNRFEAEQRGEFGIGSAAQFGSADLKKAVHVNENFRRANFTSADMRESDFSGSTFNGAYLEKAVAYKANFTGADLSDTLMDRMVLNEANLTNAVLVRSVLTRSDLGGAIIEGADFSDAVIDLPQKQALCKYASGTNPITGVSTRKSLGCGNSRRNAYGSPSSPLLSAPPQKLLDRDGFCDSGTGMCDAK

SEQ ID NO: 107009 - protein, 109 aa, Setaria italica
  Transcript Sequence Number=SeqID_41035
  Homolog annotation: Hit_ID=B9REY5; Match level="QueryCoverage=90%, HitCoverage=17%, E-value=2e-30, Identity=66%"; Hit description =Copine, putative
  Pfam annotation: Domain name=C2; Domain location=33-109; Score=10.7; E_value=0.016; Accession=PF00168.22; Description=C2 domain
EEPRGAAAQQGGPNDAVDHFFQARGLRGLYTPIELSFSATKLRNMDAFSKSDPMLVVYTNIKGKLEEIGRTEVILNSLEPSWITKATMSYQFEIVQPLIFRIYDVDTKY

SEQ ID NO: 107010 - protein, 214 aa, Setaria italica
  Transcript Sequence Number=SeqID_41036
  Gene Ontology: Mol. function=metal ion binding; Cellular component =integral to membrane; Biological process=ubiquitin-dependent protein catabolic process
  Homolog annotation: Hit_ID=B6TT13; Match level="QueryCoverage=100%, HitCoverage=94%, E-value=2e-69, Identity=64%"; Hit description=RING -H2 finger protein ATL1Q
  Pfam annotation: Domain name=PHD; Domain location=168-213; Score= -4.0; E_value=0.073; Accession=PF00628.21; Description=PHD-finger
  Pfam annotation: Domain name=Rick_17kDa_Anti; Domain location=26-67; Score=8.0; E_value=0.033; Accession=PF05433.7; Description =Rickettsia 17 kDa surface antigen
  Pfam annotation: Domain name=zf-C3HC4; Domain location=169-210; Score= 30.0; E_value=9.5e-06; Accession=PF00097.17; Description=Zinc finger, C3HC4 type (RING finger)
  Pfam module annotation: Pfam domain module=PHD::Rick_17kDa_Anti::zf -C3HC4; Domain location=168-213::26-67::169-210
EGGLDERGAALHLPRLLAGVVSGALTGLFALAGALTGAVTGAVAGRASDSGVLRGAGLGAFAGAVLSIEVLEASRAYWCSDRLGSHGASSMADFIEQLIQARFAQEQYTSSGYTSSRWQVSISDFGHDDLYDIFGDISSKGLSLESLKKLPNYVVTDQMRDSFGEILSCPICLQDLVAGETARRLPNCSHTFHQPCVDKWLVDHGSCPVCRQQV

SEQ ID NO: 107011 - protein, 96 aa, Setaria italica
  Transcript Sequence Number=SeqID_41037
  Homolog annotation: Hit_ID=Q9SRT1; Match level="QueryCoverage=73%, HitCoverage=23%, E-value=3e-11, Identity=47%"; Hit description =F21O3.6 protein
  Pfam annotation: Domain name=DUF506; Domain location=1-71; Score= -29.1; E_value=8.8e-07; Accession=PF04720.4; Description=Protein of unknown function (DUF506)
SAFEVARPTKAYRSLLQRLPAVFVGKDDRLRLLVAAAADAARASLKKRGLHLPPWRKPEYMRAKWLSPHDREAPAAEEAASAAGAGEVDVEGTAAA

SEQ ID NO: 107012 - protein, 212 aa, Setaria italica
  Transcript Sequence Number=SeqID_41038
IMMLGMILEPSCPIRSVKILGLCLNLCNPAQVELMLQVLNYFPCVETLNIKIYTDPSIRHTLYSEAPYANLLELAGRVACLRDSVKTIVLSDLWVHTHTFGLQFANMLLESAKKLQLMKIFHVPVDKRKQARSTRHKLGLKSNPSIKAQVVFPRDYISYRQVSDVLMDTSSLALPDPMFCQRKFQSSNFIRILWNSYLNPVNKDYYSDALVG

SEQ ID NO: 107013 - protein, 185 aa, Setaria italica
  Transcript Sequence Number=SeqID_41039
  Gene Ontology: Mol. function=amine oxidase activity; Biological process=cellular amine metabolic process
  Homolog annotation: Hit_ID=B7ZYE7; Match level="QueryCoverage=97%, HitCoverage=25%, E-value=7e-94, Identity=92%"; Hit description =Copper amine oxidase
  Pfam annotation: Domain name=Cu_amine_oxid; Domain location=1-185; Score=-75.9; E_value=3.3e-13; Accession=PF01179.12; Description =Copper amine oxidase, enzyme domain
GSFVLLRAGTVISLASVYDADAGTRRRVLYRGFVSEVFVPYMDPVEEWYYRTFLDAGEYGLGLWAFPLQPGADCPANAAYLDGYYAGQDGKPVAGANRICVFERYAGDVAWRHTEAGFPGQLITEVRPDVTLVVRMVMSLGNYDYILDWEFKTSGSIKFVVSLTGLLEVKGTPYTHADEITADAH

SEQ ID NO: 107014 - protein, 53 aa, Setaria italica
  Transcript Sequence Number=SeqID_41040
QATNSDSMLSLQACIYARHMRAVLISHYLKTLTILINKQMPPFFRLSIKDRNC

SEQ ID NO: 107015 - protein, 108 aa, Setaria italica
  misc_feature (52)..(52): Xaa can be any naturally occurring amino acid
  misc_feature (70)..(70): Xaa can be any naturally occurring amino acid
  Transcript Sequence Number=SeqID_41041
  Gene Ontology: Mol. function=aspartic-type endopeptidase activity; Cellular component=chromatin
  Homolog annotation: Hit_ID=Q8SA93; Match level="QueryCoverage=84%, HitCoverage=3%, E-value=1e-13, Identity=44%"; Hit description =Putative polyprotein
MVDLQSLAPQPEHTSFDDWWARINSEVPGEIQKGLDSLVILGAWSIWKHRNXVFDGILPNLAGMLLLAKXEIHLWGLAKARGLSYLAAIATGGLDVSAHGRCTIKSKA

SEQ ID NO: 107016 - protein, 65 aa, Setaria italica
  Transcript Sequence Number=SeqID_41042
  Subcellular localization annotation: CTP_CleavageSite=33; ConfidenceScore=5.45e-01
FVPLLLELLDFGATLPAFSSSQSSPGCLASFPPAAATSQRRASGHGEPRQASALSRLAETMISSY

SEQ ID NO: 107017 - protein, 150 aa, Setaria italica
  Transcript Sequence Number=SeqID_41043
  Gene Ontology: Mol. function=transporter activity; Cellular component= membrane; Biological process=transport
  Homolog annotation: Hit_ID=Q8GTY9; Match level="QueryCoverage=68%, HitCoverage=19%, E-value=1e-43, Identity=83%"; Hit description =Nramp1 protein(Natural-resistance-associated macrophage protein 1)
RSRNQRSRRASSSFGSSLPIIIIIARAPIVRGCSTADLWTPRRRLRGVVVDVEALAGRRGSAATKEPAWKRFLCHVGPGFMVCLAYLDPGNLETDLQAGANHKYELLWVILIGLIFALIIQSLSANLGVVTGRHLAELCKTEYPRWVRIC

SEQ ID NO: 107018 - protein, 202 aa, Setaria italica
  misc_feature (18)..(18): Xaa can be any naturally occurring amino acid
  misc_feature (85)..(85): Xaa can be any naturally occurring amino acid
  Transcript Sequence Number=SeqID_41044
  Gene Ontology: Mol. function=methyltransferase activity; Cellular component=intracellular; Biological process=metabolic process
  Homolog annotation: Hit_ID=Q9C5Q8; Match level="QueryCoverage=89%, HitCoverage=19%, E-value=1e-29, Identity=43%"; Hit description =CORYMBOSA2
SLTCISYTASLVMKDKAXKYLLESHNEFEFEIGTGAVGNQLESCVTQLSVNQSACFVAELPPRDLILAAASEFSHDLSNVSRGEXHLILSVTEPLEDRMEKALFSPPLSKQRVEFAVQHINELHATTLVDFGCGSGSLLDSLLQHPTTLEKLVGVDISRKGLTRAAKSLHQKLSKKLLVQTTVPTAVLYDGSITDYDSRLYW

SEQ ID NO: 107019 - protein, 708 aa, Setaria italica
  Transcript Sequence Number=SeqID_41045
  Gene Ontology: Mol. function=methyltransferase activity; Cellular component=intracellular; Biological process=metabolic process
  Homolog annotation: Hit_ID=Q9C5Q8; Match level="QueryCoverage=98%, HitCoverage=74%, E-value=1e-109, Identity=36%"; Hit description =CORYMBOSA2
  Pfam annotation: Domain name=Methyltransf_11; Domain location=573 -672; Score=1.4; E_value=0.068; Accession=PF08241.4; Description =Methyltransferase domain
  Pfam annotation: Domain name=Methyltransf_12; Domain location=573 -681; Score=31.4; E_value=3.7e-06; Accession=PF08242.4; Description =Methyltransferase domain
  Pfam module annotation: Pfam domain module=Methyltransf _11::Methyltransf_12; Domain location=573-672::573-681
GRVPLSAIAACDVKVNTLCKVIDPKAEFDPLLILSLVYNAAKQSPGVSVSDSNFWIQSQKPYSPEAVDLALKRWSGTSDPVEVEAILVPCVLEDELKIVRINLRDNEHYMSYVAEKLTASDSSHVLVSRTIGKASSEIRLYFAAPDVHFVSDISKNVLACHGDGDINCQVNKRASYISGQTIYGDALLANIGYTRRDSELHTEDVNLCTYYRILLGKLPDGNCKMSRDAILAAELPSVYSRFSWKGLSPRDLLCSFCRNQRLSEPLFAVSRVSCDMLTSAVSSEERGAPAKSVENQFNDVRTDKENSDSFKCEVKICSRKQEILLEYSASDTWSKESDAIQNSALKVLIWFNNYFKQINTKRDKLYLSECTDGFKIHPNIFLQEFVMCLSVYGNTGCNDSGMCSAVGAFSMDTLKKHFESTTTLTHIEGPDSGVFPSHGSLTCISYTASLVMKDKAKKYLLESHNEFEFEIGTGAVGNQLESCVTQLSVNQSACFVAELPPRDLILAAASEFSHDLSNVSRESCFLEFSVKVLQVTEPLEDRMEKALFSPPLSKQRVEFAVQHINELHATTLVDFGCGSGSLLDSLLEHPTTLEKLVGVDISRKGLTRAAKSLHQKLSKKLLVQTTVPTAVLYDGSITDYDSRLYGFDIGTCLEVIEHMEEDQASLFGNVVLSSFRPTVLIVSTTLNDVNPNLQRSAMPNKDDEAERK

SEQ ID NO: 107020 - protein, 124 aa, Setaria italica
  Transcript Sequence Number=SeqID_41046
MALARCNTKRAIYLTAVVFLILTIISSTSPSCQGQDQPQPQPQAPRHRHSPPPRRATVAPRPPSRPLWWWPWTKKTCYPYNDVYCLTEDCKWMCGANGFDGYRAICIKRRNGKWDCCCHKQCVI

SEQ ID NO: 107021 - protein, 56 aa, Setaria italica
  Transcript Sequence Number=SeqID_41047
  Gene Ontology: Mol. function=protein tyrosine kinase activity; Biological process=protein amino acid phosphorylation
SIVMWCRWVCCNCQVDESDQRENGQFKVTTNNADGMTKGFKDSSTGKVEPQNAASP

SEQ ID NO: 107022 - protein, 73 aa, Setaria italica
  Transcript Sequence Number=SeqID_41048
  Gene Ontology: Mol. function=metal ion binding
  Homolog annotation: Hit_ID=Q9ZVT8; Match level="QueryCoverage=90%, HitCoverage=8%, E-value=8e-19, Identity=62%"; Hit description=F15K9.3
  Pfam annotation: Domain name=zf-C3HC4; Domain location=19-58; Score =24.9; E_value=0.00015; Accession=PF00097.17; Description=Zinc finger, C3HC4 type (RING finger)
MFMPPPGFAMDSVQREQECAMCLEEEVSVVFLPCGHQVVCAGCNQRHQEVGMTECPSCRSPIERRICARFADS

SEQ ID NO: 107023 - protein, 410 aa, Setaria italica
  Transcript Sequence Number=SeqID_41049
  Gene Ontology: Mol. function=protein binding; Cellular component =integral to membrane; Biological process=biological_process
  Homolog annotation: Hit_ID=Q21453; Match level="QueryCoverage=59%, HitCoverage=30%, E-value=1e-16, Identity=28%"; Hit description =Protein M01F1.4a, confirmed by transcript evidence
  Pfam annotation: Domain name=UPF0118; Domain location=92-398; Score= -79.7; E_value=0.039; Accession=PF01594.8; Description=Domain of unknown function DUF20
TGGILRHLKTLVAVGLMLGMIAGFLTGSIFFSYQIGLEGKDAVMSLKSHVEKGNYSEKIGLKKWLDDNDIPGLVDQYSAKIYDTVWEQVDQLAVQYNLTDFTSGFRHFLISQSVDPKSKALISARPHPYSMKLQSIAARVKKREWLEIYMELDSFFRELLITREDLVVKAKELALQGTEIAKRLLSSSTSVLGGSANLMLSVALRIVSGAAEVVNFLSQLMVFLWVLYYLITVEGGGATEQIIDLLPVSKQVKDRCVEVIDHAISSVLLATAKIAIFQGGLTWLLFKFFKVHFVYTSTVLGFISALVPILPFWLSSIFAAGQLLMEGRYVLALVVTVIHLTLMDYGTTTILEDIPGYNGYLTGLSIIGGMTLFPNALEGAILGPLIMTVVIALKNLYTEFVLADAEETSS

SEQ ID NO: 107024 - protein, 67 aa, Setaria italica
  Transcript Sequence Number=SeqID_41050
VPSYTCNHCGCLQRDARGPCVLGTVVHPGSRSSGSFLDRDSKRFFLMQSSGGGLFPPLVEIFFMYQQ

SEQ ID NO: 107025 - protein, 49 aa, Setaria italica
  Transcript Sequence Number=SeqID_41051
MCGTARAQCGSLGFLTCTRSPIYVCFLLWVHIVILELLIGKEGRCNYAY

SEQ ID NO: 107026 - protein, 79 aa, Setaria italica
  Transcript Sequence Number=SeqID_41052
  Gene Ontology: Mol. function=DNA-directed RNA polymerase activity; Cellular component=mitochondrion; Biological process=transcription
  Homolog annotation: Hit_ID=Q84LK6; Match level="QueryCoverage=100%, HitCoverage=7%, E-value=1e-37, Identity=94%"; Hit description=DNA -directed RNA polymerase
AHLFLPSYVMRTHGARQQREAVKRAPREQMQSVFEALNTLGSTKWRVNKRVLSIIDRIWSSGGRLADLVDRTDVPLPEK

SEQ ID NO: 107027 - protein, 108 aa, Setaria italica
  Transcript Sequence Number=SeqID_41053
LFIIKLLSYNYKISYEIIFRQHQPRRVPLSRISLYSSRTRKINILVEAKNYIITFTGSVSDFAMRKPVRSKERECEIKKGHYCPNTAKLPSLSLLATVSTFYLALLFA

SEQ ID NO: 107028 - protein, 54 aa, Setaria italica
  Transcript Sequence Number=SeqID_41054
KIVHRINAYCFDNQIKGCCAATGLCYQFSASTFQRYLKKKLLDFSVAGRADLLY

SEQ ID NO: 107029 - protein, 121 aa, Setaria italica
  Transcript Sequence Number=SeqID_41055
  Homolog annotation: Hit_ID=B9SVM2; Match level="QueryCoverage=97%, HitCoverage=12%, E-value=8e-19, Identity=39%"; Hit description =Protein phosphatase 2c, putative
LFSVPSCFSAGEKLPDVPAPAAATRSGQSAVTLVYRAGIAGHDRLVTVTWCRNLLTHGLSVSIEGSAGAGKDKTGREWGEAGGGGGGGAASKSCSSACKVEMQPWHFWRKYGAKQFQVDGK

SEQ ID NO: 107030 - protein, 215 aa, Setaria italica
  Transcript Sequence Number=SeqID_41056
  Gene Ontology: Mol. function=serine-type endopeptidase inhibitor activity; Cellular component=extracellular region
  Homolog annotation: Hit_ID=P19860; Match level="QueryCoverage=31%, HitCoverage=100%, E-value=2e-32, Identity=100%"; Hit description =Bowman-Birk type major trypsin inhibitor
  Pfam annotation: Domain name=Bowman-Birk_leg; Domain location=157 -182; Score=0.6; E_value=6; Accession=PF00228.12; Description=Bowman -Birk serine protease inhibitor family
  Pfam annotation: Domain name=Bowman-Birk_leg; Domain location=62-86; Score=31.0; E_value=4.8e-06; Accession=PF00228.12; Description =Bowman-Birk serine protease inhibitor family
  Pfam annotation: Domain name=Bowman-Birk_leg; Domain location=88-113; Score=36.5; E_value=1e-07; Accession=PF00228.12; Description=Bowman -Birk serine protease inhibitor family
  Pfam module annotation: Pfam domain module=Bowman-Birk_leg::Bowman -Birk_leg::Bowman-Birk_leg; Domain location=157-182::62-86::88-113
MEKRVASRILLMMLSLQALLLVAGLSTPAATTVAVAGGSGEDMGGAIRLPSDTASGERPWKCCDLQTCTKSIPAFCRCRDLLEQCSDACKECGKVRDSDPPRYICQDVYRGIPAPMCHEHQGRTNQVVVVHAGPKEMAAVVRGSKKGENGKGRPWKCCDKAVPGPTTEGQVWYCMDKVDKCTCNRCFELEGSHRYYYCLDGYQGSDPGPSCTTHA

SEQ ID NO: 107031 - protein, 40 aa, Setaria italica
  Transcript Sequence Number=SeqID_41057
YIMQLTNRDIMLINSMHVSIQTNRDQCIMCCIFRLLALTT

SEQ ID NO: 107032 - protein, 137 aa, Setaria italica
  Transcript Sequence Number=SeqID_41058
  Gene Ontology: Mol. function=electron carrier activity; Biological process=oxidation reduction
  Homolog annotation: Hit_ID=B6SRJ8; Match level="QueryCoverage=87%, HitCoverage=23%, E-value=2e-62, Identity=96%"; Hit description =Cytochrome P450 CYP94B12
RRTVVTANPVNVEHILKGNFGNYPKGKPFTDILGDLLGTGIFNVDGELWYAQRKLVSHEFSARALRELEFAVLEDEARERLVPALGLAAASGDAIDMQDLLRRFSFDVICRVSLGVDPGCLDPALPAPRLAAAFDAA

SEQ ID NO: 107033 - protein, 124 aa, Setaria italica
  misc_feature (108)..(108): Xaa can be any naturally occurring amino acid
  misc_feature (114)..(114): Xaa can be any naturally occurring amino acid
  Transcript Sequence Number=SeqID_41059
  Gene Ontology: Mol. function=DNA binding
  Homolog annotation: Hit_ID=Q84S70; Match level="QueryCoverage=75%, HitCoverage=13%, E-value=3e-10, Identity=38%"; Hit description=Kelch- like protein
  Pfam annotation: Domain name=Dev_Cell_Death; Domain location=1-122; Score=163.1; E_value=8.5e-46; Accession=PF10539.1; Description =Development and cell death domain
IICNHETKRQFFEQKHFALPGYAATFIKKIRAGMLLFLFEHEERKLYGVFEATSDGALNILPDSCASLCKFRPAQVLFRRVWFCKPLTEAEFSDAIKGSSLLPQRSFXGISYQXVLDLVDLFTS

SEQ ID NO: 107034 - protein, 137 aa, Setaria italica
  Transcript Sequence Number=SeqID_41060
CKRPAEKDDMFLTLAKKPYTAAGKELTMLPFPEKGLEFRGSRPPDPQARDMPICLDEPEADLRLGHRESQATWSAPANAHRPLKLKPGAKHVLQPSASGVYQENPWPVHSVAPLLAPENDACTLSTSKTRGAETYKF

SEQ ID NO: 107035 - protein, 211 aa, Setaria italica
  misc_feature (26)..(26): Xaa can be any naturally occurring amino acid
  Transcript Sequence Number=SeqID_41061
  Gene Ontology: Mol. function=metal ion binding; Cellular component =integral to membrane
  Homolog annotation: Hit_ID=B6TJ70; Match level="QueryCoverage=100%, HitCoverage=82%, E-value=5e-74, Identity=65%"; Hit description=PHD finger protein
DVFRDFRARRAGIVKALTTDVEKYYXKPDPEKENLCLYGLPNETWEVTLPAEEVPPELPEPALGINFARDGMIEKDWLSLVAVHSDAWLLSVAFYFGARFGFDKDARRRLFTMINNLPTVYELVTGVAKKQSKAPNGSSKSSKSNSKPSKQTNSNSKPAKPAHPKEEEDSGQEDAEEDQAYNCGSCGDSYLNGEFWICCDVCEKWFHGKCV

SEQ ID NO: 107036 - protein, 261 aa, Setaria italica
  Transcript Sequence Number=SeqID_41062
  Gene Ontology: Mol. function=metal ion binding; Cellular component =integral to membrane
  Homolog annotation: Hit_ID=B6TJ70; Match level="QueryCoverage=94%, HitCoverage=96%, E-value=2e-93, Identity=68%"; Hit description=PHD finger protein
  Pfam annotation: Domain name=PHD; Domain location=207-257; Score =46.1; E_value=1.4e-10; Accession=PF00628.21; Description=PHD-finger
MDGDGGGAAAGAAAVHHHTRSPEDVFRDFRARRAGIVKALTTDVEKFYQMCDPEKENLCLYGLPNETWEVTLPAEEVPPELPEPALGINFARDGMIEKDWLSLVAVHSDAWLLSKVIGEHFGARFGFDKDARRRLFTMINNLPTVYELVTGVAKKQSKAPNGSSKSSKSNSKPSKQTNSNSKPAKPAHPKEEEDSGQEDAEEDQAYNCGSCGDSYLNGEFWICCDVCEKWFHGKCVRITPAKAEHIKQYKCPSCSSKRSRE

SEQ ID NO: 107037 - protein, 103 aa, Setaria italica
  Transcript Sequence Number=SeqID_41063
  Gene Ontology: Mol. function=protein binding
  Homolog annotation: Hit_ID=Q7F1J7; Match level="QueryCoverage=87%, HitCoverage=27%, E-value=5e-27, Identity=70%"; Hit description =Putative speckle-type POZ protein(Spop)
  Pfam annotation: Domain name=BTB; Domain location=6-103; Score=52.0; E_value=2.4e-12; Accession=PF00651.23; Description=BTBPOZ domain
RYCCSFHRSTARLFHAHRAVLAARSPVFRAELLGSMAEATMSCITLHDIAPATFKAMLQFMYTDVLPGDEELGDCPTEMFENLLVAADRYALDRLKLMCAHKL

SEQ ID NO: 107038 - protein, 59 aa, Setaria italica
  misc_feature (1)..(5): Xaa can be any naturally occurring amino acid
  Transcript Sequence Number=SeqID_41064
XXXXXFLSITFSSCNKNLIWKNNITCLLCRLPATKLHSPSEITLPLKTRNRTYSTVTKS

SEQ ID NO: 107039 - protein, 277 aa, Setaria italica
  Transcript Sequence Number=SeqID_41065
  Gene Ontology: Mol. function=protein binding
  Homolog annotation: Hit_ID=B9RCS2; Match level="QueryCoverage=97%, HitCoverage=45%, E-value=1e-39, Identity=41%"; Hit description =Protein binding protein, putative
  Pfam annotation: Domain name=LRR_1; Domain location=141-161; Score =0.3; E_value=2.6e+02; Accession=PF00560.25; Description=Leucine Rich Repeat
  Pfam annotation: Domain name=LRR_1; Domain location=165-188; Score =4.2; E_value=47; Accession=PF00560.25; Description=Leucine Rich Repeat
  Pfam annotation: Domain name=LRR_1; Domain location=34-56; Score=7.5; E_value=11; Accession=PF00560.25; Description=Leucine Rich Repeat
  Pfam annotation: Domain name=LRR_1; Domain location=58-91; Score=3.5; E_value=64; Accession=PF00560.25; Description=Leucine Rich Repeat
  Pfam annotation: Domain name=LRR_1; Domain location=9-31; Score=5.2; E_value=31; Accession=PF00560.25; Description=Leucine Rich Repeat
  Pfam annotation: Domain name=LRR_1; Domain location=93-115; Score =9.1; E_value=5.5; Accession=PF00560.25; Description=Leucine Rich Repeat
  Pfam module annotation: Pfam domain module=LRR_1::LRR_1::LRR_1::LRR _1::LRR_1::LRR_1; Domain location=141-161::165-188::34-56::58-91::9 -31::93-115
EHIAKIGANLKYLSLKGTGITSQALCVLAGTVLNLTSLSLSHTKIDDSALAYISMMPFLRTVDLSHTSIKGFAYAEVNADKMLSISAFEHLKYLESLNLEDTPLSAEVIPPLGSFAALKYLYLKSDFLSDPALHALSAASNLIHLGFCGNILSSSGLLQFVPPATLCVLDLSGCWILTGDAISTFCKRHPMIEVRHELMWELKANSVGRSQPKARQSQQVKAKVVNSFASPSRLPDIRFVDERIKYNKEEMMELQGLVKSNSVMHGVQLPPELRRLT

SEQ ID NO: 107040 - protein, 333 aa, Setaria italica
  misc_feature (249)..(249): Xaa can be any naturally occurring amino acid
  Transcript Sequence Number=SeqID_41066
  Gene Ontology: Mol. function=aminoacyl-tRNA ligase activity; Cellular component=cytoplasm; Biological process=tRNA aminoacylation for protein translation
  Homolog annotation: Hit_ID=B6T638; Match level="QueryCoverage=94%, HitCoverage=82%, E-value=6e-91, Identity=51%"; Hit description =Tyrosyl-tRNA synthetase
  Pfam annotation: Domain name=tRNA-synt_1b; Domain location=12-307; Score=2.3; E_value=4.9e-10; Accession=PF00579.17; Description=tRNA synthetases class I (W and Y)
RVNDRELELLLKKKPAPICYVWCDPSPWMHISEGIIKTLCVNKMVKSGCKVKIVMADWFARMNPYIGGSLNKMRAIGLYNIEVWKAAGMALDSVELVWLSDEINQHANVYWPLAMDVSRRTTLRRIKGFYGSRHPAVQPFTAADVFYPSLQCATILFQKVDIWLLGKAQHEANLLAREYRKRAGRGNKPIAVSHKILPNLLLRPEEEHRRNKFLAIYMRDIEFDINRKIIHAFCPPKLVEGNPCLEYIXKYIILPWYGKFEVVRKIEDGGDKTFLSMEELTADYLSGALQPDDLKLALAKSLNKIMQPIRGHFRSNAEAENTVERIKEYYKPR

SEQ ID NO: 107041 - protein, 94 aa, Setaria italica
  Transcript Sequence Number=SeqID_41067
  Subcellular localization annotation: CTP_CleavageSite=45; ConfidenceScore=5.06e-01
MSSPTCGKMSYQSKRTHAPSPLEVQQPGMTDSSAQGPWWAPASIGASAYPTQPPELMRKFISRSCCDVVIKFQDYVVMWSLLLVIVIPCMHSLI

SEQ ID NO: 107042 - protein, 279 aa, Setaria italica
  Transcript Sequence Number=SeqID_41068
  Gene Ontology: Cellular component=integral to membrane
  Homolog annotation: Hit_ID=Q2MJU2; Match level="QueryCoverage=98%, HitCoverage=89%, E-value=3e-32, Identity=32%"; Hit description =Cadmium tolerance factor
SSQPAVGNKPSSHSTEFQLRKYLLLLATLVATVTYVAGLNLPGGAWQEDTKDGLHRAGDPILQYAHHSRYLAFYYCNATAFAASLVVCLLLLVLDGTNTGWEALLRVVMVLDLLGLMGAYAAGSCRDTFTTIYSALLVCAVFAYIVISFSAFVISKNSVLAVVLPKKQGDDTEKQGKDTSTLEHEDELREVLMLLATFAVTITYVAGLNPPGGFWGEGNHKMSDPVLQEHYLSRYQAFFVWTTTAFIASLLIIILLVDKKLSSNKSVRFVALHGVIITV

SEQ ID NO: 107043 - protein, 317 aa, Setaria italica
  misc_feature (300)..(300): Xaa can be any naturally occurring amino acid
  Transcript Sequence Number=SeqID_41069
  Gene Ontology: Mol. function=Rho guanyl-nucleotide exchange factor activity
  Homolog annotation: Hit_ID=B6SW78; Match level="QueryCoverage=100%, HitCoverage=64%, E-value=1e-82, Identity=54%"; Hit description =Pollen-specific kinase partner protein
  Pfam annotation: Domain name=PRONE; Domain location=1-236; Score =112.1; E_value=1.9e-30; Accession=PF03759.5; Description=PRONE (Plant-specific Rop nucleotide
DAMLLEYLDSFHEAQEFWYVAKDADGGEDDDSCDKWWIPTARVPDEGLSDASKKFLQHQKELVGQVLKAAIAINADVITEMEIPEEYIESLPKNGRSILGDSMYRIITGDIFDPNELLNSVDLSTEHKIVDLKDQIEASVVIWQRKICNKLSWGSGVSLEKREEFEERAQTTLLILKHKFPGIPQSTLDISKIQHNKDVGFAILESYSRTLESLAFAVLSRIEDVLHADAVARDPKRTKSRRTSLESPLLDATAEAETAHHSTVHWQDQDLEDGERHPQAAEDNGGKLKRVHRVATKKFXHSQKIDVASGLRSFTHR

SEQ ID NO: 107044 - protein, 91 aa, Setaria italica
  Transcript Sequence Number=SeqID_41070
  Subcellular localization annotation: CTP_CleavageSite=79; ConfidenceScore=5.26e-01
PVQHGRGPRAVALLLPSRSNHQVIAGFFASEFGSRFTESLGESNKFAHSCCRSRSVLLVGFSSVDGLNRTEPQFRHFPVGSSNFGVFFSFC

SEQ ID NO: 107045 - protein, 317 aa, Setaria italica
  Transcript Sequence Number=SeqID_41071
  Gene Ontology: Mol. function=binding; Cellular component=spindle microtubule; Biological process=anaphase-promoting complex-dependent proteasomal ubiquitin-dependent protein catabolic process
  Homolog annotation: Hit_ID=Q10PF0; Match level="QueryCoverage=88%, HitCoverage=37%, E-value=1e-147, Identity=90%"; Hit description=TPR Domain containing protein, expressed
  Pfam annotation: Domain name=TPR_1; Domain location=119-152; Score =20.2; E_value=0.0085; Accession=PF00515.20; Description =Tetratricopeptide repeat
  Pfam annotation: Domain name=TPR_1; Domain location=153-186; Score =10.0; E_value=0.37; Accession=PF00515.20; Description=Tetratricopepti de repeat
  Pfam annotation: Domain name=TPR_1; Domain location=17-50; Score=1.3; E_value=4.2; Accession=PF00515.20; Description=Tetratricopeptide repeat
  Pfam annotation: Domain name=TPR_1; Domain location=187-220; Score =15.5; E_value=0.081; Accession=PF00515.20; Description =Tetratricopeptide repeat
  Pfam annotation: Domain name=TPR_1; Domain location=226-259; Score =22.8; E_value=0.0014; Accession=PF00515.20; Description =Tetratricopeptide repeat
  Pfam annotation: Domain name=TPR_1; Domain location=260-293; Score =33.1; E_value=1.1e-06; Accession=PF00515.20; Description =Tetratricopeptide repeat
  Pfam annotation: Domain name=TPR_1; Domain location=85-118; Score =19.9; E_value=0.011; Accession=PF00515.20; Description =Tetratricopeptide repeat
  Pfam annotation: Domain name=TPR_2; Domain location=119-152; Score =22.2; E_value=0.0022; Accession=PF07719.9; Description =Tetratricopeptide repeat
  Pfam annotation: Domain name=TPR_2; Domain location=153-186; Score =11.5; E_value=1.3; Accession=PF07719.9; Description=Tetratricopeptide repeat
  Pfam annotation: Domain name=TPR_2; Domain location=17-50; Score=4.6; E_value=9.2; Accession=PF07719.9; Description=Tetratricopeptide repeat
  Pfam annotation: Domain name=TPR_2; Domain location=187-220; Score =15.9; E_value=0.17; Accession=PF07719.9; Description=Tetratricopeptid e repeat
  Pfam annotation: Domain name=TPR_2; Domain location=226-259; Score =15.7; E_value=0.2; Accession=PF07719.9; Description=Tetratricopeptide repeat
  Pfam annotation: Domain name=TPR_2; Domain location=260-293; Score =18.3; E_value=0.032; Accession=PF07719.9; Description=Tetratricopepti de repeat
  Pfam annotation: Domain name=TPR_2; Domain location=85-118; Score =24.1; E_value=0.00059; Accession=PF07719.9; Description =Tetratricopeptide repeat
  Pfam annotation: Domain name=TPR_3; Domain location=192-218; Score =1.6; E_value=9; Accession=PF07720.4; Description=Tetratricopeptide repeat
  Pfam annotation: Domain name=TPR_3; Domain location=257-293; Score =14.9; E_value=0.14; Accession=PF07720.4; Description=Tetratricopeptid e repeat
  Pfam annotation: Domain name=TPR_3; Domain location=87-118; Score =7.2; E_value=1.6; Accession=PF07720.4; Description=Tetratricopeptide repeat
  Pfam module annotation: Pfam domain module=TPR_1::TPR_1::TPR_1::TPR _1::TPR_1::TPR_1::TPR_1::TPR_2::TPR_2::TPR_2::TPR_2::TPR_2::TPR _2::TPR_2::TPR_3::TPR_3::TPR_3; Domain location=119-152::153-186::17 -50::187-220::226-259:...
  Pfam module annotation: Domain location=:260-293::85-118::119 -152::153-186::17-50::187-220::226-259::260-293::85-118::192-218::257- 293::87-118
SCSISSSSSGETLKNNIDVLACKAEYYHQSGEYQKCWQLTSSLLERDPFHLKCTLVHLAAAMELGHSNDLYLLACNLVKDYPQKALSWFAVGCYYYCIKKYDQARRYFGKATGLDGTFPPAWIGTGIAYAAQEEGDQAMAAFRTAARLFPGCHLPTLYMGMQYVRMHNFKLAEQFFTQAKSICPSDPLIYNELGVVAYNMKEYQKAVQFFELTLGHTSSSQNEMWEPTLVNLGHALRKLKKYDNAVSYYEKALTFPTKSLSAFAGLAYTYHLMDNFEAAINYYHKALWLKPDDQFCTDMLTYALESSCHSTARRRIV

SEQ ID NO: 107046 - protein, 21 aa, Setaria italica
  Transcript Sequence Number=SeqID_41072
YLKQTTSFKSQGHNIIKAYSN

SEQ ID NO: 107047 - protein, 180 aa, Setaria italica
  Transcript Sequence Number=SeqID_41073
  Gene Ontology: Mol. function=oxidoreductase activity, acting on the CH-OH group of donors, NAD or NADP as acceptor; Biological process =metabolic process
  Homolog annotation: Hit_ID=Q8H423; Match level="QueryCoverage=88%, HitCoverage=46%, E-value=2e-66, Identity=73%"; Hit description =Putative phosphoglycerate dehydrogenase
  Pfam annotation: Domain name=2-Hacid_dh_C; Domain location=1-146; Score=125.7; E_value=1.5e-34; Accession=PF02826.11; Description=D -isomer specific 2-hydroxyacid dehydr
VLILGFGAIGIEVAKRLKPFGVKVLATKRNWSSDTLPCDVDEMVGKKGGPQDMYEFAGEADIVITCMALTNETVGIVDHKFLSSMKKGSYLINIARGRLLDYNAVFDHLKSGHLAGLGIDVAWMEPFDPEDPILKFPNVIITPHVAGVTEYSYRTMAKSVGDTALQLHSGEPFMGIEFVN

SEQ ID NO: 107048 - protein, 82 aa, Setaria italica
  Transcript Sequence Number=SeqID_41074
LKTGGREQMEHMLMSDLKECKINSSHVEKFINHFQCWLGDLSLDSIFCRKKHCPGHFESIVKFMFSEMNSIVIGDWHRLVCF

SEQ ID NO: 107049 - protein, 172 aa, Setaria italica
  misc_feature (9)..(9): Xaa can be any naturally occurring amino acid
  Transcript Sequence Number=SeqID_41075
  Homolog annotation: Hit_ID=B6U9N7; Match level="QueryCoverage=100%, HitCoverage=40%, E-value=1e-24, Identity=39%"; Hit description=F-box domain containing protein
NRTWIGGRXDWLVTTDVRCGVELLNPITRERVPLPSFDTIGKFADPYKLCISVDYMLHHLQQVALCQTPAHPNGYLAVAMFSSASLDFLAFTADGDEGWTPLKDPSGLGVHYTDVTAHNGKVFAVSDYGDIYCWDMNGTDVEFTYLRGPEFHVSNNDYIRRGSTFDQRYVST

SEQ ID NO: 107050 - protein, 222 aa, Setaria italica
  Transcript Sequence Number=SeqID_41076
  Gene Ontology: Mol. function=iron-sulfur cluster binding; Cellular component=chloroplast; Biological process=iron-sulfur cluster assembly
  Homolog annotation: Hit_ID=B6UGE2; Match level="QueryCoverage=99%, HitCoverage=99%, E-value=6e-89, Identity=77%"; Hit description=NFU3
  Pfam annotation: Domain name=NifU; Domain location=79-147; Score =99.8; E_value=9.5e-27; Accession=PF01106.9; Description=NifU-like domain
  Subcellular localization annotation: CTP_CleavageSite=51; ConfidenceScore=5.67e-01
MEAWLTAAAAVVSLPPPRIRLRFTKPSPLPPPRRLQFGTSKIRTSSSRACLAAASASTPPAPGGGLYSAATYELTAENVDRVLDDVRPYLIADGGNVTVVSVEDGTISLKLEGACGSCPSSTTTMNMGIERVLKEKFGDAFKEIRQVFDGDQPPAETTPEAVNRHLDILRPAIANYGGTVDVLAVDGEDCLVKYDGPESIGSGIKAAIKEKFPDITNVVFTQ

SEQ ID NO: 107051 - protein, 156 aa, Setaria italica
  misc_feature (12)..(12): Xaa can be any naturally occurring amino acid
  Transcript Sequence Number=SeqID_41077
  Gene Ontology: Mol. function=aspartic-type endopeptidase activity; Biological process=DNA integration
  Homolog annotation: Hit_ID=P10978; Match level="QueryCoverage=99%, HitCoverage=12%, E-value=9e-21, Identity=36%"; Hit description =Endonuclease
  Pfam annotation: Domain name=zf-CCHC; Domain location=132-149; Score =22.8; E_value=9.6e-05; Accession=PF00098.15; Description=Zinc knuckle
LYMAKSLDKLVXLKLQLFRLHMEEGARFVDHLNVINKLVTQLISVDENIEENNKVIILVSSLPSSWEQLVMNILIGKTTLNFNTTIAYLLETVSLKKPQESSSLGDQALTISRGTGKVKNHGKKKGKSKGIRTCYLCDKEGHMIKECVNLETMRGV

SEQ ID NO: 107052 - protein, 69 aa, Setaria italica
  Transcript Sequence Number=SeqID_41078
  Subcellular localization annotation: CTP_CleavageSite=29; ConfidenceScore=5.53e-01
PLSTFTTTPAFQSKGRGQRPLLTMFRMPSSSSLPSIGQAFPFLPLPSYFLVLAWPPRHCPVNPHPQISA

SEQ ID NO: 107053 - protein, 153 aa, Setaria italica
  misc_feature (110)..(110): Xaa can be any naturally occurring amino acid
  misc_feature (125)..(125): Xaa can be any naturally occurring amino acid
  Transcript Sequence Number=SeqID_41079
YNIITMIVNYIISLVNQVISCEKKKVTSGSICMPSEWDKKYIAPFRLMVKLVTCYPSAATVALGKLISVVKELSQINGRDYSEVAVTSVEPFQTIIALEELSTSNGNVEXLATRIEASPIETDIXRKLDSSKFDRKNKGTIMHDLTLCTLRFG

SEQ ID NO: 107054 - protein, 82 aa, Setaria italica
  Transcript Sequence Number=SeqID_41080
FLPNWCCAAATCRPAGLSGDIDWLRVYRRHPSSKLIKRFYCTLLLPRRLRLLSLKVLARISVGQSFNRKKIKHSTRIDIKKH

SEQ ID NO: 107055 - protein, 47 aa, Setaria italica
  Transcript Sequence Number=SeqID_41081
  Gene Ontology: Mol. function=3-oxoacyl-[acyl-carrier-protein] reductase activity; Cellular component=chloroplast; Biological process=fatty acid biosynthetic process
  Homolog annotation: Hit_ID=B6T8A3; Match level="QueryCoverage=97%, HitCoverage=14%, E-value=6e-19, Identity=93%"; Hit description=3 -oxoacyl-reductase
KWGTIDVLVNNAGITRDTLLMRMKKSQWQDVIDLNLTGVFLCTQVSL

SEQ ID NO: 107056 - protein, 126 aa, Setaria italica
  misc_feature (67)..(67): Xaa can be any naturally occurring amino acid
  misc_feature (88)..(88): Xaa can be any naturally occurring amino acid
  misc_feature (92)..(92): Xaa can be any naturally occurring amino acid
  Transcript Sequence Number=SeqID_41082
  Gene Ontology: Mol. function=3-oxoacyl-[acyl-carrier-protein] reductase activity; Cellular component=chloroplast; Biological process=fatty acid biosynthetic process
  Homolog annotation: Hit_ID=B6T8A3; Match level="QueryCoverage=96%, HitCoverage=38%, E-value=4e-59, Identity=94%"; Hit description=3 -oxoacyl-reductase
  Pfam annotation: Domain name=adh_short; Domain location=1-126; Score =22.6; E_value=4.4e-07; Accession=PF00106.17; Description=short chain dehydrogenase
RVLLLQIEASGGEAITFGGDVSKEADVESMMKAAMDKWGTIDVLVNNAGITRDTLLMRMKKSQWQDXIDLNLTGVFLCTQAATKVMMXKKGXIINIASVVGLTGNVGQANYSAAKAGVIGFTKTVA

SEQ ID NO: 107057 - protein, 85 aa, Setaria italica
  Transcript Sequence Number=SeqID_41083
  Gene Ontology: Mol. function=3-oxoacyl-[acyl-carrier-protein] reductase activity; Cellular component=chloroplast; Biological process=fatty acid biosynthetic process
  Homolog annotation: Hit_ID=B6T8A3; Match level="QueryCoverage=96%, HitCoverage=25%, E-value=1e-37, Identity=93%"; Hit description=3 -oxoacyl-reductase
LHHRTGAREYASRIFNVNAIAPGFIASDMTAELGEELEKKILSTIPLGRYGQPEEVAGLVEFLALNPAASYITGQVLTIDGGMVM

SEQ ID NO: 107058 - protein, 315 aa, Setaria italica
  Transcript Sequence Number=SeqID_41084
  Gene Ontology: Mol. function=3-oxoacyl-[acyl-carrier-protein] reductase activity; Cellular component=chloroplast; Biological process=fatty acid biosynthetic process
  Homolog annotation: Hit_ID=B6T8A3; Match level="QueryCoverage=91%, HitCoverage=90%, E-value=1e-147, Identity=89%"; Hit description=3 -oxoacyl-reductase
  Pfam annotation: Domain name=Epimerase; Domain location=75-310; Score= -57.4; E_value=0.0076; Accession=PF01370.13; Description=NAD dependent epimerasedehydratase family
  Pfam annotation: Domain name=KR; Domain location=73-258; Score=0.5; E_ value=7.1e-07; Accession=PF08659.2; Description=KR domain
  Pfam annotation: Domain name=NAD_binding_4; Domain location=77-290; Score=-108.1; E_value=0.067; Accession=PF07993.4; Description=Male sterility protein
  Pfam annotation: Domain name=adh_short; Domain location=73-241; Score= 165.4; E_value=1.6e-46; Accession=PF00106.17; Description=short chain dehydrogenase
  Pfam module annotation: Pfam domain module=Epimerase::KR::NAD_binding_ 4::adh_short; Domain location=75-310::73-258::77-290::73-241
  Subcellular localization annotation: CTP_CleavageSite=60; ConfidenceScore=5.86e-01
MVTAAAAAAVSSPAAPVAGAAAATSRRGFVTFGGGAARSSPALRSGRGLSGVRTHVAAVEQAVAKDATKLEAPVVIITGASRGIGKATALALGKAGCKVLVNYARSSKEAEDVSKEIEASGGEAITFGGDVSKEADVESMMKAAMDKWGTIDVLVNNAGITRDTLLMRMKKSQWQDVIDLNLTGVFLCTQAATKVMMKKKKGRIINIASVVGLTGNVGQANYSAAKAGVIGFTKTVAREYASRNINVNAIAPGFIASDMTAELGEELEKKILSTIPLGRYGQPEEVAGLVEFLALNPAASYITGQVLTIDGGMVM

SEQ ID NO: 107059 - protein, 74 aa, Setaria italica
  misc_feature (19)..(19): Xaa can be any naturally occurring amino acid
  Transcript Sequence Number=SeqID_41085
  Gene Ontology: Mol. function=nucleoside-triphosphatase activity; Cellular component=integral to membrane; Biological process =proteolysis
  Homolog annotation: Hit_ID=Q8GU88; Match level="QueryCoverage=100%, HitCoverage=5%, E-value=3e-23, Identity=78%"; Hit description =Putative pleiotropic drug resistance protein 7
YSAWLPVCPHEVDSEARKXFVEEVMELVELTPLRGALVGLPGVNGLSTEQRKRLTIAVELVANPSIIFMDEPTS

SEQ ID NO: 107060 - protein, 238 aa, Setaria italica
  misc_feature (183)..(183): Xaa can be any naturally occurring amino acid
  misc_feature (195)..(195): Xaa can be any naturally occurring amino acid
  Transcript Sequence Number=SeqID_41086
  Gene Ontology: Mol. function=electron carrier activity; Biological process=oxidation reduction
  Homolog annotation: Hit_ID=Q10S04; Match level="QueryCoverage=91%, HitCoverage=39%, E-value=2e-85, Identity=69%"; Hit description =Cytochrome P450 family protein
RNERYEGRAPGAPSNAFLRDTTINLMLAGRDTTGSALSWFFYLLTQNPRVVAKILEELETVKQGTSAVIAPDGTVTFDPDELGRLTYLHAALCESLRLYPPVPQELKEAAAADVLPCGHEVRAGDKILVWLYAMGRMEDVWGSDCREFRPERWISAEDGRVRYVPSYRFMSFNSGPRTCLGKXMAFVQLKAAVVXVVWNFEVEAVPGHVVEPKLSIILHMKNGFMATVKRRRQAAALA

SEQ ID NO: 107061 - protein, 147 aa, Setaria italica
  misc_feature (99)..(99): Xaa can be any naturally occurring amino acid
  Transcript Sequence Number=SeqID_41087
FLVFYVLSNFKLLRYQYELRLSVTVALPLAGDSRRRSVPSPVRPFRSHRRLLRSIGVALILFPTLCWCWACAARGSVHADLDRHSASAGFVAMGLFRGXFTLLVGMGCGVYIAQNYNVPNVKKLFNTYVFLAKHIEETYRKPKKDDD

SEQ ID NO: 107062 - protein, 123 aa, Setaria italica
  Transcript Sequence Number=SeqID_41088
MDRDGRPGWLPSLGFAFLSFNCGMAVYRSWDDPSSVAFVVIAYVALILLFRCLHLLERAGPGHRGGQGIKLAVWGLSTLLTLMFSSKVADIMPLWAQLLVWAMGIFTIVAGFYAFFLARPDAP

SEQ ID NO: 107063 - protein, 74 aa, Setaria italica
  Transcript Sequence Number=SeqID_41089
  Gene Ontology: Cellular component=chloroplast
PKTRKVPASEVLSALSKIKKAKLDTSTFFETLGGTESPGRTWMLIFTAKGRLEKGQYFPVTAVQRFDAAVSFSC

SEQ ID NO: 107064 - protein, 249 aa, Setaria italica
  Transcript Sequence Number=SeqID_41090
  Gene Ontology: Cellular component=chloroplast
  Subcellular localization annotation: CTP_CleavageSite=47; ConfidenceScore=5.69e-01
MASSAALLQASTAFAPVFCPLPCRPQPAPRLHLRGSPNRRRRGVALAASSAASSEVEKEPSTSPSSSPQESESAVADSVKVLKEAAKTRKVPASEVLSALSKIKKAKLDTSTFFETLGGTESPGRTWMLIFTAKGRLEKGQYFPVTAVQRFDAAGKRIENGIYLGPIGCLTFEGRLSWKKKILAFIFERVRIKVGPFGPLEIGLGSGDDGREPSTKDPFFVWFYVDEEIAVAQGRGGGVAYWCRCQRVP

SEQ ID NO: 107065 - protein, 142 aa, Setaria italica
  Transcript Sequence Number=SeqID_41091
VMTSSQLHRISTPRPFLHNSKLSVLREIIQQGVPQLLGDQPNHRKTATIANTITAKQPQIANSITTKQPQIGCLNSRNHSLKHRWSDSEGLVSETEWLEHQLSRFITNANPNPTPGSAQEITTLQPAVRAQAQTYIPSHGTK

SEQ ID NO: 107066 - protein, 49 aa, Setaria italica
  Transcript Sequence Number=SeqID_41092
  Homolog annotation: Hit_ID=Q5ZC07; Match level="QueryCoverage=71%, HitCoverage=6%, E-value=4e-11, Identity=82%"; Hit description =Transcription factor jumonji (JmjC) domain-containing protein-like
LTIAVNFWWKSRIMTQMLEHMDAYYLRRIVSRLLETCQCFVHRLNIGAI

SEQ ID NO: 107067 - protein, 112 aa, Setaria italica
  misc_feature (98)..(98): Xaa can be any naturally occurring amino acid
  Transcript Sequence Number=SeqID_41093
  Homolog annotation: Hit_ID=Q5ZC07; Match level="QueryCoverage=92%, HitCoverage=21%, E-value=4e-41, Identity=72%"; Hit description =Transcription factor jumonji (JmjC) domain-containing protein-like
NHSSVSIEEPDYSSYTRARYMKEYSERVLLNCGDVLFIPEGWYHQVDSDDLTIAVNFWWKSRIMTQMLEHMDAYYLRRIVSRLVDKEMNIMVQKSPFXRLEDCTNIQPMDKA

SEQ ID NO: 107068 - protein, 96 aa, Setaria italica
  Transcript Sequence Number=SeqID_41094
  Homolog annotation: Hit_ID=Q5ZC07; Match level="QueryCoverage=92%, HitCoverage=17%, E-value=5e-28, Identity=68%"; Hit description =Transcription factor jumonji (JmjC) domain-containing protein-like
MQEAAEEGEYVGARLEAGLRAARFASPPSADEFAADVEPKNVPAVFRGVAKEWAASTRWDPLRGGLDYLLEKVGRDVALEAMMSKTGHVFYGDLRS

SEQ ID NO: 107069 - protein, 300 aa, Setaria italica
  Transcript Sequence Number=SeqID_41095
  Homolog annotation: Hit_ID=Q5ZC07; Match level="QueryCoverage=86%, HitCoverage=49%, E-value=1e-121, Identity=78%"; Hit description =Transcription factor jumonji (JmjC) domain-containing protein-like
LPFLASLLNAHKASRVKTTLLGIFAAILSSRLVVLQEKVGRDVALEAMMSKTGHVFYGDLRSHERVSVPFSTFIQSCKSYLSQMNAASDKLVDQGILEKPTCSREMCSSSSENSEQVYLAQVSIMKTENREKCSLQVLKEDIQEPIFLRGKSFSSINFWMNGAHMRSSTHYDPHHNLLCVVAGCKKVTLWPPSASPFLYPMPVYGEASNHSSVSIEEPDYSSYTRARYMKEYSERVLLNCGDVLFIPEGWYHQVDSDDLTIAVNFWWKSRIMTQMLEHMDAYYLRRIVSRYFMSQLCTFT

SEQ ID NO: 107070 - protein, 180 aa, Setaria italica
  misc_feature (139)..(139): Xaa can be any naturally occurring amino acid
  misc_feature (164)..(164): Xaa can be any naturally occurring amino acid
  Transcript Sequence Number=SeqID_41096
  Gene Ontology: Mol. function=transferase activity, transferring glycosyl groups; Cellular component=integral to membrane; Biological process=cell wall organization and biogenesis
  Homolog annotation: Hit_ID=Q84Z01; Match level="QueryCoverage=100%, HitCoverage=26%, E-value=2e-90, Identity=87%"; Hit description =Putative xyloglucan glycosyltransferase 10
NGTAGVWRIKALEDSGGWMERTTVEDMDIAVRAHLKGWKFVFLNDVECQCELPESYEAYRKQQHRWHSGPMQLFRLCLPDIIRCKIAFWKKANLIFLFFLLRKLILPFYSFTLFCIILPLTMFVPEAELPDWVVCYIPXLMSFLNILPSPRSFPFIIPYLLFEXTMSVTKFNAMVSGLFQ

SEQ ID NO: 107071 - protein, 210 aa, Setaria italica
  misc_feature (194)..(194): Xaa can be any naturally occurring amino acid
  Transcript Sequence Number=SeqID_41097
  Gene Ontology: Mol. function=sequence-specific DNA binding; Cellular component=nucleus; Biological process=regulation of transcription, DNA-dependent
  Homolog annotation: Hit_ID=Q5ZAY0; Match level="QueryCoverage=97%, HitCoverage=29%, E-value=5e-53, Identity=50%"; Hit description =Homeobox-leucine zipper protein TF1
  Subcellular localization annotation: CTP_CleavageSite=31; ConfidenceScore=5.11e-01
VIEHVRVDGGTHNLFQPSLSGLLFGARRWVMSMARQCARLRDVFHVTNCALNVTARGRKAVMKLADNLLADYTSSISGLPVDAWSVQCGEGTEEDVRIVYRRNDDTSNTAVVCASATFLLELPMRRVFDLLKNNLLRIKWDVLVNGGCVKEEVRVANGVGSEDAVSILHVKHGSGTNKEIMMILQNSCYDASGXFMVYSSLDKNVMEMIT

SEQ ID NO: 107072 - protein, 75 aa, Setaria italica
  misc_feature (47)..(47): Xaa can be any naturally occurring amino acid
  misc_feature (62)..(62): Xaa can be any naturally occurring amino acid
  Transcript Sequence Number=SeqID_41098
  Gene Ontology: Mol. function=transposase activity; Biological process= transposition, DNA-mediated
  Homolog annotation: Hit_ID=Q2QPA1; Match level="QueryCoverage=94%, HitCoverage=23%, E-value=6e-14, Identity=50%"; Hit description =Transposon protein, putative, CACTA, En/Spm sub-class
MPIQICEIFADEVQKGNRSSTHLNKTGYKNVIQRFHERTGILYTRQXFKNKWDKLKTDYGIXKQLTNKKTGIEWD

SEQ ID NO: 107073 - protein, 133 aa, Setaria italica
  Transcript Sequence Number=SeqID_41099
VYDQSTHVGRQVEAGPILDRIGRTLQSSVRDIEHFRPRVRDPEIRSVLERLSNRLRSAAARCGCRTATTRDVHVPSLCEGGIGTSSQGPSGSKAIASEDEDNDDDDDEQRPEELGPSQLHEAPLTRPTQVVGT

SEQ ID NO: 107074 - protein, 150 aa, Setaria italica
  Transcript Sequence Number=SeqID_41100
SHKLPVDELPIISFHTEASTAPTVLATLTRVAQAELLPWLPVPRFFLSASEFVESMLASLKVPVVAPVSAAMAFTALHLRLRYGESSDGLVTRRDAEVPGSVVVRPERRLDHAWMVYSTLKKGSAEADASEMCEALLAMLVEIGKNKKSC

SEQ ID NO: 107075 - protein, 118 aa, Setaria italica
  Transcript Sequence Number=SeqID_41101
GMCAGRIGSMLTEIRCFLTSVLFCFVIFPNFLINLRPQCTKVIGELLLNGRVTLISRCTGGSSFWDVQLFGREISLGCRGCYAVEDAMIAQVHLEVLDCICCYISRTVPDFRAQMRRP

SEQ ID NO: 107076 - protein, 65 aa, Setaria italica
  Transcript Sequence Number=SeqID_41102
  Gene Ontology: Mol. function=protein serine/threonine kinase activity; Biological process=protein amino acid phosphorylation
KGQGQVAQELASLSRLAQHPWGRQNSEEILALLGGSPSTASEIELSSNRNISFTDTAYIGIRSPR

SEQ ID NO: 107077 - protein, 268 aa, Setaria italica
  Transcript Sequence Number=SeqID_41103
  Gene Ontology: Mol. function=metal ion binding; Cellular component =integral to membrane; Biological process=ubiquitin-dependent protein catabolic process
  Homolog annotation: Hit_ID=B6T239; Match level="QueryCoverage=99%, HitCoverage=54%, E-value=1e-106, Identity=77%"; Hit description=RING- H2 finger protein ATL2C
GCSPLVFVLESGSEASVSDRFDAVSSARLSFVMEQEEAGQDRKHVAAEPVEKKDEVVVPVKLGKFRSQATEGAGGSDNTGSQDVRRCFSMGTYEYVMDESSLLRVAVKPPEKKRPATRMPGHRVAMSECDCHSKREGFRGFDAPPKQQQPSKASVDKRESFSISKIWMRGGPRRKDVSSGGAIAAGSCSNSRRVSSFRLSSALQRAASDVGVAAAVPKRRADVVSPVTESEYNVSTWDKSASGSVVDWDLESAGGGHSLSSRADEARS

SEQ ID NO: 107078 - protein, 54 aa, Setaria italica
  Transcript Sequence Number=SeqID_41104
FPQLGSAHRSPVAVEQQGHTGAGFGFNGGPYTIQPLYAPAVNYNTEFPQLGSAT

SEQ ID NO: 107079 - protein, 184 aa, Setaria italica
  misc_feature (70)..(70): Xaa can be any naturally occurring amino acid
  Transcript Sequence Number=SeqID_41105
  Gene Ontology: Mol. function=nucleic acid binding
  Homolog annotation: Hit_ID=B9SG72; Match level="QueryCoverage=87%, HitCoverage=35%, E-value=1e-19, Identity=42%"; Hit description=R3h domain containing protein, putative
WSPISSITATAVVKYPCTCPVNLPQEESSTVAKVAIKQRPQKNFHSINSSSAHSSRDNLPEKVVEEKERXEYNRARARIFNNSSSSNAADGRPAEEATLPNTLHRSTSLELNSSNRMGQGAEITLERSLTTTSASRSNRSKIEKEPAVNRNRQNNRVAIFRDRESERKDPDYDRSYDRYNDKRI

SEQ ID NO: 107080 - protein, 449 aa, Setaria italica
  Transcript Sequence Number=SeqID_41106
  Gene Ontology: Mol. function=nucleic acid binding; Cellular component= nucleus
  Homolog annotation: Hit_ID=B9SG72; Match level="QueryCoverage=100%, HitCoverage=97%, E-value=1e-123, Identity=54%"; Hit description=R3h domain containing protein, putative
ETADIDGPMSRLILSARRVSSSPDLAEEQQQQDLPAPTQPQQGPAPPPRDDSAAQVDQFLREALEKPRERLSVLRMEQDILKFIRDPRQTQFEFPALPTSYLRLAAHRLAQHYFLQSIAIPDNSLPDGTGSRIILRKMSSECRLPAVRLADIPVNLPQEESSTVAKVAIKQRPQKNFHSINSSSAHSSRDNLQKSVEERKEEYNRARARIFNNSSSSNAADGRPAEEATLPNTLHRSTSLELNSSNRMGQGAEITLERSLTTTSASRSNRSKIEKEPAVNRNRQNNRVAIFRDRESERKDPDYDRSYDRYMQRFDPGFGFNGGPYTIQPLYAPAVNYNTEFPQLGSAHRSPVAVEQQPRPIAQHMLGSWSAGQAPNAIGYGPPDGVMTPYSPGHAGAPVRSSVFMHASQQYPMPSRPGVPFVHPPESMGQFGQTHQQQPEANLRFARPR

SEQ ID NO: 107081 - protein, 48 aa, Setaria italica
  Transcript Sequence Number=SeqID_41107
DAIASSLYVMACLCMDLNTVMCVAAQGSVHICLIVKICFPCIELILFI

SEQ ID NO: 107082 - protein, 103 aa, Setaria italica
  misc_feature (1)..(27): Xaa can be any naturally occurring amino acid
  Transcript Sequence Number=SeqID_41108
  Subcellular localization annotation: CTP_CleavageSite=83; ConfidenceScore=5.12e-01
XXXXXXXXXXXXXXXXXXXXXXXXXXXVFGCMTLPCPCFELRAARSTTASSHTTRTHTFNLLTTPVDRSRDGSDRPTGYTYVRTSRYGYFRGHVQRERMIGSV

SEQ ID NO: 107083 - protein, 72 aa, Setaria italica
  Transcript Sequence Number=SeqID_41109
KMNRQNYYATMNMTSPDNCKESNQWCTSYFSPQSQPIHYVLGASKHLITICLQFYFQFQVYERKKFFSSSHK

SEQ ID NO: 107084 - protein, 180 aa, Setaria italica
  Transcript Sequence Number=SeqID_41110
  Gene Ontology: Mol. function=RNA-directed DNA polymerase activity; Cellular component=chromatin; Biological process=chromatin assembly or disassembly
  Homolog annotation: Hit_ID=Q7XPJ7; Match level="QueryCoverage=96%, HitCoverage=13%, E-value=3e-66, Identity=67%"; Hit description =OSJNBa0087O24.13 protein
  Pfam annotation: Domain name=rve; Domain location=66-180; Score=27.1; E_value=6.5e-05; Accession=PF00665.18; Description=Integrase core domain
ENFTIKSALGGHSGERATSYQRLKLVFYWPKLQKAVKDYVKACPICQKNKSEHTHPYPGLLEQLPVPDMAWTHISMDFIEGLPKSNGKDVILAVVDRFTMYSHFLPLSHPFIVTDVIPLLTDNVFKLHGTPMVMVTDRDRIFTSHIWQSLFKSMGIKLHLSSAYHPQTDGQTERVNQCLW

SEQ ID NO: 107085 - protein, 269 aa, Setaria italica
  Transcript Sequence Number=SeqID_41111
  Gene Ontology: Mol. function=nucleoside-triphosphatase activity; Cellular component=integral to membrane; Biological process =proteolysis
  Homolog annotation: Hit_ID=Q8GU89; Match level="QueryCoverage=99%, HitCoverage=18%, E-value=1e-132, Identity=84%"; Hit description =Pleiotropic drug resistance protein 4
  Pfam annotation: Domain name=ABC_tran; Domain location=137-266; Score= -44.7; E_value=0.01; Accession=PF00005.19; Description=ABC transporter
  Pfam annotation: Domain name=DUF258; Domain location=32-227; Score= -177.9; E_value=0.057; Accession=PF03193.8; Description=Protein of unknown function, DUF258
  Pfam module annotation: Pfam domain module=ABC_tran::DUF258; Domain location=137-266::32-227
RWAALERLPTYDRVRRGILALDEDGEKVEVDVGRLGARESRALIERLVRAADDDHERFLLKLKERMDRVGIDYPTIEVRYENLEVEAQVHVGDRGLPTLINSVTNTIESIGNALHIFPSRKQPMTVLHDVSGIVKPRRMTLLLGPPGSGKTTLLLALAGKLDKDLKVSGKVTYNGHGMNEFVPERTAAYISQHDLHIGEMTVRETLQFSARCQGVGTRYEMLTELARREKAANIKPDHDIDVYMKASAMGGQESSIVTDYILKILGLEA

SEQ ID NO: 107086 - protein, 111 aa, Setaria italica
  Transcript Sequence Number=SeqID_41112
  Gene Ontology: Mol. function=cysteine-type endopeptidase activity; Cellular component=plasma membrane; Biological process=proteolysis
  Homolog annotation: Hit_ID=B4ESG1; Match level="QueryCoverage=76%, HitCoverage=37%, E-value=9e-37, Identity=77%"; Hit description =Papain-like cysteine proteinase (Fragment)
  Pfam annotation: Domain name=Inhibitor_I29; Domain location=50-106; Score=87.8; E_value=3.7e-23; Accession=PF08246.4; Description =Cathepsin propeptide inhibitor domain (
QQPLAMESKLLVLFLCLAFAACSASHHHDPSVVGYSQEDLALPSRLSELFTSWSVKHSKIYASPKEKVKRYEVFKKNLMHIAETNRKNGSYWLGLNQFADIDHEEFKTSYQ

SEQ ID NO: 107087 - protein, 79 aa, Setaria italica
  Transcript Sequence Number=SeqID_41113
YTHTILMVLIPITLAYIYRTNLSYVATPLPATSDLTILSLTQIKASCFFRRIKISYKKGPECSCIYVSLEISNFGSITS

SEQ ID NO: 107088 - protein, 179 aa, Setaria italica
  Transcript Sequence Number=SeqID_41114
  Gene Ontology: Cellular component=integral to membrane
  Homolog annotation: Hit_ID=B6TMF2; Match level="QueryCoverage=89%, HitCoverage=89%, E-value=1e-71, Identity=80%"; Hit description =Transmembrane protein 18
MAEEAAAAGSSVVGRAVEEVRSALNEHADVVAELFGRVSSELRTGFAPAVDSFIGFFHAVDWKEPWLISMLTFHAILLLVTIISRRNVNFQLILSALTFSGVFLAERINTFLGQNWKSFSSQNYFDSQGLFISVVWSGPLLLITILILVNTLVTLCMLIVRWKRAELRHRARQARNKQD

SEQ ID NO: 107089 - protein, 172 aa, Setaria italica
  Transcript Sequence Number=SeqID_41115
CITKEANLICEVLSRGAKPMVYLIIQSTEIRMCTLSLMYHQLYGVAAAAAMVGIMKETDKICDWMSKNNKPFDPFDMDLDNDFELGRQVRFRTLHLMISILEKSPFSVPAAAGHKVVKEKSFSGNVPSNDENNITRAEAANTTGDNLQDQEKITVADISKKRRMEDTNKEEK

SEQ ID NO: 107090 - protein, 55 aa, Setaria italica
  Transcript Sequence Number=SeqID_41116
FFGWLVRRSLACTCEPGSGYAVDCTCQDVQQWRWHTRTTGFRLNLTTHNPCQRLE

SEQ ID NO: 107091 - protein, 140 aa, Setaria italica
  Transcript Sequence Number=SeqID_41117
  Gene Ontology: Mol. function=nucleotide binding; Biological process =defense response
  Homolog annotation: Hit_ID=C3SBK4; Match level="QueryCoverage=99%, HitCoverage=13%, E-value=9e-21, Identity=41%"; Hit description=Pi5-2
VFFLEEPNKSSGRGLNYASASKVLNMHNLVHEFARYVTSHDLFIMDGERKNNDIMEICTSRYAILTRCHDESKIRKVFLTSVRAICLKDCMGAKLIENILSSLKHLQVLDLSRCSFLEIPSSIYQLTHLRYIDVSNSLVK

SEQ ID NO: 107092 - protein, 124 aa, Setaria italica
  Transcript Sequence Number=SeqID_41118
  Homolog annotation: Hit_ID=C3SBK4; Match level="QueryCoverage=95%, HitCoverage=11%, E-value=9e-15, Identity=38%"; Hit description=Pi5-2
KGKKYIQELLSVFFLEEPNKSSGRGLNYASASKVLNMHNLVHEFARYVTSHDLFIMDGERKNNDIMEICTSRYAILTRCHDESKIRKVFLTSVRAICLKDCMGAKLIENILSSLKHLQGVWIFT

SEQ ID NO: 107093 - protein, 169 aa, Setaria italica
  Transcript Sequence Number=SeqID_41119
  Gene Ontology: Mol. function=sucrose-phosphate synthase activity; Cellular component=plasma membrane; Biological process=sucrose metabolic process
  Homolog annotation: Hit_ID=Q6EZE8; Match level="QueryCoverage=99%, HitCoverage=15%, E-value=6e-68, Identity=77%"; Hit description =Sucrose-phosphate synthase
TTVDPRRLGKADGAQEAGLAVDDTACSVHCHAYAAAGASKVKKVDSLRQSLRMRGFRCNLVYTRACTRLNVIPLSASRPRALRYLSIQWGIDLSKVAVLVGDKGDTDRERLLPGLHKTLVLPGLVTHGSEELLRDEDGLLTEDVVAMDSPNIVILAGDQATAADILKAI

SEQ ID NO: 107094 - protein, 108 aa, Setaria italica
  Transcript Sequence Number=SeqID_41120
  Gene Ontology: Mol. function=protein disulfide oxidoreductase activity; Cellular component=chloroplast; Biological process =electron transport chain
  Homolog annotation: Hit_ID=Q6K953; Match level="QueryCoverage=81%, HitCoverage=66%, E-value=9e-38, Identity=85%"; Hit description =Glutaredoxin-C4, chloroplastic
  Pfam annotation: Domain name=Glutaredoxin; Domain location=42-104; Score=106.4; E_value=9.9e-29; Accession=PF00462.16; Description =Glutaredoxin
  Subcellular localization annotation: CTP_CleavageSite=37; ConfidenceScore=5.15e-01
KSHGQTSSSSPAPATSQRPTEETSKPPMALEKAKEIVASSPVVVFSKTYCPFCTRVKQLLAQLGANYKAVELDVESDGSDLQSALAEWTGQKTVPNVFIKGQHIGGCD

SEQ ID NO: 107095 - protein, 190 aa, Setaria italica
  misc_feature (169)..(169): Xaa can be any naturally occurring amino acid
  Transcript Sequence Number=SeqID_41121
  Gene Ontology: Cellular component=intracellular
DIETSQKTSTDPISGIKSASILGTKVAQCLAQRAEYNSPLQKSGIFDWADNPNNDECTAIMISRKKQRIHANTQVKHLASQRYCGNGSSTRAGFISDCIGGVSGVDSFKKPEPVGSTDDLYEAYDIGPCTQMAAEAMEALSNASTVNYVVRDEAHPESSILGTNLGKEXKADKICSVESQIQKRIVGSSS

SEQ ID NO: 107096 - protein, 69 aa, Setaria italica
  Transcript Sequence Number=SeqID_41122
  Gene Ontology: Mol. function=peptidyl-prolyl cis-trans isomerase activity; Cellular component=plasma membrane; Biological process =protein folding
  Homolog annotation: Hit_ID=Q7XZG9; Match level="QueryCoverage=62%, HitCoverage=21%, E-value=2e-16, Identity=95%"; Hit description =Peptidyl-prolyl cis-trans isomerase
  Subcellular localization annotation: CTP_CleavageSite=10; ConfidenceScore=5.15e-01
MASTGGAAISAAAGATPPPPNPKNPVVFFDVTIGSIPAGRIKMELFADIAPKTAENFRQFCTGEHRKNW

SEQ ID NO: 107097 - protein, 202 aa, Setaria italica
  Transcript Sequence Number=SeqID_41123
  Gene Ontology: Mol. function=peptidyl-prolyl cis-trans isomerase activity; Cellular component=plasma membrane; Biological process =protein folding
  Homolog annotation: Hit_ID=Q7XZG9; Match level="QueryCoverage=89%, HitCoverage=88%, E-value=2e-97, Identity=92%"; Hit description =Peptidyl-prolyl cis-trans isomerase
  Pfam annotation: Domain name=Pro_isomerase; Domain location=36-202; Score=316.0; E_value=7.7e-92; Accession=PF00160.13; Description =Cyclophilin type peptidyl-prolyl cis-tr
  Subcellular localization annotation: CTP_CleavageSite=17; ConfidenceScore=5.08e-01
MASTGGAAISAGPTPPSATAAAVEWHQRPPNPKNPVVFFDVTIGSIPAGRIKMELFADIAPKTAENFRQFCTGEHRKNGLPQGYKGCQFHRVIKDFMIQGGDFLKNDGTGCTSIYGTKFDDENFIAKHTGPGLLSLANSGPNSNGSQFFITCAKCDWLDNKHVVFGRVLGDGLLVVRKIENVATGPNNRPKLACIISECGEM

SEQ ID NO: 107098 - protein, 107 aa, Setaria italica
  Transcript Sequence Number=SeqID_41124
  Gene Ontology: Mol. function=hydrolase activity, hydrolyzing O -glycosyl compounds; Biological process=carbohydrate metabolic process
  Homolog annotation: Hit_ID=B9SGZ4; Match level="QueryCoverage=89%, HitCoverage=22%, E-value=2e-29, Identity=61%"; Hit description =Glucan endo-1,3-beta-glucosidase, putative
  Pfam annotation: Domain name=X8; Domain location=19-104; Score=178.0; E_value=2.8e-50; Accession=PF07983.5; Description=X8 domain
RQIVPQPPWSGEGGNSGGLWCVAKPTVPEDKLQEAMDYACSQDGVDCQEIAAGGSCFYPDNIASHASYAFNSYWQKMKQIGGSCNFGGTALLINSDPSYLQCRFMLS

SEQ ID NO: 107099 - protein, 72 aa, Setaria italica
  misc_feature (56)..(56): Xaa can be any naturally occurring amino acid
  Transcript Sequence Number=SeqID_41125
CRSLVELRLGAAFRTCTSPPPAAPDPFPLPPADVPTAAELEHGCSSFFSRSCRGKXLGRRPPPPSPATSMVN

SEQ ID NO: 107100 - protein, 324 aa, Setaria italica
  Transcript Sequence Number=SeqID_41126
  Gene Ontology: Mol. function=hydrolase activity
  Homolog annotation: Hit_ID=B6T0Y0; Match level="QueryCoverage=100%, HitCoverage=80%, E-value=1e-175, Identity=91%"; Hit description =Ser/Thr protein phosphatase family
  Pfam annotation: Domain name=Metallophos; Domain location=1-244; Score=18.4; E_value=0.024; Accession=PF00149.20; Description =Calcineurin-like phosphoesterase
VFVVSDLHTDYPENMDWVRRLPAEVGAGEGPGVDALVVAGDVAETRDNFARTMEVLRDRFGAVFYVPGNHDLWLRREGGRYMDSLEKLTALLDACSELGVDTGPRMIGDLGIIPLFSWYHKSFDKEKDVNSVRVPSLEMACKDFHACKWPSDLANDDESLALYFDKLNDKNHDAIEEVKNSSKQILTFSHFVPRQELCPEKRMLYYPYLPKVIGSDFLERRLRDIHSNRKDGSACHVFGHTHFCWDSVVDGIRYVQAPLAYPRERKRRMNGEGWLPFCVYRDGFNPEIYPALWSDYYNKNKREPENTQLAPWVARHFAKYHKFH

SEQ ID NO: 107101 - protein, 134 aa, Setaria italica
  Transcript Sequence Number=SeqID_41127
  Subcellular localization annotation: CTP_CleavageSite=49; ConfidenceScore=5.16e-01
ARPATNHNQPVRPAFFRSGCTPHVFNGTNLTNRIRMDQYHPSRLDFDPMSARRPSDGESCPETRLGPVFRTSGTLTCKYVYSDSASSSYNFAIRYTLGWVVLCGLLADGGIGNWDNRTSCLYWLCTNCSQVHYI

SEQ ID NO: 107102 - protein, 68 aa, Setaria italica
  Transcript Sequence Number=SeqID_41128
  Gene Ontology: Mol. function=nucleotide binding; Biological process =defense response
  Homolog annotation: Hit_ID=A1Z0K0; Match level="QueryCoverage=92%, HitCoverage=7%, E-value=7e-24, Identity=80%"; Hit description=Non -TIR-NBS-LRR type resistance protein
GFGKYGALPCIEGLYIVSLVDLDQVPHGIESLHSLKKLWLVNLHRGFLTQWNKSGMHHKMQHVVEIRV

SEQ ID NO: 107103 - protein, 162 aa, Setaria italica
  Transcript Sequence Number=SeqID_41129
  Gene Ontology: Mol. function=drug transporter activity; Cellular component=membrane; Biological process=multidrug transport
  Homolog annotation: Hit_ID=B7ZGM0; Match level="QueryCoverage=97%, HitCoverage=33%, E-value=2e-41, Identity=53%"; Hit description =Putative MATE transporter
  Pfam annotation: Domain name=MatE; Domain location=17-161; Score =86.9; E_value=7.2e-23; Accession=PF01554.10; Description=MatE
  Subcellular localization annotation: CTP_CleavageSite=53; ConfidenceScore=5.17e-01
TSQWAREAGRLGYLALPMVVVSLSQYAVQVSSNMMVGHLPGVLPLSSAAIATSLANVSGFSLLYGMASALETLCGQAYGAKQYRKVGADTYRAVVTLLFVCIPLSLLWVFMDKILVLIGQDPMISHGAGRYLIWLIPGLFASAVIQPVTKFLQSQSLIYPLL

SEQ ID NO: 107104 - protein, 187 aa, Setaria italica
  misc_feature (162)..(162): Xaa can be any naturally occurring amino acid
  Transcript Sequence Number=SeqID_41130
CKSIDIYDQDIHVRSLRTLWYPSSFSFVHCSPQVNESSSLLAIAEGSQLSIWDLRMNNNGGCVQRISGSIGDTIYSVCSSPSGPIAIGGTDRAVTIYDPRRWSALSRWVGCSKYEITGLSFSSVDQSFIYVQGVDYEITCGRWKESERAFSFRGDSNWLGFXKCANTGVVAGWCESGSIFIVDAMQL

SEQ ID NO: 107105 - protein, 211 aa, Setaria italica
  Transcript Sequence Number=SeqID_41131
  Gene Ontology: Mol. function=nucleotide binding; Biological process =defense response
  Homolog annotation: Hit_ID=Q2R4S9; Match level="QueryCoverage=100%, HitCoverage=20%, E-value=3e-72, Identity=62%"; Hit description=NB -ARC domain containing protein
QMTPAGCANLCRYMGEHVENEETLARLKHVLLQNYSSLPGHALKACLLYLSIFPSGHPIKRKCLIRRWLAEGFVEADHRRSAMDVSQRTTTALTDRSIIKPIGISNNTEAKTCQTHGMMLEFILQKSIRENFITSLYDQAGLPDKIRRLSLHRKGATRDKINSNVDFSLVRSLTIFGEAVMHIVEFSKYELLRVLDLEECEALKDEHVKKL

SEQ ID NO: 107106 - protein, 301 aa, Setaria italica
  Transcript Sequence Number=SeqID_41132
  Gene Ontology: Cellular component=vacuole
  Homolog annotation: Hit_ID=A8Y5V3; Match level="QueryCoverage=98%, HitCoverage=79%, E-value=2e-84, Identity=52%"; Hit description=Alpha galactosidase
  Pfam annotation: Domain name=DUF231; Domain location=139-297; Score =231.8; E_value=1.7e-66; Accession=PF03005.7; Description=Arabidopsis proteins of unknown function
FACARFGRPDKMYLKYRWQLDPPCAQPRFDGLALLGMWRGKTVMFVGDSLALNQYESLLCMLHAAAPGARTTVSPASGKIDPSYTVRFEDYNVTVVYYLTHYLVDLVAEKSGRVLKLDAIDQATNWLGADVLVFDSWHWWPRSGPTQPWDYIQEGNTVVKDMDRTRAFTKALHTWATWVDANLLHTDTKVFFQGISPSHYRGQDWGAPAKKTCMGETRPLNGTAPYPGGPIPQQAILRSVLAGMAKPVYLLDFTYLSQLRKDAHPTKYDGGVFAGDCTHWCVAGLPDTWNVLFYAALTGQF

SEQ ID NO: 107107 - protein, 105 aa, Setaria italica
  Transcript Sequence Number=SeqID_41133
IESDGILKDLADKASNIDAEMQLLEGEYKKDLLDHDKVHQELADVQAKRALMEAVMGEMKQLQELGGRAAELEKVHASLTDELQRRYTCPGCGVNNMPRLEEAAN

SEQ ID NO: 107108 - protein, 98 aa, Setaria italica
  Transcript Sequence Number=SeqID_41134
FFSVFLAFKLYLYCLLYYFPFAANEQSPEQQNPLGARRSSAPPLRATESPAARSKESCNSTKWRRDPPANPKPTQQDRRRERDPTPDCLEANSQTHQT

SEQ ID NO: 107109 - protein, 92 aa, Setaria italica
  misc_feature (85)..(85): Xaa can be any naturally occurring amino acid
  Transcript Sequence Number=SeqID_41135
  Gene Ontology: Mol. function=protein serine/threonine kinase activity; Biological process=protein amino acid phosphorylation
  Homolog annotation: Hit_ID=B6U2B7; Match level="QueryCoverage=82%, HitCoverage=8%, E-value=4e-25, Identity=71%"; Hit description =Serine/threonine-protein kinase receptor
  Pfam annotation: Domain name=S_locus_glycop; Domain location=15-92; Score=12.6; E_value=5.1e-06; Accession=PF00954.12; Description=S -locus glycoprotein family
SPGPVVAAMDTSGDPEVFVWNGPAKVWRSGPWDGVQFTGVPDTITYKPLGFSFRFVNTPQEVTYSFQVRDASIVTRLALNGTGAXAGLMQRW

SEQ ID NO: 107110 - protein, 79 aa, Setaria italica
  Transcript Sequence Number=SeqID_41136
DKLRRILKRSNIPFTKPLLPFNILQDFQYIAGQHIKRRNILHARLPFLFQHMSAEGYFGPFTYFITSWNYKLSYIWEKI

SEQ ID NO: 107111 - protein, 76 aa, Setaria italica
  Transcript Sequence Number=SeqID_41137
MRVGEEEVFDRPSSSQQQTLCHRCRSAVQHSNIASIESTCTRVESRMSYARLGFSCMVEKFRRGEKCSRGRDGISA

SEQ ID NO: 107112 - protein, 56 aa, Setaria italica
  Transcript Sequence Number=SeqID_41138
LVSSHSFTFQPADLHDVAFFMTSWGWYLSPRNLGVKSSVNFVAAQVCWLHASAWRK

SEQ ID NO: 107113 - protein, 421 aa, Setaria italica
  Transcript Sequence Number=SeqID_41139
  Gene Ontology: Cellular component=ribonucleoprotein complex; Biological process=ribosome biogenesis
  Homolog annotation: Hit_ID=B6TTU7; Match level="QueryCoverage=100%, HitCoverage=93%, E-value=0.0, Identity=94%"; Hit description=Protein SOF1
  Pfam annotation: Domain name=Sof1; Domain location=361-421; Score =79.2; E_value=1.5e-20; Accession=PF04158.6; Description=Sof1-like domain
  Pfam annotation: Domain name=WD40; Domain location=193-232; Score =26.1; E_value=0.00014; Accession=PF00400.24; Description=WD domain, G-beta repeat
  Pfam annotation: Domain name=WD40; Domain location=279-317; Score =39.0; E_value=1.9e-08; Accession=PF00400.24; Description=WD domain, G-beta repeat
  Pfam annotation: Domain name=WD40; Domain location=322-360; Score =19.3; E_value=0.016; Accession=PF00400.24; Description=WD domain, G -beta repeat
  Pfam annotation: Domain name=WD40; Domain location=56-95; Score=32.3; E_value=1.9e-06; Accession=PF00400.24; Description=WD domain, G-beta repeat
  Pfam annotation: Domain name=WD40; Domain location=99-137; Score =37.9; E_value=4e-08; Accession=PF00400.24; Description=WD domain, G -beta repeat
  Pfam module annotation: Pfam domain module=Sof1::WD40::WD40::WD40::WD4 0::WD40; Domain location=361-421::193-232::279-317::322-360::56 -95::99-137
MRVKVISRSTDEFTRDRSQDLQKVFRNYDPGLRSQEKAVEYTRALNAAKLEKIFAKPFIGAMDGHIDAVSCMAKNPNHLKAIFSGSMDGDIRLWDIAARKTVCQFPGHQGAVRGLTASTEGDLLVSCGVDCTVRLWKVPVLKMVDTSDHIGDTSQPSAVYTWKHAFWGADHQWDGNLFATVGAQVDIWDPNRSEPVNSFEWGKDTVLSVRFDPGDCNILITSASDRSLTLYDLRMSSPARKLIMKTRCNSVCWNPREPMNFTAANEDTNCYSFDARRLEEAKIVHKGHVSAVMDIDYSPTGREFVTGSYDRTVRIFNYLGDHSREIYHTKRMQRVFCVKYTYDGTYLVSGSDDTNLRLWKSKASEQLGVLLPRERKKQEYMDAVKERYKHLPEVKRISRHRHLPKPIYKAANMRRTMIEAE

SEQ ID NO: 107114 - protein, 160 aa, Setaria italica
  Transcript Sequence Number=SeqID_41140
  Gene Ontology: Cellular component=ribonucleoprotein complex; Biological process=ribosome biogenesis
  Homolog annotation: Hit_ID=B6TTU7; Match level="QueryCoverage=93%, HitCoverage=33%, E-value=1e-73, Identity=88%"; Hit description =Protein SOF1
  Pfam annotation: Domain name=Sof1; Domain location=69-156; Score =164.4; E_value=3.3e-46; Accession=PF04158.6; Description=Sof1-like domain
  Pfam annotation: Domain name=WD40; Domain location=30-68; Score=19.3; E_value=0.016; Accession=PF00400.24; Description=WD domain, G-beta repeat
  Pfam module annotation: Pfam domain module=Sof1::WD40; Domain location=69-156::30-68
SISITAESVLQVVTGSYDRTVRIFNYLGDHSREIYHTKRMQRVFCVKYTYDGTYLVSGSDDTNLRLWKSKASEQLGVLLPRERKKQEYMDAVKERYKHLPEVKRIVRHRHLPKPIYKAANMRRTMIEAENRKEERRRKHSAPGSMPVQPFRKRRIIKEVE

SEQ ID NO: 107115 - protein, 142 aa, Setaria italica
  Transcript Sequence Number=SeqID_41141
  Gene Ontology: Cellular component=anchored to membrane
  Homolog annotation: Hit_ID=Q6Z4G8; Match level="QueryCoverage=95%, HitCoverage=29%, E-value=1e-65, Identity=89%"; Hit description=COBRA- like protein 1
  Subcellular localization annotation: CTP_CleavageSite=38; ConfidenceScore=5.44e-01
VKPTKFISQDGRRSTQAHMTWNVTCTYSQFVAQRSPTCCVSLSSFYNDTIVNCPTCSCGCQNNSTEPGSCVEGNSPYLASVVNDPNNKNNLAPLVQCTSHMCPIRVHWHVKVNYKEYWRVKITVSNFNYRMNYSQLEPSFVV

SEQ ID NO: 107116 - protein, 168 aa, Setaria italica
  Transcript Sequence Number=SeqID_41142
  Gene Ontology: Cellular component=anchored to membrane
  Homolog annotation: Hit_ID=Q6Z4G8; Match level="QueryCoverage=85%, HitCoverage=32%, E-value=9e-77, Identity=91%"; Hit description=COBRA- like protein 1
VVYFLHMCPIRVHWHVKVNYKEYWRVKITVSNFNYRMNYSQWNLVAQHPNFDNLTTIFSFNYKSLNPYGVINDTAMLWGIKYYNDLLMTAGPDGNVQSELLFRKEPSTFTFQKGWAFPRRVYFNGDNCVMPPPDAYPWLPNASPRQSASLLLTFVAVWAALAVLLAHA

SEQ ID NO: 107117 - protein, 243 aa, Setaria italica
  misc_feature (38)..(38): Xaa can be any naturally occurring amino acid
  misc_feature (99)..(99): Xaa can be any naturally occurring amino acid
  Transcript Sequence Number=SeqID_41143
  Gene Ontology: Mol. function=aspartic-type endopeptidase activity; Biological process=DNA integration
  Homolog annotation: Hit_ID=O23864; Match level="QueryCoverage=98%, HitCoverage=18%, E-value=1e-118, Identity=83%"; Hit description =Polyprotein
  Pfam annotation: Domain name=rve; Domain location=5-165; Score=182.2; E_value=1.4e-51; Accession=PF00665.18; Description=Integrase core domain
RIPERAVDLLELVHSDVCGPMSTTARGGFQYFITFTDXFSRYGYVYLMRHKSETFEKFKEFQNEVENQRGKKIKALRSDRGGEYLSHEFSNHLKSCGIXPQLTPPGTPQRNGVSERRNRTLLDMVRSMMSQSDLPLSFWGYALETAAFTLNRVPSKSVVKTPYEMWTGKVPSLSFLKIWGCEVFVKRLQSDKITPKSDKCIFVGYPKETLGYYFYNRSEGKVFVTRNGVFLEKEFLKGEKSGK

SEQ ID NO: 107118 - protein, 87 aa, Setaria italica
  Transcript Sequence Number=SeqID_41144
ESIVCTLQLGISGYCLSNVKGQAGMQAALPNHRRKRTQLDRKYTTHVQSSSAASKVSDRKGHTHTNHQLNPAIGEHFLRLNKFNLAY

SEQ ID NO: 107119 - protein, 95 aa, Setaria italica
  Transcript Sequence Number=SeqID_41145
  Gene Ontology: Mol. function=sequence-specific DNA binding; Cellular component=nucleus; Biological process=regulation of transcription, DNA-dependent
  Homolog annotation: Hit_ID=A8Y7W2; Match level="QueryCoverage=98%, HitCoverage=17%, E-value=6e-22, Identity=62%"; Hit description =Putative wuschel homeobox protein
  Subcellular localization annotation: CTP_CleavageSite=15; ConfidenceScore=5.30e-01
MASSFNNRHWPSMFRSKHAAEQWQPQPDISSSPPSSLLSGGGNTTNTGGSCLNKHPSSGYAGGEERTPDPKPRWNPRPEQIRILEAIFNSGMINP

SEQ ID NO: 107120 - protein, 107 aa, Setaria italica
  Transcript Sequence Number=SeqID_41146
  Gene Ontology: Cellular component=integral to membrane
  Homolog annotation: Hit_ID=Q7X648; Match level="QueryCoverage=91%, HitCoverage=26%, E-value=6e-50, Identity=95%"; Hit description =OSJNBa0083D01.22 protein
  Pfam annotation: Domain name=DUF2499; Domain location=7-96; Score =200.8; E_value=3.6e-57; Accession=PF10693.1; Description=Protein of unknown function (DUF2499)
LSEPANALSLPTWAVHVSSVAEWVTAMWLVWDYGERTGIKGWKGLSWGMVPLLGGAMCACTWHFFYNSESLEVLVALQGALTVIGNMTMCIAAYRIFKASQESSKTS

SEQ ID NO: 107121 - protein, 65 aa, Setaria italica
  misc_feature (42)..(65): Xaa can be any naturally occurring amino acid
  Transcript Sequence Number=SeqID_41147
FLFSRVSSDTRVLNLQTGYSASGSFVSLLSFLIKSGGYLEIXXXXXXXXXXXXXXXXXXXXXXXX

SEQ ID NO: 107122 - protein, 168 aa, Setaria italica
  Transcript Sequence Number=SeqID_41148
NLGPLRRRRGEAPKSLLVRSFFLAAMSSMSRVSSDAFVDLEKGATGAKASSDASVDLEKGATGVKAAATATEEEEQLAVVDRPAMDPRLAMCIKVTLDVWAVLYVFYYIGMTTFMVRHDKWDSWPAVLIQSTVLIWAIWMAPKMKYDTKPTRGSDGSDLSTGLIAYKK

SEQ ID NO: 107123 - protein, 40 aa, Setaria italica
  Transcript Sequence Number=SeqID_41149
IIKITRTNQRVSLLHHKEYCYVRMGLRLYHTYVTVFFMVQ

SEQ ID NO: 107124 - protein, 54 aa, Setaria italica
  Transcript Sequence Number=SeqID_41150
  Gene Ontology: Mol. function=nucleic acid binding; Cellular component= cytoplasm; Biological process=stem cell maintenance
  Homolog annotation: Hit_ID=Q69VD5; Match level="QueryCoverage=88%, HitCoverage=5%, E-value=3e-17, Identity=78%"; Hit description =Protein argonaute PNH1
LCSHAGIKGTSRPAHYHVLWDENNFSADELQTLTNNLCYRACAPCISVTEVVGK

SEQ ID NO: 107125 - protein, 143 aa, Setaria italica
  Transcript Sequence Number=SeqID_41151
  Gene Ontology: Mol. function=nucleic acid binding; Cellular component= cytoplasm; Biological process=multicellular organismal development
  Homolog annotation: Hit_ID=Q6K972; Match level="QueryCoverage=97%, HitCoverage=14%, E-value=6e-51, Identity=70%"; Hit description =Protein argonaute 1C
  Subcellular localization annotation: CTP_CleavageSite=39; ConfidenceScore=5.21e-01
MSRLSTLHFCVFFALCISFVSLKLTSCNLAKVGGRNTVLVDAVSRRIPLVTDRPTIIFGADVTHPHPGEDSSPSIAAVVASQDWPEVTKYAGLVSAQAHRQELIEDLYKVWQDPQRGTVSGGMDKGSYLYPYKKSTGRSPANN

SEQ ID NO: 107126 - protein, 1023 aa, Setaria italica
  Transcript Sequence Number=SeqID_41152
  Gene Ontology: Mol. function=nucleic acid binding; Cellular component= cytoplasm; Biological process=multicellular organismal development
  Homolog annotation: Hit_ID=Q6K972; Match level="QueryCoverage=90%, HitCoverage=90%, E-value=0.0, Identity=88%"; Hit description=Protein argonaute 1C
  Pfam annotation: Domain name=DUF1785; Domain location=309-361; Score =109.6; E_value=1e-29; Accession=PF08699.2; Description=Domain of unknown function (DUF1785)
  Pfam annotation: Domain name=PAZ; Domain location=362-499; Score =188.3; E_value=2.2e-53; Accession=PF02170.14; Description=PAZ domain
  Pfam annotation: Domain name=Piwi; Domain location=652-973; Score =521.3; E_value=1.2e-153; Accession=PF02171.9; Description=Piwi domain
  Pfam module annotation: Pfam domain module=DUF1785::PAZ::Piwi; Domain location=309-361::362-499::652-973
MGSRRGRQHPGVGEGSQPPHPQPAGRGGGRGGNQGRGGGRSARADEAQQQPPPPRGEHPGRGHARGGTRPLPQQYPRAARPGQGAGPSATGSSSPLAPELRQAMEAPHELAQASPLHAGPSQSQPQIEEHKLAEASAGSEIAPAIPSSSKSVRFPLRPGKGSVGTRCLVKANHFFAQLPDRDLHQYDVSITPEVTSRILSRAIIKELVNLHRQSHLGGRLPAYDGRKSLYTAGALPFTSQEFHITLLDDDDGSGSERRRRSFKVVIKFAARADLHRLEMFLAGRHAEAPQEALQVLDIVLRELPSARYAPFGRSFFSPVLGRRQPLGDGLESWRGFYQSIRPTQMGLSLNIDMSATAFIEPLPVIEFVAQLLNSDIHSRPLADAERVKIKKALRGVKVEVTHRGNMRRKYRISGLTTQATRELTFPVDEGGTMKSVVQYFQETYGFAIQHTYLPCLQVGNQQRPNYLPMEVCKIVEGQRYSKRLNQNQIRALLEETCQHPRDRERDIIRMVKHNAYEKDDYAQEFGIKISDRLASVEARILPAPRLKYNETGREKDCLPRVGQWNMMNKKMVNGGKVRSWICVNFARNVQESVVRGFCHELALMCQASGMDFSREPVLPPLYARPDQVERALKARYHDAMNVLGPQRRELDLLIGILPDNNGSLYGDLKRVCEIDLGIVSQCCCTKQVFKMNKQILANLALKINVKVGGRNTVLVDAVSRRIPLVTDRPTIIFGADVTHPHPGEDSSPSIAAVVASQDWPEVTKYAGLVSAQAHRQELIEDLYKVWQDPQRGTVSGGMIRDLLISFKKSTGEKPQRIIFYRDGVSEGQFYQVLLYELHAIRKACASLEANYQPKVTFVVVQKRHHTRLFAHNHNDQNSIDRSGNILPGTVVDSKICHPTEFDFYLCSHAGIKGTSRPAHYHVLWDENNFSADELQTLTNNLCYTYARCTRSVSIVPPAYYAHLAAFRARFYMEPETSDSGSVASGPAGRGQQPTSRSARPPGGAAVRPLPALKDNVKRVMFYC

SEQ ID NO: 107127 - protein, 47 aa, Setaria italica
  Transcript Sequence Number=SeqID_41153
  Gene Ontology: Mol. function=hydrolase activity; Biological process =metabolic process
  Homolog annotation: Hit_ID=B6U9V9; Match level="QueryCoverage=95%, HitCoverage=12%, E-value=2e-16, Identity=93%"; Hit description =Hsr203J
PAEVEVLINRGMSHSFYLNKYAVDMDPVTGERARELIDAIKSFISRH

SEQ ID NO: 107128 - protein, 73 aa, Setaria italica
  Transcript Sequence Number=SeqID_41154
PHVNLQACIITAWMARSISLLAQTTLTNGKGSFQLCTNQRCCRKGSNEQLYHYHARQKRNWGGLPFGFWTSTT

SEQ ID NO: 107129 - protein, 176 aa, Setaria italica
  misc_feature (54)..(54): Xaa can be any naturally occurring amino acid
  Transcript Sequence Number=SeqID_41155
LARHPNEEDCPQFERVSIASRHLKHLILSESFLSDRMLRQLSSQCPCLEVLDLXGCYLRGHEISSASLRSLTIVKCSIQENLTIAAPNLLSLCCVKLYFRVPLFQNMGSIATATIVLDDSLHVGYEHEPKLTHESAHDGGSDSDCSLEDEPKYCSDSCSDASTCEYNEVLSDNYSH

SEQ ID NO: 107130 - protein, 75 aa, Setaria italica
  Transcript Sequence Number=SeqID_41156
SQMHGSWTAGTRGLTGNKQFPLEKIEVEQGGYSSNLRSFFIMTPVVLLHQVAASESYFIRIRNICANQCPIWILL

SEQ ID NO: 107131 - protein, 91 aa, Setaria italica
  Transcript Sequence Number=SeqID_41157
RESIMHIIWETDRWLQKYCATNPGNIKDMETNVDTSQSPNDAVLDHEALTLNFTKISSLIKLIRLAFAQIVFRKSKNICNDIDWFLCTEQN

SEQ ID NO: 107132 - protein, 72 aa, Setaria italica
  Transcript Sequence Number=SeqID_41158
NEVLPPSQIVGCFGISRFIAFAMHIYTMSRYIVQAMNLEMPKRPTNWDGWSITYPTHISNQRFLVNGHMICG

SEQ ID NO: 107133 - protein, 77 aa, Setaria italica
  Transcript Sequence Number=SeqID_41159
YPLCALLCRHAFVECTRSVCILDRECSASLGFRLKCKTVYLYIDIGSCKCILVCLNGVGEKKQMGNVLLSIMLFYLK

SEQ ID NO: 107134 - protein, 98 aa, Setaria italica
  Transcript Sequence Number=SeqID_41160
  Subcellular localization annotation: CTP_CleavageSite=74; ConfidenceScore=5.74e-01
GPEPNKDSGASATSAPSSWSSPPASASPAGCHCRSSSSAPWKPKAFSTGGTSPAKKSAASSTASRPSSSRPSTRAARATNPATRSSTSCPRRSGRSCS

SEQ ID NO: 107135 - protein, 167 aa, Setaria italica
  Transcript Sequence Number=SeqID_41161
LGHKVQGCSDHCSCSGLSEISDWFQRCYLDMSFDSKSSTDIALSFLALYMEEDDMLFSILLQLFDAPHIFLKIDSMNSTELIGAKLFSSIFDPVHLFHLLLLLLHYDHMVLVDYLISKDVGVHCAQYLLRCLRLVSQSWHAFVDDSMYLTKIEKIDCKKDRRNLPRE

SEQ ID NO: 107136 - protein, 425 aa, Setaria italica
  misc_feature (194)..(194): Xaa can be any naturally occurring amino acid
  Transcript Sequence Number=SeqID_41162
  Gene Ontology: Cellular component=plasma membrane
  Homolog annotation: Hit_ID=B6U8U8; Match level="QueryCoverage=100%, HitCoverage=71%, E-value=1e-173, Identity=73%"; Hit description =Nodulin-like protein
  Pfam annotation: Domain name=Nodulin-like; Domain location=4-92; Score=-131.2; E_value=0.0029; Accession=PF06813.5; Description =Nodulin-like
PDDAALITHVDLGPTMVVIGLVFIVRPVGGHRQVRPSDGTSFTFVYSICLLLAAYLMGVMLLEDLVDLSQSMTVLLTIILIMFLLVPIVIPVLLSFFSDDDETLYALLLPSPRKEEASASTSSEEQEEVILSEVEDEKPKDVDLLPASERQKRIAELQARLVQAAAVGAVRVKRRRGPRRGEDFTLMQALIKAXFWLLFFSLLLGSGSGLTVIDNLGQMSQSLGYEETHIFVSMISIWNFLGRIGGGYFSEIIVKDYAYPRAIALAIAQVLMAIGHFNFAMAWPGTMYIGTLLVGIGYGAHWAIVPAAASELFGVKNFGALYNFLTVANPAGSLVFSGIIASGIYDAEAAKQAQQRHNSTLLTMPARVVTMISEAAPALKCEGAICFFLSSLIMSGFCIIAVVLSLILVYRTKIVYTNLYGKPRT

SEQ ID NO: 107137 - protein, 48 aa, Setaria italica
  Transcript Sequence Number=SeqID_41163
LQARDSTFTAHKEYVKLKQMPCYNLMHGSPEQALPTPERSGPGHKTAT

SEQ ID NO: 107138 - protein, 135 aa, Setaria italica
  Transcript Sequence Number=SeqID_41164
  Gene Ontology: Mol. function=protein tyrosine phosphatase activity; Biological process=dephosphorylation
  Homolog annotation: Hit_ID=B9RYC0; Match level="QueryCoverage=91%, HitCoverage=20%, E-value=2e-64, Identity=87%"; Hit description =Phosphoprotein phosphatase, putative
VIKVVTNLLFLERLYDASLFEGKVACFPFDDHNCPPIQLVISFCHSAYSWLKEDIENVVVVHCKAGKARTGLMISSLLLFLKFFPTAEESIEYYNQKRCVDGKGLILPSQIRYVKYFERILTYFNGESQPPRRSL

SEQ ID NO: 107139 - protein, 649 aa, Setaria italica
  Transcript Sequence Number=SeqID_41165
  Gene Ontology: Mol. function=protein tyrosine phosphatase activity; Cellular component=cytoplasm; Biological process=dephosphorylation
  Homolog annotation: Hit_ID=B9RYC0; Match level="QueryCoverage=71%, HitCoverage=76%, E-value=0.0, Identity=77%"; Hit description =Phosphoprotein phosphatase, putative
  Pfam annotation: Domain name=PTEN_C2; Domain location=355-483; Score =111.3; E_value=3.2e-30; Accession=PF10409.1; Description=C2 domain of PTEN tumour-suppressor pr
  Subcellular localization annotation: CTP_CleavageSite=70; ConfidenceScore=5.18e-01
MEEQQVKPSDLPPTNSDNQDSAATPPVTTVDPVRPAASTDSSSQVAGVDPAVISAPTAAPAKDAAGREAPASMFSTSGLSSWAKNLKIPQPSSGQESPTGKNTFARFTSGFGLRLSPKAAQQDEIAEGSTSPTTGQPGVFGSLTKGIVDSSKNAVKAVQVKARHMVSQNKRRYQEGGFDLDMTYITENIIAMGFPAGDLSSGLFGYFEGFYRNHMEEVIRFFEMHHKGKYKVYNLCSERLYDASLFEGKVACFPFDDHNCPPIQLVISFCHSAYSWLKEDIENVVVVHCKAGKARTGLMISSLLLFLKFFPTAEESIEYYNQKRCVDGKGLILPSQIRYVKYFERILTYFNGESQPPRRCMLRGFRLHRCPYWIRPSITVSNHNGVLFSTKKHPRTKELMPEDFWFSAPKKGIMVFALPGEPGLAEVSGDFKIQFHDRQGDFYCWLNTTMMENRVTLNPTDLDDFDKRKLPSPGFQVEVVLVDYDGSQAPKPKPAAGSDNKTDADSSGSTVAKESNAAPPESNKGTGSNDKDEVFSDSEGEDGSSKGRKEKASSGGQSNANAAKPSETSTVQEEASAAASRLEKVAITSEQGAAKAPDATSLKTEVSSKSSSTTAPSPAVDSSSMSEFKAIAADASVFSFGDEDDYESE

SEQ ID NO: 107140 - protein, 264 aa, Setaria italica
  misc_feature (33)..(33): Xaa can be any naturally occurring amino acid
  Transcript Sequence Number=SeqID_41166
  Gene Ontology: Mol. function=ubiquitin-protein ligase activity; Cellular component=nucleus; Biological process=ubiquitin-dependent protein catabolic process
  Homolog annotation: Hit_ID=Q94DR6; Match level="QueryCoverage=71%, HitCoverage=69%, E-value=3e-36, Identity=41%"; Hit description =P0460E08.34 protein
  Pfam annotation: Domain name=Sina; Domain location=26-208; Score= -50.1; E_value=0.0019; Accession=PF03145.8; Description=Seven in absentia protein family
PRTPLLDTALPNPKKCHYCSRESDYNRCHGIEXIIGSIQVPCSNTKYGCSIKTSYYEREDHETTCSHAPCFCPDTGCSFSGSTGMLQEHFIAVHQWPSTKFRYDWCFYANIQEGIRVISGEDKQLFLLNVVSESFGCVISVFCVWPHDTDPKFRCAMSFNYWKNSLYHARSSEFQVPSTTLSDGLPRDCFLFIMPKFYLDEDSKICATEEGFSMKNLRPRCSFSHVILFFASGQVSSTVMMGLAASIPIIPIMYRCYFGRMLGT

SEQ ID NO: 107141 - protein, 141 aa, Setaria italica
  Transcript Sequence Number=SeqID_41167
  Gene Ontology: Mol. function=electron carrier activity; Biological process=oxidation reduction
  Homolog annotation: Hit_ID=B4FQ24; Match level="QueryCoverage=100%, HitCoverage=27%, E-value=1e-64, Identity=83%"; Hit description =Flavonoid 3-monooxygenase
HAQAAAGAPVDVGAQMFLTTMNVITGTLWGGNIGDEAQRAAVGKEFRHLVAEITEMLGAPNVSDFFPALARFDLQGIRRKSDVLKERFNQMFARIIEQRVKAEQRTGRTKTPDFLEYMLRLEKEGGDGKAGFTMTNVKALL

SEQ ID NO: 107142 - protein, 111 aa, Setaria italica
  misc_feature (64)..(64): Xaa can be any naturally occurring amino acid
  Transcript Sequence Number=SeqID_41168
  Gene Ontology: Mol. function=nucleic acid binding
  Homolog annotation: Hit_ID=Q2R061; Match level="QueryCoverage=96%, HitCoverage=7%, E-value=3e-27, Identity=53%"; Hit description =Transposon protein, putative, Mutator sub-class
FCQLTFIVVQADYMTDDVDDATVARHLEAYLLWLFGWIMFCTSQGNSMPNHLLPYMRAIAEAPXCEVPQYNWGSAVLAATYRGLCMGCCKVDSMEPIFVGCLLLLQLWSYE

SEQ ID NO: 107143 - protein, 145 aa, Setaria italica
  Transcript Sequence Number=SeqID_41169
  Gene Ontology: Mol. function=catalytic activity; Biological process =cellular metabolic process
  Homolog annotation: Hit_ID=O82104; Match level="QueryCoverage=94%, HitCoverage=38%, E-value=1e-54, Identity=78%"; Hit description =Dihydroflavonol4-reductase
TGNEAHYSILKQVQFVHLDDLCDAEIFLFENPDAAGRYVCSSHDSTIHGLAAMLRERYPEYRIPERFREIDDGDLQPVHFSSKKLLDHGFTFRYTVEDMFDAAIRTCREKGLIPLATAGGDGSASAREPGEADAALGRDGPAVGA

SEQ ID NO: 107144 - protein, 73 aa, Setaria italica
  Transcript Sequence Number=SeqID_41170
ACLPFSPKGGIICIFQVCSPYKLLEKVVLNKDQSMTHLQDMQKHERPMENSFPTVQSDGLICQSKDSSAYRGK

SEQ ID NO: 107145 - protein, 75 aa, Setaria italica
  Transcript Sequence Number=SeqID_41171
  Homolog annotation: Hit_ID=B6SP63; Match level="QueryCoverage=76%, HitCoverage=36%, E-value=2e-12, Identity=64%"; Hit description=Cold shock protein-1
GGWGAGYGGPGGGYAHGGVDVPTVVCQEKGPCYGKKVACPKRCFWSYSRSGNGYGAGGGGGSCTVDCKDKCTATC

SEQ ID NO: 107146 - protein, 189 aa, Setaria italica
  Transcript Sequence Number=SeqID_41172
  Gene Ontology: Biological process=protein localization
  Homolog annotation: Hit_ID=Q6K796; Match level="QueryCoverage=100%, HitCoverage=4%, E-value=4e-80, Identity=76%"; Hit description =Vacuolar protein sorting 13C protein-like
FVPSLGTITGRDESLDPKNDPLMRSDDIILSEHVFLQRENVIQLSPRRQLIVDGCDIDEFIYDGCGGTISLCEEFDKKGQLCSGAIIIIGHGKRLRLKNVKIENGALLRRCVYLSTGSSYSIAAEDGVEVSVLESSFGNDDEDLLKLEEHNKRTLQNASNAPANQMLNFTFEAQVVSPEFTFYDSSKLS

SEQ ID NO: 107147 - protein, 66 aa, Setaria italica
  Transcript Sequence Number=SeqID_41173
WQLKVRVVASQVDNRSDDVVEGSVVFTPLKAGCSSATCGLGFCKVEITVAWSLLATLAKMRFLSVY

SEQ ID NO: 107148 - protein, 76 aa, Setaria italica
  Transcript Sequence Number=SeqID_41174
  Gene Ontology: Mol. function=zinc ion binding; Cellular component =nucleus
  Homolog annotation: Hit_ID=A4UQN2; Match level="QueryCoverage=78%, HitCoverage=31%, E-value=3e-15, Identity=56%"; Hit description=MBD1
  Pfam annotation: Domain name=MBD; Domain location=1-57; Score=1.8; E _value=0.028; Accession=PF01429.11; Description=Methyl-CpG binding domain
VVLRSDLSRMDTYYIIPTGKRIKGASDLDKFLEANPHYKGRMSASDFNFATPKVVEETVSAWKAAMAKEQEKASGP

SEQ ID NO: 107149 - protein, 208 aa, Setaria italica
  Transcript Sequence Number=SeqID_41175
  Homolog annotation: Hit_ID=Q2HUK9; Match level="QueryCoverage=99%, HitCoverage=30%, E-value=7e-57, Identity=49%"; Hit description =Tetratricopeptide-like helical
GLEPGMEHYGTMVDLLGRAGKLDEAWLFIKDMPIQPGISVYGAMLGACKLHKNVELAEESAQRIFELGPEEGVYHVLLANIYANASKWKDVARVRTTMEKKGLQKTPGWSIIQLKNEVHTFYSGSTNHQQAKEIYARLAKLIEEIKDVGYVPDTDSIHDVEDDVKAQLLNTHSEKLAIAYGLIRTAPGTTIQIKKNLRVCNDCLLIVR

SEQ ID NO: 107150 - protein, 747 aa, Setaria italica
  Transcript Sequence Number=SeqID_41176
  Gene Ontology: Mol. function=Rab GTPase activator activity; Cellular component=intracellular; Biological process=regulation of Rab GTPase activity
  Homolog annotation: Hit_ID=Q5QMF8; Match level="QueryCoverage=98%, HitCoverage=88%, E-value=0.0, Identity=66%"; Hit description =RabGAP/TBC domain-containing protein-like
  Pfam annotation: Domain name=DUF827; Domain location=453-651; Score= -103.0; E_value=0.01; Accession=PF05701.3; Description=Plant protein of unknown function (DUF827)
  Pfam annotation: Domain name=TBC; Domain location=116-340; Score =163.4; E_value=6.8e-46; Accession=PF00566.10; Description=TBC domain
  Pfam module annotation: Pfam domain module=DUF827::TBC; Domain location=453-651::116-340
SESLPEKTSAGPRKIEIWTPIRKSLGNIEQMMSLRVEKKQSSAGKQQVVRGQADDGIHPVKVEEAKLSEDSDDEFYDVDKVDPSQEVHSGDTGNADNGSRGHEETYISKEELECLVHGGLPMALRGELWQAFVGTGARRVEGYYDTLAAEGESENNKSSDSSTSEGVHEKWIGQIEKDLPRTFPGHPALDEDGRNALRRLLIAYAKHNPSVGYCQAMNFFAGLLLLLMPEENAFWTLVGIIDDYFDGYFSEEMIESQVDQLVLEELVREKFPKLANHLDYLGLQVAWVTGPWFLSIFTNVLPWESVLRVWDVLLFDGNRVMLFRTALALLEFYGPALVTTKDAGDAVTLLQSLSGSTFDSSQLVLTARMGYQSVNETILQELSNKHRPSVIASMEERAKGLGAWTDTNGLASKLYNFKRDPEPLVSLSDSADQLSDVGDGDANQESDPGNMDDMYGGVTVNSEIDSLPDPKDQVAWLKLELCRLLEERRSAVLRADELETALMEMVKQDNRRQLSAKVEQLEQEISELRQALSDKQEQEEAMFQVLMRVEQELKIAEEARISAEQDAAAQRYAANVLQEKYEEAMASLAQMENRAVMAETMLEATLQYQSSQQKALSPCPSPRTSMLDASPTASQTSQEFQPRRKNLLGPFSLSWRDKNKEKQNSADDSTNTKFSNSNDEMVETSNKDDEKQRETPELNVEQTAESPEEDGKLRAEMPNEDNELPGARIVTSDLNGHHEQMQEIKLD

SEQ ID NO: 107151 - protein, 136 aa, Setaria italica
  Transcript Sequence Number=SeqID_41177
  Gene Ontology: Mol. function=protein serine/threonine kinase activity; Cellular component=cell surface; Biological process =protein amino acid phosphorylation
  Homolog annotation: Hit_ID=B8XSN7; Match level="QueryCoverage=100%, HitCoverage=20%, E-value=2e-52, Identity=74%"; Hit description =Lectin receptor-type kinase
  Pfam annotation: Domain name=Pkinase; Domain location=1-117; Score= -110.1; E_value=0.062; Accession=PF00069.17; Description=Protein kinase domain
EQVVIHRDIKASNVLLDHEMSGRLGDFGLARLYDHGADPQTTHVVGTMGYLAPELVRTGKATPLTDVFSFGVFLLEVACGRRPIDRDDRNNRVVLVDRVIEHHRNGSILDAVDPRLVGKYEVEEVTLVLKLGLMCA

SEQ ID NO: 107152 - protein, 66 aa, Setaria italica
  Transcript Sequence Number=SeqID_41178
  Subcellular localization annotation: CTP_CleavageSite=56; ConfidenceScore=5.18e-01
DLVVSMLSYSVPGYYPCQATSYNLTFCRTHGRVMYFLNKKAVCFQKNNNSTPVQVRVQTKHETLLL

SEQ ID NO: 107153 - protein, 53 aa, Setaria italica
  Transcript Sequence Number=SeqID_41179
PKMNKIQTLHHHHLLITFMLTLYPPILLLFSPLPVLVIFPCSRETFVLYVFYS

SEQ ID NO: 107154 - protein, 145 aa, Setaria italica
  Transcript Sequence Number=SeqID_41180
  Gene Ontology: Cellular component=cell wall
  Homolog annotation: Hit_ID=Q56US0; Match level="QueryCoverage=93%, HitCoverage=52%, E-value=2e-37, Identity=67%"; Hit description =Putative phi-1-like phosphate-induced protein (Fragment)
  Pfam annotation: Domain name=Phi_1; Domain location=1-145; Score= -44.8; E_value=1.7e-07; Accession=PF04674.4; Description=Phosphate -induced protein 1 conserved region
YHDGAVLSGDISVSVLWYGRFTPAQKAIVTDFLLSLSAAAQGPSVAQWWSNINRLYLSKAAAASKNGAHGGGARIARVVLAGQVSDEGCSLGKSLKMSQLPALAARARPAKVGGGVALVLTAQDVAVEGFCASRCGHHGSYGGGG

SEQ ID NO: 107155 - protein, 66 aa, Setaria italica
  Transcript Sequence Number=SeqID_41181
  Gene Ontology: Cellular component=cell wall
  Homolog annotation: Hit_ID=O82161; Match level="QueryCoverage=100%, HitCoverage=21%, E-value=3e-23, Identity=78%"; Hit description=Phi-1 protein
  Pfam annotation: Domain name=Phi_1; Domain location=1-66; Score= -143.9; E_value=0.066; Accession=PF04674.4; Description=Phosphate -induced protein 1 conserved region
GDRGAPLEAATACAGVYGRGAYPGYAGELLVDKATGASYNAHGARGRKYLLPALFDPDTSACSTLV

SEQ ID NO: 107156 - protein, 329 aa, Setaria italica
  Transcript Sequence Number=SeqID_41182
  Gene Ontology: Cellular component=cell wall
  Homolog annotation: Hit_ID=B6STQ1; Match level="QueryCoverage=91%, HitCoverage=86%, E-value=6e-79, Identity=54%"; Hit description=Phi-1- like phosphate-induced protein
  Pfam annotation: Domain name=Phi_1; Domain location=35-329; Score =473.4; E_value=3.3e-139; Accession=PF04674.4; Description=Phosphate -induced protein 1 conserved region
MAKHSALLLLLMVLAVTMGAAPSAAFLVQPQPNLLTYHNGAVLSGDIPVSILWYGRFTPAQKAVVSDFLLSLSAAPAPRGAPPSPAPSVAQWWSSINRLYLSKAAAVSKNGAHGGAAVARSARVVLSRQVSDEGCSLGKSLKLSQLPALAARARGPAKASGGGGGGIALVLTARDVAVEGFCMSRCGHHGSDPRSRAAYAWVGNPADQCPGQCAWPFHQPAYGPQAPPLVPPSGDAGMDGVVINVATVVAGAVTNPFGDGFYQGDRGAPLEAATACAGVYGRGAYPGYAGELLVDKATGASYNANGARGRKYLLPALYDPDTGDCATLV

SEQ ID NO: 107157 - protein, 167 aa, Setaria italica
  Transcript Sequence Number=SeqID_41183
  Homolog annotation: Hit_ID=P0C941; Match level="QueryCoverage=77%, HitCoverage=83%, E-value=2e-35, Identity=56%"; Hit description =Reticulon-like protein B23
  Pfam annotation: Domain name=Reticulon; Domain location=9-159; Score=- 3.5; E_value=0.00016; Accession=PF02453.9; Description=Reticulon
GGGGTGAGRWAVGAVCGGLVYYHCAVRRASAVSLAADVLLVLLCSLSILGLLFRHLHISVPVDPLEWQISQEMANSIVASLANTIGAAESVLRVAATGHDKKLFFKVVFTLYFLAALGRVVSGAAVAYAALCIFCLYMFAQSTDLFDQLPSWVPVGRDSLGGAQDTA

SEQ ID NO: 107158 - protein, 76 aa, Setaria italica
  Transcript Sequence Number=SeqID_41184
SERDASIIRHACYALHHYNAKHPREGFDAVKPLMGASVRFKGQLWFHVNFWARCRKSKRSKPFCPRCIQATGSSSV

SEQ ID NO: 107159 - protein, 175 aa, Setaria italica
  Transcript Sequence Number=SeqID_41185
  Gene Ontology: Mol. function=nucleic acid binding
  Homolog annotation: Hit_ID=B6SL12; Match level="QueryCoverage=97%, HitCoverage=33%, E-value=4e-74, Identity=80%"; Hit description =Calmodulin binding protein
  Pfam annotation: Domain name=IQ; Domain location=39-59; Score=19.7; E_ value=0.012; Accession=PF00612.19; Description=IQ calmodulin-binding motif
MEVEAAAPTVAGMDFSASPRFDPDKLESPPPVEGSGGENGAATKLQKVYRSYRTRRKLADSAVVVEELWWQALDFARLSHSTVSFFDEPKPETAASRWNRVSLNASKVGQGLSRDGKALKLAFQHWIEAIDPRHRYGHNLHFYYDVWCQSQAGQPFFYWLDVGRSRSFPSPTSSQ

SEQ ID NO: 107160 - protein, 225 aa, Setaria italica
  Transcript Sequence Number=SeqID_41186
  Gene Ontology: Mol. function=nucleic acid binding
  Homolog annotation: Hit_ID=B6SL12; Match level="QueryCoverage=98%, HitCoverage=51%, E-value=4e-83, Identity=69%"; Hit description =Calmodulin binding protein
GKEKKKKVVFQHSSFLAGGTTIAAGRFTAENGIIKSIWAYSGHYKPSAENLSNFMNFLEENGVDLKEVEVRSSIREDYNEDPVRDGSQNLTAESMGSEVISIPSMTECDEGENATAEQAKPTYQRTLSGGLQSPRATGVPQKAILERMKSKGESKSYQLGHRLSLKWSTGAGPRIGCVKDYPMELRMQALEMVDLSPRASTPSALRRLPSCLSPTEATSPTSLLA

SEQ ID NO: 107161 - protein, 474 aa, Setaria italica
  Transcript Sequence Number=SeqID_41187
  Gene Ontology: Mol. function=nucleic acid binding
  Homolog annotation: Hit_ID=B6SL12; Match level="QueryCoverage=100%, HitCoverage=100%, E-value=0.0, Identity=73%"; Hit description =Calmodulin binding protein
  Pfam annotation: Domain name=IQ; Domain location=42-62; Score=22.8; E_ value=0.0014; Accession=PF00612.19; Description=IQ calmodulin-binding motif
MEVEAAPPPLGLDSTDPPRFQSDKLESPSPPVEGSAGGSGEDGAATKLQKAYRGYRTRRKLADSAVVVEELWWQALDFARLSHSTVSFFDEPKPETAASRWNRVSLNASKVGQGLSRDGKALKLAFQHWIEAIDPRHRYGHNLHFYYDVWCQSQAGQPFFYWLDVGEGKELDLPECPRAKLRKQCIKYLGPQERENYEYIINEGKIIHKQSGQPLDTSQDPKGTKWIFVMSTAKRLYAGKKERGVFQHSSFLAGGTTIAAGRFTAENGIIKSIWAYSGHYKPSAENLSNFMNFLEENGVDLKEVEVRSSTKEDYNEDPVPDGSQNLTAEFMGSVPPEVISSPNITEGDEGENAPAEQAKPTYERTLSGGLQSPRATGILQKAILERMKSKGESKSYQLGHRLSLKWSTGAGPRIGCVKDYPMELRMQALEMVDLSPRASTPSASRRLPSCLSPTEATSPTSPLATMQASLPQPS

SEQ ID NO: 107162 - protein, 162 aa, Setaria italica
  Transcript Sequence Number=SeqID_41188
MSFRLGGAVGREEGDEELFETASYVSGGEESDADEGDHFPDSGAAGQGDQDHQRLFVPQPLRRMNSDSIYDMASMMSQLPAKKGLSRYYEGKSQSFACMSEVRCLEDLRKKDNPYQQKIKSCKSYVALGGMAKKPSSGSCANLSLAAASGFRTTPIQNGYHQ

SEQ ID NO: 107163 - protein, 104 aa, Setaria italica
  Transcript Sequence Number=SeqID_41189
  Gene Ontology: Cellular component=mitochondrial respiratory chain
  Homolog annotation: Hit_ID=B9T595; Match level="QueryCoverage=98%, HitCoverage=97%, E-value=3e-38, Identity=70%"; Hit description=NADH -ubiquinone oxidoreductase 12 kDa subunit, mitochondrial, putative
MVRKAKVEFDEQPPDNFDPKNPYGDPVAMLEYREHLVREKWIQIETAKIIRERLRWCYRIEGINHHQKCRHLVDQYLEATRGVGWGKDARPPEFHEPKKVAEAE

SEQ ID NO: 107164 - protein, 91 aa, Setaria italica
  Transcript Sequence Number=SeqID_41190
  Gene Ontology: Mol. function=hydrolase activity; Biological process =metabolic process
  Homolog annotation: Hit_ID=B9SDP1; Match level="QueryCoverage=100%, HitCoverage=28%, E-value=9e-21, Identity=56%"; Hit description =Gibberellin receptor GID1, putative
  Pfam annotation: Domain name=Abhydrolase_3; Domain location=1-91; Score=-63.5; E_value=0.0018; Accession=PF07859.5; Description =alphabeta hydrolase fold
LRLAAELPAVVLSADYRLAPEHRLPAALDDAESVFSWLRSQAAAAGGADPWLAESADFRRVFVTGDSAGGNIAHHISVRHGSGELPLTPLR

SEQ ID NO: 107165 - protein, 110 aa, Setaria italica
  Transcript Sequence Number=SeqID_41191
  Gene Ontology: Cellular component=plasma membrane
  Homolog annotation: Hit_ID=B6T914; Match level="QueryCoverage=96%, HitCoverage=99%, E-value=1e-48, Identity=88%"; Hit description=Pop3 peptide
  Pfam annotation: Domain name=Dabb; Domain location=10-106; Score =104.1; E_value=4.9e-28; Accession=PF07876.4; Description=Stress responsive AB Barrel Domain
MAAGGGGGVVKHILLARFKEDVTPERLDQLIRGYDRLVGVVPPMKAFHWGTDVSIENMHQGFTHVFESTFESTEGIKEYIEHPAHVEFANEFLPVLEKALIIDYKPTSVN

SEQ ID NO: 107166 - protein, 1006 aa, Setaria italica
  Transcript Sequence Number=SeqID_41192
  Gene Ontology: Mol. function=zinc ion binding; Cellular component =intracellular
  Homolog annotation: Hit_ID=B3GS43; Match level="QueryCoverage=97%, HitCoverage=86%, E-value=0.0, Identity=69%"; Hit description =Methylcytosine binding domain protein
  Pfam annotation: Domain name=PhnA_Zn_Ribbon; Domain location=958-996; Score=11.7; E_value=0.031; Accession=PF08274.4; Description=PhnA Zinc- Ribbon
KQDNLAPLATSLPPPPASVASAATDPDREVLNPKGVAVDLARLAELVDPYGVELQQRTAGLGSESELLGFMNALEGQWGSRRRRRKFVDAGMFADHLPRGWKLLLGLKRKERVAWINCRRYVSPKGHQFATCKEVSTYLRSLLGYPEAKPTTTQINSAGVHDLDINSAGHQQTISIEQRQLAVPLTSVTLFSHSGDSHGQKLQKDEAQMEVNPKECRKCNLTFHDQGAYMQHQLSFHQRKAKRRRVSKSSELGTYVDGNYETQQKTLGEGFGNSSHGVADVRYQGQSPAKLFDGTFSGQLGVQPSLKAAPLGFQEMTVLPPQLEKEPFAGEPVSMNNKDPPEEMSGFLEQERESAAGEPISRHGKDPQEMINFPEQEKEPAAREAVSGSTSAAELEKGPSAGGPTSGHHLDAVDNSDHRTHDETCDSAVASLSVDAESKLSTCNATNFHENDCSKDLELSNTDHSQKSNRSDETYGVPKEVSPAADDPVESKSTNDLMECTDITQTEQVSQPYDLLHGKFGSSEGNDFHNQLESNPLSGTRDEPDLNSIGMEVDDGNITCSVENPTSFKSERPLDDKIMECEMTSLKEDGIKSGVTIRNVNLNSCSDTISSPVSGGNYETSSTPDDAIRSSIIAQCFGTNSNDENAGKDGNFANQNSAGKGENFVSQENDIVYQSNLTMGPIPPAQINVDCFTSCSMTPEIKSYGNRGEDDGKEALVNSQNMASNETGFDVETYNSDIFNSTITESSLAQLNNAINMKNDFASCYSLSDLNTLTGGSATDEIDIHGMRNSFVSSTSRTDQNEHCTLDFDIKGSMLEALEKSDSDLDNQYNGAGPSCDSLPAAGTNGNIDDFMSMQTNFGSFTSLVRAVEDVPLSRILQDQCDLQLGFGGPKQPMYPSFEQQLRMASAGAPPYGNMGRHDTVPVPEPTLMLGYAPPLGSCPPPFQLGWGAPSYSKMVGVLQSVCVWCNSQFQHFGTIAEQQADSLGYICPSCKGKFSGHLGINGPSI

SEQ ID NO: 107167 - protein, 81 aa, Setaria italica
  misc_feature (78)..(78): Xaa can be any naturally occurring amino acid
  Transcript Sequence Number=SeqID_41193
  Homolog annotation: Hit_ID=Q69JJ7; Match level="QueryCoverage=93%, HitCoverage=12%, E-value=2e-17, Identity=51%"; Hit description =Putative pentatricopeptide (PPR) repeat-containing protein
ANTGKWEEMNRVRKLMNEKGVVKVPGCSSIEIDNTVHEFFAGDGRHPKSQEARKMVDEVIDQLKLVGYVPDTSHVFYXVIG

SEQ ID NO: 107168 - protein, 69 aa, Setaria italica
  Transcript Sequence Number=SeqID_41194
ESANKLFQFVVYEIGENDSAVNQLARKFIATWRGYAVSAAGSQSNVSIYFCSHIAILVLLVLLGLFFLA

SEQ ID NO: 107169 - protein, 41 aa, Setaria italica
  Transcript Sequence Number=SeqID_41195
SQAYLDVIVLPCVRVSTLFCKRKKRYILTGVLNHLLNDPEI

SEQ ID NO: 107170 - protein, 76 aa, Setaria italica
  Transcript Sequence Number=SeqID_41196
  Homolog annotation: Hit_ID=B6T9Z9; Match level="QueryCoverage=100%, HitCoverage=22%, E-value=2e-34, Identity=92%"; Hit description =Hydroxyacylglutathione hydrolase 2
  Subcellular localization annotation: CTP_CleavageSite=17; ConfidenceScore=5.45e-01
MRMLSKACSIVASSLPRCSSSAAPTMRGQPSLLPSVRKQWLGKPLLYGIGSLLVMPLRTLHGVGRVFGAGRFLCNI

SEQ ID NO: 107171 - protein, 311 aa, Setaria italica
  Transcript Sequence Number=SeqID_41197
  Gene Ontology: Mol. function=hydrolase activity; Cellular component =mitochondrion
  Homolog annotation: Hit_ID=B6T9Z9; Match level="QueryCoverage=100%, HitCoverage=92%, E-value=1e-168, Identity=90%"; Hit description =Hydroxyacylglutathione hydrolase 2
  Pfam annotation: Domain name=Lactamase_B; Domain location=68-226; Score=128.3; E_value=2.4e-35; Accession=PF00753.19; Description =Metallo-beta-lactamase superfamily
  Subcellular localization annotation: CTP_CleavageSite=48; ConfidenceScore=5.03e-01
MRGQPSLLPSVRKQWLGKPLLYGIGSLLVMPLRTLHGVGRVFGAGRFLCNMTSVSSSLQIELVPCLRDNYAYILHDVDTGTVGVVDPSEAMPIINALEKRNQNLTYILNTHHHYDHTGGNLELKAKYGAKVIGSEKDRDRIPGIDITLKEGDTWMFAGHQVLVLETPGHTSGHVCYYFAGSGAIFTGDTLFNLSCGKLFEGTPQQMYSSLQKIIALPDETKVYCGHEYTLSNSKFALSVEPGNKELQEYAANAAELRNKNIPTVPTTIGREKQCNPFLRTSNPEIKSTLSIPDHFDEDRVLEVVRRAKDNF

SEQ ID NO: 107172 - protein, 77 aa, Setaria italica
  Transcript Sequence Number=SeqID_41198
  Subcellular localization annotation: CTP_CleavageSite=42; ConfidenceScore=5.34e-01
MIDHGVDDPAIIQQGSSTTMGAAGPSSRNGSRELASPTGSVDATAAPEPEALWPSRRRWRRRADRWRRNAAAAAAAA

SEQ ID NO: 107173 - protein, 65 aa, Setaria italica
  Transcript Sequence Number=SeqID_41199
  Gene Ontology: Mol. function=acid phosphatase activity; Cellular component=extracellular region; Biological process=biological_process
  Homolog annotation: Hit_ID=B6TGL9; Match level="QueryCoverage=66%, HitCoverage=9%, E-value=3e-17, Identity=95%"; Hit description=Purple acid phosphatase
MSSGGRRRLALVAALALVVLAADAGVTSEYRRKLEATVEMPLDADVFRVPPGYNAPQQVHITLGN

SEQ ID NO: 107174 - protein, 56 aa, Setaria italica
  Transcript Sequence Number=SeqID_41200
TGEDTDLTSLSHYQDSRLTVIGPQNCYSLMNILKFFKLAHQGWTGTIRRVKSCPLV

SEQ ID NO: 107175 - protein, 137 aa, Setaria italica
  Transcript Sequence Number=SeqID_41201
  Gene Ontology: Mol. function=actin binding; Cellular component =cytoskeleton; Biological process=regulation of actin filament polymerization
  Homolog annotation: Hit_ID=B6TA39; Match level="QueryCoverage=100%, HitCoverage=36%, E-value=2e-74, Identity=95%"; Hit description=Actin- related protein 2/3 complex subunit 1B
  Pfam annotation: Domain name=WD40; Domain location=2-37; Score=0.6; E_ value=34; Accession=PF00400.24; Description=WD domain, G-beta repeat
  Pfam annotation: Domain name=WD40; Domain location=43-81; Score=29.0; E_value=1.9e-05; Accession=PF00400.24; Description=WD domain, G-beta repeat
  Pfam annotation: Domain name=WD40; Domain location=87-125; Score=5.8; E_value=8.1; Accession=PF00400.24; Description=WD domain, G-beta repeat
  Pfam module annotation: Pfam domain module=WD40::WD40::WD40; Domain location=2-37::43-81::87-125
AAVAIHQFAECITCHAWSPDQSMIAFCPNNNELHIYKFIKDKWEKLHVLSKHDQIVSGIDWSRSSNKIVTVSHDRNSYVWTQEGSDWVPTLVILKLNRAALCVQWSPKENKFAVGSGAKSVCICYYEQENNWWISKV

SEQ ID NO: 107176 - protein, 118 aa, Setaria italica
  misc_feature (11)..(11): Xaa can be any naturally occurring amino acid
  misc_feature (24)..(24): Xaa can be any naturally occurring amino acid
  Transcript Sequence Number=SeqID_41202
  Gene Ontology: Mol. function=actin binding; Cellular component =cytoskeleton; Biological process=regulation of actin filament polymerization
  Homolog annotation: Hit_ID=B6TA39; Match level="QueryCoverage=61%, HitCoverage=19%, E-value=6e-23, Identity=67%"; Hit description=Actin- related protein 2/3 complex subunit 1B
FVDEVESAPAXQNLTLRDLPLRDXLFVSERMVIGVGFDCNPMIFAADQTGLWSFVRFLDERKATPSTSKASQVYCFFFPIFYLFLWMVMHIIPLMLFCYYMRVLFSPCSPKGCFFLHG

SEQ ID NO: 107177 - protein, 70 aa, Setaria italica
  Transcript Sequence Number=SeqID_41203
APSQDTFLFYFCPSITPFCYPTTIVNRGACETILLLPLNMHSIYFNAQVLFEKCVSYLEWVNKSLNSFLY

SEQ ID NO: 107178 - protein, 103 aa, Setaria italica
  Transcript Sequence Number=SeqID_41204
  Gene Ontology: Mol. function=actin binding; Cellular component =cytoskeleton; Biological process=regulation of actin filament polymerization
  Homolog annotation: Hit_ID=B6TA39; Match level="QueryCoverage=72%, HitCoverage=20%, E-value=8e-36, Identity=92%"; Hit description=Actin- related protein 2/3 complex subunit 1B
  Pfam annotation: Domain name=WD40; Domain location=39-82; Score=17.9; E_value=0.042; Accession=PF00400.24; Description=WD domain, G-beta repeat
THQVNITQTNTEKNIFQLSEALGKLYGQSKQGTSSDTVEPSKPRGGAHENCITCIVPLTKGRDGTIKRFSTSGLDGKIVVWDLENHITVAKIGGREVFVPIKL

SEQ ID NO: 107179 - protein, 69 aa, Setaria italica
  Transcript Sequence Number=SeqID_41205
GFGSCGISTYVIRGDQMLIAMSKGCSTTNQIPDYFVGGCSWFSPFFCTAMYCCHLDLTFGMFSVKLNRI

SEQ ID NO: 107180 - protein, 372 aa, Setaria italica
  Transcript Sequence Number=SeqID_41206
  Gene Ontology: Mol. function=actin binding; Cellular component =cytoskeleton; Biological process=regulation of actin filament polymerization
  Homolog annotation: Hit_ID=B6TA39; Match level="QueryCoverage=94%, HitCoverage=93%, E-value=0.0, Identity=91%"; Hit description=Actin -related protein 2/3 complex subunit 1B
  Pfam annotation: Domain name=WD40; Domain location=130-168; Score =39.2; E_value=1.6e-08; Accession=PF00400.24; Description=WD domain, G-beta repeat
  Pfam annotation: Domain name=WD40; Domain location=190-228; Score =9.6; E_value=2.9; Accession=PF00400.24; Description=WD domain, G -beta repeat
  Pfam annotation: Domain name=WD40; Domain location=320-363; Score =17.9; E_value=0.042; Accession=PF00400.24; Description=WD domain, G -beta repeat
  Pfam annotation: Domain name=WD40; Domain location=40-78; Score=29.0; E_value=1.9e-05; Accession=PF00400.24; Description=WD domain, G-beta repeat
  Pfam annotation: Domain name=WD40; Domain location=84-122; Score=5.8; E_value=8.1; Accession=PF00400.24; Description=WD domain, G-beta repeat
  Pfam module annotation: Pfam domain module=WD40::WD40::WD40::WD40::WD4 0; Domain location=130-168::190-228::320-363::40-78::84-122
LHLSWSLIFNSTGNFFSLPVIAFCPNNNELHIYKFIKDKWEKLHVLSKHDQIVSGIDWSRSSNKIVTVSHDRNSYVWTQEGSDWVPTLVILKLNRAALCVQWSPKENKFAVGSGAKSVCICYYEQENNWWISKVIRKRHESSVTSIAWHPNNIYLATTSTDGKCRVFSTFIKGVDTRGSQSSTSTDSKFGEQIAQLDLSSTWTFGVRWSPSGKTLAYAGHNSMIYFVDEVESAPAAQNLTLRDLPLRDVVLFVSERMVIGVGFDCNPMIFAADQTGLWSFVRFLDERKATPSTSKASQLSEALGKLYGQSKQGTSSDTVEPSKPRGGAHENCITCIVPLTKGRDGTIKRFSTSGLDGKIVVWDLENHITVAK

SEQ ID NO: 107181 - protein, 145 aa, Setaria italica
  misc_feature (20)..(20): Xaa can be any naturally occurring amino acid
  misc_feature (40)..(40): Xaa can be any naturally occurring amino acid
  misc_feature (92)..(92): Xaa can be any naturally occurring amino acid
  Transcript Sequence Number=SeqID_41207
  Gene Ontology: Mol. function=cysteine-type peptidase activity; Cellular component=nucleus; Biological process=biosynthetic process
  Homolog annotation: Hit_ID=Q2QR87; Match level="QueryCoverage=95%, HitCoverage=14%, E-value=1e-44, Identity=63%"; Hit description =Transposon protein, putative, CACTA, En/Spm sub-class
GVVQRYTLEARQDLKCMEQXEDLHPEKRENGQHYLCPTSXTLNNEEKESMFVCLNSMKVSSAYSSNIQGIINVKEKKFTNLKSHDCHVMMTXLLLVALMGILPENVRLSIVKLCAFLNEISHKAIDPNNLIKLNNDVVQYLVSFE

SEQ ID NO: 107182 - protein, 162 aa, Setaria italica
  Transcript Sequence Number=SeqID_41208
  Subcellular localization annotation: CTP_CleavageSite=28; ConfidenceScore=5.30e-01
FAAALVMALMLAGSTTSHAARRLADTAPAAAPAAVPGIPSVPKPPVPTVPTVPASALPPMPAVPTVPAVTVPAVPQVPAIPAATLPPMPAVPAIPAVPAMPNAAALPPMPAVPAVPKVTLPPMPAVPKVTLPPMPFVPKVTLPPMPSIPGVPMPFLAPPPSA

SEQ ID NO: 107183 - protein, 87 aa, Setaria italica
  Transcript Sequence Number=SeqID_41209
  Gene Ontology: Cellular component=nucleus; Biological process =regulation of transcription, DNA-dependent
  Homolog annotation: Hit_ID=Q9FWN6; Match level="QueryCoverage=100%, HitCoverage=15%, E-value=2e-25, Identity=70%"; Hit description =Putative Scl1 protein
FLVQPGVEQRVVARHRAAALDNPPLPWRTVFASAGFVPVQASTFAESQAEALLKRMALMGFRVEKRGGALCLYWQRGELVSVSAWRC

SEQ ID NO: 107184 - protein, 193 aa, Setaria italica
  Transcript Sequence Number=SeqID_41210
  Homolog annotation: Hit_ID=Q5W963; Match level="QueryCoverage=98%, HitCoverage=17%, E-value=2e-51, Identity=48%"; Hit description =PPR1106-17
KEHFRMMQKGHGLIPRMEHYACMVDLLGRSGLVEEALDFINEMPCKADALVWKSLLGACKTHNNMDIGEIAANHVIELEPQDPAPYVLLSNLYADAGLWDQVARVRSTMRDKNLMKETGLSWMHVENTIHEFRAGDTNHPQAEEIYTELDRLIMDIKEMGYVPDTSIVLHDMPDELKEQCLLQHSEKIAVAFG

SEQ ID NO: 107185 - protein, 119 aa, Setaria italica
  Transcript Sequence Number=SeqID_41211
  Gene Ontology: Cellular component=integral to membrane
  Homolog annotation: Hit_ID=B6TET5; Match level="QueryCoverage=57%, HitCoverage=25%, E-value=1e-10, Identity=45%"; Hit description =Purine permease
  Pfam annotation: Domain name=TPT; Domain location=4-95; Score=-13.7; E_value=0.004; Accession=PF03151.8; Description=Triose-phosphate Transporter family
SGGGKGPWSGVEATWDLSPAAYYAVVGAAVLSWQMCFFGTAGTVFLTTSLHGGICMTALLAVNVAGGVVVFGDDFGAEKGVAMVLCLWAFSSYIYGEYKKGGKSVDGGSRISYGVLGQV

SEQ ID NO: 107186 - protein, 108 aa, Setaria italica
  Transcript Sequence Number=SeqID_41212
  Homolog annotation: Hit_ID=Q01JE0; Match level="QueryCoverage=100%, HitCoverage=12%, E-value=5e-46, Identity=81%"; Hit description =B0402A04.2 protein
EAVWMGHSPPLLRLAIVDLALPKTPSDSSLSLFLDPLVPERFYCAHGGGLDMVTLHFLPFSYPEMASTPPSVHPILTTGNSETSSPFLCGFVTIADAYGHVQLVGITC

SEQ ID NO: 107187 - protein, 113 aa, Setaria italica
  Transcript Sequence Number=SeqID_41213
  Gene Ontology: Mol. function=protein serine/threonine kinase activity; Biological process=protein amino acid phosphorylation
  Homolog annotation: Hit_ID=B6SWL2; Match level="QueryCoverage=99%, HitCoverage=13%, E-value=1e-43, Identity=80%"; Hit description =Receptor-like kinase
AFLVKSDTYGFGVIVLEIISGLKITLTNYKGFPNILSYAWSLWVDGKAMDLVDSSLAKSCFQTEALRCIQIGLLCVQDNPNYRPLMSSVVTMLENETTPLEVPKQPVYFSYAG

SEQ ID NO: 107188 - protein, 145 aa, Setaria italica
  Transcript Sequence Number=SeqID_41214
LPIVDTSLVEGEEPFNVLEMRNLPADAKFSFVPTHHAPNMVSYSSSEEEDASSDRSSDGQEEGRGRVTAEVQEIEMVTGNGHCSSNGNGNTFDSTGIKTEPERRKYLSPVSKRRRLTESNSGMKADGGAPSIWNSNMRDPSEATE

SEQ ID NO: 107189 - protein, 63 aa, Setaria italica
  Transcript Sequence Number=SeqID_41215
ALNREEHRVAVEFLVKGKRSFGLLLTIIAGELYASCRCSQAIILQQLAVHKNTVYRNTGCRSG

SEQ ID NO: 107190 - protein, 75 aa, Setaria italica
  Transcript Sequence Number=SeqID_41216
  Gene Ontology: Mol. function=nucleotide binding; Biological process =defense response
  Homolog annotation: Hit_ID=Q6AVJ8; Match level="QueryCoverage=82%, HitCoverage=6%, E-value=9e-17, Identity=69%"; Hit description=NB-ARC domain containing protein
MAELLDEFASKLVGILAGMVKEEVEMLLGVPGEVIKLETTLRDLSHILGDAERKRIRDKATEGWVRELKDVMYDA

SEQ ID NO: 107191 - protein, 74 aa, Setaria italica
  Transcript Sequence Number=SeqID_41217
  Gene Ontology: Mol. function=metal ion transmembrane transporter activity; Cellular component=integral to membrane; Biological process=metal ion transport
  Homolog annotation: Hit_ID=B6SZI8; Match level="QueryCoverage=68%, HitCoverage=12%, E-value=3e-14, Identity=72%"; Hit description=ZIP zinc/iron transport family protein
AISSVYDETSPTALLVQGLLEAAAAGILVYMALVDILAEEFMSAKVQSRGRLQLALNASLLLGASLMSMLAIWA

SEQ ID NO: 107192 - protein, 57 aa, Setaria italica
  Transcript Sequence Number=SeqID_41218
LATLTPTGSFRYQNSEHVKSYDSAKEEYTMDIIHFCFVLIKMQDQILVKGIYMLFSL

SEQ ID NO: 107193 - protein, 80 aa, Setaria italica
  Transcript Sequence Number=SeqID_41219
GTIHCPPSELGGRGNDYMHGGDPDPLSDSNLINNKKTGLSSQQSESIKWEADPDGTIHGPSSELGGCVHGGDPDPPLIPS

SEQ ID NO: 107194 - protein, 250 aa, Setaria italica
  misc_feature (121)..(121): Xaa can be any naturally occurring amino acid
  Transcript Sequence Number=SeqID_41220
  Gene Ontology: Mol. function=hydrolase activity, acting on glycosyl bonds; Cellular component=extracellular region; Biological process =cell wall catabolic process
  Homolog annotation: Hit_ID=Q43764; Match level="QueryCoverage=89%, HitCoverage=87%, E-value=8e-97, Identity=75%"; Hit description =Chitinase
  Pfam annotation: Domain name=Glyco_hydro_19; Domain location=28-244; Score=469.3; E_value=5.4e-138; Accession=PF00182.11; Description =Chitinase class I
MARLALVACAAAAMAVLLGVAAADVGSIITQDVYNAMLPNRDNSICPANGFYTYDAFIQAANSFPGFGTSGGSDEANKRELAAFFGQTSHETNGGAAGQYTWGYCFKEEISKATSPPYYGXRGPIQLTGQANYQQAGSAIGADLVGNPDLVSTDPVISFKTAIWFWMTAQSPKPSCHDVILGNWTPTSADTSAGRVPGYGVITNIINGGLECGMGPNDANVNRIGYYKHYCDMLGVGYGDNLDCYSQQHF

SEQ ID NO: 107195 - protein, 170 aa, Setaria italica
  Transcript Sequence Number=SeqID_41221
  Homolog annotation: Hit_ID=Q9LWW0; Match level="QueryCoverage=98%, HitCoverage=32%, E-value=1e-41, Identity=44%"; Hit description =Pentatricopeptide (PPR) repeat-containing protein-like
  Pfam annotation: Domain name=PPR; Domain location=21-55; Score=41.9; E_value=2.6e-09; Accession=PF01535.12; Description=PPR repeat
  Pfam annotation: Domain name=PPR; Domain location=56-90; Score=4.3; E_ value=2.8; Accession=PF01535.12; Description=PPR repeat
  Pfam module annotation: Pfam domain module=PPR::PPR; Domain location =21-55::56-90
CGDVISSFEIFKGLKNKQDIMPWNSMIVGFAKNGYANEALLLFQKMQESQLKPDEVTFLGVLIACSHAGLISEGRNFFDSMSQAYGLTPRVDHYACFIDLLGRGGHLEEAQEVIDHLPFRADGVIWATYLAACRMHKDEEGGKVAAKKLVELEPRSSSTYVFLSSNYPLS

SEQ ID NO: 107196 - protein, 80 aa, Setaria italica
  Transcript Sequence Number=SeqID_41222
VQSKKSTFRILLYYISTICLLVTVCCTLLSKESLGLGSLWSISFAGVIAKWLRCDPVKKESLVIMPTFGIQLEQLFHSRS

SEQ ID NO: 107197 - protein, 72 aa, Setaria italica
  Transcript Sequence Number=SeqID_41223
FMTSSLTFSSPFMLIWSNYLFFCLQLAWTSLEYYLSLEKPWGSRIPPQPLPRAGAALKAGWCAWKSSSSSAP

SEQ ID NO: 107198 - protein, 445 aa, Setaria italica
  misc_feature (11)..(11): Xaa can be any naturally occurring amino acid
  misc_feature (72)..(72): Xaa can be any naturally occurring amino acid
  Transcript Sequence Number=SeqID_41224
  Gene Ontology: Mol. function=nucleic acid binding; Cellular component= nucleus
CIRDYIIAQSXCICGVEILLDDLIPNHTLRSTISSMLSSRGGGISSGTGNLASSISSNLDGKSISFSSRSSXDCLQQQHMDSAPSIAAEGSLLITVCKNPVGHHEKLKHSDLQSKTEETEKASVKKTIAVAGAMETAPELRRQKRLPPDGVVIVSGNLQRKVVKSKSSKKQKKAGTTGKGDTNCDDYDCNIPFEPSCYNSSFGLGGLPWGADPYSMYFMSNMASSGYPMGLYNVNGISNLPLHAPGMQGYPASYYSSGFQPTVFQDHEASAHASLSNSHKGAGPQSPKPEGYHSRASTQKGGSRSGGRSVPEMRDSSTESHDYYEEYHNRKKVGTHPASSSPRDSGQRTVDSSSFESHDYREEFHSRKKVGAHPARSPRDGGQHRRALDDGGSFASHDYDEEFHGRRKERARSRSRKSSSRHSYRRRAYEGSTWSNEESNLKQRW

SEQ ID NO: 107199 - protein, 81 aa, Setaria italica
  Transcript Sequence Number=SeqID_41225
IELQPIIMGCNQLQPNCFPLLLVATSFCPVVNPVTTCCNSLPHNHYLLQQVTTTQLQPSYYLMQLVTTQLQYSCLLLGLSN

SEQ ID NO: 107200 - protein, 106 aa, Setaria italica
  misc_feature (18)..(18): Xaa can be any naturally occurring amino acid
  Transcript Sequence Number=SeqID_41226
  Gene Ontology: Mol. function=hydrolase activity; Cellular component =nucleus; Biological process=mRNA processing
  Homolog annotation: Hit_ID=Q652P4; Match level="QueryCoverage=67%, HitCoverage=9%, E-value=9e-28, Identity=76%"; Hit description =Cleavage and polyadenylation specificity factor subunit 2
SSVIDASSSHGFSNAGSXFGDNMDIRIHGFIPPSTSVAPRFPLFENTAEWDDFGEIINPDDYMMKQEEMDNTLMVAVMLQAVTNECALWCSAREVGLRDLLLRLLP

SEQ ID NO: 107201 - protein, 60 aa, Setaria italica
  Transcript Sequence Number=SeqID_41227
  Gene Ontology: Mol. function=hydrolase activity; Cellular component =nucleus; Biological process=mRNA processing
  Homolog annotation: Hit_ID=B6U1S6; Match level="QueryCoverage=85%, HitCoverage=7%, E-value=2e-19, Identity=80%"; Hit description =Cleavage and polyadenylation specificity factor, 100 kDa subunit
LLYFLVLPAGSHFGDNMDIRIHGFIPPSTSVAPRFPLFENTAEWDDFGEIINPDDYMMKQ

SEQ ID NO: 107202 - protein, 345 aa, Setaria italica
  Transcript Sequence Number=SeqID_41228
PLASGDLAARLREMALAANASASSPEEMIEAARAAAEAATDAAAAARAAAAEKAAVAAKARAAARAAMEFLDSFSRTGTSRNGLQFKVKSRKKHVQVKMLYRPNGTLGDAPKPRRRKQSDEEIARNLHRAMNSSPRISHTGPPKRPRGKAGDGKDGAAPGEGNREGRDDACNGSSTHAPIEAGGGLSNGCCEEKSSETTVPLFKHGGPDDGGDDPSRHAAKSRGDVTDNGVGTGNLSAARKVKIKRKELLLNQHNNKETEEPKETEPSVQPIGQDEPKTNGNGTEKHGSPADAKAPGDGTASMKITSVWKFKKLKTSHCSSDSKVLHNVCSSPTAAETSASVKAD

SEQ ID NO: 107203 - protein, 118 aa, Setaria italica
  misc_feature (15)..(15): Xaa can be any naturally occurring amino acid
  misc_feature (21)..(21): Xaa can be any naturally occurring amino acid
  misc_feature (54)..(54): Xaa can be any naturally occurring amino acid
  Transcript Sequence Number=SeqID_41229
  Gene Ontology: Mol. function=cysteine-type peptidase activity; Cellular component=nucleus; Biological process=regulation of transcription
  Homolog annotation: Hit_ID=Q10R35; Match level="QueryCoverage=94%, HitCoverage=10%, E-value=2e-45, Identity=74%"; Hit description =Transposon protein, putative, CACTA, En/Spm sub-class
FTNLKTHNCHMLMTXLLPVAXRGILPENVRLVLVKLCTFVNAISQKAIDPTKLXSYHDVVQCLVSFELVFPPSFFNIMTHLLVHLVKEITILGTVFLHDMWPFERFMSVLKTIFLIVP

SEQ ID NO: 107204 - protein, 143 aa, Setaria italica
  Transcript Sequence Number=SeqID_41230
  Gene Ontology: Mol. function=nucleoside-triphosphatase activity; Cellular component=nuclear envelope; Biological process=protein metabolic process
  Homolog annotation: Hit_ID=Q334H8; Match level="QueryCoverage=89%, HitCoverage=14%, E-value=4e-67, Identity=96%"; Hit description=Heat shock protein 101
TLRKGTTIGPSSGAIGATTLEEYRKYVEKDAAFERRFQQVFVAEPSVADTISILRGLKEKYEGHHGVRIQDRALVVAAQLSARYIMGRHLPDKAIDLVDEACANVRVQLDSQPEEIDNLERKRIQLEVELHALEKEKDKASKP

SEQ ID NO: 107205 - protein, 66 aa, Setaria italica
  misc_feature (35)..(35): Xaa can be any naturally occurring amino acid
  Transcript Sequence Number=SeqID_41231
  Homolog annotation: Hit_ID=B3VTB4; Match level="QueryCoverage=92%, HitCoverage=48%, E-value=3e-11, Identity=50%"; Hit description =Putative retroelement protein
MMQVHKQHRKGFNSLVILVVWLIWKQRNTCLFEGXSPNFNVIMQDIRDEARIWCMAGAKCLRSIWP

SEQ ID NO: 107206 - protein, 140 aa, Setaria italica
  misc_feature (117)..(117): Xaa can be any naturally occurring amino acid
  Transcript Sequence Number=SeqID_41232
  Gene Ontology: Mol. function=transposase activity; Biological process= transposition, DNA-mediated
IGKKVSIRRVDIHVSPTEEDNGGTAGSDIEEVSPSFDNGKRRSRVVIDKGKKAKTGTTLVIQEKLSEIAEQAKAFTSRKVGEVTVEQVMDLVLDCGAGYGTDEHFIATELFVKKDQXMTLPTKNIRFGWLTRKFNAKYGN

SEQ ID NO: 107207 - protein, 57 aa, Setaria italica
  Transcript Sequence Number=SeqID_41233
  Gene Ontology: Mol. function=electron carrier activity; Cellular component=chloroplast envelope
  Homolog annotation: Hit_ID=B9S1Y2; Match level="QueryCoverage=100%, HitCoverage=19%, E-value=1e-09, Identity=61%"; Hit description =Electron transporter, putative
VVSRGATDVDVKRLPKRPAPPRIYAINCKYPIFFQERATHICLDCGYIYFLPKPFEE

SEQ ID NO: 107208 - protein, 264 aa, Setaria italica
  Transcript Sequence Number=SeqID_41234
  Gene Ontology: Mol. function=electron carrier activity; Cellular component=chloroplast envelope
  Homolog annotation: Hit_ID=B9S1Y2; Match level="QueryCoverage=100%, HitCoverage=98%, E-value=8e-92, Identity=64%"; Hit description =Electron transporter, putative
  Pfam annotation: Domain name=Rubredoxin; Domain location=189-224; Score=27.2; E_value=1.1e-05; Accession=PF00301.12; Description =Rubredoxin
  Subcellular localization annotation: CTP_CleavageSite=71; ConfidenceScore=5.49e-01
MAATISYVAAPSLINRSSIARAQRPAPPPVISASTKTKTGFHGVSLVDTRWAAGHRRGGGGRRRLLQVNARSTAAKNIEVEVDKPLGLALGQKPGGGVVITSVESGGNAARAGLKAGDQVLYTSSFFGDELWPADKLGFTKTAIQAKPDSVYFVVSRGATDVDVKRLPKRPAPPRFGRKLTDAQKERATHICLDCGYIYFLPKPFEEQPDDYGCPQCNAAKKRFAKYDAATGRAIGGALPPIAVIVSLVIGIAGVGALLVYGLQ

SEQ ID NO: 107209 - protein, 64 aa, Setaria italica
  Transcript Sequence Number=SeqID_41235
CCNTAIRALFRWHVVADRYEQRIHEYVWVFIHCQNWPVSFSTFMATTASLGITDWFKSSWFVFL

SEQ ID NO: 107210 - protein, 93 aa, Setaria italica
  Transcript Sequence Number=SeqID_41236
  Gene Ontology: Mol. function=nucleic acid binding; Cellular component= nucleus; Biological process=mRNA processing
  Homolog annotation: Hit_ID=B9T4F5; Match level="QueryCoverage=80%, HitCoverage=15%, E-value=1e-31, Identity=88%"; Hit description =Polypyrimidine tract binding protein, putative
PVNQTAIEGIVQPTVGPDGKIKEPESNVLLASIENMQYAVTVDVLHTVFSAFGTVQKIAMFEKNGGMQALIQYPERCRSSGRHKMDICNFQQL

SEQ ID NO: 107211 - protein, 208 aa, Setaria italica
  Transcript Sequence Number=SeqID_41237
  Gene Ontology: Mol. function=nucleic acid binding; Cellular component= nucleus; Biological process=mRNA processing
  Homolog annotation: Hit_ID=B6U4H8; Match level="QueryCoverage=94%, HitCoverage=65%, E-value=1e-102, Identity=74%"; Hit description =Polypyrimidine tract-binding protein
  Pfam annotation: Domain name=RRM_1; Domain location=117-184; Score =2.3; E_value=0.12; Accession=PF00076.14; Description=RNA recognition motif. (a.k.a. RRM, RBD, o
  Pfam annotation: Domain name=RRM_1; Domain location=22-92; Score =23.1; E_value=0.0012; Accession=PF00076.14; Description=RNA recognition motif. (a.k.a. RRM, RBD, o
  Pfam module annotation: Pfam domain module=RRM_1::RRM_1; Domain location=117-184::22-92
MSSSGGGGGQQFRYAQTPSKVLHLRNLPWECAEEELVELCKPFGRIVNTKSGVGANRNQAFVEFTDVNQAISMVSYFASSSEPAQIRGKTVYIQYSNRQEIINNKSPGETAGNVLLVTIEGVQASDVTIDVIHMDFSAFGYVHRLQLFEKAAGFQALIQYSDAATASAAREALDGRSIPSYLLPEHVTSCCLRISFSAHKDLNIKFQF

SEQ ID NO: 107212 - protein, 115 aa, Setaria italica
  Transcript Sequence Number=SeqID_41238
  Gene Ontology: Mol. function=nucleic acid binding; Cellular component= nucleus; Biological process=mRNA processing
  Homolog annotation: Hit_ID=B9T4F5; Match level="QueryCoverage=94%, HitCoverage=23%, E-value=3e-24, Identity=50%"; Hit description =Polypyrimidine tract binding protein, putative
QKAIFADVTTAAVAKQALEGHCIYDGGYCKLHLSYSRHTDLNVKAHDERSRDYTLSDPNAQLQAAAQAPAPGVAWQNTSAPAAPFYASTAASPPAGVGQVPAWNPNMQAGAFASA

SEQ ID NO: 107213 - protein, 160 aa, Setaria italica
  misc_feature (142)..(142): Xaa can be any naturally occurring amino acid
  Transcript Sequence Number=SeqID_41239
  Gene Ontology: Mol. function=nucleic acid binding; Cellular component= nucleus; Biological process=mRNA processing
  Homolog annotation: Hit_ID=B6U4H8; Match level="QueryCoverage=100%, HitCoverage=34%, E-value=3e-28, Identity=47%"; Hit description =Polypyrimidine tract-binding protein
KEALEGHCIYDGGYCKLHLSYSRHTDLNVKAHGDKSRDYTIPPGVIQGVPQPPGAAATSTGWQGNIQGAGAYAPPGIPAQNHSANGQVPNWNSGNSGYPPAPGAYPGQMYSSPAQYSASGGFPNAPPAAPPQYAASGGFPTXPAAPPHELHASQQMPPQH

SEQ ID NO: 107214 - protein, 189 aa, Setaria italica
  Transcript Sequence Number=SeqID_41240
  Gene Ontology: Mol. function=nucleic acid binding; Cellular component= nucleus; Biological process=mRNA processing
  Homolog annotation: Hit_ID=B6U4H8; Match level="QueryCoverage=99%, HitCoverage=60%, E-value=1e-76, Identity=67%"; Hit description =Polypyrimidine tract-binding protein
TNTKYLPINYSAMDGTLQPAVGADGRKVEAQGNVLLASIENMQYAVTVDVLHTVFSAFGTVQKIAIFEKNGGTQALIQYPDVTTAAVAKEALEGHCIYDGGYCKLHLSYSRHTDLNVKAHGDKSRDYTIPPGVIQGVPQPPGAAATSTGWQGNIQGAGAYAPPGIPAQNHSANGQVPNWNSGNSGYPQA

SEQ ID NO: 107215 - protein, 173 aa, Setaria italica
  Transcript Sequence Number=SeqID_41241
  Gene Ontology: Mol. function=nucleic acid binding; Cellular component= nucleus; Biological process=mRNA processing
  Homolog annotation: Hit_ID=B9T4F5; Match level="QueryCoverage=65%, HitCoverage=24%, E-value=3e-23, Identity=49%"; Hit description =Polypyrimidine tract binding protein, putative
QKAIFADVTTAAVAKQALEGHCIYDGGYCKLHLSYSRHTDLNVKAHDERSRDYTLSDPNAQLQAAAQAPAPGVAWQNTSAPAAPFYASTAASPPAGVGQVPAWNPNMQAGAFASASTPYPSQPMMANAMPHYPAVGTSSGAPPVPFQASQQMPQYGIPPGCLPSVYVYLPSLG

SEQ ID NO: 107216 - protein, 334 aa, Setaria italica
  misc_feature (184)..(184): Xaa can be any naturally occurring amino acid
  Transcript Sequence Number=SeqID_41242
  Gene Ontology: Mol. function=nucleic acid binding; Cellular component= nucleus; Biological process=mRNA processing
  Homolog annotation: Hit_ID=B6U4H8; Match level="QueryCoverage=99%, HitCoverage=77%, E-value=1e-113, Identity=63%"; Hit description =Polypyrimidine tract-binding protein
KVFSAFGYVHKIATFEKAAGFQALIQYSDAATASAAREALDGRSIPSYLLPEHVTSCCLRISFSAHKDLNIKFQSNRSRDYNNPYLPINYSAMDGTLQPAVGADGRKVEAQGNVLLASIENMQYAVTVDVLHTVFSAFGTVQKIAIFEKNGGTQALIQYPDVTTAAVAKEALEGHCIYDGGYCXGDKSRDYTIPPGVIQGVPQPPGAAATSTGWQGNIQGAGAYAPPGIPAQNHSANGQVPNWNSGNSGYPPAPGAYPGQMYSSPAQYSASGGFPNAPPAAPPQYAASGGFPTPPAAPPHELHASQQMPPQHGIQSGPAGVPGTSQPPPPSYYH

SEQ ID NO: 107217 - protein, 460 aa, Setaria italica
  Transcript Sequence Number=SeqID_41243
  Gene Ontology: Mol. function=nucleic acid binding; Cellular component= nucleus; Biological process=mRNA processing
  Homolog annotation: Hit_ID=Q2XTB3; Match level="QueryCoverage=87%, HitCoverage=92%, E-value=1e-170, Identity=71%"; Hit description =Polypyrimidine tract-binding protein-like
  Pfam annotation: Domain name=RRM_1; Domain location=19-89; Score =23.2; E_value=0.0011; Accession=PF00076.14; Description=RNA recognition motif. (a.k.a. RRM, RBD, o
  Pfam annotation: Domain name=RRM_1; Domain location=247-316; Score =1.0; E_value=0.16; Accession=PF00076.14; Description=RNA recognition motif. (a.k.a. RRM, RBD, o
  Pfam module annotation: Pfam domain module=RRM_1::RRM_1; Domain location=19-89::247-316
MPSGSATQFRYTQTPSKVLHLRNMPWECTEEELVELCKPFGRVVNTMCNVGANRNQAFVEFTDLNQAISMVSYYASSSEPAQVRGKTVYIQYSNRQEITNNKGTGDSSGNVLLVTFEGVQPNDVTIEVIHLVFSAFGFVHKIATFEKAAGFQALIQYTDAPTALEAKNSLDGRSIPKYLLPEHINACHMRITFSAHKDLNIKFQSHRSRDYTNPYLPVNQTAIEGIVQPTVGPDGKIKEPESNVLLASIENMQYAVTVDVLHTVFSAFGTVQKIAMFEKNGGMQALIQYPDVTTAAVAKQALEGHCIYDGGYCKLHLSYSRHTDLNVKAHDERSRDYTLSDPNAQLQAAAQAPAPGVAWQNTSAPAAPFYASTAASPPAGVGQVPAWNPNMQAGAFASASTPYPSQPMMANAMPHYPAVGTSSGAPPVPFQASQQMPQYGIPPGAPPHAPPAGQPMYFPK

SEQ ID NO: 107218 - protein, 67 aa, Setaria italica
  Transcript Sequence Number=SeqID_41244
MSSMANFAAQLKDKLLGLLDRVVNCGGAGAGANKDVPEEPTKLPNVQPIAIKPRDPTVSGGSKAGVN

SEQ ID NO: 107219 - protein, 64 aa, Setaria italica
  misc_feature (33)..(33): Xaa can be any naturally occurring amino acid
  Transcript Sequence Number=SeqID_41245
  Gene Ontology: Mol. function=voltage-gated chloride channel activity; Cellular component=integral to membrane; Biological process=chloride transport
  Homolog annotation: Hit_ID=Q8LPA2; Match level="QueryCoverage=98%, HitCoverage=7%, E-value=9e-12, Identity=62%"; Hit description =Chloride channel
DTSEYTVVRKMSLGTGRGIRGLRHILVVPKTPXSQIPLVVGILTRHDFMPEHVHGPFPNLHKSR

SEQ ID NO: 107220 - protein, 40 aa, Setaria italica
  Transcript Sequence Number=SeqID_41246
  Subcellular localization annotation: CTP_CleavageSite=47; ConfidenceScore=5.12e-01
SASAIPPAASPLTPTTLMSPSTRRRSKASRLDYWCCRQAS

SEQ ID NO: 107221 - protein, 182 aa, Setaria italica
  misc_feature (132)..(132): Xaa can be any naturally occurring amino acid
  Transcript Sequence Number=SeqID_41247
  Gene Ontology: Cellular component=integral to membrane
  Homolog annotation: Hit_ID=B6TUW9; Match level="QueryCoverage=99%, HitCoverage=96%, E-value=1e-57, Identity=61%"; Hit description =Salicylic acid-induced 1 protein
  Pfam annotation: Domain name=DUF588; Domain location=1-141; Score =102.9; E_value=1.1e-27; Accession=PF04535.4; Description=Domain of unknown function (DUF588)
MAAMKLPELALRVCVIPLAVASLWEMATNRQVDDTYGEVRFSNLSGFTYLVGINAVTAAYAVASILLSSFKSFARYDWLILVLDQASAYLLVTSASAAAEVLQLARRGDRDVSWGEVCSYFSRFCGKATVSXALHAAALACFVALSLVSAFRVFSKCHPPGGVSSHANYSDEPKHAQEEQGK

SEQ ID NO: 107222 - protein, 279 aa, Setaria italica
  Transcript Sequence Number=SeqID_41248
  Gene Ontology: Mol. function=unfolded protein binding; Cellular component=cytoplasm; Biological process=cellular protein metabolic process
  Homolog annotation: Hit_ID=A8HQ74; Match level="QueryCoverage=98%, HitCoverage=49%, E-value=2e-97, Identity=65%"; Hit description=T -complex protein, eta subunit
  Pfam annotation: Domain name=Cpn60_TCP1; Domain location=35-279; Score=-92.6; E_value=3.2e-11; Accession=PF00118.16; Description=TCP -1cpn60 chaperonin family
MSAMLQPQVILLKEGTDTSQGKAQMVSNINACTAVVDTVRTTLGPRGMDKLIHDDKGGVTISNDGATIMRLLDIVHPAAKILVDIARSQDSEVGDGTTTVVLLAGEFLKEAKPYVEDGVHPHSLIRSYRAAGHLATEKVKELAVSIEGKSLEEKKLLLAKCAATTLSSKLIGGEKEFFASMVVDAVLAIGNDDRLNMIGIKKVPGGTMRDSFLVNGVAFKKTFSYAGFEQQPKKFLNPKILLLNIELELKSEKENAEIRLSDPLQYQSIVDAEWNIIYD

SEQ ID NO: 107223 - protein, 120 aa, Setaria italica
  Transcript Sequence Number=SeqID_41249
  Gene Ontology: Mol. function=identical protein binding; Cellular component=chaperonin-containing T-complex; Biological process =cellular protein metabolic process
  Homolog annotation: Hit_ID=A8HQ74; Match level="QueryCoverage=62%, HitCoverage=13%, E-value=1e-27, Identity=75%"; Hit description=T -complex protein, eta subunit
LRRLITEEQTLVEQIAGFDATDVLNKLRQKHASGEGANYGVDINTGGIADSFANFVWEPAVVKINAINAATEAACLILSVDETVKNPKSESAQGDAAAMGGRGRGGAAMRGRGGRGMRRR

SEQ ID NO: 107224 - protein, 404 aa, Setaria italica
  Transcript Sequence Number=SeqID_41250
  Gene Ontology: Mol. function=identical protein binding; Cellular component=chaperonin-containing T-complex; Biological process =cellular protein metabolic process
  Homolog annotation: Hit_ID=A8HQ74; Match level="QueryCoverage=92%, HitCoverage=67%, E-value=1e-151, Identity=68%"; Hit description=T -complex protein, eta subunit
  Pfam annotation: Domain name=Cpn60_TCP1; Domain location=1-372; Score= 235.0; E_value=1.9e-67; Accession=PF00118.16; Description=TCP-1cpn60 chaperonin family
VLAKCAATTLSSKLIGGEKEFFASMVVDAVLAIGNDDRLNMIGIKKVPGGTMRDSFLVNGVAFKKTFSYAGFEQQPKKFLNPKILLLNIELELKSEKENAEIRLSDPLQYQSIVDAEWNIIYDKLDKCVKSGAKIVLSRLAIGDLATQYFADRDIFCAGRVTEEDLQRVAAATGGTVQTSVNNVIDEVLGSCEVFEEKQVGNERFNIFSGCPSGQTATIVLRGGADQFIEEAERSLHDAIMIVRRALKNSTVVPGGGAIDMEISKYLRQHARTIAGKSQFFVNSFAKALEVIPRQLCDNAGFDATDVLNKLRQKHASGDGANYGVDINTGGIADSFANFVWEPAVVKINAINAATEASCLILSVDETVKNPKSESAQGDAAAGAMAGRGGGAMRGRGGRGMRRR

SEQ ID NO: 107225 - protein, 98 aa, Setaria italica
  Transcript Sequence Number=SeqID_41251
  Gene Ontology: Mol. function=protein serine/threonine kinase activity; Biological process=protein amino acid phosphorylation
  Homolog annotation: Hit_ID=Q5KQI5; Match level="QueryCoverage=100%, HitCoverage=10%, E-value=3e-25, Identity=55%"; Hit description =Unkown protein
  Subcellular localization annotation: CTP_CleavageSite=76; ConfidenceScore=5.28e-01
ELLNFTLGSYADEFPTVVSSGLKRSALAGILVGTIVAAVAVSVVSTVFIMKKRRKHRTVSRRSLLSRFSIKVDGVKCFTFEEMAGATSDFNISAQVGQ

SEQ ID NO: 107226 - protein, 228 aa, Setaria italica
  Transcript Sequence Number=SeqID_41252
  Gene Ontology: Mol. function=protein serine/threonine kinase activity; Biological process=protein amino acid phosphorylation
  Homolog annotation: Hit_ID=Q5KQI5; Match level="QueryCoverage=99%, HitCoverage=24%, E-value=9e-68, Identity=57%"; Hit description =Unkown protein
  Pfam annotation: Domain name=LRR_1; Domain location=2-24; Score=13.7; E_value=0.72; Accession=PF00560.25; Description=Leucine Rich Repeat
  Pfam annotation: Domain name=LRR_1; Domain location=54-75; Score=4.3; E_value=45; Accession=PF00560.25; Description=Leucine Rich Repeat
  Pfam module annotation: Pfam domain module=LRR_1::LRR_1; Domain location=2-24::54-75
  Subcellular localization annotation: CTP_CleavageSite=31; ConfidenceScore=5.11e-01
STITTIDLSHNFLDGTIPPNFSGLLTFSYCQSMEPLNGSVPPTIWSNITFTGNRTLILDFQNNSLDTIPAAFEPPEAVTLLLYGNPVCTTSNAARAANLCQPKSVIGEPSGEGRQVNTLCPPCPTDKNYEYNPASPIPCLCAVPLGVGFRLKSPGIFDFLPYKETFEINLTSLLELRVYQLYIERFMRETGPRLNTHLKLFPNNTPLFNTAEVVRLRQVLAGWQITLS

SEQ ID NO: 107227 - protein, 165 aa, Setaria italica
  Transcript Sequence Number=SeqID_41253
  Gene Ontology: Mol. function=protein serine/threonine kinase activity; Biological process=protein amino acid phosphorylation
  Homolog annotation: Hit_ID=Q5KQI5; Match level="QueryCoverage=87%, HitCoverage=15%, E-value=8e-73, Identity=88%"; Hit description =Unkown protein
  Pfam annotation: Domain name=Pkinase; Domain location=1-165; Score= -46.3; E_value=9.8e-06; Accession=PF00069.17; Description=Protein kinase domain
  Pfam annotation: Domain name=Pkinase_Tyr; Domain location=1-163; Score=-53.6; E_value=3.7e-10; Accession=PF07714.9; Description =Protein tyrosine kinase
  Pfam module annotation: Pfam domain module=Pkinase::Pkinase_Tyr; Domain location=1-165::1-163
AIKRAHEDSLQGSKEFCTEIELLSRLHHRNLVSLVGYCDEEDEQMLVYEFMPNGTLRDHLSAKTERPLTFGRRVHIALGAAKGILYLHTEANPPIYHRDVKASNILLDSKFVAKVADFGLSRLAPVPDVEGTLPAHISTVVKGTPVSLILSVTLTMSKLPCFLLW

SEQ ID NO: 107228 - protein, 41 aa, Setaria italica
  Transcript Sequence Number=SeqID_41254
ASPVSSQIAKLRYATQIRNSSLQAAVPKTPGKTRNIILSLY

SEQ ID NO: 107229 - protein, 160 aa, Setaria italica
  misc_feature (40)..(40): Xaa can be any naturally occurring amino acid
  Transcript Sequence Number=SeqID_41255
  Gene Ontology: Mol. function=protein serine/threonine kinase activity; Cellular component=plasma membrane; Biological process =protein amino acid phosphorylation
  Homolog annotation: Hit_ID=B9T0N7; Match level="QueryCoverage=98%, HitCoverage=17%, E-value=4e-42, Identity=55%"; Hit description=ATP binding protein, putative
VDLDPEYFLTHKLTERSDVYSLGVVLLELLTGMRPIQHGXNIVREVNMAYQSGDISRIIDSRMPSYPPECVTRFLSLAIKCCRDETEARPYMADIVRELETIRGMLPEGEDALSETTGSGLLTKTMSSSSTPTGALYVSSHMSGSGQVDSGIPSGTVAPR

SEQ ID NO: 107230 - protein, 824 aa, Setaria italica
  Transcript Sequence Number=SeqID_41256
  Gene Ontology: Mol. function=protein serine/threonine kinase activity; Biological process=protein amino acid phosphorylation
  Homolog annotation: Hit_ID=Q5KQI5; Match level="QueryCoverage=100%, HitCoverage=87%, E-value=0.0, Identity=71%"; Hit description=Unkown protein
  Pfam annotation: Domain name=LRR_1; Domain location=101-124; Score =0.6; E_value=2.4e+02; Accession=PF00560.25; Description=Leucine Rich Repeat
  Pfam annotation: Domain name=LRR_1; Domain location=126-147; Score =9.9; E_value=3.9; Accession=PF00560.25; Description=Leucine Rich Repeat
  Pfam annotation: Domain name=LRR_1; Domain location=149-169; Score =10.3; E_value=3.2; Accession=PF00560.25; Description=Leucine Rich Repeat
  Pfam annotation: Domain name=LRR_1; Domain location=172-194; Score =15.2; E_value=0.27; Accession=PF00560.25; Description=Leucine Rich Repeat
  Pfam annotation: Domain name=LRR_1; Domain location=196-219; Score =9.0; E_value=5.9; Accession=PF00560.25; Description=Leucine Rich Repeat
  Pfam annotation: Domain name=LRR_1; Domain location=225-246; Score =2.0; E_value=1.3e+02; Accession=PF00560.25; Description=Leucine Rich Repeat
  Pfam annotation: Domain name=LRR_1; Domain location=29-51; Score =11.4; E_value=2; Accession=PF00560.25; Description=Leucine Rich Repeat
  Pfam annotation: Domain name=LRR_1; Domain location=5-27; Score=12.6; E_value=1.2; Accession=PF00560.25; Description=Leucine Rich Repeat
  Pfam annotation: Domain name=LRR_1; Domain location=53-75; Score =16.2; E_value=0.14; Accession=PF00560.25; Description=Leucine Rich Repeat
  Pfam annotation: Domain name=LRR_1; Domain location=77-99; Score=7.5; E_value=11; Accession=PF00560.25; Description=Leucine Rich Repeat
  Pfam annotation: Domain name=Pkinase; Domain location=494-763; Score =153.4; E_value=7.1e-43; Accession=PF00069.17; Description=Protein kinase domain
  Pfam annotation: Domain name=Pkinase_Tyr; Domain location=494-763; Score=121.2; E_value=3.3e-33; Accession=PF07714.9; Description =Protein tyrosine kinase
  Pfam module annotation: Pfam domain module=LRR_1::LRR_1::LRR_1::LRR _1::LRR_1::LRR_1::LRR_1::LRR_1::LRR_1::LRR_1::Pkinase::Pkinase_Tyr; Domain location=101-124::126-147::149-169::172-194::196-219::225 -246::29-51::5-27::...
  Pfam module annotation: Domain location=53-75::77-99::494-763::494-763
GNVTTLKLILLNGNQLSGILPDEIGNLQNLNRLQVDQNQLFGPIPKSFANLRSVKHLHMNNNSLSGSIPSELSRLPLLLHLLVDNNNLSGPLPPEFAKAPALKIFQADNNNFSGSSIPTTYSNISTLLKLSLRNCSLQGAIPDLSSIPQLGYLDISWNQLTGSIPTNKLASNITTIDLSHNMLDGTIPKNFSGLPDLQILSLEDNNLNGSVPSIIWNDINLAGNRSLVLDFQNNSLNTIPATFDPPPNVTVMLYGNPVCRNTNGALVTNLCKPMSVNQQTSKKEQGSTFSCQPCPTDKNYEYNPSSPIPCFCAVPLGVGLRLKSPGITDFHPHEEAFGINLTSLLQLFLYQLNIEHYIWEVGPRLNMHMKLFPSNSSLFNISEIVRLRHVLAGWEITLSDVFGPYELLNFTLGSYADEFPNAASTGLSKAALGSILAGSIAGAIALSVVATTLMLRRRSRHRTVSKRSMSRFSVKIDGVRCFAFEEMAIATNNFDISAQVGQGGYGKVYKGFLADGAIVAIKRAHEDSLQGSKEFCTEIELLSRLHHRNLVSLVGYCDEEDEQMLVYEFMSNGTLRDHLSAKSKRPLSFGLRLKIALGASKGILYLHTEADPPIFHRDVKASNILLDSKFVAKVADFGLSRLAPVPDVEGTLPAHVSTVVKGTPGYLDPEYFLTHKLTDKSDVYSLGVVFLEMLTGMKPIEHGKNIVREVNSACQSGNISGIIDGRMGLCPPECVSRFLSLATKCCQDETDDRPSMWEIVRELELILRMMPKEDLVLLETSETDSTDVSKSLSASASGTLFISSQVSGSLDASSGMISGRVTPR

SEQ ID NO: 107231 - protein, 79 aa, Setaria italica
  Transcript Sequence Number=SeqID_41257
DKVCFCLVTFVCGYQIFLHGDPYTPENAERPLPVWIKSHFSGFVFPLGHFCESVNIRGHPFSFFSLAEVFGFYASEKPS

SEQ ID NO: 107232 - protein, 138 aa, Setaria italica
  misc_feature (17)..(17): Xaa can be any naturally occurring amino acid
  Transcript Sequence Number=SeqID_41258
  Gene Ontology: Mol. function=hydrolase activity; Cellular component =plasma membrane
  Homolog annotation: Hit_ID=B6T6U1; Match level="QueryCoverage=97%, HitCoverage=56%, E-value=5e-58, Identity=79%"; Hit description=Endo -1,3;1,4-beta-D-glucanase
GSQCCDNPPALNPTGGXGKVVDSFGGLKAYVAGSDESKAAVILISDIFGFQSPNLRKIADKVALSGYFVVVPDFLHGDPYTPENAERPLPVWIKSHSPGFEEAKPVIAALKEKGVSSVGAAGYCWGGVVVVELAKSLL

SEQ ID NO: 107233 - protein, 240 aa, Setaria italica
  Transcript Sequence Number=SeqID_41259
  Gene Ontology: Mol. function=hydrolase activity; Cellular component =plasma membrane
  Homolog annotation: Hit_ID=B6T6U1; Match level="QueryCoverage=100%, HitCoverage=100%, E-value=1e-105, Identity=77%"; Hit description =Endo-1,3;1,4-beta-D-glucanase
  Pfam annotation: Domain name=DLH; Domain location=29-239; Score=85.0; E_value=2.7e-22; Accession=PF01738.10; Description=Dienelactone hydrolase family
MAGSQCCDNPPALNPTGGEGKVVDSFGGLKAYVAGSDESKAAVILISDIFGFQSPNLRKIADKVALSGYFVVVPDFLHGDPYTPENAERPLPVWIKSHSPKKGFEEAKPVIAALKEKGVSSVGAAGYCWGGVVVVELAKAHEIHAAVVLHPGPIAVDDIKEVKCPISILGAEFDHTAPPELVKQFEQVLLANSRVAHFVKIFPGVAHGWSVRYNHDDPAAVKSAEEALGDTIDWFNKNLK

SEQ ID NO: 107234 - protein, 106 aa, Setaria italica
  misc_feature (81)..(106): Xaa can be any naturally occurring amino acid
  Transcript Sequence Number=SeqID_41260
DRSRRDGSINTRTCCCCSYGFSLYSISFGWLVTCFSCSCMLLGNSSGTWYCRVCRMLLGLCMQCNDDGDNIMEGLITKEIXXXXXXXXXXXXXXXXXXXXXXXXXX

SEQ ID NO: 107235 - protein, 129 aa, Setaria italica
  Transcript Sequence Number=SeqID_41261
  Gene Ontology: Mol. function=strictosidine synthase activity; Cellular component=plasma membrane; Biological process=biosynthetic process
  Homolog annotation: Hit_ID=B6TT85; Match level="QueryCoverage=72%, HitCoverage=27%, E-value=5e-46, Identity=90%"; Hit description =Strictosidine synthase 3
  Subcellular localization annotation: CTP_CleavageSite=27; ConfidenceScore=5.08e-01
MAVAAHSSSLSFLALLPLLLIPPVVLSAAGVAAVSYETKSMDPGLVVMTLPEPVSGPESLAFDGRGGGPYSGVSDGRVLRWEGGLRGWTEYAYNSKHKNVAMCAPEKKLVVPESVCGRPLGLQFHRQSG

SEQ ID NO: 107236 - protein, 158 aa, Setaria italica
  Transcript Sequence Number=SeqID_41262
  Homolog annotation: Hit_ID=Q109L7; Match level="QueryCoverage=94%, HitCoverage=51%, E-value=2e-29, Identity=51%"; Hit description =Ribosomal RNA assembly protein mis3, putative, expressed
NPALATESWDRFLPKFKKKNVKQKKPQTKEKKPYTPFPPPQQPSKIDEELMTGEYFMSEKKKSEKKWQEKLEKQSGKAEENKRKREAAFVPPKENTTGPSESDKTANDNSGIGDLAKSLKKKAKEFRKNEAQENVRVESYLASNEESCPKKEKSTKSK

SEQ ID NO: 107237 - protein, 337 aa, Setaria italica
  misc_feature (302)..(302): Xaa can be any naturally occurring amino acid
  Transcript Sequence Number=SeqID_41263
  Gene Ontology: Mol. function=RNA binding; Cellular component =ribonucleoprotein complex; Biological process=ribosome biogenesis
  Homolog annotation: Hit_ID=B9RI36; Match level="QueryCoverage=86%, HitCoverage=76%, E-value=1e-108, Identity=66%"; Hit description =Ribosomal RNA assembly protein mis3, putative
MASDDEANAAAVAAEEDAEAAEGKTWRRKGKHDKPKPWDEDPNIDHWKIEKFDPSWNEGGMLEVSSFSTLFPQYREKYLQESWPIVKGALKEHGISCELNLVEGSMTVSTTRKTRDPFIIIKARELIKLLSRSVPAPQAIKILDDEMNCDIIKIGGLVRNKERFVKRRERLLGPNLSTLKAIEILTGCYILVQGNTVAAMGSYKGRGLKQVRRIVEDCIKNVKHPVYHIKELLIKRELAKNPALATESWDRFLPKFKKKNVKQKKPQTKEKKPYTPFPPPQQPSKIDEELMTGEYFMSEKKXSEKKWQEKLEKQSRKAEENKRKREAVSRYLFLFKV

SEQ ID NO: 107238 - protein, 84 aa, Setaria italica
  Transcript Sequence Number=SeqID_41264
EEMGIIRSGESTTRNTTGRRCSTPPDPSMHMISIHPFIFHMLVELDYYLNALHATSVFTSFVRVREKLGAMMSEVDYHGERTVY

SEQ ID NO: 107239 - protein, 50 aa, Setaria italica
  Transcript Sequence Number=SeqID_41265
KTTPDSLLAEKLFIHKIYHRESLSATRVTCLEESTSIEESALDGTLPTGS

SEQ ID NO: 107240 - protein, 57 aa, Setaria italica
  Transcript Sequence Number=SeqID_41266
FPSSIFILLIVSEFTWFEALSYLLCGLMASNTSTTAVAVGLEKTFLPLNESLFFLSP

SEQ ID NO: 107241 - protein, 55 aa, Setaria italica
  Transcript Sequence Number=SeqID_41267
LSHIQEQTKDKFIHIDMAFFVFDLSDFCNLVKFTTKYSLLNFVFKKKLVNDFYGF

SEQ ID NO: 107242 - protein, 101 aa, Setaria italica
  Transcript Sequence Number=SeqID_41268
SNTNWFGGFSIRMEGSPDMNRCTARVVQGTGHCGASGAPPRELTLAFRMLGLALYTVPPLLSQPEEAMDFCPGYDTRRRSPRWPVVAPAPSSQPQSPPAPA

SEQ ID NO: 107243 - protein, 44 aa, Setaria italica
  Transcript Sequence Number=SeqID_41269
IQNFKFAVTMKLKLDFEETKLRRLMIGQIPCHRNNIYNCEEIRQ

SEQ ID NO: 107244 - protein, 63 aa, Setaria italica
  Transcript Sequence Number=SeqID_41270
SLKCFKLCAKLPFSRLHDRSSCSFNEPVQSYVVLTLPARAYAVMCAVSMMILYMIFTLSNLQW

SEQ ID NO: 107245 - protein, 101 aa, Setaria italica
  Transcript Sequence Number=SeqID_41271
  Gene Ontology: Mol. function=hydrolase activity, acting on glycosyl bonds; Biological process=cell wall organization and biogenesis
NTSGTSRRADAIRFACSDAVPCTGIVLSDIDLRRSDDDGGGEVQTVCNCAVGFDYGCVRPAVDCLRSSTCGGAPDDHPDHDDDKEKEAAETTPAPILHTEL

SEQ ID NO: 107246 - protein, 132 aa, Setaria italica
  Transcript Sequence Number=SeqID_41272
PVMRSSTVHSWRTTEDTLRGRNPLNCKIDLAIFMASNVDEPHASPHSRSPSPSDLLLFQIKQKKTERDRFRENKLTEQHYRKLNIIRFHPRALAMPGARVPGSQRRHATLAVQADEWNVKVSTPNDDERGRS

SEQ ID NO: 107247 - protein, 135 aa, Setaria italica
  Transcript Sequence Number=SeqID_41273
  Gene Ontology: Mol. function=DNA-directed RNA polymerase activity; Biological process=metabolic process
  Homolog annotation: Hit_ID=Q2QYS5; Match level="QueryCoverage=98%, HitCoverage=29%, E-value=3e-21, Identity=43%"; Hit description=DNA -directed RNA polymerase
ILPDSSHRDASIYRDTSGWKKEFRIVDRRETRLEAMMLSNPTDCVMDEEYGTCMWHRPRRMLQIFSLKVAKIPVDAGKIELYGYIAARDDLEPLLNYVVNVSRDDPIIVEQGSLITMAPKRGIKLGYDTLIEYCI

SEQ ID NO: 107248 - protein, 184 aa, Setaria italica
  Transcript Sequence Number=SeqID_41274
  Gene Ontology: Mol. function=Rho guanyl-nucleotide exchange factor activity
  Homolog annotation: Hit_ID=B6U1X9; Match level="QueryCoverage=65%, HitCoverage=21%, E-value=5e-62, Identity=93%"; Hit description =Pollen-specific kinase partner protein
  Pfam annotation: Domain name=PRONE; Domain location=3-184; Score= -76.7; E_value=3.8e-10; Accession=PF03759.5; Description=PRONE (Plant- specific Rop nucleotide
RKERTKDEGRTLQRNSVDGSSSSSDAASTDEWLPVPAPARKPPGCCAPDSEVAKQQHKHKRRAPSEMELMKERFAKLLLGEDMSGSGKGVCTALAISNAITNLCATIFGQLWRLEPLPPEKKAMWRREMDWLLCVSDHIVELVPTWQSFPDGTRLEIMTSRPRSDLYINLPALRKLDHMLLEIL

SEQ ID NO: 107249 - protein, 79 aa, Setaria italica
  Transcript Sequence Number=SeqID_41275
ESFIMNKAPQLVLLAYYHLTTCRCSISSEASYLHKNISTIEHTLRCANNNRRRLFSRQKLASCSGARLQEAMAASDINR

SEQ ID NO: 107250 - protein, 174 aa, Setaria italica
  Transcript Sequence Number=SeqID_41276
CPDTQHPHLPISQETPSNNMFVAALLAVVVRVGKVRVLGGSTKTVAGPYLLLLAHAFSGDVEPCAAVGRLAGEGEAPMGGGIRKSVALPFKDCTGSGLQARGAAGLPSELLTVVARRTGRNLPWRPPAAEGILAPPPWIRCGYVVAARWIRWSIVMTRLPHRLRPPHLGHLAGI

SEQ ID NO: 107251 - protein, 54 aa, Setaria italica
  Transcript Sequence Number=SeqID_41277
  Gene Ontology: Mol. function=DNA binding; Cellular component=nucleus; Biological process=regulation of transcription
SINNKYVAKAAHIYISQSFQERNFLLSVIELTSPGSRPETSQQPSCKRALLNSL

SEQ ID NO: 107252 - protein, 230 aa, Setaria italica
  misc_feature (11)..(11): Xaa can be any naturally occurring amino acid
  misc_feature (169)..(169): Xaa can be any naturally occurring amino acid
  Transcript Sequence Number=SeqID_41278
  Gene Ontology: Mol. function=DNA binding; Cellular component=nucleus; Biological process=regulation of transcription
MRIQRKMNRTXREQNGQIDAHNNQSYGHSQATMELTPGMAPDELMEACPADSCKEDNSLCRNVLSGSMEPCPGEEKAASTNSSEVAEESRLQCIESTSPVLANFQTKECGETPAPEKPNEVVEDSRLQCVEFTSPSHTVLRAKAGAETFASPRSPVVAKDSKLPSMEFXSPAHTVATFQPYADYADDMPTPKFTASERNFLLSVIELTSPGSRPETSQQPSCKRALLNSL

SEQ ID NO: 107253 - protein, 209 aa, Setaria italica
  Transcript Sequence Number=SeqID_41279
  Gene Ontology: Mol. function=aspartic-type endopeptidase activity; Cellular component=chromatin; Biological process=regulation of transcription, DNA-dependent
  Homolog annotation: Hit_ID=Q7XW39; Match level="QueryCoverage=92%, HitCoverage=11%, E-value=6e-71, Identity=63%"; Hit description =OSJNBa0054D14.1 protein
VLVSPNSNLFALTLRFPSNVWQELFKLSDTQLLMSSSYHPQTDGQTERLNQCLEAFLRCSVHSCPRRWSKWLPLAEFWYNTSFHSALGHSPFEVLYGHPPRHFGISPLSSTSVPDLEIWLTERNMLNGLIQQQLLRAQQRMKSQADKHRSEREFQVGDMVYLKLQPYIQTSVASRSNQKLAFKFYGPFQVLQRVGQVAYKLDLPAESRI

SEQ ID NO: 107254 - protein, 124 aa, Setaria italica
  Transcript Sequence Number=SeqID_41280
  Gene Ontology: Mol. function=receptor activity
  Homolog annotation: Hit_ID=B6UEB9; Match level="QueryCoverage=98%, HitCoverage=31%, E-value=2e-22, Identity=44%"; Hit description=F-box domain containing protein
CFFIGQSKGRLHYLSRRTDSTSKMTELSIWVLQEHNTEDWVLKHRVTFLQLFGRMSCRDQDYNVVAIHPDRDLIFFLQHWDLQLKSYDMDSKEVCTLHTLGVGPQNIFPLVPYYAESSALANKH

SEQ ID NO: 107255 - protein, 293 aa, Setaria italica
  misc_feature (19)..(19): Xaa can be any naturally occurring amino acid
  Transcript Sequence Number=SeqID_41281
  Gene Ontology: Mol. function=nucleic acid binding; Cellular component= nucleus; Biological process=protein ubiquitination
  Homolog annotation: Hit_ID=Q0WVP4; Match level="QueryCoverage=85%, HitCoverage=40%, E-value=7e-33, Identity=30%"; Hit description=DNA -binding protein-like (Fragment)
  Pfam annotation: Domain name=DWNN; Domain location=1-70; Score=43.4; E_value=9e-10; Accession=PF08783.3; Description=DWNN domain
  Pfam annotation: Domain name=zf-CCHC; Domain location=160-177; Score =5.1; E_value=0.1; Accession=PF00098.15; Description=Zinc knuckle
  Pfam annotation: Domain name=zf-CCHC; Domain location=186-203; Score =17.5; E_value=0.00077; Accession=PF00098.15; Description=Zinc knuckle
  Pfam module annotation: Pfam domain module=DWNN::zf-CCHC::zf-CCHC; Domain location=1-70::160-177::186-203
TFSLPIPGAFASVAELKRXIAATGRHGTGRTRGRGPRDGIALCDPRTGEEYVDENTLIPQNSTVVVHRVAGHPTDAIITSPIVLENDGMASNKPVTESTLKSSGFTEADDEEAASMRTVIDAAEIKWGVSSSGGGYDGGGGQLGHRYGRPLEGEAPPPGYVCRICHIPGHFIWHCPSESKPPPPGYICHKCGVPGHFIHSCPNYGDTKYDSRRTSSLIPIISSSDNGIPAELARAMSSSVSAKLVAELHCPLCKKVMTDAMLTSKCCYDSFCDKCIRDYIIAQSNCICGVEIL

SEQ ID NO: 107256 - protein, 107 aa, Setaria italica
  Transcript Sequence Number=SeqID_41282
LPACFIISPSPTATHCRLALCCHSPHAIAWVNRVEERGCGIRVDAMHTLLFFHYLLCLWLLHFVIFTAWQHLKCLSPSSPPPATIHSFATLSWNGRPLARHGGCCAC

SEQ ID NO: 107257 - protein, 243 aa, Setaria italica
  Transcript Sequence Number=SeqID_41283
MHDKVASHENVETQQAEACCSPNAAKSTPLFPAEVLSNKSRNEVRSSSLGPNRKMNESLMASRAESVNMPLQRNTKGSHRKLSSTASVDENQGSSSQRVPNSKSSKSVAEGCRTADADMADSPTIEKTETIPSKSSFSEAVPPQNGEENHQKILTSASEADHGVCTANKVTDNRVRKVVAKRKLSAVQKKNSGSVSVSEDKSVSSARAAQSSRNANKVMVDQELQNTKEDRTNDTFGSLCKMP

SEQ ID NO: 107258 - protein, 68 aa, Setaria italica
  Transcript Sequence Number=SeqID_41284
YDDFSYKVRSHKRTSDDSIKLYLKIDRSLSTAWRLEVLISELKSVNSEASQHIFIVSIMVVFSYYLLK

SEQ ID NO: 107259 - protein, 189 aa, Setaria italica
  Transcript Sequence Number=SeqID_41285
  Homolog annotation: Hit_ID=Q01MS5; Match level="QueryCoverage=98%, HitCoverage=25%, E-value=2e-32, Identity=44%"; Hit description =OSIGBa0147M20.2 protein
MAGGLVVHLWNAWAIQILVLLSFALQVSLLVCAGIRRRQASSALRLLIWLLYLVADSTAIYTLGHLSVTSSRSSQQEQHQLAAFWAPFLLLHLGGKDSITAYAFEDNRLWLRHLLTLLVQALAAAFVIYKYVAADTAAGAGTTATTTLLLADILVFIVGVLKYGERTWALKCGNMADIESTVLSSRHHT

SEQ ID NO: 107260 - protein, 93 aa, Setaria italica
  Transcript Sequence Number=SeqID_41286
  Gene Ontology: Mol. function=translation initiation factor activity; Biological process=regulation of translational initiation
  Homolog annotation: Hit_ID=B9R879; Match level="QueryCoverage=88%, HitCoverage=16%, E-value=1e-16, Identity=53%"; Hit description =Translation initiation factor, putative
MEPPPPPQAIPREAWEGCSVLLDINDGDRLAFFRLTPAATVKIGNKTCSLQPLVGRPFGSLFRVGADGLVPCAAGDAPSREDSMEDGADGQVQ

SEQ ID NO: 107261 - protein, 104 aa, Setaria italica
  Transcript Sequence Number=SeqID_41287
  Gene Ontology: Mol. function=ribonuclease inhibitor activity; Biological process=regulation of RNA metabolic process
  Homolog annotation: Hit_ID=B6T0A4; Match level="QueryCoverage=92%, HitCoverage=57%, E-value=7e-41, Identity=81%"; Hit description =Regulator of ribonuclease activity A
  Pfam annotation: Domain name=Methyltransf_6; Domain location=12-104; Score=-22.9; E_value=1.2e-05; Accession=PF03737.7; Description =Demethylmenaquinone methyltransferase
MTSRSEANMAALPLATAEVCDANPHLIMNGELRALHPIFQIYGRRQVFAGPIVTLKVYEDNVLIREFLEEKGHGRVLVVDGGGSMRCAILGGNPVQQAQNNGWA

SEQ ID NO: 107262 - protein, 168 aa, Setaria italica
  Transcript Sequence Number=SeqID_41288
  Gene Ontology: Mol. function=ribonuclease inhibitor activity; Biological process=regulation of RNA metabolic process
  Homolog annotation: Hit_ID=B6T0A4; Match level="QueryCoverage=100%, HitCoverage=100%, E-value=2e-82, Identity=84%"; Hit description =Regulator of ribonuclease activity A
  Pfam annotation: Domain name=Methyltransf_6; Domain location=4-161; Score=183.1; E_value=7.7e-52; Accession=PF03737.7; Description =Demethylmenaquinone methyltransferase
MAALPLATAEVCDANPHLIMNGELRALHPIFQIYGRRQVFAGPIVTLKVYEDNVLIREFLEEKGHGRVLVVDGGGSMRCAILGGNPVQQAQNNGWAGIVVNGCIRDVDEINGCDIGVRALNSHPMKANKKGIGEKHVPVTIAGTRICDGEWLYADTDGILVSRTELTV

SEQ ID NO: 107263 - protein, 83 aa, Setaria italica
  Transcript Sequence Number=SeqID_41289
FGSNSCLEQDICRRFDKGCKNNNRYSTGHPLTPLSICCNWGMTFDYVQTTDYMVSSGFCALCMIEYRAYRSGRAIFTALMLNC

SEQ ID NO: 107264 - protein, 112 aa, Setaria italica
  Transcript Sequence Number=SeqID_41290
MVMEEAMDSEMSLSNMVLGFFEDFERERWPENDDDDEGSSGGDTAESKAFWRTQHSQLHEALSKTSPAESRIRADTEAAIKSMRAAAAAGTACSCTGRPAAGGDCRRCMLRR

SEQ ID NO: 107265 - protein, 57 aa, Setaria italica
  Transcript Sequence Number=SeqID_41291
FSVFYNFHKPNSCRWNYIVRFNIRSLLQTFKLNPYPATLFFFEWLRKGRESPTDSFH

SEQ ID NO: 107266 - protein, 87 aa, Setaria italica
  misc_feature (30)..(30): Xaa can be any naturally occurring amino acid
  Transcript Sequence Number=SeqID_41292
  Subcellular localization annotation: CTP_CleavageSite=20; ConfidenceScore=5.07e-01
AVAFVGVSHLNLLLLFGAIRRFELSPPGSXTRGRARLAVWLLTATLTAAFTWKIGAILPLGFAVAAWVMAAATVIGGFYMLFLHGEK

SEQ ID NO: 107267 - protein, 54 aa, Setaria italica
  Transcript Sequence Number=SeqID_41293
DYCHNLYSAWPLDLVHGWCCTRRSCKNRLLFTTTRTRLTAERNEQQMESWWFKS

SEQ ID NO: 107268 - protein, 100 aa, Setaria italica
  Transcript Sequence Number=SeqID_41294
  Gene Ontology: Mol. function=microtubule motor activity; Cellular component=microtubule associated complex; Biological process =microtubule-based movement
  Homolog annotation: Hit_ID=B9RCC3; Match level="QueryCoverage=96%, HitCoverage=8%, E-value=2e-39, Identity=76%"; Hit description =Kinesin heavy chain, putative
YLLSGNIRVYCRVRPFLPGQDGKTTTVDYIGENGEIFITNPFKQGKDGCRMFKFNKVFNTRASQAEVFSDIQPLIRSVLDGFNVCIFAYGQTGSGKTYNK

SEQ ID NO: 107269 - protein, 194 aa, Setaria italica
  Transcript Sequence Number=SeqID_41295
  Gene Ontology: Mol. function=microtubule motor activity; Cellular component=microtubule associated complex; Biological process =microtubule-based movement
  Homolog annotation: Hit_ID=Q93XG1; Match level="QueryCoverage=56%, HitCoverage=33%, E-value=4e-35, Identity=71%"; Hit description =Kinesin heavy chain (Fragment)
AARSNKEGMNMTQHQELLEQVASLKDTISRKDMEIEQLQLNKDKVKSPNLSFDRNGAGLTKNTVNQPSQLLSGERMLKFSDRVLSDPQSYAEANGDSTNIAPMGLDEAEYEDNASDDGLPAGETENSNPEKAAEMTAERLHRAPSRITRFTLTKNGQSSRSKLKDAVLKTPSNTKAPSSQLTGASARGSKRWQK

SEQ ID NO: 107270 - protein, 152 aa, Setaria italica
  Transcript Sequence Number=SeqID_41296
  Gene Ontology: Mol. function=microtubule motor activity; Cellular component=microtubule associated complex; Biological process =microtubule-based movement
  Homolog annotation: Hit_ID=Q0WN69; Match level="QueryCoverage=50%, HitCoverage=10%, E-value=1e-16, Identity=47%"; Hit description =Kinesin-related protein
PGFSVKDLEEGSVSSVVECLLALKDNVTTGMGQNISNNVKTPLRRRLELRESDGPIISVVTPGKRSPRDLKSQQRSVLHSGQKVHDAFQIKRGSYTDLPAAKISEMMHSSSLDRVVYLLRNVVQEIEHRIAIQADHIRNQNSIIKTREDKYR

SEQ ID NO: 107271 - protein, 556 aa, Setaria italica
  misc_feature (65)..(65): Xaa can be any naturally occurring amino acid
  Transcript Sequence Number=SeqID_41297
  Gene Ontology: Mol. function=microtubule motor activity; Cellular component=microtubule associated complex; Biological process =microtubule-based movement
  Homolog annotation: Hit_ID=B9RCC3; Match level="QueryCoverage=96%, HitCoverage=47%, E-value=1e-117, Identity=42%"; Hit description =Kinesin heavy chain, putative
  Pfam annotation: Domain name=CH; Domain location=15-119; Score=33.6; E_value=7.7e-07; Accession=PF00307.23; Description=Calponin homology (CH) domain
MGNVDGEYDEFHAANRRAEVIDWLGGLLPEFDLPLDSSDEELREYLVDGAALCYLAEKLMPGIQXGMWGGNASDQRSNVKKFLSVVAEMGLPGFSVKDLEEGSVSSVVECLLALKDNVTTGMGQNISNNVKTPLRRRLELRESDGPIISVVTPGKRSPRDLKSQQRSVLHSGQKVHDAFQIKRGSYTDLPAAKISEMMHSSSLDNAPTQSLLRVVNGILDESVERKRGEIPHRVVYLLRNVVQEIEHRIAIQADHIRNQNSIIKTREDKYRSKIKALETLVNGTNEENEMTVNRLELIEVEKSKIDEKRKLGEQDMVRLMREKENAENAIASLQQEIQILSRMHEQYRERMETEARQMEEHLTTRIKEAEFLLMQSKRKVEEIESASQLKSQLWSRKANIFQTFMDNQKISIKDIRLSSQSIKQEMFALQMKWRDEICNIGNDLKGLVDAADNYHKVLAENQKLFNEVQELKGNIRVYCRVRPFLPGQDGKTTTVDYIGENGEIFITNPFKQGKDGCRMFKFNKVFNTRASQAEVFSDIQPLIRSVLDGFNVCIFA

SEQ ID NO: 107272 - protein, 580 aa, Setaria italica
  Transcript Sequence Number=SeqID_41298
  Gene Ontology: Mol. function=microtubule motor activity; Cellular component=microtubule associated complex; Biological process =microtubule-based movement
  Homolog annotation: Hit_ID=Q93XF2; Match level="QueryCoverage=69%, HitCoverage=99%, E-value=0.0, Identity=87%"; Hit description=Kinesin heavy chain (Fragment)
  Pfam annotation: Domain name=Kinesin; Domain location=101-423; Score =491.5; E_value=1.1e-144; Accession=PF00225.15; Description=Kinesin motor domain
IEEVEAASKLKSQLWDKKENIFQSYMDNQQLYVKDIRISSRTIKNDMYALQMKWRDEICNIGNDLKGLVDAADNYHKVLAENQKLFNEVQELKGNIRVYCRVRPFLPGQDKKSTTIDYMGENGEMLISNPLKQGKDGHRMFKFNKVFSPSATQAEVFSDIQPLIRSVLDGFNVCIFAYGQTGSGKTYTMSGPSTSKQDWGVNYRALNDLFDISLSRINAFSYEVGVQMVEIYNEQVRDLLSNDIAQRRLGIWNTSQPNGLVVPDASLHPVKSTSDVLDLMEIGQTNRAVGSTALNERSSRSHSILTVHVRGLDLKNGSTSRGCLHLIDLAGSERVERSEAIGDRLKEAQYINKSLSALGDVIFALAQKNAHVPYRNSKLTQVLQSSLGGQAKTLMFVQINPDTESYSETMSTLKFAERVSGVELGAARSNKEGKDIKELLEQVSYLKDTISRKDMEIEQLLKDKSKSPSSSTDRNDSSQQIRRLSGAAGSGEAECEDNVSDDGCSVAGTEYSVGGASEAAAEQMQKAPSRIARLFLTKNGQPGNSKPKPRESALKPPGRTKSTGSQVTGGGSSVKPPKRR

SEQ ID NO: 107273 - protein, 122 aa, Setaria italica
  Transcript Sequence Number=SeqID_41299
  Gene Ontology: Mol. function=ribonuclease activity; Cellular component=exosome (RNase complex); Biological process=rRNA processing
  Homolog annotation: Hit_ID=B9S6W9; Match level="QueryCoverage=95%, HitCoverage=12%, E-value=1e-51, Identity=79%"; Hit description =Mitotic control protein dis3, putative
LVNKRIVVAVDSWGVLSRYPSGHYVRTIGDIGDKETETEVVLIENDINTRPFSTQVLACLPPLPWTLSQEDLANPNRQDLRHVRVFSVDPPGCRDIDDALHCTLLPNGNFEVGVRILYQFLQ

SEQ ID NO: 107274 - protein, 708 aa, Setaria italica
  Transcript Sequence Number=SeqID_41300
  Gene Ontology: Mol. function=ribonuclease activity; Cellular component=nuclear exosome (RNase complex); Biological process=rRNA processing
  Homolog annotation: Hit_ID=B9S6W9; Match level="QueryCoverage=100%, HitCoverage=75%, E-value=0.0, Identity=77%"; Hit description=Mitotic control protein dis3, putative
  Pfam annotation: Domain name=OB_RNB; Domain location=12-72; Score= -3.8; E_value=0.076; Accession=PF08206.3; Description=Ribonuclease B OB domain
  Pfam annotation: Domain name=RNB; Domain location=245-576; Score =448.6; E_value=9.6e-132; Accession=PF00773.11; Description=RNB-like protein
  Pfam module annotation: Pfam domain module=OB_RNB::RNB; Domain location=12-72::245-576
TSGLRCGIYHQGKLRVNRYNPFEAYVGSESIGDEIVIHGRSNMNRAFDGDIVAVELLPQDQWHESKSFIADDDEEEEEEDVHLVPNSADDAPRNASSTQSSVGSSAPSVSSRPVGRVVGIIKRNWNSYCGSLQPMPMPAGSGGVAHALFVSKDRRIPKIRIQTRQLENLVNKRIVVAVDSWGVLSRYPSGHYVRTIGDIGDKETETEVVLIENDINTRPFSTQVLACLPPLPWTLSQEDLANPNRQDLRHVRVFSVDPPGCRDIDDALHCTLLPNGNFEVGVHIADVTNFVHPGTPLDEEAAQRGTSVYLVGQRIDMLPKPLTEDVCSLRADVERLAFSVIWEMTPDADIISTRYTKSVIKSCAAMSYVEAQARMDDSRLVDPLTVDLRNLNSLAKIMRQRRCDRGALTLASAEVKFEIDSETHDPLDIGIYQIREANQMIEEFMLAANISVAEKILKHFPLCSLLRRHPSPTKEMLEPLLRTASSIGLNLDVSTSKALAESLDNAKSNDPYFNKLIRILATRCMTQAVYFCSGDLTFSEYYHYGLAASLYTHFTSPIRRYADVVVHRLLAAALEIAKLPPIFQDGPQLTGIADNLNYRHRNAQMASRASVELHTLIYFRTRPTDTEARIVKVKANGFIVFVPKFGIEGPIHLTPKGDKGGDWVVDEVHQRVTKPGTNISYAVLQTVRIHMEVVEPQPHRPKLQLTLI

SEQ ID NO: 107275 - protein, 136 aa, Setaria italica
  Transcript Sequence Number=SeqID_41301
  Gene Ontology: Mol. function=ATPase activity, coupled to transmembrane movement of substances; Cellular component=integral to membrane; Biological process=transport
  Homolog annotation: Hit_ID=B9SWF7; Match level="QueryCoverage=87%, HitCoverage=18%, E-value=5e-38, Identity=66%"; Hit description=Abc transporter, putative
  Pfam annotation: Domain name=ABC_tran; Domain location=1-112; Score =41.6; E_value=2.8e-09; Accession=PF00005.19; Description=ABC transporter
LVLGFVVIAAKIAHAEEFIKMLPEGYDSNVGQRGSSLSGGQKQRLAIARAVYQNSSILIMDEATSALDIRSELLLKEALRNLMTNHTVTVLIIAHQQEMVLMADRIVSLEGGKLQEITKLDFLSQNRHLQKITSPN

SEQ ID NO: 107276 - protein, 47 aa, Setaria italica
  Transcript Sequence Number=SeqID_41302
IDMVCESMPELQQKEIRQYLRRRIDKCVEWLPYKSSFRYTVHRSLAQ

SEQ ID NO: 107277 - protein, 187 aa, Setaria italica
  Transcript Sequence Number=SeqID_41303
  Homolog annotation: Hit_ID=B9R8W0; Match level="QueryCoverage=90%, HitCoverage=31%, E-value=3e-45, Identity=49%"; Hit description =Electron transporter, putative
  Pfam annotation: Domain name=DUF547; Domain location=3-100; Score =91.0; E_value=4.2e-24; Accession=PF04784.6; Description=Protein of unknown function, DUF547
  Subcellular localization annotation: CTP_CleavageSite=81; ConfidenceScore=5.15e-01
MKSTDMILKAAYNVGGHSVNSQIIQNSILGCQSHRPSLWVRTLFSPTKKSGSSMHPYALCHPEPIAHFALSTGAFSDPPVRLYTAKKLYHQLEQARTEFIQANVMVRKQTIFLPKVLHFYAKDAALELPDLIDMVCESMPELQQKEIRQYLRRRIDKCVEWLPYKSSFRYTVHRSLAHRTIYIYYIT

SEQ ID NO: 107278 - protein, 227 aa, Setaria italica
  misc_feature (216)..(216): Xaa can be any naturally occurring amino acid
  Transcript Sequence Number=SeqID_41304
  Gene Ontology: Mol. function=transferase activity; Cellular component= intracellular
  Homolog annotation: Hit_ID=Q011I4; Match level="QueryCoverage=89%, HitCoverage=34%, E-value=5e-23, Identity=30%"; Hit description=S-M checkpoint control protein CID1 and related nucleotidyltransferases (ISS)
VFNKIAQQIFVWCFFSGKKDGFPVVEAFGSFTMDLFTPESDLDLSVNFNTDTKDLYPRKDKINAIRKLTKTLYSHQRNGRCYGVLPISTARVPVLKVTDQGTGLDCDISIENKDGMSRSMIIKFISSIDERFRILCYLMKFWAKAHDVNSPKDQTMSSMAIISLVAFHLQTRRPPILPAFSAILKDGSDFASIQKNVSLFKGFGSSNKEAIAELFXSMMIKLVSVVG

SEQ ID NO: 107279 - protein, 206 aa, Setaria italica
  Transcript Sequence Number=SeqID_41305
  Gene Ontology: Cellular component=mitochondrion
  Homolog annotation: Hit_ID=B6SKI6; Match level="QueryCoverage=100%, HitCoverage=80%, E-value=1e-52, Identity=39%"; Hit description=ATP binding protein
  Pfam annotation: Domain name=PPR; Domain location=114-148; Score =39.6; E_value=1.2e-08; Accession=PF01535.12; Description=PPR repeat
  Pfam annotation: Domain name=PPR; Domain location=12-46; Score=26.1; E_value=0.00014; Accession=PF01535.12; Description=PPR repeat
  Pfam annotation: Domain name=PPR; Domain location=149-183; Score =43.2; E_value=1e-09; Accession=PF01535.12; Description=PPR repeat
  Pfam annotation: Domain name=PPR; Domain location=47-81; Score=30.1; E_value=8.8e-06; Accession=PF01535.12; Description=PPR repeat
  Pfam module annotation: Pfam domain module=PPR::PPR::PPR::PPR; Domain location=114-148::12-46::149-183::47-81
LLRSIPWRPNTVCYRSVLKGLCRADRWEDVGKLVAEMIRNNLTIDEVTFGLIIDYLCQKGLVGYGIEVIEEMSNYGCSPDIIMYNSLINGFVEYGSVDDALKLFKNMSCKRNIVTYNYMLKGLCRAEQWEDAGRLIAEMVKDECLPNEVTFSTLISYLCQKGLVECAIEVFEKMPKYNCMPNVIIYSTLINGLSEQDRVDDALKLL

SEQ ID NO: 107280 - protein, 88 aa, Setaria italica
  Transcript Sequence Number=SeqID_41306
  Subcellular localization annotation: CTP_CleavageSite=55; ConfidenceScore=5.08e-01
ICSYALMLLGVRSSSFMLTCGDKEKKREKKTTSSMLRQAAWFVFKRILPHWSSPVLAVLSNLQSNCGTTLQAKHNLTSLLENYNPKTC

SEQ ID NO: 107281 - protein, 121 aa, Setaria italica
  Transcript Sequence Number=SeqID_41307
SLGTSVKCARRRGRVEFSATRPRREAVLSVVGAGEAEGVGSEALRGGWHCSLPILGGLSNGGEELQWTRGVTHVGAAACYRAGARALASMRWICHGRICGAMALGERGKSSGGEGEERIVR

SEQ ID NO: 107282 - protein, 122 aa, Setaria italica
  Transcript Sequence Number=SeqID_41308
  Gene Ontology: Mol. function=transcription regulator activity; Cellular component=nucleus
  Homolog annotation: Hit_ID=Q2R1K8; Match level="QueryCoverage=50%, HitCoverage=21%, E-value=7e-10, Identity=70%"; Hit description=Helix- loop-helix DNA-binding domain containing protein, expressed
  Subcellular localization annotation: CTP_CleavageSite=14; ConfidenceScore=5.10e-01
GWPPHARRARVRVLASLPPSHSPRQPSPALHLPARIRPPSIPGRQPPQPAAADRLAGDQDPPRPRNINLGMVADTESSDSLPGSSNAAAATPVHGSLDQRSQEKTPKKLIKLNESKLKRDQL

SEQ ID NO: 107283 - protein, 84 aa, Setaria italica
  Transcript Sequence Number=SeqID_41309
  Subcellular localization annotation: CTP_CleavageSite=50; ConfidenceScore=5.05e-01
SIHEDRLNNTNINHCPNSHQLVFESNHKRLSLLSVTEDRKTSSLPQTFTRSATWPGDNFFNSCSLLAVVSLHSIRCMSFSDCPT

SEQ ID NO: 107284 - protein, 67 aa, Setaria italica
  Transcript Sequence Number=SeqID_41310
CFLNLKISIYHTSIALNVAMFLRNLTSILNLVSWCLVVSGLHTYTVRYKKYASRKWCVSVCRFIIPT

SEQ ID NO: 107285 - protein, 257 aa, Setaria italica
  misc_feature (20)..(20): Xaa can be any naturally occurring amino acid
  misc_feature (207)..(207): Xaa can be any naturally occurring amino acid
  Transcript Sequence Number=SeqID_41311
  Gene Ontology: Mol. function=sequence-specific DNA binding; Cellular component=nucleus; Biological process=regulation of transcription, DNA-dependent
  Homolog annotation: Hit_ID=B6SWE5; Match level="QueryCoverage=85%, HitCoverage=36%, E-value=1e-72, Identity=65%"; Hit description=Bell -like homeodomain protein 3
  Pfam annotation: Domain name=Homeobox; Domain location=108-166; Score= 2.7; E_value=0.0065; Accession=PF00046.21; Description=Homeobox domain
  Pfam annotation: Domain name=POX; Domain location=1-52; Score=-10.4; E_value=5e-06; Accession=PF07526.3; Description=Associated with HOX
  Pfam module annotation: Pfam domain module=Homeobox::POX; Domain location=108-166::1-52
VERRYRRYREQMRAVAGVLXAVAGERAAAAYTRLASRTISKHFRSLRDGVAAQMQAVRRALGEKDADGGVPSAGMAKGETTPRLRVLDQCLRQHREYQAGVLESQPWRPQRGLPERAVSILRAWLFEHFLHPYPSDVDKHILARQTGLSRSQVSNWFINARVRLWKPMVEEMYAEEMKDPQQEGGACSNANSNANNPSSYSASELGXGRGGASGEDGAERKPTRAQLVHDAGSLASVVSIGSSSRDPQNINFGMMDG

SEQ ID NO: 107286 - protein, 37 aa, Setaria italica
  Transcript Sequence Number=SeqID_41312
YMLRRFIINKLMTYIYSTDFLFYVNDNCREIYKGVVL

SEQ ID NO: 107287 - protein, 66 aa, Setaria italica
  Transcript Sequence Number=SeqID_41313
QHVSRHQIHTEVEELHSLSEDIMQSVPPAIQQVLSDYQHLFKEPTTLPPPRQCEHLSDLKSCKRVR

SEQ ID NO: 107288 - protein, 157 aa, Setaria italica
  misc_feature (131)..(131): Xaa can be any naturally occurring amino acid
  misc_feature (150)..(150): Xaa can be any naturally occurring amino acid
  Transcript Sequence Number=SeqID_41314
  Gene Ontology: Mol. function=aspartic-type endopeptidase activity; Cellular component=chromatin; Biological process=RNA-dependent DNA replication
  Homolog annotation: Hit_ID=Q53P05; Match level="QueryCoverage=85%, HitCoverage=10%, E-value=1e-23, Identity=38%"; Hit description =Retrotransposon protein, putative, unclassified
  Pfam annotation: Domain name=Fe_dep_repr_C; Domain location=65-140; Score=-22.7; E_value=0.088; Accession=PF02742.7; Description=Iron dependent repressor, metal binding and dimerisation domain
GRFKREGPRHTVQGVLWGGSQHIGEDWLEDCSPMWVNWKKKIMRFTHKGKRITLKGVQSEVTKCTPIGARKVKGLLRRHAVTHCVMMLPQLSRHQIHTEVEELHSLSEDIMQSVPPAIQQVLSDYQHLFKXPTTLPPPRQCDHQIELVPXAQPVNIR

SEQ ID NO: 107289 - protein, 116 aa, Setaria italica
  Transcript Sequence Number=SeqID_41315
  Homolog annotation: Hit_ID=B6SV28; Match level="QueryCoverage=100%, HitCoverage=19%, E-value=2e-22, Identity=59%"; Hit description =Proline-rich protein
MNTSQFMDKQILGLAASASPSGGGGGGGGVDLSDLMIPIPQEDGEDRLRRRRSSSSANGIADDVLPSYDFQPIRTTAAAAAPAPHASWGSLDSKAPSASASASASYNLKTAGILEP

SEQ ID NO: 107290 - protein, 325 aa, Setaria italica
  Transcript Sequence Number=SeqID_41316
  Gene Ontology: Mol. function=electron carrier activity; Cellular component=extracellular region; Biological process=response to oxidative stress
  Homolog annotation: Hit_ID=P93550; Match level="QueryCoverage=88%, HitCoverage=93%, E-value=1e-97, Identity=59%"; Hit description =Peroxidase (Fragment)
  Pfam annotation: Domain name=peroxidase; Domain location=46-289; Score=444.3; E_value=1.8e-130; Accession=PF00141.15; Description =Peroxidase
  Subcellular localization annotation: CTP_CleavageSite=47; ConfidenceScore=5.02e-01
MAAALLSSRRAVAAAVACVLALALGAAAQLSPTFYDGSCPNLQSIVRSAMAAAVQQEPRMGASILRLFFHDCFVQGCDASVLLDDSPTLTGEKNAAPNANSLRGYEVIDSIKSQVEAACPGTVSCADILALAARDGVNLLSGPTWAVPLGRRDTRTASQASANSNLPSPSSSAATLVSAFASKGLDSRDLVALSGAHTVGSARCSSFRSRVYNDTNINSGFAAKRRQICAAQSGGTDGNLAPLDALSPVRFDNGYFRNVVGQFGLLHSDQELFGAGGPVDGITTQYARNGAAFARDFITAMIKMGNISPLTGSSGEIRANCRKPN

SEQ ID NO: 107291 - protein, 77 aa, Setaria italica
  Transcript Sequence Number=SeqID_41317
SEFALLFVENNCPYFTSPIIIVGYATRLVIGDSIVVAMLLMSHFNYIHTKKAEEDDVAIEFAVYVKSCDVVISMLYI

SEQ ID NO: 107292 - protein, 105 aa, Setaria italica
  misc_feature (23)..(23): Xaa can be any naturally occurring amino acid
  Transcript Sequence Number=SeqID_41318
  Gene Ontology: Mol. function=ubiquitin-protein ligase activity; Cellular component=nucleus; Biological process=ubiquitin-dependent protein catabolic process
  Homolog annotation: Hit_ID=A8W462; Match level="QueryCoverage=100%, HitCoverage=34%, E-value=1e-52, Identity=93%"; Hit description=SINA3
  Pfam annotation: Domain name=Sina; Domain location=1-98; Score=24.9; E_value=7.7e-09; Accession=PF03145.8; Description=Seven in absentia protein family
SCFGQYFCLHFEAFQLGMAPVYXIAFLRFMGDDAEAKNYSYSLEVGGSGRKMTWQGVPRSIRDSHRKVRDSYDGLIIQRNMALFFSGGDRKELKLRVTGRIWKEQ

SEQ ID NO: 107293 - protein, 46 aa, Setaria italica
  Transcript Sequence Number=SeqID_41319
TPFAVKQVLDLADRGEILQLHTHASIRGIVCFQDISGSTRILGPPH

SEQ ID NO: 107294 - protein, 165 aa, Setaria italica
  Transcript Sequence Number=SeqID_41320
  Gene Ontology: Mol. function=aspartic-type endopeptidase activity; Cellular component=integral to membrane
  Homolog annotation: Hit_ID=Q53NS0; Match level="QueryCoverage=82%, HitCoverage=34%, E-value=9e-69, Identity=93%"; Hit description =Signal peptide peptidase, putative
  Pfam annotation: Domain name=Peptidase_A22B; Domain location=3-165; Score=58.8; E_value=2.1e-14; Accession=PF04258.5; Description=Signal peptide peptidase
QQFADCYQVLILLILSPSEISNTIFSQVASALLSAAFVYDIFWVFISPLIFHESVMIAVARGDNTGESIPMLLRIPRFFDPWGGYDMIGFGDIIFPGLLVAFSYRFDRASKKGILNGYFLWLTGGYAVGLFLTYLALFLMDGHGQPALLYLVPCTLGLIVLLRLG

SEQ ID NO: 107295 - protein, 534 aa, Setaria italica
  Transcript Sequence Number=SeqID_41321
  Gene Ontology: Mol. function=aspartic-type endopeptidase activity; Cellular component=integral to membrane
  Homolog annotation: Hit_ID=Q53NS0; Match level="QueryCoverage=73%, HitCoverage=100%, E-value=0.0, Identity=90%"; Hit description=Signal peptide peptidase, putative
  Pfam annotation: Domain name=Metallothio_11; Domain location=69-122; Score=-2.5; E_value=0.059; Accession=PF02066.7; Description =Metallothionein family 11
  Pfam annotation: Domain name=PA; Domain location=78-175; Score=64.7; E_value=3.4e-16; Accession=PF02225.14; Description=PA domain
  Pfam annotation: Domain name=Peptidase_A22B; Domain location=243-524; Score=415.6; E_value=8.3e-122; Accession=PF04258.5; Description =Signal peptide peptidase
  Pfam module annotation: Pfam domain module=Metallothio_11::PA::Peptida se_A22B; Domain location=69-122::78-175::243-524
MAAARRASRLPFAAALLVLLLAGGAAADDASSDDDAGAPRTPGCSNKFQLVKVKNWVNGTEGATVVGLSARFGASLPRDMHEAQKSFAVLANPFDCCSNLTSKLTNSVALATRGECAFTAKAKTAQAGGAVGLLVINDNEELYKMVCSENDTSINVTMPVVMIPQSAGKKLKDFLDHGASVEVQLYSPSRPVVELSACFLLIMAVGTIVCASLWSEFVACEQVDERYNQLTRKDGPNTGTNSGEDKEIFEISAKGAIVFIIIASVFLLLLFYFMSSWFVWVLIVLFCIGGIEGMHVCLVTLLARIFKDCGQKTVQLPFLGEVLTLSVGIVPFCVVFAILWAVYRHASFAWIGQDILGICLMITVLQMARLPNIRVASALLSAAFVYDIFWVFISPLIFHESVMIAVARGDNTGESIPMLLRIPRFFDPWGGYDMIGFGDIIFPGLLVAFSYRFDRASKKGILNGYFLWLTGGYAVGLFLTYLALFLMDGHGQPALLYLVPCTLGLIVLLGWVRGDLHDLWNYGKGRTENLVDEP

SEQ ID NO: 107296 - protein, 182 aa, Setaria italica
  Transcript Sequence Number=SeqID_41322
  Gene Ontology: Mol. function=binding
  Homolog annotation: Hit_ID=B8Y6I0; Match level="QueryCoverage=98%, HitCoverage=57%, E-value=1e-92, Identity=47%"; Hit description =Chloroplast pentatricopeptide repeat protein 10
  Pfam annotation: Domain name=PPR; Domain location=123-157; Score =13.1; E_value=0.25; Accession=PF01535.12; Description=PPR repeat
  Pfam annotation: Domain name=PPR; Domain location=18-52; Score=32.9; E_value=1.3e-06; Accession=PF01535.12; Description=PPR repeat
  Pfam annotation: Domain name=PPR; Domain location=53-87; Score=33.5; E_value=8.5e-07; Accession=PF01535.12; Description=PPR repeat
  Pfam module annotation: Pfam domain module=PPR::PPR::PPR; Domain location=123-157::18-52::53-87
VTRVLEGMKSCGVELCRDTYNTLIAAYGRCGSRTNAFKMYDEMTSAGFAPCLTTYNALLNVLSRQGDWSTAQSIVSKLRTKGFKPNEQSYSLLLQCYAKGGNIAGITAIEKEVYGGTVFPSWVILRTLVIANFKCRRLEGIERAFREVKSRGYKPDLVIFNSMLSMYAKNGLYSKATEIFVF

SEQ ID NO: 107297 - protein, 71 aa, Setaria italica
  Transcript Sequence Number=SeqID_41323
MQTFSLHESFIFVVSSGFIGVGPPKAIKFYRSAPFAHHDQVLICGSELVMTLPLVSLGFCSSPRLKLVNLL

SEQ ID NO: 107298 - protein, 54 aa, Setaria italica
  Transcript Sequence Number=SeqID_41324
WLCHVLPGYLRSMLIINDMFPDSKYFVAGSIQWLCHVLPGYLRSMLIINDIVPP

SEQ ID NO: 107299 - protein, 130 aa, Setaria italica
  misc_feature (29)..(29): Xaa can be any naturally occurring amino acid
  Transcript Sequence Number=SeqID_41325
LGVTYLLTYKVTKCSSTKEKKRRDKDYYXPFTRHRTATTTVNSIQTCYAIGRKSCWGTYQTSSYCNSTSELPLSLLSTATISLLDHLCLFSVSTATSLERGEISLISQSVQPSWSDLVFNSLSVQHRRGR

SEQ ID NO: 107300 - protein, 48 aa, Setaria italica
  Transcript Sequence Number=SeqID_41326
IPKLNQRSSMYTLSQSQVASPVSFTLHTLFAMYSGIISLISNIPPARL

SEQ ID NO: 107301 - protein, 62 aa, Setaria italica
  Transcript Sequence Number=SeqID_41327
YLVPVTAGSCELLPAGWHDDRWTLAAVRGAHCSVEGPRILEIRKPIVVSRHAAHEIKAQQNA

SEQ ID NO: 107302 - protein, 239 aa, Setaria italica
  misc_feature (176)..(176): Xaa can be any naturally occurring amino acid
  Transcript Sequence Number=SeqID_41328
  Gene Ontology: Cellular component=chloroplast
  Homolog annotation: Hit_ID=Q6MWD7; Match level="QueryCoverage=92%, HitCoverage=58%, E-value=2e-81, Identity=52%"; Hit description =B1358B12.18 protein
  Pfam annotation: Domain name=PPR; Domain location=109-143; Score =42.3; E_value=1.9e-09; Accession=PF01535.12; Description=PPR repeat
  Pfam annotation: Domain name=PPR; Domain location=144-178; Score =34.8; E_value=3.5e-07; Accession=PF01535.12; Description=PPR repeat
  Pfam annotation: Domain name=PPR; Domain location=179-213; Score =41.5; E_value=3.4e-09; Accession=PF01535.12; Description=PPR repeat
  Pfam annotation: Domain name=PPR; Domain location=39-73; Score=28.6; E_value=2.5e-05; Accession=PF01535.12; Description=PPR repeat
  Pfam annotation: Domain name=PPR; Domain location=74-108; Score=25.1; E_value=0.00029; Accession=PF01535.12; Description=PPR repeat
  Pfam module annotation: Pfam domain module=PPR::PPR::PPR::PPR::PPR; Domain location=109-143::144-178::179-213::39-73::74-108
YPSTTDLGTRTINEPASTAPEAYAFYLQLLDAGVPPEAKLFNVLMRDMIRSGELASARDVFDEMLRRGVRPTVVSFNTLISGLCKAANLDSANALRGLMAKVGVAARCVHLGALMQGLCMAGRIQDALEMFEEMCERGVNPNTVVFTTLIDANCKEGNVAAGLELYREMAARGVQXDLVAYNALVNGLCRARDLKAANDIVEEMRNTGLKPDKVTYTTLIDGCCKEGELDMAMEMKREM

SEQ ID NO: 107303 - protein, 139 aa, Setaria italica
  misc_feature (5)..(5): Xaa can be any naturally occurring amino acid
  misc_feature (31)..(31): Xaa can be any naturally occurring amino acid
  Transcript Sequence Number=SeqID_41329
ACAAXPQVGGRAASVPTARFLAPLRVLHIWXRGADVVARGALLHGHRRRPVVLQERCCKATCIDARALGDTVVRLCGHKLRCADKLLFISMISKIDRDLPPRKLMGKRIPVKIHLQGVLPGLPGLAPHVTKLGLRVRGR

SEQ ID NO: 107304 - protein, 90 aa, Setaria italica
  Transcript Sequence Number=SeqID_41330
WVVRSGRVAQVRRDESRITVDSDDMNRLILLGERARLSDEHSSPFSYCSGRPRRCGGAFFLLKCGCWSRCNGSRDSQGCRHHGCFGRAAK

SEQ ID NO: 107305 - protein, 165 aa, Setaria italica
  misc_feature (31)..(31): Xaa can be any naturally occurring amino acid
  Transcript Sequence Number=SeqID_41331
  Gene Ontology: Mol. function=cytokinin dehydrogenase activity; Cellular component=extracellular region; Biological process =cytokinin metabolic process
  Homolog annotation: Hit_ID=Q7XKG1; Match level="QueryCoverage=98%, HitCoverage=31%, E-value=2e-46, Identity=55%"; Hit description =OSIGBa0153E02-OSIGBa0093I20.7 protein
  Pfam annotation: Domain name=Cytokin-bind; Domain location=1-165; Score=114.1; E_value=4.6e-31; Accession=PF09265.2; Description =Cytokinin dehydrogenase 1, FAD and cytok
NVEQVVDVISRQMSHMVSQLYSVEVSYFDFXNRVRMEEMSLRSIGLWEVHHPWLNMFVPKAGINDFRDLLMDNVSPDSFEGLILIYPLLRDKWDTNTSVVLPDSGSMDRVMYVVGILRSANPDGGCSHHCLQELLRRHRRIADTAGVHLGAKQYLAHHPTPSGWL

SEQ ID NO: 107306 - protein, 34 aa, Setaria italica
  Transcript Sequence Number=SeqID_41332
YLYVNSGMSPNLKINLIAFLTHDCHLLYSFRRVY

SEQ ID NO: 107307 - protein, 165 aa, Setaria italica
  misc_feature (46)..(46): Xaa can be any naturally occurring amino acid
  Transcript Sequence Number=SeqID_41333
  Gene Ontology: Mol. function=aspartic-type endopeptidase activity; Cellular component=chromatin; Biological process=DNA integration
  Homolog annotation: Hit_ID=Q2QTG1; Match level="QueryCoverage=91%, HitCoverage=11%, E-value=1e-50, Identity=61%"; Hit description =Transposon protein, putative, unclassified
  Pfam annotation: Domain name=zf-CCHC; Domain location=9-26; Score =20.0; E_value=0.00028; Accession=PF00098.15; Description=Zinc knuckle
NHEVVVDKDTCKWCKKKGHYQKDCPEFLKHLMKKGEDIITFVDESXYLSYEKSTWWINSGATIHVVNSLQGFHTRRILQRGERSIKVANSVQAEVEAIGELPLELVDGFVLQLRDVLYVPSLHINLISVSRLDDDGFACHFGDGLCKIKFNNKCVLSCLSSTKLR

SEQ ID NO: 107308 - protein, 171 aa, Setaria italica
  misc_feature (51)..(51): Xaa can be any naturally occurring amino acid
  Transcript Sequence Number=SeqID_41334
  Gene Ontology: Mol. function=aspartic-type endopeptidase activity; Cellular component=chromatin; Biological process=DNA integration
  Homolog annotation: Hit_ID=Q53NL0; Match level="QueryCoverage=91%, HitCoverage=13%, E-value=5e-34, Identity=49%"; Hit description =Retrotransposon protein, putative, Ty1-copia subclass, expressed
  Pfam annotation: Domain name=zf-CCHC; Domain location=130-147; Score =13.6; E_value=0.0035; Accession=PF00098.15; Description=Zinc knuckle
REHILRMSNMASKLKAMDMELKDEFVLYLIFAFLPKEFEAFVVNYNSQPEXWGIEKLISMCVQEEDRIKGSRGDSINYVKQNKKRNYQSNNSKPQGKLQWDNTSSSKAHGKAPLNDHHQRLNHEEVVDKDTCKWCKKKGHYQKDCVEFLRFLCKKGIPYEEDPAKRSKVSL

SEQ ID NO: 107309 - protein, 74 aa, Setaria italica
  Transcript Sequence Number=SeqID_41335
MTEMERILMVLLTVRLVLNIGPDQCKIVLPRQILIDALTLAMCQLVHFFSYFLFSLPYFVFCNLLEYFNSLPFN

SEQ ID NO: 107310 - protein, 48 aa, Setaria italica
  misc_feature (22)..(22): Xaa can be any naturally occurring amino acid
  Transcript Sequence Number=SeqID_41336
  Gene Ontology: Mol. function=zinc ion binding
  Homolog annotation: Hit_ID=B6U1Q2; Match level="QueryCoverage=100%, HitCoverage=18%, E-value=4e-16, Identity=84%"; Hit description=Zinc finger, C3HC4 type family protein
VVAFLGMVVYRFYGDELREMFXYEEHPYAFYAMAILAMFVLLYGFFIA

SEQ ID NO: 107311 - protein, 169 aa, Setaria italica
  misc_feature (134)..(134): Xaa can be any naturally occurring amino acid
  Transcript Sequence Number=SeqID_41337
  Gene Ontology: Mol. function=zinc ion binding
  Homolog annotation: Hit_ID=B6U1Q2; Match level="QueryCoverage=98%, HitCoverage=64%, E-value=1e-75, Identity=79%"; Hit description=Zinc finger, C3HC4 type family protein
  Pfam annotation: Domain name=zf-C3HC4; Domain location=48-95; Score =55.9; E_value=1.6e-13; Accession=PF00097.17; Description=Zinc finger, C3HC4 type (RING finger)
AYNKLNTVEGSTEHLASCEIKPVSIDDDNENIDANEETHLVIQDVPQCRICLDNEGDDLIAPCRCKGTQKYVHRSCLDNWRSTKEGFAFSHCTECRAAFLLRANVPPDRWWLRLKFQLLVVRDHTLIFFIVQLXFYGDELREMFGYEEHPYAFYAMAILAIVLVGLLYW

SEQ ID NO: 107312 - protein, 81 aa, Setaria italica
  Transcript Sequence Number=SeqID_41338
RREQRARNGLIYIQQRLAPGAQGIDVDASRGATRPRGNMLEQLAENVLRRETDGVEDHLVPRLPEHPGDRERRGVGRDRWQ

SEQ ID NO: 107313 - protein, 33 aa, Setaria italica
  Transcript Sequence Number=SeqID_41339
FWVEGGRFMHCDETAFEYAFLMKALGLDDITMA

SEQ ID NO: 107314 - protein, 34 aa, Setaria italica
  Transcript Sequence Number=SeqID_41340
KKMKQDDKSIHILRKSIGSFLGGDADDQFGQDDD

SEQ ID NO: 107315 - protein, 104 aa, Setaria italica
  Transcript Sequence Number=SeqID_41341
  Gene Ontology: Mol. function=transferase activity, transferring groups other than amino-acyl groups
  Homolog annotation: Hit_ID=Q6IYE4; Match level="QueryCoverage=53%, HitCoverage=11%, E-value=2e-09, Identity=58%"; Hit description=HCBT -like putative PR (Fragment)
  Subcellular localization annotation: CTP_CleavageSite=31; ConfidenceScore=5.06e-01
MIPSAPALHTTTSGRRRQGSHSHPVLESTTQLKMEGATVEVQIVSRRVIRPQQATSPDGMPPEPEIMHLTPWDLGVITVDHIQKGVLLPKPQTGGEAAHLVDSL

SEQ ID NO: 107316 - protein, 98 aa, Setaria italica
  Transcript Sequence Number=SeqID_41342
  Gene Ontology: Mol. function=ATP binding; Cellular component =cytoplasm; Biological process=protein folding
  Homolog annotation: Hit_ID=A3FPF3; Match level="QueryCoverage=100%, HitCoverage=100%, E-value=1e-32, Identity=73%"; Hit description =Small molecular heat shock protein 10
  Pfam annotation: Domain name=Cpn10; Domain location=4-96; Score =119.5; E_value=1.1e-32; Accession=PF00166.13; Description=Chaperonin 10 Kd subunit
MAKRLLPSLNRVLVEKLVQPKKTAGGILLPETSKQLNAAKVVAVGPGERDREGKLIPVALKEGDTVLLPEYGGTEVKLAADKEYLLFREPDILGTLVD

SEQ ID NO: 107317 - protein, 66 aa, Setaria italica
  Transcript Sequence Number=SeqID_41343
MAGGSGEAAMSPPSSGGSGSGGGKRGRDPEEDVYVDNLHSHKRYLSEVGRRRPSPPSGAPVSTARP

SEQ ID NO: 107318 - protein, 291 aa, Setaria italica
  Transcript Sequence Number=SeqID_41344
MAGGSGEAAMSPPSSGGSGSGGGKRGRDPEEDVYVDNLHSHKRYLSEIMASSLNGLSVGDSLPDNIMESPVRSETASSFRDEILSQYSPMSEDSDDYRCYDTQLNPGANAMISPSTSPMSSPLRHQKPQSPLLPSNPYPLPSCSLSSVVCSHARRGSDNEGRFPSSPNDMCHGADLRRTALLRSVQMRVQGPPAYDLPFGIRQEQEHVHEHEDGHGHEHLEGLERVERSSSCSKSIDDEVGYQRPDHDFGRPEHDIVYIDSCASDDCPSDPKFKQEDKSHCKFDTSMDKNR

SEQ ID NO: 107319 - protein, 141 aa, Setaria italica
  misc_feature (117)..(117): Xaa can be any naturally occurring amino acid
  misc_feature (131)..(131): Xaa can be any naturally occurring amino acid
  Transcript Sequence Number=SeqID_41345
  Gene Ontology: Mol. function=catalytic activity; Cellular component =protein serine/threonine phosphatase complex; Biological process =protein amino acid dephosphorylation
  Homolog annotation: Hit_ID=Q9FQY2; Match level="QueryCoverage=100%, HitCoverage=27%, E-value=3e-44, Identity=68%"; Hit description =Protein phosphatase type-2C
NLSRAIGDMEFKQNKFLSPDKQILTANPDINIVSDFCSCFTLLQLITGYYVGYCVTILFPLIALVIYSFLQVELCDDDDFLVLACDGIWDCMSSQQLVDFIREHINNEESLSAVCEXVLDRCLAPSTMGGXEGCDNMTMIL

SEQ ID NO: 107320 - protein, 362 aa, Setaria italica
  Transcript Sequence Number=SeqID_41346
  Gene Ontology: Mol. function=catalytic activity; Cellular component =protein serine/threonine phosphatase complex; Biological process =protein amino acid dephosphorylation
  Homolog annotation: Hit_ID=Q9FQY2; Match level="QueryCoverage=100%, HitCoverage=98%, E-value=0.0, Identity=90%"; Hit description=Protein phosphatase type-2C
  Pfam annotation: Domain name=PP2C; Domain location=22-322; Score =273.4; E_value=5.1e-79; Accession=PF00481.13; Description=Protein phosphatase 2C
MGVYLSTPKTEKLSEDGENDKLKFGLSSMQGWRATMEDAHSALLDLDNDTAFFGVFDGHGGKVVAKFCAKYLHREVINSEAYAAGDLGAAVYRAFFRMDEMMRGQRGWRELQALGDKINQFTGIIEGLIWSPKGSDSNDRHDEWAFEEGPHSDFIGPNCGSTACVALVRNRQLIVANAGDSRCVISRNGQAYNLSRDHKPELEAERERIQNAGGYIQMGRVNGTLNLSRAIGDMEFKQNKFLSPDKQILTANPDINIVELCDDDDFLVLACDGIWDCMSSQQLVDFIREHINNEESLSAVCERVLDRCLAPSTMGGEGCDNMTMILVQFKKPITQTKEASGAEQSTGDTECSETHVAEENGS

SEQ ID NO: 107321 - protein, 86 aa, Setaria italica
  misc_feature (18)..(18): Xaa can be any naturally occurring amino acid
  Transcript Sequence Number=SeqID_41347
  Gene Ontology: Mol. function=protein binding
  Homolog annotation: Hit_ID=B6SGI6; Match level="QueryCoverage=93%, HitCoverage=22%, E-value=6e-12, Identity=49%"; Hit description =Speckle-type POZ protein
SQMIWNILVAADRYALDXQKLVCQTILREDLDVQIGACMLALAYQPHCNMLKDVCVEFISSLIMDDLVASQGFALREKPKISTYFM

SEQ ID NO: 107322 - protein, 158 aa, Setaria italica
  misc_feature (32)..(32): Xaa can be any naturally occurring amino acid
  Transcript Sequence Number=SeqID_41348
  Gene Ontology: Mol. function=nucleic acid binding
  Homolog annotation: Hit_ID=Q6ZK57; Match level="QueryCoverage=92%, HitCoverage=20%, E-value=3e-21, Identity=42%"; Hit description=Zinc finger CCCH domain-containing protein 54
  Pfam annotation: Domain name=RRM_1; Domain location=19-86; Score =26.9; E_value=8.3e-05; Accession=PF00076.14; Description=RNA recognition motif. (a.k.a. RRM, RBD, o
LAHGSKLGAPSAGSDPNQIYVVFVPESKFTEXDVLNYFSQYGTVNTVRIPPQGRRMYGFVSFHDPGTAERILSEMTPHFICGDQVRVKAYKEKRELPHGQRHGSKLVMPSAITNSNKIVIIFDPKSTFTENDAWNYFSDYGPVNNVRIPLQKKRNFGM

SEQ ID NO: 107323 - protein, 215 aa, Setaria italica
  misc_feature (192)..(192): Xaa can be any naturally occurring amino acid
  Transcript Sequence Number=SeqID_41349
  Gene Ontology: Mol. function=RNA binding
MTLSLQARTNDLPTSHHNVGLTNGHYPSGHLDVTLNHMPATRQDDSLPLQFSAAHDKQNSDIEHREHGYGFPPHLGKFSRTSALQSFNSNFGVTYHPSTASASPFQQQCYVDGQSQMYRPNDQNVSSNFIWPHDIGVQPYSIIQPHYVCPQMQQVSGFDVYQHRSNEHAAVCTPANVPSSHIGTPNSHGLEXNGYPYFNVAAFQKRYSNRLNNAF

SEQ ID NO: 107324 - protein, 74 aa, Setaria italica
  Transcript Sequence Number=SeqID_41350
MYDVFLIQTFCGVRQRFAADFYITDAKSGKRALVKAGHHSKVVSLLVVTLLVTTSRDTELSSTLKYWLDERKLS

SEQ ID NO: 107325 - protein, 213 aa, Setaria italica
  Transcript Sequence Number=SeqID_41351
  Gene Ontology: Mol. function=ubiquitin thiolesterase activity; Cellular component=integral to membrane; Biological process =ubiquitin-dependent protein catabolic process
  Homolog annotation: Hit_ID=Q01IJ9; Match level="QueryCoverage=36%, HitCoverage=22%, E-value=3e-27, Identity=79%"; Hit description =H0501D11.5 protein
RRFVDGLPASSLRVAADGQLVKITGFVSYEEISEISPHEKVENCVYTSTLLRKCATWGSIVLNPWNRCSKWKLTHAERFAADFYITDAKSGKRALVKAGHHSKVVPLIDENLLVTTSRDTELSSTLKYWLDERKLSSEEAQLIRLEEGYIREGMRLSVIGMLSKKNGDAMILPPPEPLSTGCVLLSFLLPTYFDGIVLRLVDRSYFVPNPGVS

SEQ ID NO: 107326 - protein, 105 aa, Setaria italica
  Transcript Sequence Number=SeqID_41352
IYLVKFVSHLFVSRMHRMVSSTRRMHIGLMKSVVYKCLMCKKCMFLEMMMIILGIFLIGTRLLAQQSRWKLGLMTWDIMIMTVYFLLYGHALSFSLSQQYKYTGV

SEQ ID NO: 107327 - protein, 70 aa, Setaria italica
  Transcript Sequence Number=SeqID_41353
ERAWKLVFPSSVKEKDGPHGNRRDSIGMGDGHNRRIPSAHESRERLRNSDIFKRKLDEPNEEKQKKSDWN

SEQ ID NO: 107328 - protein, 136 aa, Setaria italica
  Transcript Sequence Number=SeqID_41354
WIFAWLDSGRRRYLVYAAVYLAPYLRANLSMSPDESWLPIASIFICILHIQLEAGIRSGDIESFNLIERAWKLVFPSSVKEKDGPHGNRRDSIGMGDGHNRRIPSAHESRERLRNSDIFKRKLDEPNVGSKSKSKF

SEQ ID NO: 107329 - protein, 131 aa, Setaria italica
  Transcript Sequence Number=SeqID_41355
MGVMGIISFLPYFNWLSWIFAWLDSGRRRYLVYAAVYLAPYLRANLSMSPDESWLPIASIFICILHIQLEAGIRSGDIESFNLIERAWKLVFPSSVKEKDGPHGNRRDSIGMVRIKELHILGSWNLCSAKL

SEQ ID NO: 107330 - protein, 201 aa, Setaria italica
  Transcript Sequence Number=SeqID_41356
DLQQDAPFAAAIGACVLASLVLPPPTPRGEAREEVEEDGDFGATDTRMGVMGIISFLPYFNWLSWIFAWLDSGRRRYLVYAAVYLAPYLRANLSMSPDESWLPIASIFICILHIQLEAGIRSGDIESFNLIERAWKLVFPSSVKEKDGPHGNRRDSIGMGDGHNRRIPSAHESRERLRNSDIFKRKLDEPNEEKQKKSDWN

SEQ ID NO: 107331 - protein, 92 aa, Setaria italica
  misc_feature (91)..(91): Xaa can be any naturally occurring amino acid
  Transcript Sequence Number=SeqID_41357
  Gene Ontology: Mol. function=protein serine/threonine kinase activity; Biological process=protein amino acid phosphorylation
  Homolog annotation: Hit_ID=Q654Z6; Match level="QueryCoverage=98%, HitCoverage=16%, E-value=2e-26, Identity=65%"; Hit description =Receptor protein kinase-like
LMRWEATRRPLEQLSGALRRCYALVTACQDCGYLRSLLAGARMAEELRAAEQEIDMFIRLVPLISLVDATHDRGVKSTEGVPSVVANSSNXH

SEQ ID NO: 107332 - protein, 88 aa, Setaria italica
  misc_feature (50)..(50): Xaa can be any naturally occurring amino acid
  misc_feature (71)..(71): Xaa can be any naturally occurring amino acid
  misc_feature (81)..(81): Xaa can be any naturally occurring amino acid
  Transcript Sequence Number=SeqID_41358
  Gene Ontology: Mol. function=aspartic-type endopeptidase activity; Cellular component=chromatin; Biological process=RNA-dependent DNA replication
  Homolog annotation: Hit_ID=Q8SA93; Match level="QueryCoverage=96%, HitCoverage=3%, E-value=8e-20, Identity=48%"; Hit description =Putative polyprotein
YVIRSFLPMAVETTVGDGANILFWKDRWLHGQRLEDIAPLLFAAVPTRKXNERTVLQALTDQSWIPDIQGXILVGILTEFXNLWDLLL

SEQ ID NO: 107333 - protein, 234 aa, Setaria italica
  Transcript Sequence Number=SeqID_41359
MAAGCKAAIGCVDARAPVRASYVSLYKWPESDAEFVKSVAMARRQGGGGGGQESPGGASASYYYSYNGSGSMRRGGGGGGLSGELAAGYCSPRVVDSYSCRQMYLRSYTFSKKKETVPERTMACLGRVRERAAVFPFLPQRGGGSAAASDAGSVGSASNIAVGRSESRDREDVGLRDRKARRSRTRRKKQKKKRCTMVRRLQEASCGAVHAIFRRLLACTTSVDVADAGARPAR

SEQ ID NO: 107334 - protein, 67 aa, Setaria italica
  Transcript Sequence Number=SeqID_41360
EGSERDSGQSGFWGASSHDCSLPEQLHRLPPGGLNDYFAYFLVPFEGLYYEHLPTSACTTTLPEATP

SEQ ID NO: 107335 - protein, 598 aa, Setaria italica
  misc_feature (70)..(70): Xaa can be any naturally occurring amino acid
  misc_feature (197)..(197): Xaa can be any naturally occurring amino acid
  misc_feature (356)..(356): Xaa can be any naturally occurring amino acid
  Transcript Sequence Number=SeqID_41361
  Gene Ontology: Mol. function=catalytic activity
  Homolog annotation: Hit_ID=Q7XM01; Match level="QueryCoverage=96%, HitCoverage=59%, E-value=6e-79, Identity=35%"; Hit description =OSJNBa0086O06.8 protein
  Pfam annotation: Domain name=F-box; Domain location=12-59; Score =35.0; E_value=2.9e-07; Accession=PF00646.25; Description=F-box domain
  Pfam annotation: Domain name=F-box; Domain location=391-452; Score =13.4; E_value=0.36; Accession=PF00646.25; Description=F-box domain
  Pfam module annotation: Pfam domain module=F-box::F-box; Domain location=12-59::391-452
MTTGNKRVGTSGGAQVLPEEMMTEVFLRLPVKSILQCRAVCRSWADVLSSEEFCRLHMARAEAASATPKXFFTSPTSGFDATSVYLGSSSGPDDGLLFTLNNVRGDFMDMTSSPCHGLTLLYDAVAPAYYVFNAATRTVTRLPPCQDSAYATAGLTFDARTKEYKVVRLFNGKYLEKQHIKCEIYTLGGKQGDCWRXPAVGGVPFRFCLAADVAISHATLDKLQPVFADGFLNWLIHPDFLVIRPRAAILSFSITDESFRWVHSPPFVVSGVHLVELTGHLCMVRDLRNVSPDCSMLEIWKLNDYSTGGWSLKHRIDLLQHAARDLTDPQIIRVIGSVNAYGSTKKVVIATSKRKXIAYDPVLGTLETILAIRETYSSYQTEQSALRLSLFKESLVPVHQTNEEMALSTPLAEATREILLRLPGDYTVQAKLVCKQWLRLIENESFMHYYYSHNNMDRRPKIMLVGKGTGGSGFSFAPLNELKQHIPNHDTWLDMKVVCSKPCHGMNLISTEMKDYLYNPCTGYRFVYLSREQFTHMPCNNPGYGYMPQDHAFAVGNKNVGLGFNLLMQEHVIVRFSYQRKDFKTRQYLIDEYSYYLW

SEQ ID NO: 107336 - protein, 299 aa, Setaria italica
  Transcript Sequence Number=SeqID_41362
  Gene Ontology: Mol. function=catalytic activity
  Homolog annotation: Hit_ID=Q7XM01; Match level="QueryCoverage=82%, HitCoverage=25%, E-value=1e-32, Identity=36%"; Hit description =OSJNBa0086O06.8 protein
  Pfam annotation: Domain name=FBA_3; Domain location=105-215; Score= -31.3; E_value=0.082; Accession=PF08268.4; Description=F-box associated
MKDYLYNPCTGYRFVYLSREQFTHMPCNNPGYGYMPQDHAFAVGNKNVGLGFNLLMQEHVIVRFSYQRKDFKTRQYLLTSTVITCGIGCTQCHLYPPLPVNDMPPTYIKGLLYWMSEPRLGQTYERAIVSFDIAANSFGVISCPSCIATWNNRCSSLAFVVELEGSLCAVLANPVAEELDIWKLENGEWSIAYKVNLKGWSGYSLRANVVMPLAVDPKDGRILLNTGKKLGIYDPRRHSIESLYDLDEMLHARSAEKSSRFGVCEGFDVNKCKHSVKKSCTWKPPVRQLKIFNGSSPAL

SEQ ID NO: 107337 - protein, 67 aa, Setaria italica
  Transcript Sequence Number=SeqID_41363
MLFSRQGYKCSTVISSVTWNSRYHLKMETLSSCDCSTTFCKRSVVVEYLCHNGKHTRHILIPNQCDT

SEQ ID NO: 107338 - protein, 132 aa, Setaria italica
  misc_feature (85)..(85): Xaa can be any naturally occurring amino acid
  Transcript Sequence Number=SeqID_41364
  Homolog annotation: Hit_ID=Q84S70; Match level="QueryCoverage=53%, HitCoverage=9%, E-value=1e-21, Identity=66%"; Hit description=Kelch -like protein
  Pfam annotation: Domain name=Dev_Cell_Death; Domain location=68-132; Score=65.2; E_value=2.5e-16; Accession=PF10539.1; Description =Development and cell death domain
SHVGTQPRGAQKRKPVPEGDAARLQLQPLQERSNLVLEEGGAYNLAMQTYNQNSKYGELTRNLRENQLGGVIFGCKYDTIDECFXKQLFGLPSVHYSYVRNVKPGMPLFLFNYSDRKLHGIFEAASPGQMYI

SEQ ID NO: 107339 - protein, 184 aa, Setaria italica
  Transcript Sequence Number=SeqID_41365
  Gene Ontology: Mol. function=carboxyl- or carbamoyltransferase activity; Cellular component=chloroplast; Biological process='de novo' pyrimidine base biosynthetic process
  Homolog annotation: Hit_ID=B6T7U2; Match level="QueryCoverage=100%, HitCoverage=49%, E-value=1e-97, Identity=94%"; Hit description =Aspartate carbamoyltransferase 1
  Pfam annotation: Domain name=OTCace; Domain location=64-184; Score =43.1; E_value=1.1e-09; Accession=PF00185.16; Description =Aspartateornithine carbamoyltransferase, AspOrn binding domain
  Pfam annotation: Domain name=OTCace_N; Domain location=1-60; Score= -18.1; E_value=7.6e-07; Accession=PF02729.13; Description =Aspartateornithine carbamoyltransferase, carbamoyl-P binding domain
  Pfam module annotation: Pfam domain module=OTCace::OTCace_N; Domain location=64-184::1-60
VEDTIRTVEGYSDIIVLRHFESGAARRAADTADIPIINAGDGPGQHPTQALLDVYTIKREIGTLDGIKLGLVGDLANGRTVRSLAYLIAKYQNIKIYFVSPDVVKMKDDIKDYLNSKGVEWEESSDLLEVASKCDVIYQTRIQKERFGERIDLYEAARGKYIVDKKVLNVLPKHAVIMHPFQGL

SEQ ID NO: 107340 - protein, 78 aa, Setaria italica
  Transcript Sequence Number=SeqID_41366
  Gene Ontology: Mol. function=nucleotide binding; Biological process =defense response
  Homolog annotation: Hit_ID=Q33B89; Match level="QueryCoverage=74%, HitCoverage=5%, E-value=8e-12, Identity=60%"; Hit description=NB-ARC domain containing protein, expressed
MEAVSASHGALGPLLGKLTSLLADECARLKGVRREIRSLRSELISMQAAVQKYTNLQDPDVGWIQNGAAPRAELLNHT

SEQ ID NO: 107341 - protein, 170 aa, Setaria italica
  misc_feature (25)..(25): Xaa can be any naturally occurring amino acid
  Transcript Sequence Number=SeqID_41367
  Gene Ontology: Mol. function=sugar binding; Biological process =protein amino acid phosphorylation
  Homolog annotation: Hit_ID=Q25A58; Match level="QueryCoverage=88%, HitCoverage=29%, E-value=9e-47, Identity=61%"; Hit description =H0613A10.3 protein
  Pfam annotation: Domain name=PAN_2; Domain location=132-167; Score =0.2; E_value=0.0015; Accession=PF08276.3; Description=PAN-like domain
  Pfam annotation: Domain name=S_locus_glycop; Domain location=7-115; Score=66.7; E_value=8.4e-17; Accession=PF00954.12; Description=S -locus glycoprotein family
  Pfam module annotation: Pfam domain module=PAN_2::S_locus_glycop; Domain location=132-167::7-115
FNGSARGAASFWIRPWSYADMFAYXVTASPGEVTYGYHAKAGAPFSLLVVTEDGAIQPLVWDPSSRAWKTFYSTPRDVCDAYARCGPFGLCNVNAASTSFCGCAKGFGPASPSAWRMREASGGCRRNVPLDCGNGTTMTDGFVIVRNVKLPDTHNASVEECSARCLVKLV

SEQ ID NO: 107342 - protein, 118 aa, Setaria italica
  Transcript Sequence Number=SeqID_41368
  Gene Ontology: Mol. function=carboxyl- or carbamoyltransferase activity; Cellular component=chloroplast; Biological process='de novo' pyrimidine base biosynthetic process
  Homolog annotation: Hit_ID=B6T7U2; Match level="QueryCoverage=82%, HitCoverage=26%, E-value=5e-49, Identity=94%"; Hit description =Aspartate carbamoyltransferase 1
  Pfam annotation: Domain name=OTCace; Domain location=2-114; Score =69.1; E_value=1.7e-17; Accession=PF00185.16; Description =Aspartateornithine carbamoyltransferase, AspOrn binding domain
YSKVLTLNFLKVVCNWVSKVCSNLLEVASKCDVIYQTRIQKERFGERIDLYEAARGKYIVDKKVLNVLPKHAVIMHPLPRLDEITVDVDSDPRAAYFRQAKNGLYIRMALLKLLLVGP

SEQ ID NO: 107343 - protein, 70 aa, Setaria italica
  Transcript Sequence Number=SeqID_41369
NSVTGLYDYHNKTVRLMFLSRVFVVEICHMPLLVNSCYITAKHLEIYDIFKSVQSNLIILNSHVLVQMIS

SEQ ID NO: 107344 - protein, 66 aa, Setaria italica
  misc_feature (36)..(36): Xaa can be any naturally occurring amino acid
  Transcript Sequence Number=SeqID_41370
  Gene Ontology: Mol. function=hydrolase activity
  Homolog annotation: Hit_ID=Q6H5Z2; Match level="QueryCoverage=86%, HitCoverage=19%, E-value=1e-12, Identity=61%"; Hit description=MutT domain protein-like
MFLRHIIAEGVLAVIPITPLLGGIDVLDAVKGEYGXVVVHPNFLPNTSNAFSASLQVSLAYWSFYR

SEQ ID NO: 107345 - protein, 78 aa, Setaria italica
  Transcript Sequence Number=SeqID_41371
NNKNVIICDLLKKLVAKGHMTFLCFVQITQMIPFNVTIEHVSFISIYILDLGFHFFFTFFKVTLRACKLQTGVGARRP

SEQ ID NO: 107346 - protein, 39 aa, Setaria italica
  Transcript Sequence Number=SeqID_41372
WVPLVWLHQSWRLHFYCHFQKYSGRTMRLLQKLPTLSIP

SEQ ID NO: 107347 - protein, 88 aa, Setaria italica
  Transcript Sequence Number=SeqID_41373
LCHVLVDHLYLNPVWNYRVTFLLCYFKYFGSCYQVYKLQLENVAGNSLRTHVITTKSTSLSYLISLQFFLMINVSLVFVYIGCQIGPI

SEQ ID NO: 107348 - protein, 216 aa, Setaria italica
  Transcript Sequence Number=SeqID_41374
LLFSLQDPSTPEFLRLGSLRNVAAVAARRGYSADPVSASCSIAVSVGKKLLRVDLTLQDGDELDVQTREIAAVEGVKTLAWVDDSVFVATATGYSLFSSTAGQGVDIFTLPESSGHPRVKPLSGGDEVMLLVDNVGVVVDRFGQPVGSSLVFNTTPDCIAEVYPYVIVAGNAKVDVYRRRNGVHLETIPVARTGQGVLIVASHNDGIGTELVVIAT

SEQ ID NO: 107349 - protein, 59 aa, Setaria italica
  Transcript Sequence Number=SeqID_41375
LIFTVGHSCEYVLSFLITTIQHDLLKMFEMREMCELIPVNPVYLLQLANILCVVTNINQ

SEQ ID NO: 107350 - protein, 48 aa, Setaria italica
  misc_feature (1)..(16): Xaa can be any naturally occurring amino acid
  Transcript Sequence Number=SeqID_41376
XXXXXXXXXXXXXXXXFFFFFFFVMVTRYLYRSSHHDEHKRTPRKQEK

SEQ ID NO: 107351 - protein, 163 aa, Setaria italica
  misc_feature (150)..(150): Xaa can be any naturally occurring amino acid
  Transcript Sequence Number=SeqID_41377
  Gene Ontology: Mol. function=protein serine/threonine kinase activity; Biological process=protein amino acid phosphorylation
  Homolog annotation: Hit_ID=B6SKC4; Match level="QueryCoverage=98%, HitCoverage=20%, E-value=2e-39, Identity=54%"; Hit description=WAK80- OsWAK receptor-like protein kinase
  Pfam annotation: Domain name=Pkinase; Domain location=1-146; Score= -73.5; E_value=0.00041; Accession=PF00069.17; Description=Protein kinase domain
  Pfam annotation: Domain name=Pkinase_Tyr; Domain location=1-155; Score=-160.5; E_value=0.0047; Accession=PF07714.9; Description =Protein tyrosine kinase
  Pfam module annotation: Pfam domain module=Pkinase::Pkinase_Tyr; Domain location=1-146::1-155
GGDGGESKLPPGARLRVAAESADALAYMHSSASPPILHRDVKSANILLDGNLAAKVSDFGASRLAPTGELAVATLVQGTLGYLDPEYLLTSQLTSKSDVYSLAVVVLELLTGRKAFVPVEDEDEEEEGGLAFVFITAAQAGRHREIMDPXVREEVGVEVLDEA

SEQ ID NO: 107352 - protein, 189 aa, Setaria italica
  misc_feature (113)..(113): Xaa can be any naturally occurring amino acid
  Transcript Sequence Number=SeqID_41378
  Gene Ontology: Mol. function=protein serine/threonine kinase activity; Biological process=protein amino acid phosphorylation
  Homolog annotation: Hit_ID=B6SKC4; Match level="QueryCoverage=91%, HitCoverage=22%, E-value=3e-49, Identity=59%"; Hit description=WAK80- OsWAK receptor-like protein kinase
  Pfam annotation: Domain name=Pkinase; Domain location=1-173; Score= -52.4; E_value=2.3e-05; Accession=PF00069.17; Description=Protein kinase domain
  Pfam annotation: Domain name=Pkinase_Tyr; Domain location=2-173; Score=-156.5; E_value=0.0025; Accession=PF07714.9; Description =Protein tyrosine kinase
  Pfam module annotation: Pfam domain module=Pkinase::Pkinase_Tyr; Domain location=1-173::2-173
FVGPSSADALAYMHSSASPPILHRDVKSANILLDGNLAAKVSDFGASRLAPTGELAVATLVQGTLGYLDPEYLLTSQLTSKSDVYSLAVVVLELLTGRKAFVPVEDEDEEEEXGLAFVFITAAQAGRHREIMDPQVREEVGVEVLDEAAELVMQCLSMVGEERPTMKEVADKLHRLRNRASCSRGSAEN

SEQ ID NO: 107353 - protein, 279 aa, Setaria italica
  misc_feature (98)..(98): Xaa can be any naturally occurring amino acid
  misc_feature (102)..(102): Xaa can be any naturally occurring amino acid
  misc_feature (124)..(124): Xaa can be any naturally occurring amino acid
  misc_feature (169)..(169): Xaa can be any naturally occurring amino acid
  misc_feature (252)..(252): Xaa can be any naturally occurring amino acid
  Transcript Sequence Number=SeqID_41379
  Gene Ontology: Mol. function=protein serine/threonine kinase activity; Biological process=protein amino acid phosphorylation
  Homolog annotation: Hit_ID=Q2QXC6; Match level="QueryCoverage=99%, HitCoverage=69%, E-value=4e-98, Identity=60%"; Hit description =Probable serine/threonine-protein kinase WNK9
  Pfam annotation: Domain name=Pkinase; Domain location=1-190; Score =59.4; E_value=1.4e-14; Accession=PF00069.17; Description=Protein kinase domain
  Pfam annotation: Domain name=Pkinase_Tyr; Domain location=1-190; Score=-39.7; E_value=4.3e-11; Accession=PF07714.9; Description =Protein tyrosine kinase
  Pfam module annotation: Pfam domain module=Pkinase::Pkinase_Tyr; Domain location=1-190::1-190
LNTEIQLLRTLRHKNIVKLFASWIDEEKGIVNIITEYFTSGSLRQYRTKHKKLDMKAMRRWAIQILTALEYLHSQNPAIIHRDLKCDNIFINGNYGKXKIGXFGLATFMQQQKTRSVKGTLEFXMAPELYTGNYNELVDVYAFGMCMLELVTCEYPYSECQGMGHIFKXVSQAPAAERLSASELLRSSFLQNDSSLSSPPFSVSMVEIENVTRDGDQFDSFVFRKGEFLLNGNMEVTNPVHLWLRFPDPCGXFQAVQFPLDVAKDTGLSIAMEMAEQVE

SEQ ID NO: 107354 - protein, 176 aa, Setaria italica
  misc_feature (152)..(152): Xaa can be any naturally occurring amino acid
  Transcript Sequence Number=SeqID_41380
  Gene Ontology: Mol. function=protein serine/threonine kinase activity; Biological process=protein amino acid phosphorylation
  Homolog annotation: Hit_ID=P17801; Match level="QueryCoverage=97%, HitCoverage=20%, E-value=2e-87, Identity=87%"; Hit description =Putative receptor protein kinase ZmPK1
  Pfam annotation: Domain name=Pkinase; Domain location=1-171; Score =57.1; E_value=6.6e-14; Accession=PF00069.17; Description=Protein kinase domain
  Pfam annotation: Domain name=Pkinase_Tyr; Domain location=1-173; Score=-69.5; E_value=4.2e-09; Accession=PF07714.9; Description =Protein tyrosine kinase
  Pfam module annotation: Pfam domain module=Pkinase::Pkinase_Tyr; Domain location=1-171::1-173
LSIIGRINHMNLVRIWGFCSEGSHRLLVSEYVENGSLANILFNDKNNILLDWKGRFDIALGVAKGLAYLHHECLEWVIHCDVKPENILLDENFEPKITDFGLAKLLNRGGSNQNVSHIRGTLGYIAPEWVSGLPITVKVDVYSYGVVLLELXLSGTRISELVEGSGEVHDIALGKS

SEQ ID NO: 107355 - protein, 107 aa, Setaria italica
  Transcript Sequence Number=SeqID_41381
RGIRCLHTPEEATAVSVLYHCSMARRYYRQLSCVVVAESLETFVRHCYRLGCSATKDRRASDPSMLLDFDMGGFVVHVPTSGLGVMPMVESSIINIYDMRFQKQLRT

SEQ ID NO: 107356 - protein, 86 aa, Setaria italica
  Transcript Sequence Number=SeqID_41382
MEKDAGGRKQEAAPAPVASKAQREAAAAGVSVTEWLQHVKASFLGLVRKVTARSEQEAAEADMRAAKAQVEATDEAEARKKQLADH

SEQ ID NO: 107357 - protein, 218 aa, Setaria italica
  Transcript Sequence Number=SeqID_41383
  Gene Ontology: Mol. function=ATP-dependent helicase activity; Cellular component=nucleus; Biological process=ribosome biogenesis
  Homolog annotation: Hit_ID=Q0DWT8; Match level="QueryCoverage=100%, HitCoverage=41%, E-value=1e-103, Identity=84%"; Hit description=DEAD- box ATP-dependent RNA helicase 1
  Pfam annotation: Domain name=Helicase_C; Domain location=144-215; Score=51.0; E_value=4.5e-12; Accession=PF00271.23; Description =Helicase conserved C-terminal domain
LREAYQSWLPTVIQLTHSIGQDRSWHDTDGKTLLHPLTTIRRLGVERGFKGKCHPRLAKIVLSATLTQDPSKLSQLELHHPLLLNSGNKRYRIPTKLESYKLICKSNLKPLSLIVLLQELQGNKCLVFTSSVESSHRLSTLLGFFEDLPFKFSEYSRLQRESTRRKTLEAFKEGEIDVLIGTDRMARGIHIDGLRYVINYDMPPYVKTYIHRAGRTCK

SEQ ID NO: 107358 - protein, 87 aa, Setaria italica
  Transcript Sequence Number=SeqID_41384
  Homolog annotation: Hit_ID=B6TGN4; Match level="QueryCoverage=98%, HitCoverage=17%, E-value=6e-38, Identity=88%"; Hit description=mTERF family protein
TGFKLEGTMSTSIAYLVGIGVARRQIGSVITRFPEVLGMRVGKIIKPFIEYLEGIGVQRLSAARIIEKKPYVLGFGLEDKVKPNIEA

SEQ ID NO: 107359 - protein, 72 aa, Setaria italica
  Transcript Sequence Number=SeqID_41385
  Gene Ontology: Mol. function=catalytic activity; Biological process =cellular metabolic process
  Homolog annotation: Hit_ID=Q506M2; Match level="QueryCoverage=98%, HitCoverage=22%, E-value=2e-26, Identity=74%"; Hit description =Cinnamyl alcohol dehydrogenase
MAAKVVCVTGAGGFIASWIVKLLLERGYTVRGTLRDPADPKKTEHLHALEGSAERLQLFKADLLDEGSFDAI

SEQ ID NO: 107360 - protein, 54 aa, Setaria italica
  Transcript Sequence Number=SeqID_41386
IKGQQYSTSPNEGKKNPPKLGNYVLTWSALSSSLNFLVYSDGSIICTIICTRIR

SEQ ID NO: 107361 - protein, 120 aa, Setaria italica
  Transcript Sequence Number=SeqID_41387
EEAGGSGGGWSGGGRWFRWLTSGDFWDAAKQTVLTILGIIAAFFLIANFNVLVAAIINSLLLVLRLIRRTLSFIAHCVFQDMLVERPRPKSSTLDNNNVATVPVKERAGMSARERVVRKW

SEQ ID NO: 107362 - protein, 76 aa, Setaria italica
  misc_feature (35)..(35): Xaa can be any naturally occurring amino acid
  misc_feature (42)..(42): Xaa can be any naturally occurring amino acid
  Transcript Sequence Number=SeqID_41388
MGSRRRAVRGRATVEAAARGGCGRRYNARWRRPAXERGESGXRGGGAAGRHRQHGGRRRSGESSRGRQQGEGSNES

SEQ ID NO: 107363 - protein, 90 aa, Setaria italica
  Transcript Sequence Number=SeqID_41389
  Gene Ontology: Mol. function=oxidoreductase activity; Cellular component=cytoplasm; Biological process=cell redox homeostasis
  Homolog annotation: Hit_ID=Q7XPE8; Match level="QueryCoverage=100%, HitCoverage=52%, E-value=8e-37, Identity=58%"; Hit description =OSJNBa0060N03.13 protein
KKSLLSNGGQEVPLSSIEGKVTCLFFSAHWCRPCRNFTPKLVQIYTMLRNTGKNIEIIFISLDHDETSFLDHFKSMPWLALPFNSSLRRK

SEQ ID NO: 107364 - protein, 136 aa, Setaria italica
  Transcript Sequence Number=SeqID_41390
  Gene Ontology: Mol. function=DNA binding; Cellular component =chromosome; Biological process=nucleosome assembly
  Homolog annotation: Hit_ID=P35063; Match level="QueryCoverage=100%, HitCoverage=100%, E-value=1e-49, Identity=76%"; Hit description =Histone H2AX
  Pfam annotation: Domain name=CBFD_NFYB_HMF; Domain location=25-89; Score=18.0; E_value=0.0039; Accession=PF00808.15; Description =Histone-like transcription factor (CBFNF-Y) and archaeal histone
  Pfam annotation: Domain name=Histone; Domain location=19-92; Score =112.1; E_value=1.9e-30; Accession=PF00125.16; Description=Core histone H2AH2BH3H4
  Pfam module annotation: Pfam domain module=CBFD_NFYB_HMF::Histone; Domain location=25-89::19-92
  Subcellular localization annotation: CTP_CleavageSite=18; ConfidenceScore=5.24e-01
MSSSGGRGKAKPATKSVSRSSKAGLQFPVGRIARYLKAGKYAERVGAGAPVYLSAVLEYLAAEVLELAGNAARDNKKNRIVPRHIQLAVRNDEELSKLLGTVTIAAGGVMPNIHQTLLPKKAGGHKGDIGSASQEF

SEQ ID NO: 107365 - protein, 131 aa, Setaria italica
  misc_feature (108)..(108): Xaa can be any naturally occurring amino acid
  Transcript Sequence Number=SeqID_41391
  Gene Ontology: Mol. function=nucleoside-triphosphatase activity; Biological process=defense response
  Homolog annotation: Hit_ID=Q5Z9J6; Match level="QueryCoverage=93%, HitCoverage=8%, E-value=7e-43, Identity=68%"; Hit description =Putative NBS-LRR disease resistance protein
GVIKGDKIVRRLKGSPLAAKTVGRLLKNQLDLVHWTRVLESKEWEKSDGKNDIMPALKLSYDYLPSQLQRCFSHCALFPQDYKFGREELINFWIGLDVLHSSCGENKXIEDIGLSHLKQLVNHGFLKGAKK

SEQ ID NO: 107366 - protein, 87 aa, Setaria italica
  Transcript Sequence Number=SeqID_41392
GSIPLATLWAKNWFQLGVMVIYQHLKFLSNPCVLFCLVTEPYYLHICLYTRIMYKWIWSSQYLSVHFLVVDVWFSQCFFNLEKCLPS

SEQ ID NO: 107367 - protein, 42 aa, Setaria italica
  Transcript Sequence Number=SeqID_41393
  Homolog annotation: Hit_ID=B6TH44; Match level="QueryCoverage=92%, HitCoverage=19%, E-value=1e-14, Identity=97%"; Hit description =Splicing factor, arginine/serine-rich 7
VYVKHVPDADVSGVRVVTKRQPRQYMNRRGGFNRPLPPERNR

SEQ ID NO: 107368 - protein, 127 aa, Setaria italica
  misc_feature (12)..(12): Xaa can be any naturally occurring amino acid
  Transcript Sequence Number=SeqID_41394
  Gene Ontology: Biological process=hemocyte differentiation
  Homolog annotation: Hit_ID=B6TH44; Match level="QueryCoverage=89%, HitCoverage=55%, E-value=4e-36, Identity=70%"; Hit description =Splicing factor, arginine/serine-rich 7
  Pfam annotation: Domain name=DUF1777; Domain location=2-127; Score =51.7; E_value=2.8e-12; Accession=PF08648.4; Description=Protein of unknown function (DUF1777)
HSHSHRGRSSPXPDAGRHKRRRDASPAAADHHHREDKKSADPPAAPKGGGDPAAAAAAAAAGDGDVDAEELEMMKMMGIPVGFDSTKGKHVPDADVSGVRVVTKRQPRQYMNRRGGFNRPLPPERNR

SEQ ID NO: 107369 - protein, 87 aa, Setaria italica
  Transcript Sequence Number=SeqID_41395
  Gene Ontology: Mol. function=hydrolase activity; Cellular component =integral to membrane; Biological process=lipid catabolic process
  Homolog annotation: Hit_ID=Q94DR5; Match level="QueryCoverage=98%, HitCoverage=8%, E-value=1e-44, Identity=95%"; Hit description =P0460E08.35 protein
FQEAYDMTGRILVVTVCSPRKHEPPRCLNYLTSPHVLIWSAVTASCAFPGLFEAQELMAKDRFGQTIPFHAPFLLGVEERTGATTRP

SEQ ID NO: 107370 - protein, 145 aa, Setaria italica
  misc_feature (86)..(86): Xaa can be any naturally occurring amino acid
  misc_feature (106)..(106): Xaa can be any naturally occurring amino acid
  Transcript Sequence Number=SeqID_41396
  Homolog annotation: Hit_ID=B6UC12; Match level="QueryCoverage=96%, HitCoverage=32%, E-value=3e-44, Identity=67%"; Hit description =ANAC075
SSLVLADHFSFVPFRKTFDQEVGIGGDQVPSNQLGRSEQHHAGQEQQPHRPVLATTAVPATAFLISRPSNPVSTIVPPAMQHASVXLDHDQFHVPAILLHHHDKFXHQHQQQQPQQKLDRRSAGLEELIMGCTSSIINSSNTAKA

SEQ ID NO: 107371 - protein, 216 aa, Setaria italica
  Transcript Sequence Number=SeqID_41397
  Gene Ontology: Mol. function=DNA binding; Biological process =regulation of transcription
  Homolog annotation: Hit_ID=B6T7F9; Match level="QueryCoverage=93%, HitCoverage=61%, E-value=6e-57, Identity=57%"; Hit description =ANAC010
  Pfam annotation: Domain name=NAM; Domain location=1-109; Score=85.3; E_value=2.2e-22; Accession=PF02365.7; Description=No apical meristem (NAM) protein
LLETKPTTTPKKYVSGVNKDGLVRHFFHRPSRAYTTGTRKRRKVHSGDGDDGASGAGGETRWHKTGKTRPVLSNGRPRGYKKILVLYTNYGKQRKPEKTNWVMHQYHLGSDEEERDGELVVSKVFFQTQPRQCGSTAAKEAVAANAVANSNAHALGGHQQGGSVLREANGVDQFYNPGTMMGYGQGVPNNRVPPAPAAAHFMPNFAVHAARATFGP

SEQ ID NO: 107372 - protein, 306 aa, Setaria italica
  Transcript Sequence Number=SeqID_41398
  Gene Ontology: Mol. function=DNA binding; Biological process =regulation of transcription
  Homolog annotation: Hit_ID=B6T7F9; Match level="QueryCoverage=92%, HitCoverage=88%, E-value=1e-138, Identity=84%"; Hit description =ANAC010
  Pfam annotation: Domain name=NAM; Domain location=56-197; Score =192.5; E_value=1.1e-54; Accession=PF02365.7; Description=No apical meristem (NAM) protein
STTWRAACPAAAVAAAKKQQQASSHVNLIRTCPSCGHRAQYEQLQETATIQDLPGLPAGVKFDPTDQELLEHLEGKARPDSRRLHPLVDEFIPTIEGENGICYTHPERLPGVGKDGLIRHFFHRPSKAYTTGTRKRRKVHTDEQGGETRWHKTGKTRPVFTHGKLKGYKKILVLYTNYGKQRKPEKTNWVMHQYHLGSDEEEKDGELVVSKVFYQTQPRQCGSGSATAKDVVPLAASAATDHHHHHHDGGNGGSNSMLKEAGIVDFYSPAALIGYNQAAPNNRAAASAHLMPNFEVHTAGAAGFGP

SEQ ID NO: 107373 - protein, 433 aa, Setaria italica
  misc_feature (95)..(95): Xaa can be any naturally occurring amino acid
  misc_feature (99)..(99): Xaa can be any naturally occurring amino acid
  Transcript Sequence Number=SeqID_41399
  Gene Ontology: Mol. function=DNA binding; Biological process =regulation of transcription
  Homolog annotation: Hit_ID=B6UC12; Match level="QueryCoverage=100%, HitCoverage=100%, E-value=0.0, Identity=80%"; Hit description=ANAC075
  Pfam annotation: Domain name=NAM; Domain location=45-188; Score =176.0; E_value=1.1e-49; Accession=PF02365.7; Description=No apical meristem (NAM) protein
MNRGHSSSSSKLINEKLEEHRISTAKHCPHCGEKIDSKPKDWVGLPAGVKFDPTDQELIEHLESKVKDEGSRSHPLIDEFIPTIDGEDGICYTHXSATXGVTRDGLSKHFFHRPSKAYTTGTRKRRKIQTECDVHKGETRWHKTGKTRPVMVNGRQKGCKKILVLYTNFGKHRKPEKTNWVMHQYHLGDLEEEKEGELVVCKIFYQTQPRQCSWSSERGAAAAAAVAAATAQEQRRKDSGSGSCSSRDHEVSATSFPAGYTVTTAVEMQQQPADHFSFVPFRKTFDQEVGIGGDQVPSNQLGRSEQHHAGQEQQPHRPVLATTAVPATAFLISRPSNPVSTIVPPAMQHASVVLDHDQFHVPAILLHHHDKFQHQHQQQQPQQKLDRRSAGLEELIMGCTSSTSTKGETSLPQSQETEWPYPYWPPDNQDHHG

SEQ ID NO: 107374 - protein, 86 aa, Setaria italica
  Transcript Sequence Number=SeqID_41400
AIESSLSYVFFPFSSVCHIFAILLINFKSFKNGSWLVAPIIQFSIILQISEAAKKISSSCLCFQSFLLVLAISLTHFVSSSIPSLD

SEQ ID NO: 107375 - protein, 69 aa, Setaria italica
  Transcript Sequence Number=SeqID_41401
  Gene Ontology: Mol. function=binding; Cellular component=ubiquitin ligase complex; Biological process=ubiquitin-dependent protein catabolic process
  Homolog annotation: Hit_ID=B9T5H9; Match level="QueryCoverage=79%, HitCoverage=19%, E-value=2e-14, Identity=61%"; Hit description=Heat shock protein 70 (HSP70)-interacting protein, putative
  Pfam annotation: Domain name=TPR_1; Domain location=16-49; Score =21.1; E_value=0.0047; Accession=PF00515.20; Description =Tetratricopeptide repeat
  Pfam annotation: Domain name=TPR_2; Domain location=16-49; Score =19.8; E_value=0.011; Accession=PF07719.9; Description=Tetratricopepti de repeat
  Pfam module annotation: Pfam domain module=TPR_1::TPR_2; Domain location=16-49::16-49
MAPAPADSGAESQRQADRLKQEGNALFRKERLSAAIDAYTGAITLCPNVAVYWTNRALCYKKRKSVKLL

SEQ ID NO: 107376 - protein, 77 aa, Setaria italica
  Transcript Sequence Number=SeqID_41402
HCIFQACLPWLGSSSKVILLQKGGIFLLTQAQGRINILPLGLGSPPCMHPFLAFRHSLLHPCTSLPPSGFIAFLGWL

SEQ ID NO: 107377 - protein, 519 aa, Setaria italica
  Transcript Sequence Number=SeqID_41403
  Gene Ontology: Mol. function=zinc ion binding; Cellular component =intracellular
  Homolog annotation: Hit_ID=Q9M9L9; Match level="QueryCoverage=33%, HitCoverage=46%, E-value=1e-29, Identity=42%"; Hit description =F10A16.6 protein
MVHLPHLGKLRREVKEEVADAADGPAAAAEASPFHKRTRFGHQKQQWSTRCASVSNQQSSQQGFLDEPSPLGLRLRKSPSLLDLVQMKLAQANKGTEARQAINTGASEKLKASNFPGSVLRIGSWEWVSRYEGDLVAKCYFAKHKLVWEVLDGGLKSKIEIQWSDICGLKMFCPENEPGTLEIVLSRPPLFFKETNPQPRKHTLWQATSDFTGGQARMYRVHLIQCPQGMMNKHMEKLFHCDPRLQSLSQQNDFTVDNPYFETKCSIFEEPEDIKCQKYEHKDDDNQLAPQSSNALLSPQSSASRMDAEVRQQAGKSDVLPGHYPSSVASAHLIKQDGTSVECEPHTSILNWNGFRVPGISRSMSKSEIANHIGYHLYKQMYSGNLPATDAVTASLGNGDGSNSDVSFDELTRQLLNDTQISNAADERMLMSRVNSLCCLIQRDSGSGHATPGVSGTNEIYERKSQTSVPLVRGDGSNKPLPPEESFGDLLTKPLPPRQESFGDLLTNLPRISSFPHFL

SEQ ID NO: 107378 - protein, 460 aa, Setaria italica
  Transcript Sequence Number=SeqID_41404
  Gene Ontology: Mol. function=ATPase activity, coupled to transmembrane movement of ions, phosphorylative mechanism; Cellular component=integral to membrane; Biological process=phospholipid transport
  Homolog annotation: Hit_ID=P57792; Match level="QueryCoverage=88%, HitCoverage=34%, E-value=1e-163, Identity=66%"; Hit description =Putative phospholipid-transporting ATPase 12
  Pfam annotation: Domain name=E1-E2_ATPase; Domain location=152-436; Score=11.6; E_value=2.3e-05; Accession=PF00122.12; Description=E1-E2 ATPase
QDWSKLAARVVAAKNPESVALSTSWGFLEKLWCSDFIDSRGMARHRIKRLEKLKLSVLLTFIRCHTDPSDDHSRIGMVGFSRVVYVNEPDRLEEGFSYPLNEVSTTKYNLATFLPKSLFEQFRRVANFYFLVSGILALTPLAPYTAVSALAPLCVVIVATMAKEGVEDWRRKQQDHELNNRIVKVHRGNGNFEETKWKNIKVGDVIKVEKDNFFPADMILLSSNYPDGICYVETMNLDGETNLKIKQALEVTSDLQEDIKFREVRQTIKCEDPNANLYSFVGSMEWKGQRHPLSPQQLLLRDSKLRNTDYIYGAVIFTGHDTKVMQNATDPPSKRSKIEKKMDKIIYLLMSSLLMIALLGSVFFGIWTKEDLRDGEIKRWYLRPDATTIFYDPKRAALASFFHLLTALMLYSYFIPISLYISIEMVKLLQALFINQDIEMYHEESDKPTHARTSKSKMKN

SEQ ID NO: 107379 - protein, 71 aa, Setaria italica
  Transcript Sequence Number=SeqID_41405
QGEEGHVRRRALRSPGRRRPGEAAKPLCSVSFLLSLPIVSSATILCANILYYTPEKKTNCLLCFWTARISP

SEQ ID NO: 107380 - protein, 89 aa, Setaria italica
  misc_feature (82)..(82): Xaa can be any naturally occurring amino acid
  Transcript Sequence Number=SeqID_41406
  Gene Ontology: Mol. function=heat shock protein binding; Biological process=response to stress
  Homolog annotation: Hit_ID=B6U761; Match level="QueryCoverage=100%, HitCoverage=53%, E-value=1e-33, Identity=83%"; Hit description =Chaperone protein dnaJ
  Pfam annotation: Domain name=DnaJ; Domain location=1-50; Score=54.0; E_value=5.9e-13; Accession=PF00226.23; Description=DnaJ domain
RTAYRRLAMKWHPDRWASDPGAAGEAKRRFQRIQEAYSVLSDKGKKAMYDAGLFDPLDDDDQDFSDFMQEMLVMMDNVKNEXKPDTLED

SEQ ID NO: 107381 - protein, 160 aa, Setaria italica
  Transcript Sequence Number=SeqID_41407
  Gene Ontology: Mol. function=heat shock protein binding; Cellular component=cytoplasm; Biological process=response to stress
  Homolog annotation: Hit_ID=B6U761; Match level="QueryCoverage=71%, HitCoverage=68%, E-value=3e-52, Identity=95%"; Hit description =Chaperone protein dnaJ
  Pfam annotation: Domain name=DnaJ; Domain location=23-89; Score =114.1; E_value=4.5e-31; Accession=PF00226.23; Description=DnaJ domain
MDAGAGAGSGNASGGGGGASACCYYALLGIRKNASATDIRTAYRRLAMKWHPDRWASDPGAAGEAKRRFQRIQEAYSVLSDKGKKAMYDAGLFDPLDADDQDFSDFMQEMLVMMDNVKNEKPDTLEDLQKMLEDIVKGDEGSRGGGVGVGGRVPPDGARR

SEQ ID NO: 107382 - protein, 72 aa, Setaria italica
  Transcript Sequence Number=SeqID_41408
KLKNSNLVYMDAQLSCSITLKKKLSCSITLKKLSCSIYQVKSMSTNTYKHQQIYHLIRVVAKMLTSPNGILV

SEQ ID NO: 107383 - protein, 88 aa, Setaria italica
  Transcript Sequence Number=SeqID_41409
  Pfam annotation: Domain name=WD40; Domain location=48-86; Score=26.6; E_value=0.0001; Accession=PF00400.24; Description=WD domain, G-beta repeat
LWSRDCSRFCNPESFNKRMHEIALDSNGKRLLVTSGLVRAPIYQVQGHESGLRTLPHSSSITSVDWHPTLPMYITGSADHSVRVTSIL

SEQ ID NO: 107384 - protein, 143 aa, Setaria italica
  misc_feature (14)..(14): Xaa can be any naturally occurring amino acid
  misc_feature (22)..(22): Xaa can be any naturally occurring amino acid
  misc_feature (24)..(24): Xaa can be any naturally occurring amino acid
  misc_feature (40)..(40): Xaa can be any naturally occurring amino acid
  misc_feature (139)..(139): Xaa can be any naturally occurring amino acid
  Transcript Sequence Number=SeqID_41410
  Gene Ontology: Mol. function=pyridoxal phosphate binding
  Homolog annotation: Hit_ID=Q0KKQ1; Match level="QueryCoverage=100%, HitCoverage=8%, E-value=6e-36, Identity=55%"; Hit description=CGS1 mRNA stability 1
PHGCPEPRRRPQAXQKIALVLXKXSKQLQQDLIALVPKLXDGSEHSLAACALLDHLQKSDAEPSLRLPVFGALSELEFESDIWKQASVHALELLSDSNDEPLVTAITYVLKAASHCQHLSLAVRAVRWRLKDLGTEVPXCVLD

SEQ ID NO: 107385 - protein, 82 aa, Setaria italica
  misc_feature (36)..(36): Xaa can be any naturally occurring amino acid
  Transcript Sequence Number=SeqID_41411
  Homolog annotation: Hit_ID=B6TE61; Match level="QueryCoverage=89%, HitCoverage=52%, E-value=1e-25, Identity=81%"; Hit description =Dihydroflavonol-4-reductase
HDQSCRAGENTDEKMRNMVDVRDVVEALVLALETPXASGRRLICSAHVMMVSETVGLVHSLHRDLKLDYPRKFVQVEDEKGA

SEQ ID NO: 107386 - protein, 266 aa, Setaria italica
  misc_feature (225)..(225): Xaa can be any naturally occurring amino acid
  misc_feature (232)..(232): Xaa can be any naturally occurring amino acid
  Transcript Sequence Number=SeqID_41412
  Gene Ontology: Mol. function=catalytic activity; Biological process =cellular metabolic process
  Homolog annotation: Hit_ID=B6TY10; Match level="QueryCoverage=94%, HitCoverage=78%, E-value=5e-76, Identity=58%"; Hit description =Dihydroflavonol-4-reductase
  Pfam annotation: Domain name=3Beta_HSD; Domain location=18-265; Score= -60.2; E_value=3.3e-06; Accession=PF01073.11; Description=3-beta hydroxysteroid dehydrogenaseisomerase family
  Pfam annotation: Domain name=Epimerase; Domain location=17-262; Score= 57.7; E_value=4.5e-14; Accession=PF01370.13; Description=NAD dependent epimerasedehydratase family
  Pfam annotation: Domain name=KR; Domain location=16-161; Score=-60.2; E_value=0.0016; Accession=PF08659.2; Description=KR domain
  Pfam annotation: Domain name=NAD_binding_4; Domain location=19-245; Score=-54.5; E_value=1.4e-05; Accession=PF07993.4; Description=Male sterility protein
  Pfam annotation: Domain name=Polysacc_synt_2; Domain location=17-265; Score=-173.4; E_value=0.0049; Accession=PF02719.7; Description =Polysaccharide biosynthesis protein
  Pfam annotation: Domain name=adh_short; Domain location=15-151; Score= -6.9; E_value=3.9e-05; Accession=PF00106.17; Description=short chain dehydrogenase
  Pfam module annotation: Pfam domain module=3Beta_HSD::Epimerase::KR::N AD_binding_4::Polysacc_synt_2::adh_short; Domain location=18-265::17 -262::16-161::19-245::17-265::15-151
MDISGGCAGKTTKMKTVCVTGAGGFIASWLVQLLLSRGDYVVHGTVRDPSDPKNAHLMALGGAGERLRLFKADLLDYASVAAAVAGCDGVFHVASPVPAVNPTNPDVEVLAPAVTGTQNVLKASDAANARRVVVVSSVGAVIMNPKIPDGAVVNEDCWSDEDYCRTTENWYCLSKTLAEREALAYGEKAGAAMDVVTVCPPWVLGPQLQPTVNTTSMRLVAYLCXGRSTYLXRNMVDVRDVVEALVLALETPEASGRRLICSAHVM

SEQ ID NO: 107387 - protein, 193 aa, Setaria italica
  misc_feature (140)..(140): Xaa can be any naturally occurring amino acid
  Transcript Sequence Number=SeqID_41413
  Gene Ontology: Mol. function=protein serine/threonine kinase activity; Cellular component=cell wall; Biological process=protein amino acid phosphorylation
  Homolog annotation: Hit_ID=B1A5N8; Match level="QueryCoverage=84%, HitCoverage=51%, E-value=2e-44, Identity=56%"; Hit description=Xa21 -like protein (Fragment)
NDNGRTIIHCDLKPSNILLDDDMTAHLGDFGISSFHIDSVSTSVEDLNMTSSKCIASIGVKGTIGYIAPEYGGGGHVSTYGDVYSFGIVLLEMLTGKRPTDPMFTNGLNIVNFVERSLPDQIFDIVDAPVQGECETFAQXRSLVENRVSRCLLTLLQLALSCTFQSPRERANMREVASKLRSIKTSHAGAKKF

SEQ ID NO: 107388 - protein, 151 aa, Setaria italica
  Transcript Sequence Number=SeqID_41414
  Subcellular localization annotation: CTP_CleavageSite=83; ConfidenceScore=5.23e-01
AQVAYALALPRLAFSWRRRVSAFNGGGGGWCRFLPPSPVAAQHTYRCSALHSSTRNRNASPRSQGEEEQLRMRSWAPAGGAVAAMMVAWRGRVGRRWRRRGAVVGAINSLRLSLARPRFACSARSPSPALCSASTSTSPLHYYQATPPSLP

SEQ ID NO: 107389 - protein, 115 aa, Setaria italica
  Transcript Sequence Number=SeqID_41415
EARTPLAISAPHPGEAHFQATMTTGTQVLSETCSKRSNIMETTLILLAPRDLHWTKTCAIQALKEPGLTTIHAGIRPSHISVSVTVPTFVGIFLRFTNTVTVFKVVIAASSLLLW

SEQ ID NO: 107390 - protein, 84 aa, Setaria italica
  Transcript Sequence Number=SeqID_41416
  Gene Ontology: Mol. function=acid-amino acid ligase activity; Cellular component=intracellular; Biological process=ubiquitin -dependent protein catabolic process
  Homolog annotation: Hit_ID=Q2L3D3; Match level="QueryCoverage=98%, HitCoverage=9%, E-value=3e-25, Identity=63%"; Hit description =Polyubiquitin-like protein
RAHTHHRGYKENDGQVNWFWKVVESMTVEQQRRLLFFWTSVKHLPSDGFLGLDCRLFIFRASSSRDHLPTSQTCFYHLNLPAYT

SEQ ID NO: 107391 - protein, 191 aa, Setaria italica
  Transcript Sequence Number=SeqID_41417
  Gene Ontology: Mol. function=translation release factor activity, codon specific; Cellular component=cytoplasm; Biological process =translational termination
  Homolog annotation: Hit_ID=B6ST15; Match level="QueryCoverage=94%, HitCoverage=41%, E-value=2e-98, Identity=94%"; Hit description =Eukaryotic peptide chain release factor subunit 1-1
  Pfam annotation: Domain name=eRF1_1; Domain location=3-88; Score =65.8; E_value=1.6e-16; Accession=PF03463.7; Description=eRF1 domain 1
  Pfam annotation: Domain name=eRF1_2; Domain location=92-189; Score =110.7; E_value=4.8e-30; Accession=PF03464.7; Description=eRF1 domain 2
  Pfam module annotation: Pfam domain module=eRF1_1::eRF1_2; Domain location=3-88::92-189
ETDLQNNKRRQEVNRQSVLAAITSAQQRLKLYNRVPPNGLVLYTGTIVTDDGKEKKVTFDFEPFRPINASLYLCDNKFHTEALNELLASDDKFGFIVMDGNGTLYGTLSGNSREVLYKFSVDLPKKHGRGGQSAVRFARLRMERRHNYLRKVAELATQYFINPATNQPNIVGLILAGSADFKNELGKSEIV

SEQ ID NO: 107392 - protein, 56 aa, Setaria italica
  Transcript Sequence Number=SeqID_41418
  Gene Ontology: Biological process=lipid transport
  Homolog annotation: Hit_ID=B6UII5; Match level="QueryCoverage=100%, HitCoverage=56%, E-value=8e-21, Identity=83%"; Hit description =Nonspecific lipid-transfer protein AKCS9
  Pfam annotation: Domain name=Tryp_alpha_amyl; Domain location=1-56; Score=10.1; E_value=0.031; Accession=PF00234.14; Description =Protease inhibitorseed storageLTP f
AIVGNAAPSAACCAKLRAHPASCFCQYKKDPNMKRYVNSPNGKKVFAACKVPLPRC

SEQ ID NO: 107393 - protein, 444 aa, Setaria italica
  misc_feature (9)..(9): Xaa can be any naturally occurring amino acid
  Transcript Sequence Number=SeqID_41419
  Gene Ontology: Mol. function=mismatched DNA binding; Cellular component=synaptonemal complex; Biological process=mismatch repair
  Homolog annotation: Hit_ID=A4URL6; Match level="QueryCoverage=99%, HitCoverage=55%, E-value=1e-166, Identity=65%"; Hit description=MutS- like protein 5
  Pfam annotation: Domain name=MutS_V; Domain location=159-397; Score =199.0; E_value=1.3e-56; Accession=PF00488.13; Description=MutS domain V
KGYETVVKXLCDELDELRMVYEGLPDFLEQVSANENASLPFEFRIPPLIVYVHQIGYLMCFFDENDYRDALLVGLPDYKFAFSEEGEERRFYYHTQKTRELDNLLGDIYHKILDMERAIMRDLVCRVLQFLPQLTKAVNFAAELDCILSLAVVARQNNYVRPILTEDSILEIHNGRHALQEMTVDTFVPNDTKIRDAGRINIITGPNYSGKSIYIKQVALIVFLAHIGSFVPADSAIVGLTDRIFCAMGSKSMTTEQSTFMIDLHQVGTMLRHATLRSLCLLDEFGKGTLTEDGIGLLGGTISHFANCDFPPKVLLSTHLTEIFTGNYLPQSEHIKCYTMSVLNPDGQTSNDDITFLYRLVPGQAHLSFGLHCARLAGVPNEVVQRADSILEDIHSKRPIRRMSGEKLEATDKQYQDAVTKLMAFDTQNGDLNSFFQELLAFEL

SEQ ID NO: 107394 - protein, 199 aa, Setaria italica
  misc_feature (167)..(167): Xaa can be any naturally occurring amino acid
  Transcript Sequence Number=SeqID_41420
LSSCPYNTPLQSNNHISDTRDGTWDALMQMREALGASNSDNGLNEECSDLTFNHAELSGGNTMKHQVAWDNGSLTSPSITSNFLPYPGDSETTLTNTSTVCSFQNISDFQHNMNNNEQNISSFELELPHQKTSTESHIYESRGEMYPAENAGHVDSSGFMPSTEYRXNDRSHQLSSSFVNSADGSVDDSSKKSHLLYEC

SEQ ID NO: 107395 - protein, 294 aa, Setaria italica
  misc_feature (253)..(253): Xaa can be any naturally occurring amino acid
  Transcript Sequence Number=SeqID_41421
KFDATIKLEESGSAACFSNTAAYMQTGPLESAISDGTSYPEQCQSTSQTCGLFYDSASQWQNFSSSGLPLLGGDKSISEPSSIINLGGNGKGHLLPASDNALVQQQQSVASDTRLGMTDNVVNSYLEFTTSLDDQSCPIGASICHEEMADKVVQAAQPEMVVNCPFGVRASNHDGHSDMQLPITQPSHVQGTALSLSKDPNLSCIEGTECKNSELTATYNTTHNHLGLNKFECHGILHSKSFEQKAPENIKIXDYSQIVGLQQSTILSASKPSHSDVLPVGKFDGKVVSQQKKR

SEQ ID NO: 107396 - protein, 273 aa, Setaria italica
  Transcript Sequence Number=SeqID_41422
DDYSQIVGLQQSTILSASKPSHSDVLPVGKFDGKVVSQQKKRKRATENLLAWHAQVIGCGSMCHRRTSELDWARATKRLVEKVDNGNAATMERSSFGTRARKRLILTTSLIQYILPVVPARLLATDVTNSGESTVYHLSKLALSEACDTVLSFVNDDTLLNQTSTSGKEDSKVLPKVLETFNYLSGAEKATTLHDLASELQDLERWHILHRLARSHGYTQRRGGDTSNSGLVPYTTTIKKHDGAAAASVKLRNLKKLKKSLKKKVKKKTKKKK

SEQ ID NO: 107397 - protein, 41 aa, Setaria italica
  misc_feature (27)..(27): Xaa can be any naturally occurring amino acid
  Transcript Sequence Number=SeqID_41423
LKKKYFNGLAANEVPTKTPMTTMNDDXWNLVMMWSSQPHRV

SEQ ID NO: 107398 - protein, 146 aa, Setaria italica
  misc_feature (110)..(110): Xaa can be any naturally occurring amino acid
  Transcript Sequence Number=SeqID_41424
EGCCPPPNLGFRPPSRVPYVQEDGSSARARFNGGFQGGSRDNSTEPRVNGRAAQNEAGGHNGNGAPRGAYNGRGDGAPRGDYSGHRNGYMGNGGYDYGRGNGGYGYGRGXGGNQSNGGYQQQRQGGNVGQYQQERAGNGGYYPQRH

SEQ ID NO: 107399 - protein, 173 aa, Setaria italica
  Transcript Sequence Number=SeqID_41425
  Gene Ontology: Mol. function=calcium ion binding; Cellular component =mitochondrial inner membrane; Biological process=transport
  Homolog annotation: Hit_ID=Q2RBP8; Match level="QueryCoverage=78%, HitCoverage=17%, E-value=1e-26, Identity=55%"; Hit description =Mitochondrial substrate carrier family protein, putative, expressed
LLLCIAFDAFDACKHKGAEFGIATRQSNQFQLLRKVIDGKRADFDGFLSNLGFAKVGAPPPPAVIMGAVPAPAPVSDQEEGSAGIGDSEGVDNASGSPQSAQKLPARLLNIPLSNVERLRSTLSAVSLTELIELVPQLVSRSSTSPDGHPDKKKLFSVQDFFRYAKIEGKRFF

SEQ ID NO: 107400 - protein, 87 aa, Setaria italica
  misc_feature (13)..(13): Xaa can be any naturally occurring amino acid
  misc_feature (30)..(30): Xaa can be any naturally occurring amino acid
  Transcript Sequence Number=SeqID_41426
  Gene Ontology: Mol. function=nucleoside-triphosphatase activity
  Homolog annotation: Hit_ID=Q10NN1; Match level="QueryCoverage=98%, HitCoverage=8%, E-value=7e-31, Identity=75%"; Hit description=ATPase, AAA family protein, expressed
  Subcellular localization annotation: CTP_CleavageSite=42; ConfidenceScore=5.57e-01
TTLQMQSNSASSXNGKSPSPAKKHSNRATXFFDRFRKERQVDAKTHSDAGQQGATTQRDSRPLIFKYNEGFLSTVKRPVRVRDLLLS

SEQ ID NO: 107401 - protein, 121 aa, Setaria italica
  misc_feature (103)..(103): Xaa can be any naturally occurring amino acid
  Transcript Sequence Number=SeqID_41427
  Gene Ontology: Mol. function=serine-type endopeptidase activity; Biological process=negative regulation of catalytic activity
  Homolog annotation: Hit_ID=Q1EPF3; Match level="QueryCoverage=72%, HitCoverage=11%, E-value=3e-09, Identity=40%"; Hit description =Subtilisin-like serine proteinase, putative
  Pfam annotation: Domain name=Inhibitor_I9; Domain location=42-121; Score=30.5; E_value=7e-06; Accession=PF05922.8; Description =Peptidase inhibitor I9
MASIITKLLRHLALFLFLVQLTDPALASKIKNHASLKPQPSSTYIVHANHLAKPPHFATLEHWYHSMVADNSPHPSNTSRILYTYDTVMQGFAVQLTGDEARXMSGAPGVDGVYEDGLFSL

SEQ ID NO: 107402 - protein, 95 aa, Setaria italica
  Transcript Sequence Number=SeqID_41428
ILIGHTLNLYAFGLLYYTALFVFVVHLSKKLDILFVNFVAAKCLLLYDYCCNFLMEFFDLFRQLGRPLLLLPVGGLLLSSSLCTTSSLRVLDIIK

SEQ ID NO: 107403 - protein, 103 aa, Setaria italica
  Transcript Sequence Number=SeqID_41429
  Pfam annotation: Domain name=XYPPX; Domain location=24-28; Score=2.2; E_value=83; Accession=PF02162.9; Description=XYPPX repeat
  Pfam annotation: Domain name=XYPPX; Domain location=29-33; Score=2.2; E_value=83; Accession=PF02162.9; Description=XYPPX repeat
  Pfam annotation: Domain name=XYPPX; Domain location=34-38; Score=1.6; E_value=1.2e+02; Accession=PF02162.9; Description=XYPPX repeat
  Pfam annotation: Domain name=XYPPX; Domain location=41-45; Score=4.0; E_value=25; Accession=PF02162.9; Description=XYPPX repeat
  Pfam annotation: Domain name=XYPPX; Domain location=46-50; Score=4.0; E_value=25; Accession=PF02162.9; Description=XYPPX repeat
  Pfam annotation: Domain name=XYPPX; Domain location=52-56; Score=4.0; E_value=25; Accession=PF02162.9; Description=XYPPX repeat
  Pfam annotation: Domain name=XYPPX; Domain location=63-67; Score=1.6; E_value=1.2e+02; Accession=PF02162.9; Description=XYPPX repeat
  Pfam module annotation: Pfam domain module=XYPPX::XYPPX::XYPPX::XYPPX: :XYPPX::XYPPX::XYPPX; Domain location=24-28::29-33::34-38::41-45::46 -50::52-56::63-67
MSYYGQQQPPVGVPPPQGYPGKDGYPPAGYPPAGYPPPAQGYPPQGYPPQQGYPPQQGYPQQGYPPPYAQPPPPQRPQGSGGPSFMEGCLAALCCCCLLEACF

SEQ ID NO: 107404 - protein, 109 aa, Setaria italica
  Transcript Sequence Number=SeqID_41430
  Gene Ontology: Mol. function=protein kinase activity; Cellular component=integral to membrane; Biological process=protein amino acid phosphorylation
  Homolog annotation: Hit_ID=Q2LJM2; Match level="QueryCoverage=62%, HitCoverage=10%, E-value=8e-23, Identity=69%"; Hit description =Putative receptor kinase
GSELPNGGVVVELPRWVQSVVREEWTSEVFDLELMKDKGIEEEMVAMLQLALSCAVAAPEQRPKIGYVVKMIDEVRACGEASPSQDESVDESSGVSDSPAVSEGGALSQ

SEQ ID NO: 107405 - protein, 60 aa, Setaria italica
  Transcript Sequence Number=SeqID_41431
  Gene Ontology: Mol. function=transcription regulator activity; Cellular component=nucleus; Biological process=regulation of transcription
  Homolog annotation: Hit_ID=Q10CH6; Match level="QueryCoverage=95%, HitCoverage=12%, E-value=5e-16, Identity=75%"; Hit description=Helix- loop-helix DNA-binding domain containing protein, expressed
  Subcellular localization annotation: CTP_CleavageSite=21; ConfidenceScore=5.20e-01
PRVVPYMNLPLPNHIPLNSSPAMNPMNSLSVSNQMQNVHLREASNHFIHPDGRQTVVPQV

SEQ ID NO: 107406 - protein, 133 aa, Setaria italica
  misc_feature (115)..(115): Xaa can be any naturally occurring amino acid
  Transcript Sequence Number=SeqID_41432
  Gene Ontology: Mol. function=transcription regulator activity; Cellular component=nucleus; Biological process=regulation of transcription
  Homolog annotation: Hit_ID=Q10CH6; Match level="QueryCoverage=52%, HitCoverage=16%, E-value=3e-19, Identity=78%"; Hit description=Helix- loop-helix DNA-binding domain containing protein, expressed
NQVPMTPAGINRGKDAALQSEVPRGAGAHDGAGAGTSSSGGSGSNYGGSGLPSDSGRVQKKMGRCRDDSDSQSEDAECEATEETKSSRRCGTKRRTRAAEVHNLSERRRRDRINXEKMRALTELTTTLTTRLN

SEQ ID NO: 107407 - protein, 428 aa, Setaria italica
  Transcript Sequence Number=SeqID_41433
  Gene Ontology: Mol. function=transcription regulator activity; Cellular component=nucleus; Biological process=regulation of transcription
  Homolog annotation: Hit_ID=Q10CH6; Match level="QueryCoverage=100%, HitCoverage=100%, E-value=1e-136, Identity=62%"; Hit description =Helix-loop-helix DNA-binding domain containing protein, expressed
  Pfam annotation: Domain name=HLH; Domain location=233-282; Score =65.7; E_value=1.7e-16; Accession=PF00010.18; Description=Helix-loop -helix DNA-binding domain
MDGNARPAANQRKPIVTDDDLVELLWHNGGVVAQPQAHQRPAPSERLDSSGLTDEETAAWFPDTLDDSLEKDLYTQLWYSTIADAAPHHGGTLPGPSSQPPPPPPELAHPARPPVGSSGVESSWAGDICSTFCGSNQVPMTPAGINRGKDAALQSEVPRGAGAHDGAGAGTSSSGGSGSNYGGSGLPSDSGRVQKKMGRCRDDSDSQSEDAECEATEETKSSRRCGTKRRTRAAEVHNLSERRRRDRINEKMRALQELIPHCNKTDKASILDETIEYLKSLQMQVQIMWMTSGMAPMMFPGAHQFMPPMALGMTSACIPAAQGLNQMPRVVPYMNLPLPNHIPLNSSPAMNPMNSLSVSNQMQNVHLREASNHFIHPDGRQTVVPQVPGTHVYGPEIPQAEHNRVLEVPASTVVPTSSAGQPHTYGGV

SEQ ID NO: 107408 - protein, 55 aa, Setaria italica
  Transcript Sequence Number=SeqID_41434
NHTQKNFVTYTHTAMSSPLTRLVCNLFVFLHVSETQSVPLRYDWILYVPFKFVSP

SEQ ID NO: 107409 - protein, 63 aa, Setaria italica
  misc_feature (43)..(43): Xaa can be any naturally occurring amino acid
  Transcript Sequence Number=SeqID_41435
  Gene Ontology: Mol. function=RNA-directed DNA polymerase activity; Biological process=RNA-dependent DNA replication
  Homolog annotation: Hit_ID=Q10HY9; Match level="QueryCoverage=84%, HitCoverage=4%, E-value=3e-10, Identity=52%"; Hit description =Retrotransposon protein, putative, unclassified
LFPEYIPNGVTILQYADDMILCLQDDMNSAQNMKLLLYIYEKXSGLKTNFNKSEVTMVVNILS

SEQ ID NO: 107410 - protein, 92 aa, Setaria italica
  Transcript Sequence Number=SeqID_41436
CVGAQRRWVPGRRQKRPGAGGWGRRSRRWAAALAGSGREATAALVCLRRVAAVAFAWPGPKAMATQRAGRDGKPWWWRYSCDDESGRRGRSG

SEQ ID NO: 107411 - protein, 101 aa, Setaria italica
  misc_feature (43)..(43): Xaa can be any naturally occurring amino acid
  misc_feature (75)..(75): Xaa can be any naturally occurring amino acid
  Transcript Sequence Number=SeqID_41437
  Subcellular localization annotation: CTP_CleavageSite=30; ConfidenceScore=5.19e-01
RCGTPAPPRTCDPAFGCAQDPTTPWLHPAPATKRLPPLPPAAXRAQRPRPIFTRASEPTLGAPASCRAPPRLALXAPASPRARPIGQALPSRGAIGVGAVD

SEQ ID NO: 107412 - protein, 91 aa, Setaria italica
  misc_feature (1)..(15): Xaa can be any naturally occurring amino acid
  Transcript Sequence Number=SeqID_41438
  Subcellular localization annotation: CTP_CleavageSite=52; ConfidenceScore=5.25e-01
XXXXXXXXXXXXXXXKFKNSSICACKLIRPNKQMAAVNTQHASSPTPAGRTRCNYVVCAGPKKAPGRQGRAPVNSICIYVQCVRHAIEQRS

SEQ ID NO: 107413 - protein, 166 aa, Setaria italica
  Transcript Sequence Number=SeqID_41439
KESLTALDDRTLPSLFHMFQTLTVLASSCAISQGEDEEDSSSGLGSAGVSSGSRSVRPLLPLVLASSSSSQSSCRRNLLMVSESSVALACRAEAQPTSPSRSSNHSAILSIRAKYSLVMISNSRMASSILLSSSLSTGSTGFFPLPISFGKKTKQTCLWIGFGLWA

SEQ ID NO: 107414 - protein, 120 aa, Setaria italica
  misc_feature (108)..(108): Xaa can be any naturally occurring amino acid
  Transcript Sequence Number=SeqID_41440
  Gene Ontology: Mol. function=hydrolase activity; Cellular component =integral to membrane
  Homolog annotation: Hit_ID=Q2QYE2; Match level="QueryCoverage=77%, HitCoverage=23%, E-value=3e-28, Identity=66%"; Hit description =GDA1/CD39 family protein, expressed
MARVVGMAAVLILVVQLASSYPILVHAADAAGVLGRKAGVIDGKAATENTPAGMGRYAVIFDAGSTGSRVYVFRFDRQMDLARIGDDIEFFAKVKPGLSSYAGQPKEXANSILPLLDKAK

SEQ ID NO: 107415 - protein, 166 aa, Setaria italica
  Transcript Sequence Number=SeqID_41441
  Gene Ontology: Mol. function=transferase activity
  Homolog annotation: Hit_ID=B6UFI8; Match level="QueryCoverage=87%, HitCoverage=21%, E-value=9e-63, Identity=80%"; Hit description =Glycosyltransferase
DGWRFVNTDEIVRGAEKVGFEVVVSEGEHEVAPFAEIANSCDAIMGVHGAGLTNMVFVPGGGVVIQVVPLGGLEFVAGYFRGPSRDMGLRYLEYRITPEESTLINQYPRDHVIFTDPEGVKKKGWESLKGAYLDKQDVRLDMKRFRPTLKKAIAHLKKAKADGGSN

SEQ ID NO: 107416 - protein, 105 aa, Setaria italica
  misc_feature (86)..(86): Xaa can be any naturally occurring amino acid
  Transcript Sequence Number=SeqID_41442
  Homolog annotation: Hit_ID=B6SUJ7; Match level="QueryCoverage=100%, HitCoverage=84%, E-value=1e-12, Identity=40%"; Hit description =Photosystem II core complex proteins psbY
  Subcellular localization annotation: CTP_CleavageSite=38; ConfidenceScore=5.28e-01
KIVARSALPPSTSGGVSLRSLAPKKQSALAAQRVADVAAADAGSDNRGQLLLFVVAPAIGWVLYNILQPALNLLIVVAAAAAAAPXDDNRGLLLLIVVAPAIGWV

SEQ ID NO: 107417 - protein, 150 aa, Setaria italica
  Transcript Sequence Number=SeqID_41443
  Gene Ontology: Mol. function=manganese ion binding; Cellular component=integral to membrane; Biological process=photosynthesis
  Homolog annotation: Hit_ID=B6SUJ7; Match level="QueryCoverage=79%, HitCoverage=100%, E-value=4e-23, Identity=62%"; Hit description =Photosystem II core complex proteins psbY
  Pfam annotation: Domain name=PsbY; Domain location=90-118; Score=7.7; E_value=0.0082; Accession=PF06298.3; Description=Photosystem II protein Y (PsbY)
  Subcellular localization annotation: CTP_CleavageSite=77; ConfidenceScore=5.75e-01
MATIATMALLKPAKIVARSALPPSTSGGVSLRSLAPKKQSALAVSSSPAAAAMAGAFFHALASSDAALAAQRVADVAAADAGSDNRGQLLLFVVAPAIGWVLYNILQPALNQLNRMRSQAVIAGVGLGAAATAAGMACAPEASAAVQDLA

SEQ ID NO: 107418 - protein, 57 aa, Setaria italica
  Transcript Sequence Number=SeqID_41444
  Gene Ontology: Mol. function=zinc ion binding; Cellular component =intracellular
  Homolog annotation: Hit_ID=Q7XSH7; Match level="QueryCoverage=98%, HitCoverage=10%, E-value=2e-15, Identity=78%"; Hit description =OSJNBa0073L13.11 protein
VRRDGDATSAAGEEGPFDSVAGEDAASSSVYGNLEELFVANPRAILPCFVVIYRVLE

SEQ ID NO: 107419 - protein, 75 aa, Setaria italica
  misc_feature (19)..(19): Xaa can be any naturally occurring amino acid
  misc_feature (23)..(23): Xaa can be any naturally occurring amino acid
  Transcript Sequence Number=SeqID_41445
  Gene Ontology: Mol. function=protein serine/threonine kinase activity; Biological process=protein amino acid phosphorylation
  Homolog annotation: Hit_ID=Q5XTZ4; Match level="QueryCoverage=100%, HitCoverage=23%, E-value=6e-22, Identity=61%"; Hit description=Salt -inducible protein kinase
GIVMWEILTGEDPYDGMRXGDMXGGILSNTLRPPVPASCNPEWRKLMEQCWSTEPERRPAFTEVASRLRAILEAS

SEQ ID NO: 107420 - protein, 51 aa, Setaria italica
  Transcript Sequence Number=SeqID_41446
SSFLPTTTMVIAAATNKASSGGFEAAAEAGGCDCNTCKCGTSCGCSCCSCN

SEQ ID NO: 107421 - protein, 67 aa, Setaria italica
  Transcript Sequence Number=SeqID_41447
ASHDNVSLDASIRRTQQDQIQSRTCCQNELISSTGHPDTGVFGFSIGALKSLQLDLLPDYIDKLLFL

SEQ ID NO: 107422 - protein, 58 aa, Setaria italica
  Transcript Sequence Number=SeqID_41448
  Gene Ontology: Mol. function=DNA binding; Cellular component=nucleus; Biological process=regulation of transcription, DNA-dependent
  Homolog annotation: Hit_ID=Q53NF7; Match level="QueryCoverage=100%, HitCoverage=15%, E-value=4e-16, Identity=76%"; Hit description=NAC domain-containing protein 71
AGKPPKGVKTNWIMHEYRLADVDRSAAARKKTNNNALRPPRAAPIQRLDDWVLCRIYN

SEQ ID NO: 107423 - protein, 130 aa, Setaria italica
  Transcript Sequence Number=SeqID_41449
  Gene Ontology: Mol. function=DNA binding; Cellular component=nucleus; Biological process=regulation of transcription, DNA-dependent
  Homolog annotation: Hit_ID=Q53NF7; Match level="QueryCoverage=58%, HitCoverage=23%, E-value=1e-31, Identity=87%"; Hit description=NAC domain-containing protein 71
  Pfam annotation: Domain name=NAM; Domain location=1-56; Score=23.8; E_ value=1.2e-09; Accession=PF02365.7; Description=No apical meristem (NAM) protein
SRPNRAAGAGYWKATGADKPVGSPRPVAIKKALVFYAGKPPKGVKTNWIMHEYRLADVDRSAAARKKTNNNALRVNHCPYLRLAGSLSLAFIDLPQPKVTTLKLSVIKSLNIKMIFFLSNVAMEMCGANT

SEQ ID NO: 107424 - protein, 138 aa, Setaria italica
  Transcript Sequence Number=SeqID_41450
  Gene Ontology: Mol. function=DNA binding; Cellular component=nucleus; Biological process=regulation of transcription, DNA-dependent
  Homolog annotation: Hit_ID=Q53NF7; Match level="QueryCoverage=97%, HitCoverage=40%, E-value=5e-32, Identity=57%"; Hit description=NAC domain-containing protein 71
  Pfam annotation: Domain name=NAM; Domain location=2-37; Score=-53.1; E_value=0.018; Accession=PF02365.7; Description=No apical meristem (NAM) protein
RWGSPRPVAIKKALVFYAGKPPKGVKTNWIMHEYRLADVDRSAAARKKTNNNALRLDDWVLCRIYNKKGVIERYDTVDDDEVAAAAADDVKPAAAKNPRGAAAPMKVEMADYGGYYDDYDLETPSAGMLCFDRPSEAA

SEQ ID NO: 107425 - protein, 164 aa, Setaria italica
  misc_feature (9)..(9): Xaa can be any naturally occurring amino acid
  misc_feature (31)..(31): Xaa can be any naturally occurring amino acid
  misc_feature (48)..(48): Xaa can be any naturally occurring amino acid
  Transcript Sequence Number=SeqID_41451
  Gene Ontology: Mol. function=DNA binding; Cellular component=nucleus; Biological process=regulation of transcription
  Homolog annotation: Hit_ID=Q6L4Y5; Match level="QueryCoverage=91%, HitCoverage=47%, E-value=7e-60, Identity=77%"; Hit description =Putative no apical meristem (NAM) protein
  Pfam annotation: Domain name=NAM; Domain location=11-126; Score =215.1; E_value=1.9e-61; Accession=PF02365.7; Description=No apical meristem (NAM) protein
AQPQELQLXPDPVHPTDEELVTHYLCRRCAXGLPISVPIIAEIDLYKXMALYGEKEWYFFSPRDRKYPNGSRPNRAAGAGYWKATGADKPVGSPRPVAIKKALVFYAGKPPKGVKTNWIMHEYRLADVDRSAAARKKTNNNALRVNHCPYLRLAGSLSLAFIDL

SEQ ID NO: 107426 - protein, 206 aa, Setaria italica
  misc_feature (9)..(9): Xaa can be any naturally occurring amino acid
  misc_feature (145)..(145): Xaa can be any naturally occurring amino acid
  Transcript Sequence Number=SeqID_41452
  Gene Ontology: Mol. function=DNA binding; Cellular component=nucleus; Biological process=regulation of transcription
  Homolog annotation: Hit_ID=Q4QWQ6; Match level="QueryCoverage=95%, HitCoverage=65%, E-value=8e-89, Identity=83%"; Hit description=NAC23
  Pfam annotation: Domain name=NAM; Domain location=8-133; Score=258.8; E_value=1.3e-74; Accession=PF02365.7; Description=No apical meristem (NAM) protein
GGGQDLQLXPGFRFHPTDEELVTHYLCRRCAGLPIAVPIIAEIDLYKFDPWQLPRMALYGEKEWYFFSPRDRKYPNGSRPNRAAGTGYWKATGADKPVGTPKPLAIKKALVFSPLGAPKGEKTNWIMHEYRLADVDRSARKKNSXRLDDWVLCRIYNKKGAAEKPSSGSSDGARASGSHGVQAPIAMGSPPEQKPSVLPPPAPGPG

SEQ ID NO: 107427 - protein, 188 aa, Setaria italica
  Transcript Sequence Number=SeqID_41453
  Gene Ontology: Mol. function=DNA binding; Cellular component=nucleus; Biological process=regulation of transcription, DNA-dependent
  Homolog annotation: Hit_ID=Q53NF7; Match level="QueryCoverage=89%, HitCoverage=52%, E-value=2e-83, Identity=87%"; Hit description=NAC domain-containing protein 71
  Pfam annotation: Domain name=NAM; Domain location=9-134; Score=288.3; E_value=1.6e-83; Accession=PF02365.7; Description=No apical meristem (NAM) protein
MDFGGALQLPPGFRFHPTDDELVNYYLLRKCGGLPLAAPVIAEVDLYKFDPWNLPEKAMGGEKEWYFFSPRDRKYPNGSRPNRAAGAGYWKATGADKPVGSPKPVAIKKALVFYAGKPPKGVKTNWIMHEYRLADVDRSAAARKKNNNLRLDDWVLCRIYNKKGAAEKPSSGSSDGARASGSHGVQAP

SEQ ID NO: 107428 - protein, 325 aa, Setaria italica
  misc_feature (44)..(44): Xaa can be any naturally occurring amino acid
  misc_feature (194)..(194): Xaa can be any naturally occurring amino acid
  Transcript Sequence Number=SeqID_41454
CSAVSSVFTRASRLERLAPVHEDVLQQRVAADAVAAVADGVEQXAGRVHGVGGEGALPLADLGLALHLPVAPRELLLRRQHLLRAARVRVQPRHRVRRPVVVRRQVRERRGETARRSHERLLLRRGTRRRGGQQRWLAVAGGHRRLLQPALLVVDAAQDPVIQPEAVLLAGGAVDVGEAVLVHDPVGLLALGRXLAGVEDERLLDGEGLGRAHRLVGAGGLPVPRPGGAVRPRPVRVLAVPRGEEVPLLLAVQRHPRELPWVELVEVDLGDDGDGDGQPGAAAAEVVRHQLLVRWVEPEPRRQLQVLTAAAHRVSLSIDRFARCC

SEQ ID NO: 107429 - protein, 101 aa, Setaria italica
  Transcript Sequence Number=SeqID_41455
  Gene Ontology: Mol. function=RNA polymerase II transcription factor activity; Cellular component=nucleus; Biological process=regulation of transcription from RNA polymerase II promoter
  Homolog annotation: Hit_ID=Q14527; Match level="QueryCoverage=90%, HitCoverage=8%, E-value=8e-15, Identity=47%"; Hit description =Helicase-like transcription factor
  Pfam annotation: Domain name=Helicase_C; Domain location=27-101; Score=28.9; E_value=2e-05; Accession=PF00271.23; Description =Helicase conserved C-terminal domain
MRKNKNLKILIFSQFISMLDRIEIALKAIGKEGDTIRIDGSMERTERDQKIKKFSSQVEDAPKIFLLSARVGGEGLNLTAATRVIIVDPSWNIRFICSRNC

SEQ ID NO: 107430 - protein, 207 aa, Setaria italica
  misc_feature (80)..(80): Xaa can be any naturally occurring amino acid
  Transcript Sequence Number=SeqID_41456
  Gene Ontology: Mol. function=binding
  Homolog annotation: Hit_ID=B6SZ63; Match level="QueryCoverage=97%, HitCoverage=49%, E-value=3e-87, Identity=55%"; Hit description =Methyltransferase small domain
  Pfam annotation: Domain name=PPR; Domain location=158-192; Score =23.8; E_value=0.00073; Accession=PF01535.12; Description=PPR repeat
  Pfam annotation: Domain name=PPR; Domain location=25-58; Score=28.6; E_value=2.5e-05; Accession=PF01535.12; Description=PPR repeat
  Pfam module annotation: Pfam domain module=PPR::PPR; Domain location =158-192::25-58
NAYAGVSELRRAHAVFDEMLDRNTVTWNAMLNGYVKVGMMEMAADVFWRIPERDEVSWHTMIDGYIRADLILDALKAYAXVVGEVDTNGNETLLVDLVKACAQYSAITEGQQLHSVILKNGFDAHAFVQATLINFYGCCGLIGLAQMQFRLSDKSHLASWNALLAGVLRRGLMHEARQLFDDMPERDVISWSTLISGYVLNGLFLVL

SEQ ID NO: 107431 - protein, 59 aa, Setaria italica
  Transcript Sequence Number=SeqID_41457
FPILSLKPARLKYELSYSYNERTSIFVLSADKKGDIKSVLELRQDITVSQSNLYSFQVH

SEQ ID NO: 107432 - protein, 69 aa, Setaria italica
  Transcript Sequence Number=SeqID_41458
  Subcellular localization annotation: CTP_CleavageSite=48; ConfidenceScore=5.14e-01
IKNFQVFLTNVHPTIKFSTRLSVLQVFRLIYTYLTSYCTRLSILQVVVCAIYFRFNTFSEASNTTAPKG

SEQ ID NO: 107433 - protein, 93 aa, Setaria italica
  Transcript Sequence Number=SeqID_41459
  Gene Ontology: Mol. function=magnesium ion binding; Cellular component=integral to membrane; Biological process=photosynthesis, light harvesting
  Homolog annotation: Hit_ID=P27489; Match level="QueryCoverage=98%, HitCoverage=34%, E-value=5e-47, Identity=94%"; Hit description =Chlorophyll a-b binding protein 13, chloroplastic
  Pfam annotation: Domain name=Chloroa_b-bind; Domain location=25-92; Score=20.5; E_value=7.3e-07; Accession=PF00504.13; Description =Chlorophyll A-B binding protein
GRITMSNDLWYGPDRVKYLGPFSAQTPSYLTGEFPGDYGWDTAGLSADPEAFARNRALEVIHGRWAMLGALGCITPEVLEKWVRVDFKEPVWF

SEQ ID NO: 107434 - protein, 127 aa, Setaria italica
  Transcript Sequence Number=SeqID_41460
  Gene Ontology: Mol. function=endopeptidase activity; Cellular component=protein complex; Biological process=cellular process
  Homolog annotation: Hit_ID=Q8W425; Match level="QueryCoverage=86%, HitCoverage=28%, E-value=2e-55, Identity=95%"; Hit description=26S proteasome non-ATPase regulatory subunit 6
  Pfam annotation: Domain name=PCI; Domain location=1-96; Score=64.8; E_ value=3.3e-16; Accession=PF01399.19; Description=PCI domain
VTFTFSLDNLLTRTRRQEYIKLDRYLQPHFRYYMREVRTVVYSQFLESYKSVTMEAMAAAFGVTVDFIDQELSRFIAAGKLHCKIDKVAGVLETNRPDERNAFYQATIKQGDFLLNRIQKLSRVIDL

SEQ ID NO: 107435 - protein, 115 aa, Setaria italica
  misc_feature (47)..(47): Xaa can be any naturally occurring amino acid
  misc_feature (59)..(59): Xaa can be any naturally occurring amino acid
  Transcript Sequence Number=SeqID_41461
  Gene Ontology: Mol. function=endopeptidase activity; Cellular component=protein complex; Biological process=cellular process
  Homolog annotation: Hit_ID=Q8W425; Match level="QueryCoverage=93%, HitCoverage=27%, E-value=9e-48, Identity=86%"; Hit description=26S proteasome non-ATPase regulatory subunit 6
  Pfam annotation: Domain name=PCI; Domain location=2-84; Score=29.3; E_ value=1.6e-05; Accession=PF01399.19; Description=PCI domain
LGTKKTRYKLDRYLQPHFRYYMREVRTVVYSQFLESYKSVTMEAMAXRVSDSVALVSHXLSRFIAAGKLHCKIDKVAGVLETNRPDERNAFYQATIKQGDFLLNRIQKLSRVIDL

SEQ ID NO: 107436 - protein, 102 aa, Setaria italica
  Transcript Sequence Number=SeqID_41462
  Gene Ontology: Mol. function=endopeptidase activity; Cellular component=protein complex; Biological process=cellular process
  Homolog annotation: Hit_ID=Q8W425; Match level="QueryCoverage=96%, HitCoverage=25%, E-value=5e-50, Identity=96%"; Hit description=26S proteasome non-ATPase regulatory subunit 6
  Pfam annotation: Domain name=PCI; Domain location=2-87; Score=59.3; E_ value=1.4e-14; Accession=PF01399.19; Description=PCI domain
LCFSAGLTEQIKLDRYLQPHFRYYMREVRTVVYSQFLESYKSVTMEAMASAFGVTVDFIDQELSRFIAAGKLHCKIDKVAGVLETNRPDARNAFYQATIKQG

SEQ ID NO: 107437 - protein, 171 aa, Setaria italica
  Transcript Sequence Number=SeqID_41463
  Gene Ontology: Mol. function=endopeptidase activity; Cellular component=protein complex; Biological process=cellular process
  Homolog annotation: Hit_ID=Q8W425; Match level="QueryCoverage=97%, HitCoverage=42%, E-value=4e-90, Identity=94%"; Hit description=26S proteasome non-ATPase regulatory subunit 6
  Pfam annotation: Domain name=RPN7; Domain location=1-102; Score=93.9; E_value=5.5e-25; Accession=PF10602.1; Description=26S proteasome subunit RPN7
MDLVFHTLQNGFFYMDFDLISKSIDKAKNLFEEGGDWERKNRLKVYEGLYCMATRNFKKAASLFLDSISTFTTYELFPYDTFIFYTVLTSIITLDRVSLKQKVVDAPEILAVIGKVPHLSEFLNSLYNCQYKSFFVAFSGLAEQIKLDRYLQPHFRYYMREVRTCLFLLLT

SEQ ID NO: 107438 - protein, 388 aa, Setaria italica
  Transcript Sequence Number=SeqID_41464
  Gene Ontology: Mol. function=ATPase activity; Cellular component =protein complex; Biological process=anaphase-promoting complex -dependent proteasomal ubiquitin-dependent protein catabolic process
  Homolog annotation: Hit_ID=Q8W425; Match level="QueryCoverage=98%, HitCoverage=98%, E-value=0.0, Identity=95%"; Hit description=26S proteasome non-ATPase regulatory subunit 6
  Pfam annotation: Domain name=PCI; Domain location=253-357; Score =105.4; E_value=1.9e-28; Accession=PF01399.19; Description=PCI domain
  Pfam annotation: Domain name=RPN7; Domain location=65-238; Score =296.2; E_value=7.1e-86; Accession=PF10602.1; Description=26S proteasome subunit RPN7
  Pfam module annotation: Pfam domain module=PCI::RPN7; Domain location= 253-357::65-238
MDIAGEDGKQQPHLVLAHKLFLLSHHDVDDLAKVDLRADVLAAVKSDDMAALYESLATDGVLEMDAALLAEMRARIDEEIRKFDEKIADAEENLGESEVREAHLAKSLYFIRVGEKEKALEQLKVTEGKTVAVGQKMDLVFYTLQIGFFYMDFDLISKSIDKAKNLFEEGGDWERKNRLKVYEGLYCMATRNFKKAASLFLDSISTFTTYELFTYDTFIFYTVLTSVTSLDRVSLKQKVVDAPEILAVIGKVPHLSEFLNSLYNCQYKSFFIAFSGLTEQIKLDRYLQPHFRYYMREVRTVVYSQFLESYKSVTMEAMASAFGVTVDFIDQELSRFIAAGKLHCKIDKVAGVLETNRPDARNAFYQATIKQGDFLLNRIQKLSRVIDL

SEQ ID NO: 107439 - protein, 389 aa, Setaria italica
  Transcript Sequence Number=SeqID_41465
  Gene Ontology: Mol. function=ATPase activity; Cellular component =protein complex; Biological process=anaphase-promoting complex -dependent proteasomal ubiquitin-dependent protein catabolic process
  Homolog annotation: Hit_ID=Q8W425; Match level="QueryCoverage=100%, HitCoverage=100%, E-value=0.0, Identity=93%"; Hit description=26S proteasome non-ATPase regulatory subunit 6
  Pfam annotation: Domain name=PCI; Domain location=254-358; Score =106.0; E_value=1.2e-28; Accession=PF01399.19; Description=PCI domain
  Pfam annotation: Domain name=RPN7; Domain location=66-239; Score =302.3; E_value=1e-87; Accession=PF10602.1; Description=26S proteasome subunit RPN7
  Pfam module annotation: Pfam domain module=PCI::RPN7; Domain location= 254-358::66-239
MDGGAGEDGKQERHLVLAHKLFLLSHPAVDDLSKVALRAEVLDAVKSDDMAPLLESLVSAGVLEPDAALLAEMRGRIDEEIRKLDEKIADAEENLGESEVREAHLAKSLYFIRVGEKEKALEQLKVTEGKTVAVGQKMDLVFHTLQIGFFYMDFDLISKSIDKAKNLFEEGGDWERKNRLKVYEGLYCMATRNFKKAASLFLDSISTFTTYELFPYDTFIFYTVLTSIITLDRVSLKQKVVDAPEILAVIGKVPHLSEFLNSLYNCQYKSFFVAFSGLAEQIKLDRYLQPHFRYYMREVRTVVYSQFLESYKSVTMEAMAAAFGVTVDFIDQELSRFIAAGKLHCKIDKVAGVLETNRPDERNAFYQATIKQGDFLLNRIQKLSRVIDL

SEQ ID NO: 107440 - protein, 164 aa, Setaria italica
  misc_feature (135)..(135): Xaa can be any naturally occurring amino acid
  Transcript Sequence Number=SeqID_41466
  Gene Ontology: Cellular component=extracellular region; Biological process=response to biotic stimulus
  Homolog annotation: Hit_ID=Q2XX59; Match level="QueryCoverage=85%, HitCoverage=85%, E-value=2e-46, Identity=69%"; Hit description =Pathogenesis-related protein 1
  Pfam annotation: Domain name=SCP; Domain location=32-152; Score=99.1; E_value=1.5e-26; Accession=PF00188.18; Description=SCP-like extracellular protein
  Subcellular localization annotation: CTP_CleavageSite=54; ConfidenceScore=5.04e-01
MEKVACLALAFAMAAAAVFTPCAAQNSPQDFVKLHNAARAAVGVGPVSWNDNVAAFARSWAAKRAGDCRLVHSRGSGYGENLFGGSGADWSASDAVGLWVAEKQWYDHGSNSCAAGKVCGHYTQVVWRASTAIGXCARVVCNNGGIFITCNYSPPGNYAGQSPY

SEQ ID NO: 107441 - protein, 293 aa, Setaria italica
  misc_feature (143)..(143): Xaa can be any naturally occurring amino acid
  Transcript Sequence Number=SeqID_41467
  Gene Ontology: Mol. function=DNA binding
  Homolog annotation: Hit_ID=O22705; Match level="QueryCoverage=73%, HitCoverage=82%, E-value=1e-26, Identity=34%"; Hit description =F8A5.19 protein
  Subcellular localization annotation: CTP_CleavageSite=60; ConfidenceScore=5.76e-01
MADDPNMNFGAFSQSLCNQHVVSFQPSPTTSGSGSMPAYLDCSTGMDASVGMLSSTPSVVVSTGSSNLPADPGPNLKYGAPLAADWTHLELQILRDGLEKYVHEQGIMKYIKIAASLPNKTVRDVAMRCQWVGKKVNTRRRKXPQEHHTGRNIKERKDKFVEPALWGANRPLQTGMRANSFVPHNVQNNLFVSGASEIDRPVQHLLEENNWLLNQIETNILTFQAQNNIDLFHRAKRNINDLQHITTQLPGMSTKMPPLRVSVNESLASFVLPGISMDQVLGSNHLKEEPRGW

SEQ ID NO: 107442 - protein, 56 aa, Setaria italica
  Transcript Sequence Number=SeqID_41468
RRKPQEHHTGRNIKERKDKFVEPALWGANRPLQTGMRANSFVPHNVQNNLFVSGGW

SEQ ID NO: 107443 - protein, 103 aa, Setaria italica
  Transcript Sequence Number=SeqID_41469
  Subcellular localization annotation: CTP_CleavageSite=62; ConfidenceScore=5.71e-01
PPRANPTECARPAARSAVSPSSSRDPHVRRAQGLPRRRRSQGPVLPPVLSHPRRGSPRRGWVAAARHSRRPDPPPPPVPGIGGAPWNRWLRTCLPAELRHSLD

SEQ ID NO: 107444 - protein, 59 aa, Setaria italica
  misc_feature (23)..(23): Xaa can be any naturally occurring amino acid
  Transcript Sequence Number=SeqID_41470
SLPRLHEGLLNAFLKNHPLSLLXYLGDCFGSTSTSIFNLPMKIGGESMDLQYWTRQSKK

SEQ ID NO: 107445 - protein, 95 aa, Setaria italica
  Transcript Sequence Number=SeqID_41471
  Subcellular localization annotation: CTP_CleavageSite=41; ConfidenceScore=5.78e-01
DAGFGVNVLLGSCSFKITSSPGSARRVNQVPLFGISSSKITSSPGSARRVNQVPLFGISITYGATSSVDHAIVHFALDKCLLLMHKISVVLQLLA

SEQ ID NO: 107446 - protein, 112 aa, Setaria italica
  Transcript Sequence Number=SeqID_41472
QETSNRNLLYAWGYPTVLRICLIPKPSAITSTIINVSKVWMLALGSTCSLGVCSSKITSSPGSARRVNQVPLFGISITYGATSSVDHAIVHFALDKCLLLMHKISVVLQLLA

SEQ ID NO: 107447 - protein, 97 aa, Setaria italica
  Transcript Sequence Number=SeqID_41473
  Subcellular localization annotation: CTP_CleavageSite=43; ConfidenceScore=5.43e-01
KIDYAYLIPKPSAITSTIINVSKVWMLALGSTCSLGVCSSKITSSPGSARRVNQVPLFGISITYGATSSVDHAIVHFALDKCLLLMHKISVVLQLLA

SEQ ID NO: 107448 - protein, 73 aa, Setaria italica
  Transcript Sequence Number=SeqID_41474
KYIYIKGCKLILGPSITDLSRYCPEMSSVTSCQFPRQGQNTDGRERGRCSPWKLREAKCTHTLLDRDLFISRC

SEQ ID NO: 107449 - protein, 129 aa, Setaria italica
  Transcript Sequence Number=SeqID_41475
  Gene Ontology: Mol. function=binding; Cellular component =mitochondrial inner membrane; Biological process=transport
  Homolog annotation: Hit_ID=Q42422; Match level="QueryCoverage=99%, HitCoverage=42%, E-value=7e-59, Identity=84%"; Hit description=2 -oxoglutarate/malate translocator
  Pfam annotation: Domain name=Mito_carr; Domain location=34-128; Score= 82.7; E_value=1.3e-21; Accession=PF00153.19; Description =Mitochondrial carrier protein
QGPTVVRAMSLNMGMLASYDQSVELFRDKFGAGEISTVLGASAVSGFFASACSLPFDYVKTQIQKMQPDANGKYPYTGSLDCAMKTLKSGGPFKFYTGFPVYCVRIAPHVMLTWIFLNQIQKFEKGMGL

SEQ ID NO: 107450 - protein, 126 aa, Setaria italica
  misc_feature (44)..(44): Xaa can be any naturally occurring amino acid
  misc_feature (114)..(114): Xaa can be any naturally occurring amino acid
  Transcript Sequence Number=SeqID_41476
  Gene Ontology: Mol. function=nucleotide binding; Biological process =defense response
  Homolog annotation: Hit_ID=Q2R0W6; Match level="QueryCoverage=99%, HitCoverage=22%, E-value=3e-25, Identity=50%"; Hit description =Leucine Rich Repeat family protein, expressed
  Pfam annotation: Domain name=LRR_1; Domain location=39-60; Score=5.0; E_value=34; Accession=PF00560.25; Description=Leucine Rich Repeat
  Pfam annotation: Domain name=LRR_1; Domain location=62-83; Score =13.0; E_value=0.98; Accession=PF00560.25; Description=Leucine Rich Repeat
  Pfam module annotation: Pfam domain module=LRR_1::LRR_1; Domain location=39-60::62-83
GYSENMPCLSDFQLLRVLDLENRVVMEYNYIKHMDKLSHLRYLXLNSRRIIALPEQIGQLQNLQTLDLRWTRIQRLPESIVLLQRLTLVNSLELPEGIGNMQALRELSEIEINXHTSVSSLLELAV

SEQ ID NO: 107451 - protein, 264 aa, Setaria italica
  Transcript Sequence Number=SeqID_41477
  Gene Ontology: Cellular component=chloroplast
  Pfam annotation: Domain name=Dabb; Domain location=158-252; Score =87.6; E_value=4.4e-23; Accession=PF07876.4; Description=Stress responsive AB Barrel Domain
  Pfam annotation: Domain name=Dabb; Domain location=44-145; Score =89.1; E_value=1.6e-23; Accession=PF07876.4; Description=Stress responsive AB Barrel Domain
  Pfam module annotation: Pfam domain module=Dabb::Dabb; Domain location=158-252::44-145
  Subcellular localization annotation: CTP_CleavageSite=31; ConfidenceScore=5.53e-01
MICLKAFSSPLHLPTLRRIAPPSSALRTRIAAMSSSSSAVAAPVEHIVLLKARPEAVASGAAAAMVSSLQALATQVPGLAYIHAGPVLRLRSPAAEALGPTHLLHSRYATKQDLASYAAHPAHVAAVQGHVLPNALDTTAVDWVNAAELPSPVSPGSAVRLTLAKVKEGVEVAQLVEKVAAATKAAGEAKGAKVSFGENFSPARAKGYQFGMVAVFDSVEELDAVEGDGKVEEAKAAVRPLLDEVVVLDFVVEAAGGAPSPASL

SEQ ID NO: 107452 - protein, 72 aa, Setaria italica
  Transcript Sequence Number=SeqID_41478
VVGDEDHPADISPEDKRFLILLGWREDVQVEPLEFDEIADTVKGCEELKKKLQSMLSNDNIKSILHLIDGQS

SEQ ID NO: 107453 - protein, 75 aa, Setaria italica
  Transcript Sequence Number=SeqID_41479
  Gene Ontology: Mol. function=methylmalonate-semialdehyde dehydrogenase (acylating) activity
  Homolog annotation: Hit_ID=Q6AAK3; Match level="QueryCoverage=70%, HitCoverage=10%, E-value=5e-23, Identity=98%"; Hit description =Methylmalonic acid semialdehyde dehydrogenase
MSCVGHGAGRPRRPSTTKEFSSMKTIRQWVGGEYYEGSPLGVIPVENPATGEVTAELLQASKEDLDHTVEVARDA

SEQ ID NO: 107454 - protein, 86 aa, Setaria italica
  misc_feature (67)..(67): Xaa can be any naturally occurring amino acid
  Transcript Sequence Number=SeqID_41480
KKTPAQSIWRHSEQTGESDLASIEKLSKAYSDFESRLAETMKRNETRLTSMICQFNPLVQQVAVLKXKKEFWYKQILEIKCSNLRK

SEQ ID NO: 107455 - protein, 60 aa, Setaria italica
  Transcript Sequence Number=SeqID_41481
TTIFNSPWDIIWSHKCCNVMHTKLNISFFKHPALCWTWKCHHSLCNEVSTALIVNNFPGS

SEQ ID NO: 107456 - protein, 111 aa, Setaria italica
  Transcript Sequence Number=SeqID_41482
  Gene Ontology: Mol. function=protein serine/threonine kinase activity; Cellular component=ubiquitin ligase complex; Biological process=ubiquitin-dependent protein catabolic process
  Homolog annotation: Hit_ID=Q6ESH4; Match level="QueryCoverage=98%, HitCoverage=13%, E-value=9e-25, Identity=58%"; Hit description =Putative serine/threonine-specific protein kinase
MPPLTWKVRTRIIGEICSALAFIHSHKPYPIVHGDLNLGNILLDANFVSKVGDLGICHLLRQPDLPTTNLQHHPTKNHKGTLCCMDNGEFKSARELMLWSDVNSFGIIILR

SEQ ID NO: 107457 - protein, 78 aa, Setaria italica
  Transcript Sequence Number=SeqID_41483
FTQNQDKHSLLPSSVTHHMFDILPQQPISTKIPIDCSTHPPRHRKTKSTIHYSHSAMTGESRYYEKAASDLHVSFYCS

SEQ ID NO: 107458 - protein, 181 aa, Setaria italica
  misc_feature (94)..(94): Xaa can be any naturally occurring amino acid
  Transcript Sequence Number=SeqID_41484
  Homolog annotation: Hit_ID=Q259J6; Match level="QueryCoverage=91%, HitCoverage=33%, E-value=2e-13, Identity=30%"; Hit description =H0402C08.2 protein
  Pfam annotation: Domain name=DUF1668; Domain location=9-179; Score= -31.2; E_value=3.6e-07; Accession=PF07893.5; Description=Protein of unknown function (DUF1668)
RKEDLLGPLVDYKGFSQTYDAEDRTIHVIVSPNEPKHHNPVSLAVGEALYVMDRKPVPGSCCGFEALTFDMPKEVMGKLGWDWYWHCLKAPPFXLEPGYNNTSIQGYTVVGGFNIWISTRGIGTYSFDTDNGSWSKAGDWELPFHGRADFFPEHGIWLGFSSQGNLLYSSDLGVSMQCKPE

SEQ ID NO: 107459 - protein, 269 aa, Setaria italica
  Transcript Sequence Number=SeqID_41485
  Gene Ontology: Mol. function=RNA binding; Cellular component=signal recognition particle, endoplasmic reticulum targeting
  Homolog annotation: Hit_ID=B6U4F2; Match level="QueryCoverage=100%, HitCoverage=45%, E-value=1e-141, Identity=90%"; Hit description =Signal recognition particle 68 kDa protein
KTRVSILKAQQLEKDLNGSATESIASDKKLGIFDKIFSAYHDARSCIRNDLASAGNAENIRDDLNGLDKAVSAVLGLKTIERNQLLVSIAKSKFTKHRDEKNERITKPEELVRLYDLLVQNTTDLTDLVSSGRNKNEEENSFIHEYEMKGLAFRAERCFFLAKSYSSAGKRAEAYALFCHARTLTDSALQQLANSPDKALIQDLKSLSDNCRSNSCIEHATGIMEEESVPLKLSKGVSTMSLGDDKTKENKYLLDMLESYESAIGEPNT

SEQ ID NO: 107460 - protein, 164 aa, Setaria italica
  Transcript Sequence Number=SeqID_41486
  Gene Ontology: Mol. function=RNA binding; Cellular component=signal recognition particle, endoplasmic reticulum targeting
  Homolog annotation: Hit_ID=B6U4F2; Match level="QueryCoverage=99%, HitCoverage=27%, E-value=5e-85, Identity=90%"; Hit description =Signal recognition particle 68 kDa protein
MFFLAKSYSSAGKRAEAYALFCHARTLTDSALQQLANSPDKALIQDLKSLSDNCRSNSCIEHATGIMEEESVPLKLSKGVSTMSLGDDKTKENKYLLDMLESYESAIGEPNTKVPCRIAQFPPPFQAVPCNPIVLDMAYNAIEFPSLENRMKKEKKGLLSRFWG

SEQ ID NO: 107461 - protein, 60 aa, Setaria italica
  misc_feature (1)..(13): Xaa can be any naturally occurring amino acid
  Transcript Sequence Number=SeqID_41487
XXXXXXXXXXXXXFFFFSLALVKRQVNWYLEKYMSCKTCPQALYTTSVPVHSQEALVSRL

SEQ ID NO: 107462 - protein, 51 aa, Setaria italica
  Transcript Sequence Number=SeqID_41488
  Homolog annotation: Hit_ID=B6SWY5; Match level="QueryCoverage=78%, HitCoverage=15%, E-value=4e-12, Identity=87%"; Hit description=LysM receptor-like kinase
KMANLRKSCTHEEPSMRPTMRSVVVALMALSSKDNELTRGLELSPRELRSG

SEQ ID NO: 107463 - protein, 149 aa, Setaria italica
  Transcript Sequence Number=SeqID_41489
  Gene Ontology: Mol. function=hydrolase activity, acting on ester bonds; Biological process=lipid metabolic process
  Homolog annotation: Hit_ID=B6T560; Match level="QueryCoverage=90%, HitCoverage=36%, E-value=8e-16, Identity=34%"; Hit description=GSDL -motif lipase
CVPAVRVLSPTGECWDSLNQLAGGFNEALRPWLAGLARRLPGLAYSLADLFAFTRDTLADPQASGYTEVAGACCGGGRLRGEAQCSPNSTLCANRDQHVFWDRAHFSQRTAFLIAQAFCNGPAKYTNPVNFMQLAGSVSEITEALESSR

SEQ ID NO: 107464 - protein, 147 aa, Setaria italica
  misc_feature (81)..(81): Xaa can be any naturally occurring amino acid
  Transcript Sequence Number=SeqID_41490
  Homolog annotation: Hit_ID=Q259K5; Match level="QueryCoverage=68%, HitCoverage=13%, E-value=1e-13, Identity=42%"; Hit description =H0402C08.8 protein
RLAQRRAAAAAAFLASSTATAAIDGEGGGEGSIPQLSSIANSVVSRCSRILAISTENLQQSFGTDFPHNCNEPNTYARELXLEYCCHKALHEVTTRPDYLADKNLRRLMFDMMLAWETPGSEDASVENGSIVRDSLEIEDEDEGILI

SEQ ID NO: 107465 - protein, 68 aa, Setaria italica
  Transcript Sequence Number=SeqID_41491
  Gene Ontology: Mol. function=calcium ion binding
  Homolog annotation: Hit_ID=Q2RAR8; Match level="QueryCoverage=67%, HitCoverage=14%, E-value=9e-16, Identity=86%"; Hit description=EF hand family protein, expressed
  Subcellular localization annotation: CTP_CleavageSite=28; ConfidenceScore=5.32e-01
MNISYVYAFSLPSTTVLTASFFFFNLCRCCLTVKGLTEKFKEKDAAFSGSATFTYEAFMLTVLPFLIA

SEQ ID NO: 107466 - protein, 38 aa, Setaria italica
  Transcript Sequence Number=SeqID_41492
VASVLLSSHRTCLDAKTSTFINYMPCDLTREHLPSHRR

SEQ ID NO: 107467 - protein, 94 aa, Setaria italica
  Transcript Sequence Number=SeqID_41493
  Subcellular localization annotation: CTP_CleavageSite=8; ConfidenceScore=5.16e-01
PDNQRNHTCMMHQQPLLHVVRVLPGKKQSPTPFLANIIQSGFLFSELPLEIVGSRPFLRRCWRLRFQSRSLLLRQDPPIALPWTLPSAASTPRW

SEQ ID NO: 107468 - protein, 55 aa, Setaria italica
  Transcript Sequence Number=SeqID_41494
STLLIISQQQLIQPWVTFMACSNVSTTIYVAPPPHLTSLWPMYKPENKLVNAPMV

SEQ ID NO: 107469 - protein, 288 aa, Setaria italica
  misc_feature (250)..(250): Xaa can be any naturally occurring amino acid
  Transcript Sequence Number=SeqID_41495
  Gene Ontology: Cellular component=chloroplast
  Homolog annotation: Hit_ID=B6U9Z7; Match level="QueryCoverage=90%, HitCoverage=42%, E-value=1e-144, Identity=94%"; Hit description =EMB2219
  Pfam annotation: Domain name=mTERF; Domain location=1-248; Score= -84.4; E_value=0.015; Accession=PF02536.6; Description=mTERF
NLTARMGPFVDRVVVEAAAMRRDRPDLAHMSFNARAKAYIQESGLVELVKWFKHNSMTYPQIAKVVCACSGDLGKVRMMIKWLRSIYVKGDFLGRVLANGGSFLNRSFEELEDIIGYLESCGVRRDWIGYVVSRCPQLLNLSMDELETRVRFYTNMGMDDKDFGTMVYDYPRALGFLSLEEMNSKVQYLKEFGLSTEELGRLLAFKPQLMACSIEERWKPLVKYLYHLNVSRDGMKRMLLVQPTIFCLDXLETVIAPKVQVSTRYCTFGAITGWHEANAVGPTYNILS

SEQ ID NO: 107470 - protein, 287 aa, Setaria italica
  Transcript Sequence Number=SeqID_41496
  Homolog annotation: Hit_ID=B6U9Z7; Match level="QueryCoverage=82%, HitCoverage=55%, E-value=1e-130, Identity=62%"; Hit description =EMB2219
  Pfam annotation: Domain name=mTERF; Domain location=1-247; Score =41.6; E_value=9e-11; Accession=PF02536.6; Description=mTERF
MKYHSGSQVQYLKVFGLSTEELGRLLAFKPQLMACSIEERWKPLVKYLYHLNVSRDGMKRMLLVQPTIFCLDLETVIAPKVQFLLDIGVRSDAIGNVLVKFPPVLTYSLYKKIRPVVIFLLTKGGVKQDDIGKVIALDPQLLGCSIAHKLEVSVKYFRSLGIYHFVLGQMVADFPALLRYNVDILRPKYQYLRRVMVRPLKDLIEFPRFFSYSLEDRIEPRHQTLVANRINMKLRYMLTGSDEEFAERVREAVERRARFEAGKGVAETIPDARETSEEEETTEAAAC

SEQ ID NO: 107471 - protein, 334 aa, Setaria italica
  Transcript Sequence Number=SeqID_41497
  Gene Ontology: Mol. function=protein serine/threonine kinase activity; Cellular component=plasma membrane; Biological process =protein amino acid phosphorylation
  Homolog annotation: Hit_ID=Q6KC53; Match level="QueryCoverage=100%, HitCoverage=62%, E-value=1e-171, Identity=84%"; Hit description =Calcium-dependent protein kinase 17
  Pfam annotation: Domain name=Pkinase; Domain location=1-170; Score =96.5; E_value=8.9e-26; Accession=PF00069.17; Description=Protein kinase domain
  Pfam annotation: Domain name=efhand; Domain location=217-245; Score =35.3; E_value=2.4e-07; Accession=PF00036.24; Description=EF hand
  Pfam annotation: Domain name=efhand; Domain location=253-281; Score =34.4; E_value=4.6e-07; Accession=PF00036.24; Description=EF hand
  Pfam annotation: Domain name=efhand; Domain location=289-317; Score =33.5; E_value=8.3e-07; Accession=PF00036.24; Description=EF hand
  Pfam module annotation: Pfam domain module=Pkinase::efhand::efhand::ef hand; Domain location=1-170::217-245::253-281::289-317
RIIAKGHYTERAAASLLRTIVEIVHTCHSLGVIHRDLKPENFLLLSKDEHAPLKATDFGLSVFFKQGEVFKDIVGSAYYIAPEVLKRSYGPEADIWSIGVILYILLCGVPPFWAESEHGIFNAILRGQVDFSSDPWPRISPGAKDLVKKMLTTDPRKRISAYDVLNHPWIKEDGEAPDTPLDNAVMNRLKQFRAMNQFKKAALRVIAGCLSEEEIRGLKEMFKSMDSDNSGTITVDELRRGLAKQGTKLSEAEVEQLMEAADADGNGTIDYEEFITATMHMNRMDREEHLYTAFQYFDKDGSGCISKEELEQALKEKGLLDGRDIKEIISEVDA

SEQ ID NO: 107472 - protein, 614 aa, Setaria italica
  Transcript Sequence Number=SeqID_41498
  Homolog annotation: Hit_ID=Q8H2N8; Match level="QueryCoverage=31%, HitCoverage=36%, E-value=2e-43, Identity=48%"; Hit description =Proteophosphoglycan-like
  Pfam annotation: Domain name=DUF566; Domain location=310-586; Score =399.1; E_value=7.5e-117; Accession=PF04484.4; Description=Family of unknown function (DUF566)
  Subcellular localization annotation: CTP_CleavageSite=26; ConfidenceScore=5.70e-01
LKSAEFADKNCRPSSSSAAIRGVSPRSRSASNAISTGVDFAEKDSRPSTSSISLCQTPKNSRLQCDGVNTISKDVETSSTVSGCTSDSRLDDTGALVKGVDNSEKITVAMQDGGDGDGPGRMDSTDIGTGAVLLSIASQERSSSRPVVDDVKNTSENVDATQKGNRAISVKIPSRGASPRRRLASDCIDTISKTIDFTEKDKKPMTVSVPSRGVSPRRTARSDSANIMSKSMDFADKCNGPISSMIPSRVVSTRRVLGPDGANAMSRSMDLTDKIRQQISSTVQSSRASPRKTPLAYNRVKGPEVLSGDVESPASADGNESQEENASSSPDAPNNSEKFTPPKRLARTSSSPCRVLIRPSSPSNASSTSSFASRRLPSPSKTRPTTPVSPCSSVRSDSASSILSYIGDATRGKKSPAHMEEAHQLRLLHNRNLQWRFTNAYVDEMQSIQKMSAETMLYSVWDANSRMCDSMVMKRSHVQRLRQEVKLGIVLKEQMDYLDHWAALQTEHSSSLSSATEALKASTLRLPVSGGAKADVLTVKNAVSSAVDIMQAMGSSICHLLSKLQGTHSLVTELSAVAAKESTLLNEYRELLATAAALQVQESSLRTQLIQQTE

SEQ ID NO: 107473 - protein, 413 aa, Setaria italica
  misc_feature (44)..(44): Xaa can be any naturally occurring amino acid
  misc_feature (148)..(148): Xaa can be any naturally occurring amino acid
  misc_feature (156)..(156): Xaa can be any naturally occurring amino acid
  misc_feature (169)..(169): Xaa can be any naturally occurring amino acid
  misc_feature (304)..(304): Xaa can be any naturally occurring amino acid
  Transcript Sequence Number=SeqID_41499
  Gene Ontology: Cellular component=nucleus
  Homolog annotation: Hit_ID=Q7FAY1; Match level="QueryCoverage=99%, HitCoverage=44%, E-value=1e-173, Identity=75%"; Hit description =OSJNBa0086B14.27 protein
NEDSKLWQGLDSKISSTKTLCDQLTETLQQLASQTEQAEEDKKXFEEMLGKNSKALDEFNCMLHDLSTKLECAEQKIISGKQEMLQIKQEKEEMDRSYKEQLYSNDTTIKEKDSLIKQLEGSVDENKSRLICLDSRLQCMEQELKLKXDVCISLKXNLASSESEKNNLXLKNQGCILEIEKLCKDNKDFNELLSSFMAKVTELDKEHASMSSHVSRLLCSYERFYEMAQEEKMLIERSSKDKFDHLQKQHVDLSSENNALKVEIEELKSRILELQKTQEIVMVQHVEECQVAENKIRRLESEAXEISASNINRLEKLASELQGRVQKLLEDSTLENHKQELLEKIVKLESDNQELQGRVQSIMEEKSNNAESLQGEITKRDQQVDTLENQINQLRCDLNEKEQLYCCSVEERN

SEQ ID NO: 107474 - protein, 87 aa, Setaria italica
  Transcript Sequence Number=SeqID_41500
  Gene Ontology: Mol. function=binding; Cellular component=chloroplast; Biological process=photosynthesis
  Homolog annotation: Hit_ID=P61843; Match level="QueryCoverage=100%, HitCoverage=51%, E-value=1e-41, Identity=93%"; Hit description =Photosystem I assembly protein ycf3
  Pfam annotation: Domain name=TPR_1; Domain location=35-68; Score =17.5; E_value=0.047; Accession=PF00515.20; Description =Tetratricopeptide repeat
MPRSRINGNFIDKTFSIVANILLQIIPTTSGEKRAFTYYRDGMLAQSEGNYAEALQNYYEAMRLEIDPYDRSYILYNIGLIHTSNGE

SEQ ID NO: 107475 - protein, 44 aa, Setaria italica
  Transcript Sequence Number=SeqID_41501
  Gene Ontology: Mol. function=binding; Cellular component=chloroplast; Biological process=photosynthesis
  Homolog annotation: Hit_ID=A1E9S5; Match level="QueryCoverage=100%, HitCoverage=25%, E-value=5e-17, Identity=97%"; Hit description =Photosystem I assembly protein ycf3
MPRSRINGNFIDKTFSIVANILLQIIPTTSGEKRAFTYYRDGAI

SEQ ID NO: 107476 - protein, 82 aa, Setaria italica
  Transcript Sequence Number=SeqID_41502
  Gene Ontology: Mol. function=binding; Cellular component=chloroplast; Biological process=photosynthesis
  Homolog annotation: Hit_ID=A1E9S5; Match level="QueryCoverage=92%, HitCoverage=44%, E-value=1e-38, Identity=100%"; Hit description =Photosystem I assembly protein ycf3
  Pfam annotation: Domain name=TPR_1; Domain location=30-63; Score =34.3; E_value=4.8e-07; Accession=PF00515.20; Description =Tetratricopeptide repeat
  Pfam annotation: Domain name=TPR_2; Domain location=30-63; Score =20.8; E_value=0.0058; Accession=PF07719.9; Description =Tetratricopeptide repeat
  Pfam module annotation: Pfam domain module=TPR_1::TPR_2; Domain location=30-63::30-63
MLAQSEGNYAEALQNYYEATRLEIDPYDRSYILYNIGLIHTSNGEHTKALEYYFRALERNPFLPQAFNNMAVICHYVRLSPL

SEQ ID NO: 107477 - protein, 698 aa, Setaria italica
  misc_feature (215)..(215): Xaa can be any naturally occurring amino acid
  Transcript Sequence Number=SeqID_41503
  Gene Ontology: Mol. function=nucleic acid binding
  Homolog annotation: Hit_ID=Q9FI74; Match level="QueryCoverage=99%, HitCoverage=96%, E-value=1e-155, Identity=39%"; Hit description =Mutator-like transposase-like protein
  Pfam annotation: Domain name=MULE; Domain location=315-411; Score =81.7; E_value=2.6e-21; Accession=PF10551.1; Description=MULE transposase domain
  Pfam annotation: Domain name=MuDR; Domain location=119-195; Score =123.1; E_value=9e-34; Accession=PF03108.7; Description=MuDR family transposase
  Pfam annotation: Domain name=PB1; Domain location=1-79; Score=33.3; E_ value=9.6e-07; Accession=PF00564.16; Description=PB1 domain
  Pfam annotation: Domain name=SWIM; Domain location=571-603; Score =34.5; E_value=4.1e-07; Accession=PF04434.9; Description=SWIM zinc finger
  Pfam annotation: Domain name=zf-CCHC; Domain location=677-694; Score =10.5; E_value=0.012; Accession=PF00098.15; Description=Zinc knuckle
  Pfam module annotation: Pfam domain module=MULE::MuDR::PB1::SWIM::zf -CCHC; Domain location=315-411::119-195::1-79::571-603::677-694
SYSGGEAHAMFVQSDWTFSGFKQEISSTLNNLKLDQFAFKYFLPKNDKTLISISNDKDLRRMVEFHAESETTYIYVMKKADNRSKNAVADSGTPTDAFAIVPTTQDGSKRQKVCASWKNVITGVGQVFEGPKDFRDALHKYAIAHRFHYRFIKNDSSRVTAECTGEDCPWRIHASKSPAKKEFMIKKISESHTCESETVKSHRLASQRWVASVIXKEKLRDSPNYRPRDIANDLQREYGLCLNYSQAWRGRSIAQKELYSSHEEACSQLPWFCERIVETNPGSVATVVALEDSKFRFFVAFHASLHGFQHGCRPLLFLDAITAKPNKHWKLLAATSVDGEGDVFPVAFGVVDDESRENWHWFLQQLKSSLSTSRAITFISNGEHGLWDEVSSVFPDSHHGYCVESLIEEFKKQLDDAWTEELKDAMVEHLKKAIYACTTDELNQYIELIKNASDKLADWLLEINPERWSDARFKGVRHGQYSCNIFGTVSEWIPTRYELSVVQLVDTIRCKLMEMMYTRRESSNAWTEVLTPSANQKLQEEVSKAHTLNVLPAENDENGSNIFKVCDDSVNVVNLAIWECTCQRWRISGLPCMHAIAVIERTGQYAYDYCAKYFTTGWYRLTYSLSINPIPDVIVPVTLIDPAQSPATHPCPVRTRRRVGRPKEKPADPRIAIKRAVRCSRCKGYGHNKATCKVPIST

SEQ ID NO: 107478 - protein, 102 aa, Setaria italica
  Transcript Sequence Number=SeqID_41504
IIGYRIHLKLPCVVRLCFVSLFIFHKVGDLDATHSDVCSSPDTTPCYLPFVFCSITGYHIPASVPSVLCLFPSSSKGVIMMLPSFDTVLCMTTVVWYHLVGQ

SEQ ID NO: 107479 - protein, 63 aa, Setaria italica
  Transcript Sequence Number=SeqID_41505
  Subcellular localization annotation: CTP_CleavageSite=23; ConfidenceScore=5.25e-01
DSSLSMTSWVNRAASPRPPVHLQASPLSGALGFNYWRIIVISFSLPTSYRFSSYLVRLHHLTF

SEQ ID NO: 107480 - protein, 680 aa, Setaria italica
  Transcript Sequence Number=SeqID_41506
  Gene Ontology: Mol. function=ATPase activity, coupled to transmembrane movement of substances; Cellular component=integral to membrane; Biological process=transport
  Homolog annotation: Hit_ID=Q6YUU5; Match level="QueryCoverage=97%, HitCoverage=98%, E-value=0.0, Identity=57%"; Hit description =Putative multidrug resistance protein
  Pfam annotation: Domain name=AAA; Domain location=392-548; Score= -39.8; E_value=0.078; Accession=PF00004.21; Description=ATPase family associated with various cellular activities (AAA)
  Pfam annotation: Domain name=ABC_membrane; Domain location=38-315; Score=116.0; E_value=1.2e-31; Accession=PF00664.15; Description=ABC transporter transmembrane region
  Pfam annotation: Domain name=ABC_tran; Domain location=390-574; Score= 233.1; E_value=7.2e-67; Accession=PF00005.19; Description=ABC transporter
  Pfam annotation: Domain name=SMC_N; Domain location=286-578; Score= -130.8; E_value=0.057; Accession=PF02463.11; Description=RecFRecNSMC N terminal domain
  Pfam module annotation: Pfam domain module=AAA::ABC_membrane::ABC _tran::SMC_N; Domain location=392-548::38-315::390-574::286-578
MAKDDSPAETVEEKPAAPVLRSFASVFMHADAADVALMVLGLVGAMGDGLSTPVMLLITSRVFDDTGSGPDLLQEFSSKIDENARNLLFLALANWVMAFLEGYCWARTAERQASRMRERYLRAVLRQDVEYFDLNAGSTSEVITGVSSDSLAVQDALSEKVPNFVMNVTMFVASYVVGFALLPRLMLVALPSVLLLIIPGFMYGRILIDLARRIREQYTRPGAIAEQAMSSVRTVYSFVAEGSTIARFSAALEESARLGIKQGFAKGVAIGSSDVRLAIFAFNLWYGSRLVMYHGYKGGTVFAVSAAIVVGGLALGSGLSNVKYFSEASSAAERVQEVIRRVPKIDSESNAGEELANVAGEVEFKNVEFCYPSRPETPIFVSFNLRVPAGRTVALVGSSGSGKSTVIALLERFYDPSAGEVSLDGVDIRRLRLKWLRAQMGLVSQEPALFATSIRENILFGKEDATEEEVVAAAKAANAHNFISQLPQGYDTQVGERGIQMSGGQKQRIAIARAILKSPKILLLDEATSALDTESERVVQEALDLASVGRTTIVIAHRLSTIRNADMIAVMQYGEVKELGSHDELIANENGLYTSLVHLQQTRDSREANEVGGTGSTSAAGQSSSHSMSRRFSAASRSSSGRSMGDEENDNSTDKPKLPLPSFRRLLMLNAPEWKQALMG

SEQ ID NO: 107481 - protein, 61 aa, Setaria italica
  Transcript Sequence Number=SeqID_41507
WANKIDHLKNIMRLIISIFLIFVCPYERLTRIKEKQKTKQLNFFHQTNSSQYIKLSIPKRR

SEQ ID NO: 107482 - protein, 63 aa, Setaria italica
  misc_feature (50)..(50): Xaa can be any naturally occurring amino acid
  Transcript Sequence Number=SeqID_41508
  Gene Ontology: Mol. function=binding
  Homolog annotation: Hit_ID=B9SS47; Match level="QueryCoverage=96%, HitCoverage=8%, E-value=2e-14, Identity=62%"; Hit description=O -linked n-acetylglucosamine transferase, ogt, putative
TVVDAALDQTGKWSQGDLLRTKARIQAAQGQFRDAVETYTQLLAIIQLRXKSVTAGICLAKVP

SEQ ID NO: 107483 - protein, 642 aa, Setaria italica
  Transcript Sequence Number=SeqID_41509
  Gene Ontology: Mol. function=binding; Cellular component=plasma membrane
  Homolog annotation: Hit_ID=B9SKQ6; Match level="QueryCoverage=100%, HitCoverage=87%, E-value=0.0, Identity=54%"; Hit description =Calmodulin binding protein, putative
  Pfam annotation: Domain name=TPR_1; Domain location=442-475; Score =2.6; E_value=2.9; Accession=PF00515.20; Description=Tetratricopeptide repeat
  Pfam annotation: Domain name=TPR_1; Domain location=497-530; Score =6.6; E_value=0.95; Accession=PF00515.20; Description=Tetratricopeptid e repeat
  Pfam annotation: Domain name=TPR_1; Domain location=531-564; Score =20.9; E_value=0.0051; Accession=PF00515.20; Description =Tetratricopeptide repeat
  Pfam annotation: Domain name=TPR_1; Domain location=601-636; Score =2.4; E_value=3; Accession=PF00515.20; Description=Tetratricopeptide repeat
  Pfam annotation: Domain name=TPR_1; Domain location=65-98; Score=4.9; E_value=1.5; Accession=PF00515.20; Description=Tetratricopeptide repeat
  Pfam annotation: Domain name=TPR_2; Domain location=250-283; Score =8.0; E_value=3.4; Accession=PF07719.9; Description=Tetratricopeptide repeat
  Pfam annotation: Domain name=TPR_2; Domain location=371-404; Score =7.2; E_value=4.4; Accession=PF07719.9; Description=Tetratricopeptide repeat
  Pfam annotation: Domain name=TPR_2; Domain location=406-439; Score =12.9; E_value=0.83; Accession=PF07719.9; Description=Tetratricopeptid e repeat
  Pfam annotation: Domain name=TPR_2; Domain location=442-475; Score =13.3; E_value=0.74; Accession=PF07719.9; Description=Tetratricopeptid e repeat
  Pfam annotation: Domain name=TPR_2; Domain location=497-530; Score =9.7; E_value=2.1; Accession=PF07719.9; Description=Tetratricopeptide repeat
  Pfam annotation: Domain name=TPR_2; Domain location=531-564; Score =13.9; E_value=0.64; Accession=PF07719.9; Description=Tetratricopeptid e repeat
  Pfam annotation: Domain name=TPR_2; Domain location=601-636; Score =5.2; E_value=7.7; Accession=PF07719.9; Description=Tetratricopeptide repeat
  Pfam annotation: Domain name=TPR_2; Domain location=65-98; Score =14.3; E_value=0.51; Accession=PF07719.9; Description=Tetratricopeptid e repeat
  Pfam annotation: Domain name=TPR_4; Domain location=1-24; Score=0.5; E_value=38; Accession=PF07721.6; Description=Tetratricopeptide repeat
  Pfam annotation: Domain name=TPR_4; Domain location=406-431; Score =10.4; E_value=2.5; Accession=PF07721.6; Description=Tetratricopeptide repeat
  Pfam annotation: Domain name=TPR_4; Domain location=442-467; Score =7.4; E_value=5.7; Accession=PF07721.6; Description=Tetratricopeptide repeat
  Pfam annotation: Domain name=TPR_4; Domain location=65-90; Score =10.1; E_value=2.7; Accession=PF07721.6; Description=Tetratricopeptide repeat
  Pfam module annotation: Pfam domain module=TPR_1::TPR_1::TPR_1::TPR _1::TPR_1::TPR_2::TPR_2::TPR_2::TPR_2::TPR_2::TPR_2::TPR_2::TPR _2::TPR_4::TPR_4::TPR_4::TPR_4; Domain location=442-475::497-530::531- 564::601-636::65-98:...
  Pfam module annotation: Domain location=:250-283::371-404::406 -439::442-475::497-530::531-564::601-636::65-98::1-24::406-431::442 -467::65-90
ARALLGRLEYQRGHVEAALRVFDGIDISALVPKMKISIARKADRRKTHSQWDSPPMPLHAVSLLMEAIYLKARALHDLGKYKEAAQECRMILDIVEAAIPEGLPAGFGKGCKLNEIICKAVELLPELWKSGGFSLEAISSYRRSLLNNWNLDGETVARIQKKFAVFLLYSGCEARPPNLHSQLDGSFVPRNNMEEAILLLMILLRKFNLKRIERDPSVMHHLTFALSMSGQLIPLAGQFEELLPDVLDKREWLYNVALCYLAEEDDLSALNLLKQILKSGDDSDCLKELLLASKACVEMSAYTEGASYARRAIANMQGGCEQMSGVADLLLGVTLSNQARSAISATDRASWQCEALEMLGNAEKKIHGKDSRVLYSLSLENAEQRKLESASFYAKELVKLEAGSELRSWVLLARILSAQKQFADAETVVDAALDQTGKWSQGDLLRTKARIQAAQGQFRDAVETYTQLLAIIQLRTKSVTAGICLAKGKKDDNGLEIEIWYDIALLYLGMAQWRDAEICVLKMRSISPYSALAWHATGKIYEAKGLTKETLGAFFRALDLDPKHVPSLISIATVLRQLGDRPLPSVRCFLTDALQLDRTNHVAWFNLGLLYKEEGGRSAVEAAECFQAAAFLEETAPVEPFR

SEQ ID NO: 107484 - protein, 62 aa, Setaria italica
  Transcript Sequence Number=SeqID_41510
GQSIKIYDRNYGRAIIFGEWHMISGQQTLINITGAALKYKSKILVNQELTFLYNYLMSKYNV

SEQ ID NO: 107485 - protein, 71 aa, Setaria italica
  misc_feature (36)..(36): Xaa can be any naturally occurring amino acid
  Transcript Sequence Number=SeqID_41511
ENSAKVKQERVHQSRARHLEVRGPQYLVWKRVSENXTTASMRKSQNCMPTRPTKWMVFISIPVTTCLFFSV

SEQ ID NO: 107486 - protein, 354 aa, Setaria italica
  Transcript Sequence Number=SeqID_41512
  Gene Ontology: Mol. function=oxidoreductase activity; Biological process=oxidation reduction
  Homolog annotation: Hit_ID=B6SZK3; Match level="QueryCoverage=95%, HitCoverage=95%, E-value=1e-157, Identity=79%"; Hit description =NAD(P)H-dependent oxidoreductase
  Pfam annotation: Domain name=Aldo_ket_red; Domain location=25-314; Score=348.0; E_value=1.8e-101; Accession=PF00248.13; Description =Aldoketo reductase family
  Subcellular localization annotation: CTP_CleavageSite=15; ConfidenceScore=5.29e-01
MAAAGDAGRRQGRTTAAIVVPAVPLSSGKPMPRVGFGTATPTLGQTEGDAAAVTDAVLRAIGAGFRHFDTAAVYNAEAALGDAVAKAVRAGTIASRDEVYVTSKLWIADAHPGRVLLALEKTLQNLRMEYVDLYLIHFPVSQRPSEVEGGPVLVKKDLVAMDMKGVWEEMEECHRLGLARAIGVSNFACKKLEHLLSFAKIPPAANQVEVNPCCRQNKLREFCRARGIQLCGYAALGGNGTPWANNSVMKCPVLKQIAQDRGKTVAQVCIRWVYEQGDCVITKSFSESRMRENLDIFDWELTEDDHRKISELPESRGNYDSLVHESGPFKTVEDLWDGEITAGQCNQTALVSSD

SEQ ID NO: 107487 - protein, 124 aa, Setaria italica
  Transcript Sequence Number=SeqID_41513
  Gene Ontology: Cellular component=membrane
  Homolog annotation: Hit_ID=B6TT89; Match level="QueryCoverage=45%, HitCoverage=24%, E-value=1e-15, Identity=73%"; Hit description=YGGT family protein
  Pfam annotation: Domain name=YGGT; Domain location=40-119; Score= -11.1; E_value=0.037; Accession=PF02325.9; Description=YGGT family
SRRAATSSLLLWEKEERWEWTAKSGFRSGCAAVLGDSVAGVVVANGINNFLSLYNTVLVVRLVLTWFPNTPPAIVAPLSTICDPYLSGNKHHCSCTYRIVHTTILIDVVQYLKFAPGSLENYMI

SEQ ID NO: 107488 - protein, 190 aa, Setaria italica
  Transcript Sequence Number=SeqID_41514
  Gene Ontology: Cellular component=membrane
  Homolog annotation: Hit_ID=B6TT89; Match level="QueryCoverage=100%, HitCoverage=78%, E-value=2e-64, Identity=69%"; Hit description=YGGT family protein
  Pfam annotation: Domain name=YGGT; Domain location=57-138; Score =76.6; E_value=9.3e-20; Accession=PF02325.9; Description=YGGT family
  Subcellular localization annotation: CTP_CleavageSite=78; ConfidenceScore=5.27e-01
ELASAAAAHPLLKPLFAVHSHLSSFSQSRRLLVAARRDALLSGEHCFAAVLGDSVAGVVVANGINNFLSLYNTVLVVRLVLTWFPNTPPAIVAPLSTICDPYLNIFRGIIPPLGGTLDLSPILAFLVLNAFTSTAAALPAELPDSAAAPEHHRHSSAATSSCSAPLDLTANQRKWMQRMQSRKSQGDGDH

SEQ ID NO: 107489 - protein, 161 aa, Setaria italica
  Transcript Sequence Number=SeqID_41515
  Pfam annotation: Domain name=DUF1218; Domain location=1-88; Score =11.4; E_value=0.0026; Accession=PF06749.4; Description=Protein of unknown function (DUF1218)
  Subcellular localization annotation: CTP_CleavageSite=32; ConfidenceScore=5.00e-01
SGCFGRNAPATGRRHATVVRLSIVAWVLVAVAAAMFLYGAALNRGGTRGLSTSRRGRYGRGYYYYGCVVLKSGIFSTASILSGAAAACAIAAYVYLQRMDDYPAVPGQFAAPGVAMGQPQWSQPYPPPAYPPPPAYPPPPMAYPAPPPYGGYGAKQPAGTA

SEQ ID NO: 107490 - protein, 73 aa, Setaria italica
  Transcript Sequence Number=SeqID_41516
LFLYLSFCLCMRTSHVIISPPVCHTYPGICYFCFAAIELRTASSVEFVSLCQYFRLCLRVRMICCISQFTCLW

SEQ ID NO: 107491 - protein, 209 aa, Setaria italica
  Transcript Sequence Number=SeqID_41517
  Gene Ontology: Mol. function=ATP binding
  Homolog annotation: Hit_ID=Q7XQJ0; Match level="QueryCoverage=49%, HitCoverage=13%, E-value=1e-12, Identity=46%"; Hit description =OSJNBa0005N02.1 protein
MPRAFEEISDEEWSHHSFKSSRVFKRAGQPTSKPPPPIDSFRYDRKASSAAGTSTATVVLSDDDDFDLDADGRSRAAKSQRGLKRPHHGPPSRAPPSTGSFGHNPEPSKAAAALGISDSEDDYFDLNDDDFGLPASPSRTSRLRRKGKTQRVLKGPQHRPQSRAPPSTGSFRHNPKPSKTAATTGLSDSDDDDFDLTDHDSDLPASPPG

SEQ ID NO: 107492 - protein, 96 aa, Setaria italica
  Transcript Sequence Number=SeqID_41518
  Homolog annotation: Hit_ID=B9S4A9; Match level="QueryCoverage=64%, HitCoverage=9%, E-value=1e-10, Identity=50%"; Hit description =Pentatricopeptide repeat-containing protein, putative
RTLHASGNVLRQHGMWDETANVWKIMKGSKSKKAPGFSQIEANMRNHVFYSRDQEHPQCAEIYEMLNDTVVPQMKGSSCVGFWEPTLQSDPTIYQA

SEQ ID NO: 107493 - protein, 77 aa, Setaria italica
  Transcript Sequence Number=SeqID_41519
  Subcellular localization annotation: CTP_CleavageSite=29; ConfidenceScore=5.38e-01
SSPPGPLTSHPSLPHSQEPPTFPSPSTCSLSVENSPPRSWLDGWPHATVTGLLSLLEKLAPRLLTNAAAYRCCWTVR

SEQ ID NO: 107494 - protein, 198 aa, Setaria italica
  Transcript Sequence Number=SeqID_41520
  Gene Ontology: Mol. function=DNA binding; Biological process =regulation of transcription
  Homolog annotation: Hit_ID=Q8RUX5; Match level="QueryCoverage=68%, HitCoverage=55%, E-value=5e-30, Identity=50%"; Hit description=One repeat myb transcriptional factor
  Pfam annotation: Domain name=Myb_DNA-binding; Domain location=38-85; Score=41.9; E_value=2.6e-09; Accession=PF00249.23; Description=Myb -like DNA-binding domain
MGNMEEVLCSSLMEEMGAMRKGEEALQKQPTLRKQHAARFWTEEEHRQFLYGLRAYGRGNWKIISRHYVPSKTPVQISSHAQKYFQRLQNPTKKQRYSINDVGLYEAEPRVQNNTSGQERLTFARGAYKPNHYGSGGQPTAMNNLPKVRLPLPHITSQASSSQAATLATGHQQQMEANGSFVAPSVEGDGSHMAWTSD

SEQ ID NO: 107495 - protein, 292 aa, Setaria italica
  misc_feature (20)..(20): Xaa can be any naturally occurring amino acid
  misc_feature (124)..(124): Xaa can be any naturally occurring amino acid
  Transcript Sequence Number=SeqID_41521
  Gene Ontology: Mol. function=transporter activity; Cellular component= integral to membrane; Biological process=oligopeptide transport
  Homolog annotation: Hit_ID=B6UEH6; Match level="QueryCoverage=100%, HitCoverage=49%, E-value=1e-136, Identity=83%"; Hit description =Peptide transporter PTR2
  Pfam annotation: Domain name=PTR2; Domain location=55-292; Score= -97.3; E_value=0.012; Accession=PF00854.13; Description=POT family
VATFGLTANMILYLTERYLXMSNAFATVVLYNWNAFSNFLPIFGAVLADACLGRFRVIALGSFVSLSGMCLLCLTAILPVYKKTPECAARVADCEVVPWQLPLLFTSFALMSVGSGGIRPCTLXFGADQLDRRDNSSSNVRTLQTFFNWYYTVLGLAIVFAATVIVYIQQTRGWVVGFAVPVVLMVTALTLFLLGPPFYLKAAADRSAIVGLVQVLVASYKNRHEPLPPETADASTFYNKAGSKPRTPTNKLRYLNRACVLRNPSKELSADGARATLELCTVQQVEDTKAVI

SEQ ID NO: 107496 - protein, 163 aa, Setaria italica
  misc_feature (80)..(80): Xaa can be any naturally occurring amino acid
  Transcript Sequence Number=SeqID_41522
  Gene Ontology: Mol. function=electron carrier activity; Biological process=oxidation reduction
  Homolog annotation: Hit_ID=Q52PG2; Match level="QueryCoverage=77%, HitCoverage=24%, E-value=8e-32, Identity=53%"; Hit description =Cytochrome P450 monooxygenase CYP71U4v2
  Subcellular localization annotation: CTP_CleavageSite=39; ConfidenceScore=5.30e-01
PSCRTSQSPSSLPRHRLHQPSFVNLSQGFTELTNNVISRAVFGGKCQQQQEYLQELSIVTMLVGGFSLVDLFPSSWLARXLSRATCNLRRSHDQVQHIISGIIQEPKEKQSASAFPGHQDEDLLDVLLRLQEEDSLTFPLTMEIIGAIIISPHLYAFSVCTCI

SEQ ID NO: 107497 - protein, 103 aa, Setaria italica
  Transcript Sequence Number=SeqID_41523
  Gene Ontology: Mol. function=RNA-directed DNA polymerase activity; Cellular component=chromatin
  Homolog annotation: Hit_ID=Q2QPU3; Match level="QueryCoverage=63%, HitCoverage=5%, E-value=9e-09, Identity=50%"; Hit description =Retrotransposon protein, putative, unclassified
  Pfam annotation: Domain name=Chromo; Domain location=1-37; Score =12.1; E_value=0.032; Accession=PF00385.16; Description='chromo' (CHRromatin Organisation MOdifier)
VSQILIKWSGMPRSLATWEDQTALFQRFPHAPAWGQAGLLQGGNVSAAIGPTTEVAQHTTETEPAVSDATTEAYSGVGLRRASRPRKVNPHVICLDWVKLLRE

SEQ ID NO: 107498 - protein, 68 aa, Setaria italica
  Transcript Sequence Number=SeqID_41524
IMKIQSSMFNNPAWITEKQNLLSQCHRASVEAKVVLEGLKVVHRKGFSIEDVNALPDPFDSDIDIMGY

SEQ ID NO: 107499 - protein, 219 aa, Setaria italica
  Transcript Sequence Number=SeqID_41525
  Gene Ontology: Mol. function=lyase activity
  Homolog annotation: Hit_ID=Q01L71; Match level="QueryCoverage=96%, HitCoverage=45%, E-value=3e-47, Identity=47%"; Hit description =H0321H01.9 protein
  Pfam annotation: Domain name=FBD; Domain location=101-157; Score =15.4; E_value=0.0024; Accession=PF08387.2; Description=FBD
HLGTEITIVGAPKLTALGYLVVGYRDFFHGIEMPTAQKKVAKGLRAPFNSVKVLAISVMLSSKKNLESVMNLLKCFPFLETLHIQGNKRAEGEFHTIDSNYYQKLDPVGCMVNHLKSVRLEINIENQRSKVENPNILEFVCFLLANAQVLQIMKIQSSMFNNPAWITEKQNLLSQCHRASVEAKVVLEGLKVVHRKGFSIEDVNALPDPFDSDIDIMGY

SEQ ID NO: 107500 - protein, 111 aa, Setaria italica
  Transcript Sequence Number=SeqID_41526
  Gene Ontology: Cellular component=intracellular; Biological process =signal transduction
  Homolog annotation: Hit_ID=Q10NV4; Match level="QueryCoverage=45%, HitCoverage=8%, E-value=2e-16, Identity=82%"; Hit description=PH domain containing protein, expressed
LMNLRRGQVSLPSTIDSKTKADLEEVATAESDIMNLKQKASDLRGQVSGQQLCCESCNKRLLNTDRTGGPESSSVEASSIVRSDSASGTGDVEQSRKQTTQGSPSSADKPG

SEQ ID NO: 107501 - protein, 139 aa, Setaria italica
  Transcript Sequence Number=SeqID_41527
  Gene Ontology: Mol. function=mannosyl-oligosaccharide glucosidase activity; Cellular component=endoplasmic reticulum membrane; Biological process=oligosaccharide metabolic process
  Homolog annotation: Hit_ID=Q8RZJ2; Match level="QueryCoverage=97%, HitCoverage=17%, E-value=4e-69, Identity=83%"; Hit description =Putative alpha-glucosidase 1
VNNKIDSKELSVGRAALSNLLGGVGYFYGQSKIALPKGFTQKNADKYIPYWPAALYTAVPSRSFFPRGFLWDEGFHQLVIWRWDVHISMDIIGHWLDLLNSDGWIPREQILGAEALSKVPEEFVLQYPSNGNPPTLFLA

SEQ ID NO: 107502 - protein, 424 aa, Setaria italica
  Transcript Sequence Number=SeqID_41528
  Gene Ontology: Mol. function=mannosyl-oligosaccharide glucosidase activity; Cellular component=endoplasmic reticulum membrane; Biological process=oligosaccharide metabolic process
  Homolog annotation: Hit_ID=Q8RZJ2; Match level="QueryCoverage=100%, HitCoverage=42%, E-value=0.0, Identity=79%"; Hit description =Putative alpha-glucosidase 1
  Pfam annotation: Domain name=Glyco_hydro_63; Domain location=1-419; Score=125.5; E_value=1.7e-34; Accession=PF03200.8; Description =Mannosyl oligosaccharide glucosidase
ISMDIIGHWLDLLNSDGWIPREQILGAEALRIFCYELWTLVKTSDKFSVTSYIIQVLQSCSKVPEEFVLQYPSNGNPPTLFLAIRDLASGIHAKQFSGDEAEKISSFLERAYIRLNSWFQWFNSTQSGKYEGTFYWHGRDNMTTRELNPKTLTSGLDDYPRASHPNDEERHVDLRCWMLLATNCIRSIAEFLKMDSALEKDYYKMSNQLSDFRTLNKLHLDDKIGAYFDYGNHTEKVRLRWYDVQDKDTMRRELLRETLQPPQLQLVPHVGYVSLFPFMMGAIPHESWVLDKQLDLISNTSILWTDYGLRSLSRTSSIYMKRNTEHDPPYWRGAIWINMNYMILSALHHYANEDGPYKGRAGELYDKLRSNLIRNIVQNYHETGFFWENYDQNNKGKGKGARSFTGWTSLLVLIMAESYPTLHR

SEQ ID NO: 107503 - protein, 373 aa, Setaria italica
  misc_feature (101)..(101): Xaa can be any naturally occurring amino acid
  Transcript Sequence Number=SeqID_41529
  Gene Ontology: Mol. function=peptide-N4-(N-acetyl-beta-glucosaminyl)as paragine amidase activity; Cellular component=vacuole
  Homolog annotation: Hit_ID=B9S455; Match level="QueryCoverage=90%, HitCoverage=56%, E-value=1e-71, Identity=43%"; Hit description =Peptide-N4-(N-acetyl-beta-glucosaminyl)asparagine amidase A, putative
IPSSTYRAVLEVFVSPHSNDEFWYSNPPDIYIRENNLTTGRGNAAYREVVVSVDRHFAGSFVPFPVIYTGGINPLFWQPVAALGAFDLPTYDVELTPFLGXLVDGKPHEIALSVVDGIAEWLVDANLHLWLDPASSSVSAALGSHSTPRLSITRRYITRLLDGSFEIGAKRKYRFSGWVKSSFGNFTTEVEAELKATSLVEFSDQGRNKTVRLQAEQDTEVTVRSSETRREVGKVETEAKFPLWLEMVTEDGENGTYVMRTNLTHSLRVETEAEAQGLFERETKLADEQAAVGWMLVRDHSVLNGSAATTQAYRYSDDAGRYERAIDTLDGAVLSDNVTESSRGLDVAASNACCRGRRCHGIVAAKCSDIAAM

SEQ ID NO: 107504 - protein, 67 aa, Setaria italica
  Transcript Sequence Number=SeqID_41530
GEETKREESNPGFLEVEETHRVARGTVLVKVHVTCMMGLLSLFGLTTSLGAKSLALAVPFIRDSNAS

SEQ ID NO: 107505 - protein, 167 aa, Setaria italica
  misc_feature (20)..(20): Xaa can be any naturally occurring amino acid
  Transcript Sequence Number=SeqID_41531
  Homolog annotation: Hit_ID=Q7XK21; Match level="QueryCoverage=86%, HitCoverage=18%, E-value=2e-30, Identity=55%"; Hit description =OSJNBa0044K18.24 protein
SPQTLEHCSYCGNYDYLSLXSFFDAAPSLETFDLNVLQLYMKNVSVFEDPADLRHMQGLQHHNLRSVKITGFSSAKSLIELTCHVLRSVMSLECLTLEAPQSGFRCSHPYNKSGKCSSLDRYLVMEGHRGVMAIRRYIEPMVPSTVKLHVLEPCSCHAVELQMSCLS

SEQ ID NO: 107506 - protein, 77 aa, Setaria italica
  Transcript Sequence Number=SeqID_41532
ASTSCSKVIYYRNFVLCVLRVLSKLRCNSLPVNKICAHHVCKKKYMLRTVVSLCYDCMIIINFPRQDVYIIAPECPC

SEQ ID NO: 107507 - protein, 98 aa, Setaria italica
  Transcript Sequence Number=SeqID_41533
LPGKRERWNKILERKTVEINKEADVLNKKLALVPGRHSRLPSAQTYHDHLLDASSLQTSLQRVVQALESFASSSLQAFEQTLRHAEEERLSRENAKVS

SEQ ID NO: 107508 - protein, 156 aa, Setaria italica
  Transcript Sequence Number=SeqID_41534
  Gene Ontology: Mol. function=small protein activating enzyme activity; Cellular component=cytoplasm; Biological process=ubiquitin- dependent protein catabolic process
  Homolog annotation: Hit_ID=B9FV11; Match level="QueryCoverage=100%, HitCoverage=12%, E-value=6e-79, Identity=90%"; Hit description =Ubiquitin-activating enzyme E1
  Pfam annotation: Domain name=ThiF; Domain location=1-122; Score=-5.2; E_value=8.5e-06; Accession=PF00899.13; Description=ThiF family
LGAEIAKNLALAGVRSVTIHDAKNVDMWDLSANFFLSEQDIGKNRAVACVSKLQELNNAVLVSALTEELTKEHLSKFQAVVFTDISLDKAYEFDDYCHSHQPPISFIKAEVCGLFGSAFCDFGPEFTVHDVDGEDPHTGIIASISNDSPAMVSCVD

SEQ ID NO: 107509 - protein, 91 aa, Setaria italica
  Transcript Sequence Number=SeqID_41535
  Gene Ontology: Mol. function=metal ion binding
  Homolog annotation: Hit_ID=B9SU90; Match level="QueryCoverage=96%, HitCoverage=11%, E-value=2e-27, Identity=61%"; Hit description=Zinc finger protein, putative
  Pfam annotation: Domain name=zf-C3HC4; Domain location=1-54; Score =21.0; E_value=0.0004; Accession=PF00097.17; Description=Zinc finger, C3HC4 type (RING finger)
CRAVIKEPLTTPCAHNFCKTCLLGAYDSQASMRERSRGGRTLRAQKIVKKCPSCPTDICDFLENPQINREMMDLIQSLQRKAVEEGDTKVA

SEQ ID NO: 107510 - protein, 51 aa, Setaria italica
  misc_feature (30)..(51): Xaa can be any naturally occurring amino acid
  Transcript Sequence Number=SeqID_41536
VISMSGPVDWTVVRDINISSYKLLFGVQKXXXXXXXXXXXXXXXXXXXXXX

SEQ ID NO: 107511 - protein, 132 aa, Setaria italica
  misc_feature (49)..(49): Xaa can be any naturally occurring amino acid
  misc_feature (77)..(77): Xaa can be any naturally occurring amino acid
  misc_feature (90)..(90): Xaa can be any naturally occurring amino acid
  Transcript Sequence Number=SeqID_41537
  Gene Ontology: Mol. function=RNA-directed DNA polymerase activity; Biological process=RNA-dependent DNA replication
  Homolog annotation: Hit_ID=Q9LGH0; Match level="QueryCoverage=96%, HitCoverage=41%, E-value=5e-20, Identity=38%"; Hit description=NAM -like protein-like
MDEDVGLSPEGNNSVDWGGGELMVSAPEEQHWPIGVATRSMSRNKRSTXNFSNREDEMLVLAWLNVSVDQVQGSERXTYWQRIYDYYHSXKDCESNRNQNSIMHRWSIIQDSVSKFERCLARIEGTSQNGVI

SEQ ID NO: 107512 - protein, 92 aa, Setaria italica
  Transcript Sequence Number=SeqID_41538
  Gene Ontology: Mol. function=transferase activity, transferring hexosyl groups; Biological process=carbohydrate metabolic process
  Homolog annotation: Hit_ID=Q8H5W0; Match level="QueryCoverage=34%, HitCoverage=5%, E-value=7e-12, Identity=96%"; Hit description =Putative UDP-glucose:sterol glucosyltransferase
MPICFISIFFLPDVFLMLASKTLAKILVSEIFVSHSWARTKQALGFNFKHVINVLSFIARPTCEFPHPFSRVKQSAGYRLSYQIVDSFVWLG

SEQ ID NO: 107513 - protein, 464 aa, Setaria italica
  misc_feature (66)..(66): Xaa can be any naturally occurring amino acid
  Transcript Sequence Number=SeqID_41539
  Gene Ontology: Mol. function=transferase activity, transferring hexosyl groups; Cellular component=plasma membrane; Biological process=carbohydrate metabolic process
  Homolog annotation: Hit_ID=Q8H5W0; Match level="QueryCoverage=100%, HitCoverage=74%, E-value=0.0, Identity=85%"; Hit description =Putative UDP-glucose:sterol glucosyltransferase
  Pfam annotation: Domain name=Glyco_transf_28; Domain location=8-160; Score=160.5; E_value=5.1e-45; Accession=PF03033.12; Description =Glycosyltransferase family 28 N-terminal domain
  Pfam annotation: Domain name=UDPGT; Domain location=7-435; Score= -151.7; E_value=0.0028; Accession=PF00201.10; Description=UDP -glucoronosyl and UDP-glucosyl transferase
  Pfam module annotation: Pfam domain module=Glyco_transf_28::UDPGT; Domain location=8-160::7-435
QHRPPMQIVMLIVGTRGDVQPFIAIGKRLQDYGHRVRLATHANFKDFVMTTGLEFYPLGGDPKVLXGGDPKVLAGYMVKNKGFLPATPSEIPIQRKQIRDIIFSLLPACKDPDIDTGVSFSADAIIANPAAYGHVHVAEALNIPIHIIFTMPWTPTCEFPHPFSRVKQSAGYRLSYQIVDSFVWLGIRDMINDLRKRKLKLRPVTYLSGTHAYSNDIDNAYIWSPYLVPKPKDWGPKIDVVGFCFLDLASNYEPPEPLLRWLESGDKPIYIGFGSLPIPEPDKLTKIIVEALEITGQRGIINKGWGGLGNLEESKEFVYVLDNVPHDWLFLQCKAVVHHGGAGTTAAGLKAACPTTIIPFFGDQFFWGSMVHARGLGAPPVPVEQLQLHSLVDAIKFMIDPKVKERAVELAKAIESEDGVDGAVKSFLKHLPRQRNSETVPTAPPSTFMHPFLLPVKRCFGIAS

SEQ ID NO: 107514 - protein, 161 aa, Setaria italica
  Transcript Sequence Number=SeqID_41540
WRLAPPAKAKDLKAVKFDVPEGEEPADDDSDSDDEFDDDNDFEDDGLDDKMMMMQPMAMPPAAGGGDKKGGNGGRDNKIPVQIKGNANIGDKIAELIRAKQNQGGAGGSGLHGGGAQAPQNGKGSAPGGRNQLPVQAKKGVAAGGPPAGVVGGPMMGGISN

SEQ ID NO: 107515 - protein, 149 aa, Setaria italica
  Transcript Sequence Number=SeqID_41541
  Gene Ontology: Mol. function=transporter activity; Cellular component= membrane; Biological process=transport
  Homolog annotation: Hit_ID=B9H7I0; Match level="QueryCoverage=99%, HitCoverage=28%, E-value=1e-58, Identity=75%"; Hit description=Nramp transporter
  Pfam annotation: Domain name=Nramp; Domain location=1-149; Score= -41.4; E_value=1.6e-12; Accession=PF01566.10; Description=Natural resistance-associated macrophage protein
FYIPVWIGVLITGSSTLLLLGLQRYGVRKLEFLISMLVFVMAACFFGEMSFVKPPAVEVIKGLFIPRLKGPGATGDAIALLGALIMPHNLFLHSALVLSRKTPSSVRGIKDACRFFLYESGFALFVALLINIAVISVSGTVCFADNLSP

SEQ ID NO: 107516 - protein, 406 aa, Setaria italica
  misc_feature (227)..(227): Xaa can be any naturally occurring amino acid
  Transcript Sequence Number=SeqID_41542
  Gene Ontology: Mol. function=aspartic-type endopeptidase activity; Cellular component=plasma membrane; Biological process=proteolysis
  Homolog annotation: Hit_ID=Q01KZ0; Match level="QueryCoverage=99%, HitCoverage=81%, E-value=0.0, Identity=77%"; Hit description =OSIGBa0137O04.7 protein
  Pfam annotation: Domain name=Asp; Domain location=1-356; Score=-72.8; E_value=3e-09; Accession=PF00026.15; Description=Eukaryotic aspartyl protease
YFTEIKLGTPPKRYFVQVDTGSDILWVNCISCDRCPRKSGLGLDLTLYDPKVSSSGSTVSCDQGFCAATYGGKLPGCTANVPCEYSVMYGDGSSTTGFFVTDALQFDQVTGNGQTQPGNASVTFGCGAQQGGDLGSSNQALDGILGFGQANTSMLSQLSAAGKVKKIFAHCLDTIKGGGIFAIGNVVQPKVKTTPLVADMPHYNVNLKSIDVGGTTLQLPAHVFETXREKGTIIDSGTTLTYLPELVFKEVVFEVFKKHQDIKFQNVQDFMCFQYSGSVDDGFPTITFHFEDDLALHVYPHEYFFPNGNDLYCVGFQNGALQSKDGKDIVLMGDLVLSNKLVVYDLENQVIGWTDYNCSSSIKVKDDKTGATYTVNSHDISSGWRFYWHRSLVLLLVTVVCSHLIC

SEQ ID NO: 107517 - protein, 59 aa, Setaria italica
  Transcript Sequence Number=SeqID_41543
LIKLLRNYSHCRVGGGGRASQRSSSSLPTHGGEPVINARACRPAPARAKKKKGKPPRAS

SEQ ID NO: 107518 - protein, 125 aa, Setaria italica
  Transcript Sequence Number=SeqID_41544
NDCRRCPEAAQPTTCSLERLTSASISAMAVKGVQVMVGFKELILILDKTTSEKTVMNPEKIERSSSVSNFLPIHGESSQLAKAGGAESKSWEASGPLRKSFMAGWFLLNSSSVPFWMQFQMMQII

SEQ ID NO: 107519 - protein, 154 aa, Setaria italica
  misc_feature (128)..(128): Xaa can be any naturally occurring amino acid
  Transcript Sequence Number=SeqID_41545
  Gene Ontology: Mol. function=transferase activity, transferring glycosyl groups; Cellular component=integral to membrane; Biological process=cell wall organization and biogenesis
  Homolog annotation: Hit_ID=Q9LHZ7; Match level="QueryCoverage=99%, HitCoverage=13%, E-value=1e-82, Identity=91%"; Hit description =Cellulose synthase-like protein D2
VEGMCFMMDRGGDRIGYVQFPQRFEGIDPSDRYANHNTVFFDVNMRALDGLMGPVYVGTGCLFRRVALYGFDPPRDKEHGGCCSCCFPQRRKVKTSAAAPEETRALRMADFDEDEMNMSSFPKKFGNXNFLINSIPIAEFQGRPLADHPGVKNG

SEQ ID NO: 107520 - protein, 97 aa, Setaria italica
  Transcript Sequence Number=SeqID_41546
  Gene Ontology: Mol. function=transferase activity, transferring glycosyl groups; Cellular component=integral to membrane; Biological process=cell wall organization and biogenesis
  Homolog annotation: Hit_ID=Q8W3F9; Match level="QueryCoverage=96%, HitCoverage=8%, E-value=3e-51, Identity=92%"; Hit description =Cellulose synthase-like protein D1
ALVRSSAVMSNGPFILNLDCDHYVYNSQAFREGMCFMMDRGGDRIGYVQFPQRFEGIDPSDRYANHNTVFFDVNMRALDGLMGPVYVGTGCFFRCSS

SEQ ID NO: 107521 - protein, 872 aa, Setaria italica
  Transcript Sequence Number=SeqID_41547
  Gene Ontology: Mol. function=transferase activity, transferring glycosyl groups; Cellular component=integral to membrane; Biological process=cell wall organization and biogenesis
  Homolog annotation: Hit_ID=Q9LHZ7; Match level="QueryCoverage=100%, HitCoverage=79%, E-value=0.0, Identity=86%"; Hit description =Cellulose synthase-like protein D2
  Pfam annotation: Domain name=Cellulose_synt; Domain location=54-872; Score=1906.6; E_value=0; Accession=PF03552.6; Description=Cellulose synthase
WDHNRWLFETKGTYGYGNAIWPKENEVESGGGGGGGLGGADGQPAEFTTKPWRPLTRKLSIPAGILSPYRLLILIRMAVLGLFLTWRIRHKNEDAIWLWGMSVVCELWFGFSWLLDQLPKLCPVNRATDLAVLKDKFETPTPSNPTGRSDLPGLDIFVSTADPEKEPPLVTANTILSILAADYPVEKLSCYVSDDGGALLTFEAMAEAASFANMWVPFCRKHNIEPRNPESYFNLKRDPYKNKVRQDFVKDRRRVKREYDEFKVRINGLPESIRRRSDAYHAREEIKAMKRQRETALDDAVEPVKIPKATWMADGTHWPGTWIQPSAEHTRGDHAGIIQVMLKPPSDDPLYGSTGEEGRPLDFTEVDIRLPMLVYVSREKRPGYDHNKKAGAMNALVRSSAVMSNGPFILNLDCDHYVYNSQAFREGMCFMMDRGGDRIGYVQFPQRDKEHGGCCSCCFPQRRKVKTSAAAPEETRALRMADFDEDEMNMSSFPKKFGNSNFLINSIPIAEFQGRPLADHPGVKNGRPPGALTVPRDLLDASTVAEAISVISCWYEDKTEWGHRVGWIYGSVTEDVVTGYRMHNRGWKSVYCVTKRDAFRGTAPINLTDRLHQVLRWATGSVEIFFSRNNALLASRKMKFLQRIAYLNVGIYPFTSIFLIVYCFLPALSLFSGQFIVKTLNVAFLTYLLVITLTLCLLAVLEIKWSGISLEEWWRNEQFWLIGGTSAHLAAVLQGLLKVIAGIEISFTLTSKSGGDDENDEFADLYIVKWTSLMIPPIVIMMVNLIAIAVGFSRTIYSEIPQWSKLLGGVFFSFWVLAHLYPFAKGLMGRRGRTPTIVFVWAGLLSITISLLWVAINPPSQNSQIGGSFTFP

SEQ ID NO: 107522 - protein, 438 aa, Setaria italica
  Transcript Sequence Number=SeqID_41548
  Gene Ontology: Cellular component=plasma membrane
  Homolog annotation: Hit_ID=Q75HX5; Match level="QueryCoverage=100%, HitCoverage=96%, E-value=0.0, Identity=83%"; Hit description=Tubby -like F-box protein 8
  Pfam annotation: Domain name=F-box; Domain location=43-98; Score =33.4; E_value=9.4e-07; Accession=PF00646.25; Description=F-box domain
  Pfam annotation: Domain name=Tub; Domain location=109-432; Score =626.3; E_value=3.1e-185; Accession=PF01167.10; Description=Tub family
  Pfam module annotation: Pfam domain module=F-box::Tub; Domain location=43-98::109-432
GSLSRRSFEVTIAGLSGLTGHHRGKSQSTVHELRDTDLIIQESRWANLPPELLRDVIRRLEASESTWPNRKNVVSCAAVCRTWREMCREIVLSPEFCGKLTFPVSLKQPGHRDGMIQCFIKRDKSKSTYHLYLCLSTAVLTENGKFLLSAKRNRKTTCTEYVISMDADNISRSSSTYIGKLRSNFLGTKFMIYDTQPPYNGAVVPHAGRTSRRFNSKKVSPKVPTGSYNIAQVTYELNVLGTRGPRRMHCVMHSIPASAVEPGGIVPGQPEQILPRALEESFRSTTSFSKSSIMDRSMDFSSSRDFGSVRDFSSARFSDIARGAMVGDEEEQNKERPLVLRNKAPRWHEQLQCWCLNFRGRVTIASVKNFQLIATSSQPPATGAPTVSQPAPSDQDKVILQFGKVAKDMFTVDYRYPLSAFQAFAICLSSFDTKLACE

SEQ ID NO: 107523 - protein, 130 aa, Setaria italica
  Transcript Sequence Number=SeqID_41549
  Gene Ontology: Mol. function=nucleic acid binding; Cellular component= spliceosome; Biological process=mRNA processing
  Homolog annotation: Hit_ID=B6TN55; Match level="QueryCoverage=80%, HitCoverage=42%, E-value=5e-28, Identity=60%"; Hit description=RNA binding protein
  Pfam annotation: Domain name=zf-CCHC; Domain location=33-50; Score =28.3; E_value=1.1e-05; Accession=PF00098.15; Description=Zinc knuckle
ARCSNGRTLSASIASDNGRAAEYSRRRVYRDKSRCYECGEEGHLSYECPRNQLGPRERPAPSKKSRRGGGGGRGGGGVAWHSDDDEEAAATAFEDDRWASVVDTRGEEEKAAEKEDGEGEGGEEGEEGKG

SEQ ID NO: 107524 - protein, 665 aa, Setaria italica
  misc_feature (352)..(352): Xaa can be any naturally occurring amino acid
  Transcript Sequence Number=SeqID_41550
  Gene Ontology: Mol. function=GTP binding; Cellular component =intracellular; Biological process=protein transport
  Homolog annotation: Hit_ID=B6SWQ4; Match level="QueryCoverage=100%, HitCoverage=85%, E-value=0.0, Identity=83%"; Hit description =Chloroplast outer envelope protein 86
  Pfam annotation: Domain name=AIG1; Domain location=49-242; Score=7.9; E_value=3.6e-11; Accession=PF04548.8; Description=AIG1 family
  Pfam annotation: Domain name=MMR_HSR1; Domain location=49-161; Score =24.9; E_value=5e-06; Accession=PF01926.15; Description=GTPase of unknown function
  Pfam module annotation: Pfam domain module=AIG1::MMR_HSR1; Domain location=49-242::49-161
AQVLYRLQLANLIKAGESDARRTNLAINKARVIAAQQEAPGGPDLDLSLRILLLGKTGVGKSATINSIFDERKVATDALVPATHRIKKIEGTIKGIRVTVIDTPGLIPHYHGQRRNRKILNSVKRFIKRSPPDIVLYFERLDHINSRYSDYPLLKLMTDILGSSMWFNTVLVMTHCSSSPPEGPDGYPLEYDAYTRYCKNVVQRHIQAAVSNTQLDNPVVLVDNHPMCRRNTKGERVLPNGQVWVSELLLLCGATKLLAEANSLLKFQDSFLLSPANNRLPSLPHLLSTLLKPNSSSSSDRIDGELTETSDEEDEYDQLPPFRILKKSEYEKLTNEQKSAYLDELDYRETLXKEQWKEGIRRQRLTEAQNDEVADDYEESASPEVVHMSDMEIPLTFDSDYPVHRYRHIITDDQLFRPVLDPQGWDHDIGFDAINFEASQELKKNVSATIAGQMRKDKEDMYIHSECSVSYSDQKGCSLMGGMDMQTASRDLVCTVHGDAKFRNLRWNTTGGGISVTKFGNKYFAGAKLEDSVTIGKRVQLIANAGRMAGCGQVAHGGGVEITARGKDYPVREESITVSVTALSFDKETVIGANLHSDFRLGRGSKMSVGAKLNSSNLGKLSIRTSTSDHAEIALIAVVSLIQFFRRRSGAADKGEQQFDTYLDD

SEQ ID NO: 107525 - protein, 214 aa, Setaria italica
  Transcript Sequence Number=SeqID_41551
  Gene Ontology: Cellular component=chloroplast
  Homolog annotation: Hit_ID=A5H8H8; Match level="QueryCoverage=86%, HitCoverage=69%, E-value=4e-37, Identity=42%"; Hit description=CCB1
VRASLARASLDRAAVLLDAAAVVAGGGTGYSQASYYTSLGLFVLSVPGLWSLIKRSVKSKIVQKTFVKEGAQSMAPNQVAGEILSFFTRNNFTVSDRGEVITFEGTMVPSRGQAALLTFCTCISLGSVGLVLSIAVPEGGNNWFWLMTLSPLAGVYYWTKASRKEEIKVKMILSDDGNVSEILVQGDDVQVEQMRKELKFSEKGMIYVKGIFET

SEQ ID NO: 107526 - protein, 172 aa, Setaria italica
  Transcript Sequence Number=SeqID_41552
SLWDVSLPLFWFAERFPSLLPFDFGRLKEDMVNLDRLFFHLLAAITGGLVEWIHGLLDLVLLMSELCAGASWLRWTSSIVEESGDDAGSRGPTTDALLPRISCSYPTFGVRPSIWIGKIGGSMLECAIRRTVGRSLQLVLRKKINSRDLVVISGLLRVFSVRMGCTVLTFIL

SEQ ID NO: 107527 - protein, 142 aa, Setaria italica
  Transcript Sequence Number=SeqID_41553
  Gene Ontology: Mol. function=sequence-specific DNA binding; Cellular component=nucleus; Biological process=regulation of transcription, DNA-dependent
  Homolog annotation: Hit_ID=Q2RAA7; Match level="QueryCoverage=76%, HitCoverage=16%, E-value=5e-22, Identity=61%"; Hit description =Associated with HOX family protein, expressed
  Pfam annotation: Domain name=POX; Domain location=50-142; Score=33.6; E_value=5.9e-10; Accession=PF07526.3; Description=Associated with HOX
PQAQTPGAAGVSAVLSLSSREAPPVTVAAVGGADEGKYHLVGASATSQGQMVMSSKYLKAAQELLDEVVSVSKGVEEAKAATKSLSAVKKKEDSEGVSGGGTEDGGGAKSGSAAPELSTAERQELQMKKSKLINMLDEVEQR

SEQ ID NO: 107528 - protein, 50 aa, Setaria italica
  Transcript Sequence Number=SeqID_41554
RAYSLSEIHLSFFNGKTKLFLLKVLAYCSFKHSHKEHSEACPAIYWKELR

SEQ ID NO: 107529 - protein, 74 aa, Setaria italica
  misc_feature (52)..(52): Xaa can be any naturally occurring amino acid
  Transcript Sequence Number=SeqID_41555
CIRPWYLFPLAASLLLLQDHASADCEPATCGNLTLRYPFWLGSGNQTSSPCXPPFQIWCSDDHRRSVASLKAPP

SEQ ID NO: 107530 - protein, 73 aa, Setaria italica
  Transcript Sequence Number=SeqID_41556
  Gene Ontology: Mol. function=hydrolase activity, acting on carbon -nitrogen (but not peptide) bonds, in linear amidines; Biological process=arginine metabolic process
  Homolog annotation: Hit_ID=Q1X8N7; Match level="QueryCoverage=100%, HitCoverage=37%, E-value=6e-31, Identity=87%"; Hit description =Arginase (Fragment)
YFLSPQKLGEGVKGVYVSVDVDCLDPAFAPGVSHIEPGGLSFRDVLNILQNLQGDVVAADVVEFNPQRDTVDG

SEQ ID NO: 107531 - protein, 44 aa, Setaria italica
  Transcript Sequence Number=SeqID_41557
  Gene Ontology: Mol. function=hydrolase activity, acting on carbon -nitrogen (but not peptide) bonds, in linear amidines; Biological process=arginine metabolic process
  Homolog annotation: Hit_ID=P46637; Match level="QueryCoverage=100%, HitCoverage=12%, E-value=4e-12, Identity=79%"; Hit description =Arginase
RVLVQAELLRALGGVKASASLLGVPLGHNSSFLQGPAFAPPRIR

SEQ ID NO: 107532 - protein, 340 aa, Setaria italica
  Transcript Sequence Number=SeqID_41558
  Gene Ontology: Mol. function=hydrolase activity, acting on carbon -nitrogen (but not peptide) bonds, in linear amidines; Cellular component=mitochondrion; Biological process=arginine metabolic process
  Homolog annotation: Hit_ID=P46637; Match level="QueryCoverage=98%, HitCoverage=97%, E-value=1e-165, Identity=84%"; Hit description =Arginase
  Pfam annotation: Domain name=Arginase; Domain location=61-336; Score =283.1; E_value=6.4e-82; Accession=PF00491.13; Description=Arginase family
MGGAAAGTKWIHHIQRLSAAKVSAEAVERGQSRVIDASLTLIRERAKLKAELLRALGGVKASASLLGVPLGHNSSFLQGPAFAPPRIREAIWCGSTNSSTEEGKELNDPRVLTDVGDVPIQEIRDCGVEDDRLMHVISESVKTVMEEEPLRPLVLGGDHSISYPVVRAVSEKLGGPVDILHLDAHPDIYDCFEGNNYSHASSFARIMEGGYARRLLQVGLRSITKEGRDQGKRFGVEQYEMRTFSKDREKLENLKLGEGVKGVYVSVDVDCLDPAFAPGVSHIEPGGLSFRDVLNILQNLQGDVVAADVVEFNPQRDTVDGMTAMVAAKLVRELTAKISK

SEQ ID NO: 107533 - protein, 214 aa, Setaria italica
  Transcript Sequence Number=SeqID_41559
  Gene Ontology: Mol. function=binding; Cellular component=chloroplast
  Homolog annotation: Hit_ID=B9SJA6; Match level="QueryCoverage=64%, HitCoverage=69%, E-value=4e-37, Identity=53%"; Hit description =Pentatricopeptide repeat-containing protein, putative
  Pfam annotation: Domain name=PPR; Domain location=118-152; Score =16.5; E_value=0.1; Accession=PF01535.12; Description=PPR repeat
  Pfam annotation: Domain name=PPR; Domain location=13-47; Score=25.5; E_value=0.00021; Accession=PF01535.12; Description=PPR repeat
  Pfam annotation: Domain name=PPR; Domain location=154-188; Score =22.1; E_value=0.0022; Accession=PF01535.12; Description=PPR repeat
  Pfam annotation: Domain name=PPR; Domain location=48-82; Score=24.4; E_value=0.00045; Accession=PF01535.12; Description=PPR repeat
  Pfam annotation: Domain name=PPR; Domain location=83-117; Score=26.0; E_value=0.00015; Accession=PF01535.12; Description=PPR repeat
  Pfam module annotation: Pfam domain module=PPR::PPR::PPR::PPR::PPR; Domain location=118-152::13-47::154-188::48-82::83-117
RRLEENSLSGTLLTYDLLVSIFVQCGQCELAIAAYQEMLQNGLDPSEDIMKAIIASCTKEGKWDFALATFSRMLSAGMTPNIILFNSTINALGKAGQDELAFRMYHLLTSSGFKPDQYTWSALLSALYKSGRCWDVLELFQGIKAKHPTLLNDHLYNIALMSCERLGQWEHGLQLLWMMEKSGLKVSVVSYNHVIGACEVASKPKVALQVYRLL

SEQ ID NO: 107534 - protein, 297 aa, Setaria italica
  Transcript Sequence Number=SeqID_41560
  Gene Ontology: Mol. function=3-deoxy-manno-octulosonate cytidylyltransferase activity; Cellular component=cytoplasm; Biological process=lipopolysaccharide biosynthetic process
  Homolog annotation: Hit_ID=Q9M4G3; Match level="QueryCoverage=100%, HitCoverage=100%, E-value=1e-137, Identity=81%"; Hit description=CMP- KDO synthetase
  Pfam annotation: Domain name=CTP_transf_3; Domain location=53-268; Score=224.7; E_value=2.3e-64; Accession=PF02348.11; Description =Cytidylyltransferase
  Subcellular localization annotation: CTP_CleavageSite=36; ConfidenceScore=5.05e-01
MPICAPSSDSSASSASGGRAWIVHGLALGAAAAAAAAAAYLYRRPSGFRSRAVGIIPARFASSRFEGKPLAHILGKPMIQRTWERVMLASSLDHVVVATDDERIADCCRGFGADVIMTSESCRNGSERCCEALQKLGKRYDIVVNIQGDEPLIEPEIIDGVVMALQRAPDAVFSTAVTSLKPEDASDTNRVKCVVDNQGYAIYFSRGLIPSNKSGKVNPNYPYLLHLGISGFDSKFLMIYPELSPTPLQLEEDLEQLKVLENGYRMKVIKVDHDAHGVDAPEDVEKIEELMRARNIQ

SEQ ID NO: 107535 - protein, 207 aa, Setaria italica
  misc_feature (180)..(180): Xaa can be any naturally occurring amino acid
  misc_feature (189)..(189): Xaa can be any naturally occurring amino acid
  Transcript Sequence Number=SeqID_41561
  Gene Ontology: Mol. function=protein binding; Cellular component =integral to membrane
  Homolog annotation: Hit_ID=Q1HTV4; Match level="QueryCoverage=97%, HitCoverage=83%, E-value=1e-72, Identity=60%"; Hit description=Green ripe-like 1
  Pfam annotation: Domain name=DUF778; Domain location=51-186; Score =282.3; E_value=1.1e-81; Accession=PF05608.4; Description=Protein of unknown function (DUF778)
MSPKVLSSMELEADFDNEGVCSNNGLQELWPLGEIDPKRARFPCCIVWTPLPVVSWLAPYIGHVGICQEDGAVLDFAGSNLVSMDNFAYGSVARYLQLDRKKCCFPANLAAHVCERSYNHSEVGAAISWDDALQSGMRRFQHKYYNLFTCNCHSFVANCLNHLAYNGSVEWNVLNVATLXWFHGQWVDXMSVVRSFLPFLTVTCIGI

SEQ ID NO: 107536 - protein, 78 aa, Setaria italica
  Transcript Sequence Number=SeqID_41562
  Homolog annotation: Hit_ID=Q9FFF3; Match level="QueryCoverage=98%, HitCoverage=7%, E-value=1e-12, Identity=40%"; Hit description=Low density lipoprotein B-like protein
KTVLEKTPPEQLFGGLPDPDEESQFWKEHMNQLEATMVLLEPDVIACACTDWLKECCAEIFGVIAAGQKLVDAIGSGE

SEQ ID NO: 107537 - protein, 110 aa, Setaria italica
  Transcript Sequence Number=SeqID_41563
  Homolog annotation: Hit_ID=Q9FFF3; Match level="QueryCoverage=69%, HitCoverage=7%, E-value=1e-13, Identity=47%"; Hit description=Low density lipoprotein B-like protein
GMQFSDSPRRQTIAAAISLFGAEDRSNPRLDELNKTLQSLCIMAHSVWIAWVSTELSHILSYDLNKDDSLSSSRHLMVGGHSHLQGTLSCFLLFDDCDLNPSRELKRSSI

SEQ ID NO: 107538 - protein, 753 aa, Setaria italica
  misc_feature (19)..(19): Xaa can be any naturally occurring amino acid
  Transcript Sequence Number=SeqID_41564
  Gene Ontology: Mol. function=catalytic activity; Cellular component =Golgi transport complex; Biological process=metabolic process
  Homolog annotation: Hit_ID=Q9FFF3; Match level="QueryCoverage=98%, HitCoverage=67%, E-value=0.0, Identity=47%"; Hit description=Low density lipoprotein B-like protein
PQAGSCACTDWLKECGAVXVVVIAAGQKLVDAIGSGELLGSVQRLVRDALDGRDGLEGSLEQWLKSVFGSEIESPWDQIRGLILKGGKDIFEDWMEEAFVRRMKDILHSDLDSLCASVNVKESIDAIGANADPKDAGDFLSYLRKSSNGGGFWFSESKIKKGGVLAHLKPIADENDFHSCLTSYFGPEVSRIRNAIDSKCKSILDDLLCFVESHNSAPRLKELVPYLQEKCYRTISGVLKELETELRKLSALLGTKKEDNDIPAASIIAERALFIGRLLFALRYHSSHVPLILGSPREWVKEAGGAAFARLSSPTPRHSRASFDSSSFTPRRRTFDSPRSPGMQFSDSPRRQTIAAAISLFGAEDRSNPRLDELNKTLQSLCIMAHSVWIAWVSTELSHILSYDLNKDDSLSSSTPLRGWEVTVIKQEETTEGPLEMKIALPSMPSFYIISFLYQACLEIHKVGGHILDRIILHNFAWELLQKVINIYENFLVSIESGNSQVSEKGVLQILLDLRFVGDVLSGGKNSSTITTETQTKQDSLPSTISKSSFRRKQSQSQADSAAIEPINKLINKLSQRLDPIDWATYEPYLWENEKQSYKRYVVLFGFLVQLNHMYTGTVQKLPTKSNTDSNIMRCSQVPRFKYLPISAPAISSRPHKTSLQSPSGDNASKGPWKSYSNGDRSTAPEFDDNASLVGAAPLFKSFVTQVGSKFGENTSRWGSMLSDGQVGKLSDILPGPAAGFFSSFTSGVRYDS

SEQ ID NO: 107539 - protein, 242 aa, Setaria italica
  Transcript Sequence Number=SeqID_41565
  Gene Ontology: Mol. function=isoleucine-tRNA ligase activity; Cellular component=cytoplasm; Biological process=tRNA aminoacylation for protein translation
  Homolog annotation: Hit_ID=Q9SV89; Match level="QueryCoverage=100%, HitCoverage=19%, E-value=5e-91, Identity=65%"; Hit description =Isoleucine-tRNA ligase-like protein
  Pfam annotation: Domain name=tRNA-synt_1; Domain location=1-239; Score=-239.6; E_value=5.2e-09; Accession=PF00133.14; Description =tRNA synthetases class I (I, L, M and V)
VEFEIDKALGITNRQQVFDLGIGKYNETCRSIVTKYVSEWEAVVTRTGRWIDFKNDYKTMDLSFMESVWWVFAQLWEKDLVYRGFKVMPYSTGCKTALSNFEAALDYRTVPDPAVMVSFPIVGDADNAALVAWTTTPWTLPSNLALCVNANLTYVKVKDKSNGAVYVIAESRLGQLPVKAKASGKKQAPSKGSNAEAVQDGLDKESYELLAKIPGSSLVGLKYTPLFDFFLELRETAFRVIA

SEQ ID NO: 107540 - protein, 66 aa, Setaria italica
  Transcript Sequence Number=SeqID_41566
TSNTTLLSYLIVQSFSILIILMPQTVHIVYFYIYSRKFTGIYDTHCMFLLSLNNVMMSDFLYIVAE

SEQ ID NO: 107541 - protein, 77 aa, Setaria italica
  Transcript Sequence Number=SeqID_41567
  Gene Ontology: Mol. function=binding; Biological process=DNA integration
  Homolog annotation: Hit_ID=A9ZN27; Match level="QueryCoverage=93%, HitCoverage=37%, E-value=2e-17, Identity=54%"; Hit description =Putative ankyrin repeat protein
MWQQQYTDTVNVFYLQAMRVDRYDAGLFSNRSLCWLRIGDGRRALRDATWCNILRPKWVKAYFQKAQALMLLKVRLK

SEQ ID NO: 107542 - protein, 68 aa, Setaria italica
  Transcript Sequence Number=SeqID_41568
NNESFESGNSPLGGPSEAHLYCYLGSHGAQFLWVCRFDDGLNLYWMAQLLTFAAFLNVIRLRFSNPNP

SEQ ID NO: 107543 - protein, 49 aa, Setaria italica
  misc_feature (1)..(23): Xaa can be any naturally occurring amino acid
  Transcript Sequence Number=SeqID_41569
XXXXXXXXXXXXXXXXXXXXXXXTRIRSCLFGIINPPKLYKLDYGSWVL

SEQ ID NO: 107544 - protein, 125 aa, Setaria italica
  Transcript Sequence Number=SeqID_41570
  Gene Ontology: Mol. function=protein phosphatase type 2A regulator activity; Cellular component=protein phosphatase type 2A complex; Biological process=signal transduction
  Homolog annotation: Hit_ID=Q9FUY2; Match level="QueryCoverage=88%, HitCoverage=12%, E-value=6e-35, Identity=55%"; Hit description =Transcriptional corepressor LEUNIG
  Pfam annotation: Domain name=WD40; Domain location=25-60; Score=2.7; E_value=19; Accession=PF00400.24; Description=WD domain, G-beta repeat
  Pfam annotation: Domain name=WD40; Domain location=64-101; Score =31.1; E_value=4.5e-06; Accession=PF00400.24; Description=WD domain, G-beta repeat
  Pfam module annotation: Pfam domain module=WD40::WD40; Domain location=25-60::64-101
FLYFCFTICSCDGDNEIRFWNIKHGNNVRIFKGGSTQLRFQPRYVGYLATASDNMVSILDVETQACVRRFESHTNHVDSLCWDPTGGYIVSVSEDMVKMWSLNEESCVNELNCSGTRLPRHTGDR

SEQ ID NO: 107545 - protein, 79 aa, Setaria italica
  Transcript Sequence Number=SeqID_41571
LLVLLHLSVYLLECTGYRVPHICLVKSIFICHWEFTAHSIYLYIFKKHDVFFSSSVRSYRVQTIASHPVFFVVLTLLAS

SEQ ID NO: 107546 - protein, 116 aa, Setaria italica
  Transcript Sequence Number=SeqID_41572
  Subcellular localization annotation: CTP_CleavageSite=6; ConfidenceScore=5.30e-01
QLFFTVSATGNCNRKTVASLQIILSTATGHPNQSLVERMFCSMRLLPCKALMYSESPLLGEMIGDIDSSIIFSLYLKILALHMPFSALRFWCILSNFEMSDVFNFGAHSAFCMLFN

SEQ ID NO: 107547 - protein, 73 aa, Setaria italica
  Transcript Sequence Number=SeqID_41573
  Gene Ontology: Mol. function=glutathione transferase activity
  Homolog annotation: Hit_ID=Q9ZP61; Match level="QueryCoverage=97%, HitCoverage=31%, E-value=7e-23, Identity=71%"; Hit description=GST6 protein
ENFGFVDIALVPFTCRFLAYEKLGSFSIEEHCPKIVAWAKLCKERESVAKVLPDPDKVFEFIQFIRISKFGAK

SEQ ID NO: 107548 - protein, 81 aa, Setaria italica
  Transcript Sequence Number=SeqID_41574
TLSHYQNWSALRELVHTCSDTLIILVTVPILQASKTTARGQRKILIACCSALSTSIQTTKTLQARSKSSNSLICGAGRKKK

SEQ ID NO: 107549 - protein, 724 aa, Setaria italica
  Transcript Sequence Number=SeqID_41575
  Gene Ontology: Mol. function=zinc ion binding; Cellular component =nucleus
  Homolog annotation: Hit_ID=Q2QZM0; Match level="QueryCoverage=83%, HitCoverage=70%, E-value=1e-102, Identity=35%"; Hit description =Transposon protein, putative, unclassified
  Pfam annotation: Domain name=AT_hook; Domain location=594-606; Score =14.0; E_value=0.1; Accession=PF02178.11; Description=AT hook motif
  Pfam annotation: Domain name=FAR1; Domain location=1-47; Score=-17.6; E_value=0.004; Accession=PF03101.7; Description=FAR1 family
  Pfam annotation: Domain name=MULE; Domain location=149-247; Score =101.7; E_value=2.6e-27; Accession=PF10551.1; Description=MULE transposase domain
  Pfam annotation: Domain name=SWIM; Domain location=438-475; Score =25.8; E_value=0.00018; Accession=PF04434.9; Description=SWIM zinc finger
  Pfam module annotation: Pfam domain module=AT_hook::FAR1::MULE::SWIM; Domain location=594-606::1-47::149-247::438-475
RGRANACYLSRESTKINCPARISLKLRQDRWLHIDDAKLEHNHPLNQSSVALTNCYKKLTDAKNGEPASRLKGRRNVPAEKEQGNFTEIGRLKFGEGDDEYIQKFFGNMQNKNPYFFYLVDLDYQGRLRNLFWSDARSRAANDYFGHDVVYFDTSYLTEKYDLPLVFFSGMNNHGQPVLFGTVLILLPDLNADSYAWLFRAFLACMKGRCPMAIITEHYNAILDAVREVLPEVRHRLCLYRIMKDVAENLKEHAEFKTIKKALNKVTYGSLKIPEFEADWKKIIDEHGLGENECLSSLYEHRQLWAPAYLRDKFWAGMSISQHGESISSYYDGFVYPKTSLKQFFSKYEMILENKYKKEWQADEESSHRTPLTVTKFYMEEQLAKAYTINMFRKFQDELKATMYCDGMPIKVDGRLVTFEVKECSYMEDGKDTESRTYEVYFCKEGKVEIECECGFVQFTGVLCRHALSVLKLQEIFEIPSDYVLDRWRRDYKKLYSKANKPNEMPLSGIVERSDYLFSQCSQLLNLGFVSESRYLVALKLLRDAERSLLDDGLPARDRQSTLLSFEADAPENGQGLFNPQFSESVKNSQSAHAKRRGRPPKKVTESNGETVTQPNKEQDFLRSSFVTDDTNMVQGPPSASHLEGPHMGVQGGIDLMEGIPNLSFGNHFGMDINHQHQVPSHQRMQQNNFMQVQAEPHGFASQWVYHPMLQDNPVLRTPTRRTG

SEQ ID NO: 107550 - protein, 145 aa, Setaria italica
  misc_feature (11)..(11): Xaa can be any naturally occurring amino acid
  Transcript Sequence Number=SeqID_41576
  Gene Ontology: Mol. function=nucleotidyltransferase activity
NKKLGQILMLXPEFIRNEIYGFFENTLKRHGKGERPDIGSSSFQSLLGPENALSEDGSRLKTSCMNEGENRSSLPDKDLSVTDVHKNSGRCQPCVVQDLPWNKIWFMEYASDFCANSTYLSHPSFSCENGNGNSKECFENYATEG

SEQ ID NO: 107551 - protein, 320 aa, Setaria italica
  Transcript Sequence Number=SeqID_41577
MSSSSSGHHPANGAKVLHTRDRKLQLDRNAASRACPKDRQYIEKLEMELMNCYQEIDYLQDQLNIRNVEANIMGEHIHSLELKLTELEKFPERVRVMDNELMRSDSQCWLLMEEVRCKEEELQKASSQIEKLESTVLDSQCEIESLKLDLTNLEQRLFDAESFAQHAAEHKARIDKLLGEHELQLHEAQNNIDQLVLENKQLKELLPIKAHKQSPSTSGDHLDKQLENGGHAEYESDNLILERMAKQNEESELLIEQLKEELREQKLKAKEDAEDLTQEMAELRYQITGMLDEEYKRRSCIEQAAIQHIQELETQVSKEK

SEQ ID NO: 107552 - protein, 103 aa, Setaria italica
  Transcript Sequence Number=SeqID_41578
  Subcellular localization annotation: CTP_CleavageSite=29; ConfidenceScore=5.41e-01
MALVRAPPPFRQPLSPSSRSRRCPTCHAVAATARPCPGPSWTGVHGGGGGAKKRLLASRRWPGGVGVPSLLATTDEGVAAAGVAREEEDDDEYLAREAGWGGR

SEQ ID NO: 107553 - protein, 311 aa, Setaria italica
  Transcript Sequence Number=SeqID_41579
  Gene Ontology: Mol. function=nucleic acid binding
  Homolog annotation: Hit_ID=Q10KI0; Match level="QueryCoverage=93%, HitCoverage=38%, E-value=5e-47, Identity=45%"; Hit description=SAP domain containing protein, expressed
MTIDGVLSDANHTTVKLGVNVDCKIEQEKVPALPDAIELNADPKGADVVVAAENMIPKDNFSVNTLMHGNGHGDFKCSNGDTKPFLCREKDQVSEVNPDLDSQTKCVSIFDDNISADKNNDLKGNLNADDCDLELDAKQEMVKPSSTIPSPGDLLEVLDVDKEVHKIGATLQELGSTSNIDLDRDEESPDGSSIEKLNFDSCSGDESMDEDVLESKHIDSNIKSDDLGEKTEFTSEHGLKEVSLLDTAAEDSSAHTKEVVVEEKPPSPAEKRKPEDQEVIANNEPIKRQRLRNVNDVDNLLRNKKETKPKN

SEQ ID NO: 107554 - protein, 134 aa, Setaria italica
  misc_feature (74)..(74): Xaa can be any naturally occurring amino acid
  Transcript Sequence Number=SeqID_41580
  Gene Ontology: Mol. function=aspartic-type endopeptidase activity; Cellular component=chromatin; Biological process=DNA integration
  Homolog annotation: Hit_ID=Q7XFV5; Match level="QueryCoverage=100%, HitCoverage=14%, E-value=9e-61, Identity=82%"; Hit description =Retrotransposon protein, putative, Ty1-copia subclass
  Pfam annotation: Domain name=rve; Domain location=26-134; Score=40.7; E_value=5.6e-09; Accession=PF00665.18; Description=Integrase core domain
NVEQFCDVCVLTKQRRLPFPQQASFRAKERLELVHGDLCGPVTPATPGGRRYFLLLVDDLSRYMWVMVLGSKGXAANAIRRTQAAAEAECGRKLRVLRTDNGGEFTAAEFASNCADAGIQRHYSAPYSPQQNDV

SEQ ID NO: 107555 - protein, 84 aa, Setaria italica
  misc_feature (19)..(19): Xaa can be any naturally occurring amino acid
  Transcript Sequence Number=SeqID_41581
  Gene Ontology: Mol. function=RNA-directed DNA polymerase activity; Biological process=RNA-dependent DNA replication
  Homolog annotation: Hit_ID=Q6UUM9; Match level="QueryCoverage=95%, HitCoverage=4%, E-value=9e-14, Identity=60%"; Hit description =Putative gag-pol polyprotein
ARAGNEDINTNDTSTPTQXQFFDPITRARARQLNHQVNTLLSSCPSYLYHGDTCTLVLLRNQGEDRKRKGFTQARFGLQNNTNL

SEQ ID NO: 107556 - protein, 133 aa, Setaria italica
  Transcript Sequence Number=SeqID_41582
  Gene Ontology: Mol. function=carbon-sulfur lyase activity; Cellular component=vacuole
  Homolog annotation: Hit_ID=B5ATU2; Match level="QueryCoverage=98%, HitCoverage=30%, E-value=2e-64, Identity=84%"; Hit description =Tryptophan aminotransferase
  Pfam annotation: Domain name=Alliinase_C; Domain location=1-133; Score=-36.8; E_value=1.6e-11; Accession=PF04864.5; Description =Allinase, C-terminal domain
NYLNSGLYRWDGDANTFDGDTCIELVCSPNNPDGGIRKPTVKAKYGKTIHDFAYYWPQHTPITEAASHDIMLFTVSKCTGHAGTRLGWALVKDTEVAQKMIKFLELNTIGVSKDSQLRAAKILKAVCDGYELS

SEQ ID NO: 107557 - protein, 63 aa, Setaria italica
  Transcript Sequence Number=SeqID_41583
LTRLITLRSRVRFPSPHLAVRINGLFYLYRYGRGLYPTQLYINGLFYLYRYGRGLYPTQLYIN

SEQ ID NO: 107558 - protein, 88 aa, Setaria italica
  Transcript Sequence Number=SeqID_41584
GVCRRSISPTIPGWESSTKMDTLVHLLSLTFECVLLFTSLGQLGAIGHVTKGSEDRDPHRLDECSRCQGFLRLFWYLSADVTEKLPNR

SEQ ID NO: 107559 - protein, 133 aa, Setaria italica
  Transcript Sequence Number=SeqID_41585
  Gene Ontology: Mol. function=DNA binding; Cellular component =chromosome; Biological process=nucleosome assembly
  Homolog annotation: Hit_ID=Q94JJ7; Match level="QueryCoverage=72%, HitCoverage=62%, E-value=4e-35, Identity=77%"; Hit description =Histone H2B.3
  Pfam annotation: Domain name=Histone; Domain location=60-130; Score =107.1; E_value=6e-29; Accession=PF00125.16; Description=Core histone H2AH2BH3H4
MAPKAEKKPAAKKPAEEEPATEKAEKAPAGKKPKAEKRLPAGKSAGKEGGEGKKGKKKAKKSVETYKIYIFKVLKQVHPDIGISSKAMSIMNSFINDIFEKLAGEAAKLARYNKKPTITSREIQTSVRLVLPG

SEQ ID NO: 107560 - protein, 145 aa, Setaria italica
  Transcript Sequence Number=SeqID_41586
  Gene Ontology: Mol. function=DNA-directed DNA polymerase activity; Cellular component=DNA polymerase III complex; Biological process =DNA replication
  Homolog annotation: Hit_ID=B9S8E5; Match level="QueryCoverage=77%, HitCoverage=10%, E-value=3e-31, Identity=63%"; Hit description =Replication factor C / DNA polymerase III gamma-tau subunit, putative
TSLVSDDKLVDLLDLALSADTVNTVKTLRDITETGVEPLALMSQLATIITDILAGSYAFTRERPRRKFFKRPSLSKEDMEKLRQALKTLSEAEKQLRVSSDKTTWLTAALLQLAPDKQYLLPSSSTSTSLNHGGLVGSSDRDMAK

SEQ ID NO: 107561 - protein, 95 aa, Setaria italica
  Transcript Sequence Number=SeqID_41587
  Gene Ontology: Mol. function=microtubule motor activity; Cellular component=microtubule associated complex; Biological process =microtubule-based movement
  Homolog annotation: Hit_ID=B6U192; Match level="QueryCoverage=100%, HitCoverage=12%, E-value=5e-38, Identity=85%"; Hit description=ATP binding protein
NCEEATGDRRVTTRASLRKAQRDASAAGELKSPSHRFTSPAPTAKKRTFWDIGGNSPSVLAANGRKTRSHVATETPKKGPSMLLQPGFARQRAIH

SEQ ID NO: 107562 - protein, 52 aa, Setaria italica
  Transcript Sequence Number=SeqID_41588
MKQVWQRSSKDMTAMPPPRHRGAAKKPMWIIVLLSLVCVALMGAYVYPPRRY

SEQ ID NO: 107563 - protein, 85 aa, Setaria italica
  Transcript Sequence Number=SeqID_41589
  Gene Ontology: Mol. function=transferase activity, transferring glycosyl groups; Biological process=metabolic process
  Homolog annotation: Hit_ID=B6SSB3; Match level="QueryCoverage=85%, HitCoverage=15%, E-value=1e-13, Identity=57%"; Hit description =Anthocyanidin 5,3-O-glucosyltransferase
MGVAVQLKNMEVSEVEPFVEAAELEQAVRGLMGETEEGRKAREKAADMKAACRKAVTEGGSSYIALRKLMSEISSGGGGTASVTG

SEQ ID NO: 107564 - protein, 1237 aa, Setaria italica
  Transcript Sequence Number=SeqID_41590
AEAPTGFQTPVEPHMDDSGAVPVTIDEKIEMEEPAKADDVVHPDHKESFPEETSIAGPTEEVAKMEDPQSQQADAVDADVVQEEVPKFEHADEPATNAHEVLNQESTEETDGPVNEKTEETAHQSNMAVPEETTPENDTITGEPPVNIQVQNQESVEKIKDAEEVDTGAAMQQSSVAFDEAVPEDQHNLGITMDGDTVQQDTLEAIEQTEDPQGQDLEPEKANENTQPATMTNIPDVEVVSEAPSGVQTPVEINLDNSDAIPDTAGRNTETDESAKAEGTTAISEPQMTETEEEPKDIEATEAQEITEHGHVTPSKELSAEDDSTADETHNDDIQHTLGQDSVEVKETVFTSEDTVLDNVTAEEPTCDSQEVDNAESTEETKGNTAENIEEVSDVVIADEAVKEQDVLQTEDIAETHMQELEPEETKNTEPVESEEASDQMNAVLFDDLAQEDTQEIDMQQAESATETTETEAAPQESKDCVSDEPSAEDHKIESEKDCDTQGVSITESLEVIDGDKDIITGGISGQSNMVSAGESAQENYVPESKSTADIQPVQEPEPEEIKNTELTEVKETSYEMNTTVFQTPTKEDNLATIDLHESARELSNIEATEAGTPHQSDAAQSEEQAPEGIASEPQVLEPESVEEMNDTTATETTNISNAKLTSSSGESVPEEIATEDNTSTEPDVDHQQVQDQESSDFMETEADKPQGIASSCILSTSEQSTSEDNATAIAEDNATAMEPNSDTQAESLQLAEVTEGTENVKSNTALGEAAAPEENVETGATADMPSVQEPELEETKGAEPAGTEDIMTSIDLPAGNMDMETMGTEAVPHESHVESIKELTEDGTEPVLELESFENTKCTDTMEHPGEPHGSTSDETTPTEENTTVTERAFDTQQVQNLTSQEIKDSEDAKTDEFSDLSSFPTKEADQESNLPRTEPATDVQQVQETRDIESEGTENHQQHGVSTFEEPAVDSEPNVDDQQVHEDKVPEVKDNQAMEAEEVIQQSNIDIPDDATGERSELTSEPDSYVQPAQHVDSENSQLEKAEETAGTVAIEETPTEDSIACEIDPPVDIKQEHELEPVEEIKATDANEAEEEFHTSQVDAIEKSASEGNMASIEPTSDIKQEPTSDIKQENELEATKEINGIEAVNDGEQTENATSEDPSPTDNETTPEGHSAELNEEITGNETDDVKDEIQTFVELKDGACDLGETVLPTQGSENMTDEDAVQSPGDDRLETS

SEQ ID NO: 107565 - protein, 208 aa, Setaria italica
  Transcript Sequence Number=SeqID_41591
  Gene Ontology: Mol. function=peptidase activity; Cellular component =anchored to membrane; Biological process=lipid transport
  Homolog annotation: Hit_ID=B6U254; Match level="QueryCoverage=36%, HitCoverage=37%, E-value=5e-32, Identity=84%"; Hit description=Non -specific lipid-transfer protein
  Pfam annotation: Domain name=Tryp_alpha_amyl; Domain location=43-121; Score=43.8; E_value=6.7e-10; Accession=PF00234.14; Description =Protease inhibitorseed storageLTP f
MAAVARTTTAMSILALAALLATTTVRVDGATAAAPAPAPAADCTDALLSLAGCLSYVQEGSTVATPDPTCCSGLKDVVRNEVACLCQVFQGGQNLGISLNMTKALQLPAACKVKTPPVSKCHVAVPGVPSASPVPAPSAGAAPFFGQSPPSATPSESPAPAGTGSDSNTPAAAPSPARSGAASLSASTAQTTLAAAAVAATLLVYRVL

SEQ ID NO: 107566 - protein, 71 aa, Setaria italica
  Transcript Sequence Number=SeqID_41592
KNHLPLYEQLVQNIVFAVHDDNLFSCIKALLLFMHHIFISDNCRAGCTLTHNYLSTEHAHILEMHAIIFRM

SEQ ID NO: 107567 - protein, 171 aa, Setaria italica
  Transcript Sequence Number=SeqID_41593
  Gene Ontology: Mol. function=nucleotide binding
  Homolog annotation: Hit_ID=Q9LPV0; Match level="QueryCoverage=96%, HitCoverage=10%, E-value=2e-46, Identity=54%"; Hit description =T22I11.2 protein
  Pfam annotation: Domain name=GTP_EFTU_D2; Domain location=56-134; Score=16.2; E_value=0.0093; Accession=PF03144.17; Description =Elongation factor Tu domain 2
KKVVNIVPTSSASAEGIPDLLLLLVRWVPEIMMERLTYVDNVECTVLEVNEDKDFGTTIDVVLINGVLRKGDRIVVCTKQGLVTTNIRYLLTPYPMKELKAKGVYKHHEELKAAQGARIAVRGLRHAIAGTALIVVKQGDDLEQAEVAAVQEINKVNNLINEDERGESDDG

SEQ ID NO: 107568 - protein, 644 aa, Setaria italica
  misc_feature (282)..(282): Xaa can be any naturally occurring amino acid
  Transcript Sequence Number=SeqID_41594
  Gene Ontology: Mol. function=nucleotide binding
  Homolog annotation: Hit_ID=Q8H6S8; Match level="QueryCoverage=93%, HitCoverage=65%, E-value=1e-173, Identity=52%"; Hit description =Translation initiation factor
  Pfam annotation: Domain name=GTP_EFTU; Domain location=8-231; Score =39.7; E_value=6.3e-13; Accession=PF00009.19; Description=Elongation factor Tu GTP binding domain
  Pfam annotation: Domain name=MMR_HSR1; Domain location=66-146; Score=- 18.4; E_value=0.05; Accession=PF01926.15; Description=GTPase of unknown function
  Pfam module annotation: Pfam domain module=GTP_EFTU::MMR_HSR1; Domain location=8-231::66-146
MWSLSLRMKVQAIGLTGSFEHRYVASSVMWMLERHSSLIASGEAMCRVGRLGASRSRLVRPTYQLRISGRGPPWKAEATIKVPGLLVIDTPGHQSFSNMRLRGSSLCDVAVVVVDITRGLEKQTIESLDLLKQRHVRFIVALNKVDRLYGWKTCPNAPIAKALKNQSEDVQREFKWRLTEVVTQLKGSGFNASLYYENKKVKEVVNIVPTSSASAEGIPDLLLLLVRWVPEIMMERLTYVDNVECTVLEVNEDKDFGTTIDVVLINGVLRKGDRIVVCTKQXAHFHLQGLVTTNIRYLLTPYPMKELKAKGVYKHHEELKAAQGARIAVRGLRHAIAGTALIVVKQGDDLEQAEVAAVQEINKVNNLINEDERGESDDGRAIQAISRVKTCTEGVYVQASSLGTLEAIIEHLKTLSLDIPVSGCNLGPVHKQDVMKATAMLKRKEEYAAILAFDVKVMPEAFDLAAESGVKIFMADTVYKLVGRFTDHIKKLKEDKKKQYAAEAVFPCTLKILPNRVYHKKDPIVCDVEVLEGIVKVGTPICVSVPSKDRGADVIHSLGRIISMETSNGMQIDSTKRGVVSIKIIGENPQERSRLYGWHFNTDNELLSQISRKSIDVLKEYYRDEMSDENWQLIRRLKKQFGIP

SEQ ID NO: 107569 - protein, 106 aa, Setaria italica
  Transcript Sequence Number=SeqID_41595
  Gene Ontology: Mol. function=protein serine/threonine kinase activity; Biological process=protein amino acid phosphorylation
  Homolog annotation: Hit_ID=Q7XIH7; Match level="QueryCoverage=99%, HitCoverage=15%, E-value=3e-40, Identity=67%"; Hit description =Putative lectin-like protein kinase
MDDEFEEGTGPKQFRYSELAMATDYFSDKRKLGEGGFGSVYRGYIKEMDLHVAIKRVSKGSKQGRKEYASEVRIISLLRHRNLVQLIGWCHGGGELLLVYELMPNG

SEQ ID NO: 107570 - protein, 71 aa, Setaria italica
  Transcript Sequence Number=SeqID_41596
MAAEQRLLALLLVTAVLALSFSQGMVEARKVRVMRAVRHDGRRAPGLRGRLLPEEMVYTLMDYGPPRAKHQ

SEQ ID NO: 107571 - protein, 180 aa, Setaria italica
  Transcript Sequence Number=SeqID_41597
  Homolog annotation: Hit_ID=B6UA83; Match level="QueryCoverage=87%, HitCoverage=84%, E-value=1e-63, Identity=80%"; Hit description =Ribonuclease P
  Pfam annotation: Domain name=Ribosomal_L7Ae; Domain location=45-169; Score=6.2; E_value=0.015; Accession=PF01248.18; Description =Ribosomal protein L7AeL30eS12eGadd45 family
MLSFDSSRCYFTGVHALCRLTPDYIVGDALDDLLSKLVRSVEVAKASRGGLPEKIWMKKQFAIGVNDVTRVLERMPPAAAPDSAHSSSEAQTVSGRRRAPLVPLQAVLVAADCNPKWLTKHIPTLASTRQVPVLCLKDNKGGSVRLGHVVNLRTALAIGVKAGDSIINKTIDEFLECNKQ

SEQ ID NO: 107572 - protein, 70 aa, Setaria italica
  Transcript Sequence Number=SeqID_41598
CFLKASNKRLRLHLVPYECKNFINGVFCSILRNNAQNGFSQVRYKFSVLSLPYWRCVIHMIQNYNVLTNW

SEQ ID NO: 107573 - protein, 72 aa, Setaria italica
  Transcript Sequence Number=SeqID_41599
IIPLVMFLYSTMFKISMCQNEFYREVPTNAQPPHSRCNVFYWPDFVSFPAGYSEVKKNLNYCVLVFALHLRI

SEQ ID NO: 107574 - protein, 181 aa, Setaria italica
  misc_feature (82)..(82): Xaa can be any naturally occurring amino acid
  Transcript Sequence Number=SeqID_41600
  Gene Ontology: Mol. function=acid-amino acid ligase activity; Cellular component=intracellular; Biological process=ubiquitin -dependent protein catabolic process
  Homolog annotation: Hit_ID=Q2L3D3; Match level="QueryCoverage=96%, HitCoverage=20%, E-value=5e-49, Identity=55%"; Hit description =Polyubiquitin-like protein
  Pfam annotation: Domain name=HECT; Domain location=1-181; Score= -15.5; E_value=3.1e-09; Accession=PF00632.17; Description=HECT-domain (ubiquitin-transferase)
LLLLVRIRCKYIDLLIQDRFVNCTRRQLAYFAAGFRTMFDKWKPWTEFFASLDNEDFDQMLGGSKGTIDVNQWRAHTDYRGXKEKDRQIKWFWKAVENMTVEQQGRLLFFWTSVKCLPSDGFWGLGCRLFIYRASSSRDHLPTSQTCFYHLHLPAYTSSSMMQSRLRVIVQEHVSSGFGAS

SEQ ID NO: 107575 - protein, 66 aa, Setaria italica
  Transcript Sequence Number=SeqID_41601
LNFYVTVRSKLLAVKNKARLNNSTNSNKFCGTQHQRGADIFLTSDNVWKVREKKCSEGPRKRSQEG

SEQ ID NO: 107576 - protein, 73 aa, Setaria italica
  Transcript Sequence Number=SeqID_41602
DLYFSKLDLPTASVQNINIYFRTISFFSTHPYIDQFDYYTIHKNRIASTISLFLAHPCTVKIYNYTIEPCLLS

SEQ ID NO: 107577 - protein, 58 aa, Setaria italica
  Transcript Sequence Number=SeqID_41603
NINIYFRTISFFSTHPYIDQFDYYTIHQNRIASTISLFLAHPCTVKIYNYTIHPCLLS

SEQ ID NO: 107578 - protein, 113 aa, Setaria italica
  Transcript Sequence Number=SeqID_41604
  Homolog annotation: Hit_ID=Q70I34; Match level="QueryCoverage=99%, HitCoverage=54%, E-value=2e-17, Identity=39%"; Hit description =CM0216.520.nc protein
  Pfam annotation: Domain name=Yae1_N; Domain location=1-31; Score=7.5; E_value=7.7e-05; Accession=PF09811.1; Description=Essential protein Yae1, N terminal
DSAQEGFNVGFRQSVDVGYKWGLVRGVTSALASLPDSLKEKLVPDAQCRRKLLDVQSSVQEISADDALQMFHESICQSSHPSEESHVTSTADGTTESNRIKSLSNDLVLLLHE

SEQ ID NO: 107579 - protein, 111 aa, Setaria italica
  Transcript Sequence Number=SeqID_41605
VGVLCFVGVYLVVYLASLPDSLKEKLVPDAQCRRKLLDVQSSVQEISADDALQMFHESICQSSHPSEESHVTSTADGTTESNRIKSLSNDLVLLLHECPDIKVSEELAGDS

SEQ ID NO: 107580 - protein, 208 aa, Setaria italica
  Transcript Sequence Number=SeqID_41606
  Gene Ontology: Cellular component=nucleus; Biological process =ubiquitin-dependent protein catabolic process
  Homolog annotation: Hit_ID=Q7EYK0; Match level="QueryCoverage=44%, HitCoverage=15%, E-value=6e-18, Identity=45%"; Hit description =Putative WD-40 repeat protein family
  Pfam annotation: Domain name=LisH; Domain location=12-38; Score=40.0; E_value=9.5e-09; Accession=PF08513.3; Description=LisH
MQRKGSEALTGTELNAAVYRYLQDSGFVHTAFNFFYEADIERGNIQGMIPQGTLIRIVHKGLEYIELEANSEIGSDDEHHFFDTLDLMTNDLDELRKKVTSSSQWNSVKNDKEQKINSGETDKAQCSAETTTMYRKKPTRKTEAVQNTNPDETAAIGGTQPMKHFKAQGKDSTEQNISSAEIGQKTGSAEASAMYRRKPTRKTEAEQN

SEQ ID NO: 107581 - protein, 95 aa, Setaria italica
  Transcript Sequence Number=SeqID_41607
  Gene Ontology: Mol. function=electron carrier activity; Cellular component=integral to membrane; Biological process=oxidation reduction
  Homolog annotation: Hit_ID=Q2QP56; Match level="QueryCoverage=92%, HitCoverage=9%, E-value=2e-35, Identity=79%"; Hit description =Respiratory burst oxidase, putative, expressed
  Pfam annotation: Domain name=efhand; Domain location=24-52; Score =32.2; E_value=2.1e-06; Accession=PF00036.24; Description=EF hand
AQVLTKDQVREFWEQLSDPGFDAKLRTFFDMVDKNADGQITEEELKEVLTLTASANKLSKILERVDEYTALIMEELDPDNLGYIEIANLESLLLQ

SEQ ID NO: 107582 - protein, 184 aa, Setaria italica
  misc_feature (126)..(126): Xaa can be any naturally occurring amino acid
  Transcript Sequence Number=SeqID_41608
  Gene Ontology: Mol. function=RNA-directed DNA polymerase activity
  Homolog annotation: Hit_ID=Q84T47; Match level="QueryCoverage=45%, HitCoverage=11%, E-value=8e-12, Identity=45%"; Hit description =Putative reverse transcriptase
EGFSGCPSAAELAASWGLDLRGGGCGGDGEEEAEDDAFFSVLDYSMLGADPELRDLYVPCDPPEGAAHAGGARRLKGEALCDQLAEMARREADTSHPHQPHSDLSPRTPRRNSAASSGRLPGKMAXPPPPPPHHPPAAVQEVPLPYTSLLMMASANCTELIGGHDRMADDDEQLLWDCAPPSVP

SEQ ID NO: 107583 - protein, 94 aa, Setaria italica
  Transcript Sequence Number=SeqID_41609
CYPKVVRRATPMHDAIVESLRSVGPNFCVEAIVVIGQSTPEVASHGVLVSCKERQPLFAVAIRTEIGSLRYLFTMWFHCERSGVFYIRLFFLPS

SEQ ID NO: 107584 - protein, 125 aa, Setaria italica
  Transcript Sequence Number=SeqID_41610
  Homolog annotation: Hit_ID=Q8RVR4; Match level="QueryCoverage=82%, HitCoverage=72%, E-value=1e-41, Identity=78%"; Hit description =Putative CONSTANS-like B-box zinc finger protein (Fragment)
IWDFNLGRSRDHDEKSSIEVGFGSNHGGFMIKSYSDMLKEISSGTTKDLEDIYDSRYCSTAEDIMSSNICQVSSKNVSTGSNKRKVSPSTSTMDGPTTSGNHVPTSGPALTREISFGDQPSLPSR

SEQ ID NO: 107585 - protein, 288 aa, Setaria italica
  Transcript Sequence Number=SeqID_41611
  Gene Ontology: Mol. function=metal ion binding; Cellular component =intracellular
  Homolog annotation: Hit_ID=Q8RVR4; Match level="QueryCoverage=50%, HitCoverage=100%, E-value=1e-57, Identity=74%"; Hit description =Putative CONSTANS-like B-box zinc finger protein (Fragment)
  Pfam annotation: Domain name=CCT; Domain location=236-280; Score =84.1; E_value=5e-22; Accession=PF06203.6; Description=CCT motif
  Pfam annotation: Domain name=CCT_2; Domain location=233-260; Score =19.2; E_value=0.011; Accession=PF09425.2; Description=Divergent CCT motif
  Pfam module annotation: Pfam domain module=CCT::CCT_2; Domain location=236-280::233-260
KLKGKRTKQKKEKVEDPKTPRTNRNRNRYPTTPPPPPPHHPPAAVQEVPLPYTSLLMMASANCTELIGGHDRMADDDEQLLWDCAPPSVPPTQIWDFNLGRSRDHDEKSSIEVGFGSNHGGFMIKSYSDMLKEISSGTTKDLEDIYDSRYCSTAEDIMSSNICQVSSKNVSTGSNKRKVSPSTSTMDGPTTSGNHVPTSGPALTREISFGDQTVSPAGAERPAAMRIDSETLAQNRDSAMQRYREKRKNRRYEKHIRYESRKLRADTRKRVKGRFVKSTEALNAGNGG

SEQ ID NO: 107586 - protein, 67 aa, Setaria italica
  Transcript Sequence Number=SeqID_41612
  Subcellular localization annotation: CTP_CleavageSite=25; ConfidenceScore=5.33e-01
KTAAPIVSLLLCICLSAARGGYRASSARLSSSWLVRVTSWLGSTRYLNELEWSSAQLGSFTSSSWLV

SEQ ID NO: 107587 - protein, 35 aa, Setaria italica
  Transcript Sequence Number=SeqID_41613
  Homolog annotation: Hit_ID=B4FF73; Match level="QueryCoverage=100%, HitCoverage=8%, E-value=2e-14, Identity=97%"; Hit description=F-box domain containing protein
YDVDKKSWSWIAGCASQLCNSQVCFYEPRFDTSIY

SEQ ID NO: 107588 - protein, 42 aa, Setaria italica
  Transcript Sequence Number=SeqID_41614
KFHYNKLNMHFFKTLSVRCQLILEQYYCGFFFLCSLQSADSL

SEQ ID NO: 107589 - protein, 238 aa, Setaria italica
  Transcript Sequence Number=SeqID_41615
  Gene Ontology: Mol. function=carbohydrate binding; Cellular component= chloroplast; Biological process=carbohydrate metabolic process
  Homolog annotation: Hit_ID=A2Q5N9; Match level="QueryCoverage=97%, HitCoverage=63%, E-value=3e-13, Identity=26%"; Hit description =Galactose mutarotase-like
WSPGGAWSLRDVRGNPTTSIEVELAAAAPGNAAAARCVVTLHPEALSTELAVTNGASSAPMALSCGVSNHLRVSTPDATYALGLQGSDYRTVEPALSEFSIIPPDYQAAARQPAARHHRWANRGFDMILSGGRDRGGAADDDQPDGEEDDDYKHLTDAVCRVYSHAPREFTIMDRGRRNSVRLHRSGFEELYVFSPGSQYQWYGKYAYVVVGPAMLEPVVLGAGETWQGAQYLRNPNL

SEQ ID NO: 107590 - protein, 86 aa, Setaria italica
  Transcript Sequence Number=SeqID_41616
  Subcellular localization annotation: CTP_CleavageSite=60; ConfidenceScore=5.79e-01
MASSPSPSPGTIRATLPPSTATPSPVTTTPTPASPAPVTQPNATPADPPSSPAAPPPLPSASTPPPQLTPPPPSSAPPPPAAVPPP

SEQ ID NO: 107591 - protein, 321 aa, Setaria italica
  misc_feature (205)..(205): Xaa can be any naturally occurring amino acid
  Transcript Sequence Number=SeqID_41617
  Gene Ontology: Mol. function=DNA binding
  Pfam annotation: Domain name=B3; Domain location=188-318; Score=37.0; E_value=7.7e-08; Accession=PF02362.13; Description=B3 DNA binding domain
  Pfam annotation: Domain name=B3; Domain location=62-165; Score=2.8; E_ value=0.043; Accession=PF02362.13; Description=B3 DNA binding domain
  Pfam module annotation: Pfam domain module=B3::B3; Domain location =188-318::62-165
AASSSSEESGEDIPSENVSLASDDLQSPLGADYVLSYRTYLSKAQKVRVMTLIQEIQPEFTVYIATMRKTSVQPPGPYLGITKEYALAHCPDRSTTVTLEMPGKNKKWHPKFYKRDESRKNFLMGQWLDFVRDNHVQEGDIVLLLPTKGGNRSIFTVYLLHETATHSSMASEVHIEEPTTGEHASQESGTLEIPHESLESEDSEXSLFLPPYFVPCKNLLSKSQKRIVEERVRAIRSEVPLCVAVMKNNNVGVAQRWLQCGGKTWEAKMMFHNGRRWFINGGWPNFARGNGLRVGDICLFELKKEEKLLTMAVHIIRKELF

SEQ ID NO: 107592 - protein, 228 aa, Setaria italica
  Transcript Sequence Number=SeqID_41618
  Gene Ontology: Mol. function=protein dimerization activity; Cellular component=integral to membrane; Biological process=transmembrane transport
  Homolog annotation: Hit_ID=Q7XMY6; Match level="QueryCoverage=94%, HitCoverage=43%, E-value=6e-35, Identity=44%"; Hit description =OSJNBa0027G07.10 protein
CICYPASLKVVDVTKKKLSFNRQRIQSGYDASTFWRIMARNEHYLACMMVLVALQLFLQLTRVNVTTLFLPMLSRATSSRSSRAVIGNIVLVLVNSCGVLGSALATKHYGREVTFTMGAVLMVFCQVAIPLILEVQIGVGGGIRMPMGCTTAMFALTCVVSCGLSWSWGSFFWTIPGRKFHSAGQVLTMILNFGVCFAQMQYFLLMLCRQKNAILVYYAMWIWSCVVN

SEQ ID NO: 107593 - protein, 111 aa, Setaria italica
  misc_feature (25)..(25): Xaa can be any naturally occurring amino acid
  Transcript Sequence Number=SeqID_41619
TTWATPHGWFLVRRPTPATFLWNPXSNGDKIQLPPVQDDVPADCTYLLSDKPTDISGGSGCVVLLLDKMDPILWYCHVVGAGGGGWARHEYDIGTQILYPDETLHEKLVIP

SEQ ID NO: 107594 - protein, 54 aa, Setaria italica
  Transcript Sequence Number=SeqID_41620
FRMLGSSKLPVLQEMIKSVHNKLSVKLHRKTPLYALTHMFIETRKNLDVNEDIH

SEQ ID NO: 107595 - protein, 64 aa, Setaria italica
  Transcript Sequence Number=SeqID_41621
FILVEITAAWWKVFTLAGTCKLSSLDGHWKHEPNGAVILQRLQAVPVSSASHLLCAKGSISSRR

SEQ ID NO: 107596 - protein, 160 aa, Setaria italica
  Transcript Sequence Number=SeqID_41622
KKNYLKERMNKLCRINSADDKWTNLAVAHGAGELVGYHQAGGHPAGEHRPHHVHDADRDPPRHRHTCSLSSAAPKEAIPQTPSLQSLILPMQSARMKRKKLRLAPVLVSIKNLKHQQSAKNICVDKTVSDKRWGSISLPLLPPNPLAPRTNTTPPLSDQL

SEQ ID NO: 107597 - protein, 97 aa, Setaria italica
  Transcript Sequence Number=SeqID_41623
RAEHIYSPKNKKHFVVYSMERQSRNIGALVLISLLLLGCIAIHGESRSTMDVTRIGAFCYKTIDCAGPRGDHCYCCSVGNSACYVSEGECNTNCHKD

SEQ ID NO: 107598 - protein, 94 aa, Setaria italica
  Transcript Sequence Number=SeqID_41624
PRLNAEKQEDRSGGNLLLPEEEPVLQPKIKRKRSIRIRPRLNAEKQEDRSGGEAVFPQRAARQQDAVHPIVKQKRNMPSRKVSPAAKGQGKIRT

SEQ ID NO: 107599 - protein, 56 aa, Setaria italica
  Transcript Sequence Number=SeqID_41625
  Gene Ontology: Mol. function=nucleic acid binding
FQRDAHPSHQSMHSTGWVAHSDQGGSSSAPGIGDIQWAKPAKRLRTDSGKRRPSHL

SEQ ID NO: 107600 - protein, 1206 aa, Setaria italica
  Transcript Sequence Number=SeqID_41626
  Gene Ontology: Mol. function=nucleic acid binding; Cellular component= nucleus; Biological process=regulation of transcription, DNA-dependent
  Homolog annotation: Hit_ID=B9RDU3; Match level="QueryCoverage=95%, HitCoverage=51%, E-value=0.0, Identity=71%"; Hit description=Chromo domain protein, putative
  Pfam annotation: Domain name=DEAD; Domain location=530-696; Score= -18.2; E_value=0.00086; Accession=PF00270.21; Description=DEADDEAH box helicase
  Pfam annotation: Domain name=GBP_C; Domain location=115-363; Score= -150.3; E_value=0.098; Accession=PF02841.6; Description=Guanylate -binding protein, C-terminal domain
  Pfam annotation: Domain name=Helicase_C; Domain location=891-970; Score=89.4; E_value=1.3e-23; Accession=PF00271.23; Description =Helicase conserved C-terminal domain
  Pfam annotation: Domain name=QLQ; Domain location=5-42; Score=46.7; E_ value=9.3e-11; Accession=PF08880.3; Description=QLQ
  Pfam annotation: Domain name=ResIII; Domain location=526-690; Score= -17.2; E_value=0.0015; Accession=PF04851.7; Description=Type III restriction enzyme, res subunit
  Pfam annotation: Domain name=SNF2_N; Domain location=532-840; Score =359.0; E_value=8.6e-105; Accession=PF00176.15; Description=SNF2 family N-terminal domain
  Pfam module annotation: Pfam domain module=DEAD::GBP_C::Helicase _C::QLQ::ResIII::SNF2_N; Domain location=530-696::115-363::891-970::5- 42::526-690::532-840
QPGQTGFTKNQLHVLKAQILAFRRLKRGDRTLPPEVLELIVSGRSPPDSQGQQISGPQAIHNCERPGVSNADEHGRHIESGDKVPEKPALLKGPCLSKVEASASEDKASPASVPGPMQVMKASPKESLKIGPVSVPEHSNTTMIKSEHEIEQCVQRTPRSDYSSERGKSLPAESGSADAEQAKRAGSTSSAPAPRDVPRKYHGPLFDSPSFTRRHDSLGSANYNSNLSLGYDVKDLLAQEGLIILDKKREDNLKKISSLLAINLERKRIRPDLVLRLQIEEKKLKLLEHQARLRDEVEHEQQEIMAMPDRIYRKFVRQCERQRVELVRQVQQMQKASREKQLKSIFQWRKKLLEAHWAIRDARITRNRGVAKYHERMLREFSKRKDDDRTKRMEALKNNDVERYRQILLEQQTSVPGDAAQRYNVLSSFLTQTEEYLYKLGGKITAAKSQQQVEEAANAAAAAARAQGLSEEEVKAAAQCAGQEVMIRNTFSEMNAPRDNASVNKYYTLAHAVSERVTKQPSLLRAGTLRDYQLVGLQWMLSLYNNKLNGILADEMGLGKTVQVMALIAYLMEFKGNYGPHLIIVPNAVLVNWKSELLNWLPSASCIFYVGAKDQRQKLFSQEVLAMKFNVLVTTYEFVMFDRSKLSRIDWKYIIIDEAQRMKDRDSVLARDLDRYRCQRRLLLTGTPLQNDLKELWSLLNLLLPEVFDSSKAFQDWFSKPFQRDGPTHSAEEDDWLETEKKVIIIHRLHQILEPFMLRRRLEDVEGSLPRKDSIVLRCRMSAVQGAIYDWIKSTGTIRVDPEDEKMRAQRNPMYQFKTYKNLNNKCMELRKVCNHPLLSYPFLNHGKDFMIRSCGKLWNLDRILIKLHKAGHRVLLFSTMTKLLDIMEDYLQWRRLVYRRIDGTTSLEDRESAIVDFNRPGSDCFIFLLSIRAAGRGLNLQSADTVVIYDPDPNPQNEEQAVARAHRIGQTREVKVIYMEAVVDNISSYQKEDELRNGGSGDLEDDLAGKDRYMGSIESLIRNNIQQYKIDMADEVINAGRFDQRTTHEERRMTLETLLHDDERYQETVHDVPSLQEVNRMIARTEREVELFDQMDEDFDWTGDMMKHHQVPKWLRASSTEVDAVVASLSKKPLRNMSSGGIALDTNDTPEKRRGRPKGTGKYSIYREIDDEDLEESDEDSEERNTTPLPEDGEIEEFEREPRQN

SEQ ID NO: 107601 - protein, 626 aa, Setaria italica
  Transcript Sequence Number=SeqID_41627
  Gene Ontology: Mol. function=nucleic acid binding; Cellular component= nucleus; Biological process=regulation of transcription, DNA-dependent
  Homolog annotation: Hit_ID=B9RDU3; Match level="QueryCoverage=73%, HitCoverage=22%, E-value=2e-68, Identity=35%"; Hit description =Chromo domain protein, putative
TFGWCCSLIEDLFARVDVVASLSKKPLRNMSSGGIALDTNDTPEKRRGRPKGTGKYSIYREIDDEDLEESDEDSEERNTTPLPEDGEIEEFEDEEDNDDSVPDNKDESEEEEPINDDGYNFTDGLKSRRTNRIEEAGSTGSSSGSRRLPPPAPSSSSKKLRSLSALDARPGSLSRRTPDDLEEGEIAMSGDSHMDLQQSGSWNHERDDGEDEQVLQPKIKRKRSIRIRPRPNAEKQEDKSGGEGVFPQRAARQQDAVHPIVKQKRNMPSRKVSPAARAGKLAYLPGSGEGSAERSKENRSSKAIDSATPEFRGTKMSDSMQRKCKNVISKLWRRIDKEGHQIIPNISSWWRRNENSSFRGPAGSTLDLQKVEQRVDGFEYSAVTEFIVDMQQMLKSVVQHFSYRHEVRIEAETLHNLFFNIMKIAFPDSDFSEAKNAMSFSNPGGASSGAAGPSTKHAALGHKRRASTSEAEQLGSGHSRHNQPSEVPSRPHSSRSERDSRHSGSGSRDQLPDGAGLLHPSDMFIVKKKRQERARSSIGSPSSSGRAGPLSPTNPGRPGPVPSPRGARTPFQRDAHPSHQSMHSTGWVAHSDHGGSSSAPGIGDIQWAKPSKRQRTDAGKRRPSHL

SEQ ID NO: 107602 - protein, 174 aa, Setaria italica
  misc_feature (14)..(14): Xaa can be any naturally occurring amino acid
  Transcript Sequence Number=SeqID_41628
  Gene Ontology: Mol. function=transferase activity; Cellular component= membrane
  Homolog annotation: Hit_ID=B9SXE7; Match level="QueryCoverage=99%, HitCoverage=32%, E-value=6e-74, Identity=71%"; Hit description =Catalytic, putative
  Pfam annotation: Domain name=Exostosin; Domain location=1-125; Score =6.1; E_value=4.3e-07; Accession=PF03016.7; Description=Exostosin family
GGRPVAQRTILAFXAGQMHGRVRPVLLKYWGDKDPDMRIYSKLPHRITRRRNYVQHMKSSKYCICPMGYEVNSPRIVEAIYYECVPVIIADNFVLPFDDALNWSSFSVVVAERDVPKLKDILLGIPESRYITLQSNVKRVQKHFLWHPNPVKYDIFHMILHSVWFSRVNQMRIE

SEQ ID NO: 107603 - protein, 141 aa, Setaria italica
  Transcript Sequence Number=SeqID_41629
SARRSYHLGKMKKREGCPTGGENCSKEKAPKFCSPLLFFLCILLSRRACDLHRWPLLATYLAHCTCPTNLQLIAHCSRGQSQSRSSARRRPLQTAAGLACDSLFIYLLQTTPSTRREGGQACAARPVSGVDKRREERDEFA

SEQ ID NO: 107604 - protein, 74 aa, Setaria italica
  Transcript Sequence Number=SeqID_41630
GLKGKAFLCFADIIHRLEWRKSPLPFQRKGMASFRKQRKKSIQCEPWFSRKIEARRDEIKRSLFFLPKNQLGVI

SEQ ID NO: 107605 - protein, 354 aa, Setaria italica
  Transcript Sequence Number=SeqID_41631
  Gene Ontology: Mol. function=transporter activity; Cellular component= mitochondrial inner membrane; Biological process=mitochondrial transport
  Homolog annotation: Hit_ID=B6THJ2; Match level="QueryCoverage=85%, HitCoverage=91%, E-value=1e-145, Identity=83%"; Hit description =Mitochondrial uncoupling protein 3
  Pfam annotation: Domain name=Mito_carr; Domain location=165-260; Score=109.6; E_value=1.1e-29; Accession=PF00153.19; Description =Mitochondrial carrier protein
  Pfam annotation: Domain name=Mito_carr; Domain location=265-352; Score=117.5; E_value=4.3e-32; Accession=PF00153.19; Description =Mitochondrial carrier protein
  Pfam annotation: Domain name=Mito_carr; Domain location=64-159; Score= 91.4; E_value=3.2e-24; Accession=PF00153.19; Description =Mitochondrial carrier protein
  Pfam module annotation: Pfam domain module=Mito_carr::Mito_carr::Mito_ carr; Domain location=165-260::265-352::64-159
RWFPLTSCCLLCVPEKIPPCLRRFPLASVSFLLFFALLAAAAAASPSPHPAAMPGDHGSKVDISFAGRFTASAIAACFAEVCTIPLDTAKVRLQLQKNVDAAALPKYRGLLGTAATIAREEGAAALWKGIVPGLHRQCIYGGLRIGLYEPVKSLYVGQDHVGDVPLSKKIAAGFTTGAIAITIANPTDLVKVRLQAEGKLAPGMPRRYAGAMDAYAKIARQEGVAALWTGLGPNVARNGIINAAELASYDQVKQTILKLPGFKDDVVTHLFAGLGAGFFAVCVGSPVDVVKSRMMGDSAYKSTLDCFVKTLKNDGPLAFYKGFLPNFARLGSWNVIMFLTLEQVQKMFVRKPAS

SEQ ID NO: 107606 - protein, 329 aa, Setaria italica
  misc_feature (76)..(76): Xaa can be any naturally occurring amino acid
  Transcript Sequence Number=SeqID_41632
  Gene Ontology: Mol. function=metal ion binding; Cellular component =nucleus
  Homolog annotation: Hit_ID=B6TJ47; Match level="QueryCoverage=94%, HitCoverage=69%, E-value=1e-109, Identity=64%"; Hit description =Ankyrin repeat domain-containing protein 28
  Pfam annotation: Domain name=Ank; Domain location=129-161; Score =37.8; E_value=4.3e-08; Accession=PF00023.22; Description=Ankyrin repeat
  Pfam annotation: Domain name=Ank; Domain location=42-72; Score=21.7; E_value=0.003; Accession=PF00023.22; Description=Ankyrin repeat
  Pfam annotation: Domain name=Ank; Domain location=8-40; Score=33.7; E_ value=7.5e-07; Accession=PF00023.22; Description=Ankyrin repeat
  Pfam annotation: Domain name=Ank; Domain location=92-124; Score=27.3; E_value=6.5e-05; Accession=PF00023.22; Description=Ankyrin repeat
  Pfam annotation: Domain name=zf-C3HC4; Domain location=253-301; Score= 11.3; E_value=0.0053; Accession=PF00097.17; Description=Zinc finger, C3HC4 type (RING finger)
  Pfam module annotation: Pfam domain module=Ank::Ank::Ank::Ank::zf -C3HC4; Domain location=129-161::42-72::8-40::92-124::253-301
HPDVVNRHKQTALMLAAMHGKTDCVRRLLDAGANIVMFDSSHGRTCLHYAAYYGHADCLRTILSAAKSAPVSESCXWGCRGFARFVNVRDDTGATPLHLAARQGWRRCVHVLLENGAIVSASSGAFGFPGSTPLHLAARGGNLDCVRQLLSWGADRLQRDSVGRIPYEVAVKRGHVACAALLNPSSAEPLVWPSALKFISELEPNAKSLLEAALMEANRERERRILKGTKNALPSPSRSDDAAIAEASDAEVCSICFEQACSIEVRECGHQMCAACTLALCCHAKPNPATQSQLLPTCPFCRGGIAALVVATRAPAGGDDEEGSRLESP

SEQ ID NO: 107607 - protein, 121 aa, Setaria italica
  Transcript Sequence Number=SeqID_41633
  Gene Ontology: Mol. function=protein binding; Cellular component =integral to membrane; Biological process=mRNA processing
  Homolog annotation: Hit_ID=B6SQ19; Match level="QueryCoverage=75%, HitCoverage=40%, E-value=5e-43, Identity=85%"; Hit description =Cleavage and polyadenylation specificity factor 5
SSKGSNANSEAGCPILDESEGDAEDEDEDDWQVGECIGMWWRSEFEAIPFPYMPPNFRMPKECIKLFLIRLPMSRQFIVPRNMKLLAVPLSQIHNNAQVYGPVISGIPNLLSKFALNVISD

SEQ ID NO: 107608 - protein, 102 aa, Setaria italica
  Transcript Sequence Number=SeqID_41634
MVRGACSCRGDPAGEQSARGRAETAAVEMAACSLRGGLIRGSFTSWCCDRHVRISFRWVTMIARLKNLLGSTYGMQQCLCDTILSDTHENKVVEKDTYQVVS

SEQ ID NO: 107609 - protein, 75 aa, Setaria italica
  Transcript Sequence Number=SeqID_41635
NLLIPSLSSLPWHNFLLASAVCNYCCLISGFSCDGCIFNTSSLYSSFYMWFVLITNRDEFCCDLSTVDWIFFVPV

SEQ ID NO: 107610 - protein, 108 aa, Setaria italica
  Transcript Sequence Number=SeqID_41636
  Gene Ontology: Mol. function=two-component response regulator activity; Cellular component=integral to membrane; Biological process=two-component signal transduction system (phosphorelay)
  Homolog annotation: Hit_ID=Q2SFC9; Match level="QueryCoverage=73%, HitCoverage=12%, E-value=7e-14, Identity=51%"; Hit description =Sensor protein
  Pfam annotation: Domain name=Response_reg; Domain location=2-107; Score=50.3; E_value=7.2e-12; Accession=PF00072.16; Description =Response regulator receiver domain
TNNALSAQVLARALMKAVGGVELDEAGNGAEAVRRVREGGAYDLILADRQMPVMDGHEATRQIRALGVTTPIVGLSSDSLAADVDAFIKAGADDFTPKVSQLAVHVAL

SEQ ID NO: 107611 - protein, 124 aa, Setaria italica
  Transcript Sequence Number=SeqID_41637
MDQYLQYRHDLPGFIHTYGMRTAARRYSQWRQEVPMGQYLRYRHDIPWFSDAYGASMTTRSYGQWRQVYTQMGSVVYQWDLPAFGRQIHNSPPLHNGWSIPLSELQPIGSPQMSSRSMDFDGSV

SEQ ID NO: 107612 - protein, 91 aa, Setaria italica
  Transcript Sequence Number=SeqID_41638
  Subcellular localization annotation: CTP_CleavageSite=64; ConfidenceScore=5.07e-01
SDLYAHPEKPLLSSYTFLSSCKTLFFFIVHSARNLGLPVAYSACFARIGFCAHLSISVYSVFPPFSALWHWSNLLSLPQLSCSYHYIHALG

SEQ ID NO: 107613 - protein, 156 aa, Setaria italica
  Transcript Sequence Number=SeqID_41639
  Subcellular localization annotation: CTP_CleavageSite=33; ConfidenceScore=5.28e-01
LAFCADGHTGAHLLSLLSVKATCFYQLYVKKMQSTTVGSETITFASCPVPLFPSSKFQESFANTMNQQQRDVMQVKPSFSVRDTSSSIFLSNFIVISLYSSSNCVSNTICLVNKNGTRVLALPKFREHLIHCGMALKAIRCVQNLMLAPNAGIYSG

SEQ ID NO: 107614 - protein, 65 aa, Setaria italica
  Transcript Sequence Number=SeqID_41640
ISICIHSKIIDIRKSSSGVKHTHKEHFYAKLYCQWQVIINALKNFKDHNCQGKCEGMEQIPKSNK

SEQ ID NO: 107615 - protein, 78 aa, Setaria italica
  Transcript Sequence Number=SeqID_41641
  Subcellular localization annotation: CTP_CleavageSite=46; ConfidenceScore=5.09e-01
LQVDHVPSISSNWMSDVPYKPSHTTVALPWFRLHLIRLKCGFSGVPAHGLSTPPLLLVFLRQGVYVFSYSPIQALQAR

SEQ ID NO: 107616 - protein, 144 aa, Setaria italica
  misc_feature (17)..(17): Xaa can be any naturally occurring amino acid
  misc_feature (50)..(50): Xaa can be any naturally occurring amino acid
  misc_feature (65)..(65): Xaa can be any naturally occurring amino acid
  misc_feature (115)..(115): Xaa can be any naturally occurring amino acid
  Transcript Sequence Number=SeqID_41642
  Gene Ontology: Mol. function=peptidase activity; Cellular component =nucleus; Biological process=proteolysis
  Homolog annotation: Hit_ID=B9SSN4; Match level="QueryCoverage=99%, HitCoverage=6%, E-value=6e-23, Identity=40%"; Hit description =Separase, putative
PPKVSEYIEKHITEFFXKLPDVPVVCVSMLGGDYANVIAKFVLDPSYFPXSWMLLSRFDSTGEPXSMLLPVDAISGSQSEDSSIKDLGNPIGVLDKKWQCPWGYAITDYVAPTFXKILDENFVSLSSATLTINDVHADHVRWWS

SEQ ID NO: 107617 - protein, 149 aa, Setaria italica
  Transcript Sequence Number=SeqID_41643
MRLARIAMAMEDGGGASSSVAQPAAMGMGYERHFQPPPFWSTPTPYLFIGFAVVMALIAVALAVLLCTRRKEDEGGRGAEGGQVMAVRVLAPLDREDAAVPRVLVVMAGHSAPSFLASAAPFASFAAAAAGDDAKPQQHVGGKDGADAV

SEQ ID NO: 107618 - protein, 161 aa, Setaria italica
  misc_feature (153)..(153): Xaa can be any naturally occurring amino acid
  Transcript Sequence Number=SeqID_41644
  Gene Ontology: Mol. function=sequence-specific DNA binding; Cellular component=nucleus; Biological process=regulation of transcription, DNA-dependent
  Homolog annotation: Hit_ID=Q53P56; Match level="QueryCoverage=23%, HitCoverage=8%, E-value=2e-10, Identity=73%"; Hit description=GATA zinc finger family protein
  Pfam annotation: Domain name=GATA; Domain location=124-159; Score =63.2; E_value=9.7e-16; Accession=PF00320.19; Description=GATA zinc finger
  Subcellular localization annotation: CTP_CleavageSite=75; ConfidenceScore=5.72e-01
HVVSDDAPPLRAHAPPSARSLPASRTSSGSLTPTTSETSSPAPVWRPLAWPVPKKRRRPPVKCRKRPWSLDFPLHAVPVAPPDNPGDSNGNGDARNSFDNAGGGGIRRRRPVPRQRNRQAQRVCSHCHSPDTPQWRAGPDGPGTLCNACGIRXRGEQLLPE

SEQ ID NO: 107619 - protein, 83 aa, Setaria italica
  Transcript Sequence Number=SeqID_41645
FHSENKREDILQKCKQEQGSQLAWDASPQYLFKEQRGMFIFFYSLVTSSLEPTPTWLHPFHLPISSSSPAHKSISVFPPRGSL

SEQ ID NO: 107620 - protein, 112 aa, Setaria italica
  Transcript Sequence Number=SeqID_41646
  Gene Ontology: Mol. function=glutathione transferase activity; Biological process=response to stress
  Homolog annotation: Hit_ID=Q8RW01; Match level="QueryCoverage=99%, HitCoverage=47%, E-value=6e-51, Identity=87%"; Hit description =Glutathione transferase
  Pfam annotation: Domain name=GST_N; Domain location=5-78; Score=62.3; E_value=1.8e-15; Accession=PF02798.12; Description=Glutathione S -transferase, N-terminal domain
MAGGGDLKVLGVWTSPFVIRVRIVLNLKGLAYEYVEEDLGNKSALLLGSNPVNKSVPVLLHGGRPVNESQVIIQYIDEVWAGAGPAVLPSDPYERAVARFWAAYVDDKVGSG

SEQ ID NO: 107621 - protein, 90 aa, Setaria italica
  Transcript Sequence Number=SeqID_41647
SYVVISYLACVAIWDLCMCDSLRVENLRLIYVSMCVIVKFETYLAIKLLLYSLDMNSLTRLCSIPGGYPDTWLAQAWVRIFTRYLWRVRV

SEQ ID NO: 107622 - protein, 139 aa, Setaria italica
  Transcript Sequence Number=SeqID_41648
  Gene Ontology: Mol. function=hydrolase activity, acting on acid anhydrides, catalyzing transmembrane movement of substances; Cellular component=integral to membrane; Biological process=calcium ion transport
  Homolog annotation: Hit_ID=Q7XEK4; Match level="QueryCoverage=100%, HitCoverage=13%, E-value=6e-53, Identity=73%"; Hit description =Calcium-transporting ATPase 13, plasma membrane-type, putative, expressed
  Pfam annotation: Domain name=Cation_ATPase_C; Domain location=10-139; Score=82.3; E_value=1.8e-21; Accession=PF00689.13; Description=Cation transporting ATPase, C-terminus
NLVSALTSGKMPLTTVQLLWVNLIMDTMGALALATDKPTKALMRHPPIGRTAPLISNAMWRNLAAQAAFQVAVLLALQYRGRDVFGVGEKANGTMIFNAFVLCQVFNEFNAREIEKKNVFAGVLRNRMFLGIIAVTLAM

SEQ ID NO: 107623 - protein, 86 aa, Setaria italica
  Transcript Sequence Number=SeqID_41649
  Gene Ontology: Mol. function=hydrolase activity; Cellular component =mitochondrion
  Homolog annotation: Hit_ID=B6T551; Match level="QueryCoverage=100%, HitCoverage=50%, E-value=5e-37, Identity=87%"; Hit description=Nudix hydrolase 13
VKLLGFYDFKSKQPEGMCRAAVFALHVKEELASWPEQSTRQRSWLTVPEAAERSRHPWMQEALVTGFSAWLENWSNGGGCVDRSER

SEQ ID NO: 107624 - protein, 148 aa, Setaria italica
  Transcript Sequence Number=SeqID_41650
VFEDITKPQNEIKQGTLMSIFTDNTNTFVCRKTNKSKVLQIRQYIFVFILTPNISIEDHQSQCTSLLHKEQLGLPNLRHGLLHTFSHHNHFGWASQMASQTTSQVQSLCLEHFFYSRPDVDCAVASESPDYWKLVVKIEVSPAFASLI

SEQ ID NO: 107625 - protein, 71 aa, Setaria italica
  Transcript Sequence Number=SeqID_41651
  Subcellular localization annotation: CTP_CleavageSite=65; ConfidenceScore=5.31e-01
MAAKIFAFFALLALSASVASAYISPVSALAATASPLYLPQATTTLLPNVFNQLALANPIHRCLPAATTIPT

SEQ ID NO: 107626 - protein, 281 aa, Setaria italica
  Transcript Sequence Number=SeqID_41652
  Gene Ontology: Mol. function=protein phosphatase type 2A regulator activity; Cellular component=protein phosphatase type 2A complex; Biological process=signal transduction
  Homolog annotation: Hit_ID=Q7XQE7; Match level="QueryCoverage=98%, HitCoverage=36%, E-value=1e-97, Identity=62%"; Hit description =OSJNBa0033G16.13 protein
  Pfam annotation: Domain name=WD40; Domain location=109-147; Score =38.8; E_value=2.1e-08; Accession=PF00400.24; Description=WD domain, G-beta repeat
  Pfam annotation: Domain name=WD40; Domain location=198-278; Score =17.6; E_value=0.052; Accession=PF00400.24; Description=WD domain, G -beta repeat
  Pfam annotation: Domain name=WD40; Domain location=68-105; Score =42.9; E_value=1.3e-09; Accession=PF00400.24; Description=WD domain, G-beta repeat
  Pfam module annotation: Pfam domain module=WD40::WD40::WD40; Domain location=109-147::198-278::68-105
SGLYLASVGEDCIARIWMIQEVESSPDLYGREAPVEYMDRNKGLKMKVAKGQRRTLAIIPKKVFNIAETPLHEFHGHTSDILDMAWSKSDFLLTSSKDKTVRMWKAGCDGCLAVFKHRDYVTCVQFNPVDERYFVSGSIDGKVRVWDVSEKRVVDWADTRRIITAVSYQPDARVFVQAPGRCRFYDQSGENMEVEKELKVTKKKSARRQITSLQFSRGDPARIMIASAGSKIRVSEGAGISRKFEGRRGSKVLVPPSLTSDGRYLVSAGADSNVYIWNSTS

SEQ ID NO: 107627 - protein, 193 aa, Setaria italica
  Transcript Sequence Number=SeqID_41653
  Gene Ontology: Mol. function=transcription repressor activity; Cellular component=cytoplasm; Biological process=regulation of nitrogen utilization
  Homolog annotation: Hit_ID=B5M699; Match level="QueryCoverage=98%, HitCoverage=57%, E-value=2e-88, Identity=81%"; Hit description =Isoflavone reductase
  Pfam annotation: Domain name=NmrA; Domain location=1-184; Score =181.7; E_value=2e-51; Accession=PF05368.5; Description=NmrA-like family
VVVHVHAVEPAKSIFAVKARIRRAIEAEGIPYTYVSSNFFAGRFLPCLGQVGVSVLPTDKVLILGDGNVKAIFAAEEDVGTYAIKAVDDLRTLNKVLYLRPSSNILSHDELVSLWEKKTGKTFERVYIPEDEVLKKIQESPVPLNIKMSISHSVWVKGDHTNFEIDPSFGVEATELYSDVKYTTVDEYLNKLL

SEQ ID NO: 107628 - protein, 74 aa, Setaria italica
  Transcript Sequence Number=SeqID_41654
  Gene Ontology: Biological process=cell volume homeostasis
  Homolog annotation: Hit_ID=B4FU22; Match level="QueryCoverage=100%, HitCoverage=33%, E-value=3e-11, Identity=48%"; Hit description =Methylosome subunit pICln
MVLGLYPFADVAADGAPRLDATAEEELVRVERAAALALGPRAPEPPGTLFLTTRRVIWIGEGGKGYAVDFIAVS

SEQ ID NO: 107629 - protein, 190 aa, Setaria italica
  misc_feature (35)..(35): Xaa can be any naturally occurring amino acid
  Transcript Sequence Number=SeqID_41655
  Gene Ontology: Mol. function=nucleotide binding; Biological process =defense response
  Homolog annotation: Hit_ID=Q9SED7; Match level="QueryCoverage=88%, HitCoverage=14%, E-value=5e-35, Identity=50%"; Hit description=Vrga1
SLRHLGVDLKYIAMIRGIGSLVKLQGSVEFHVKNXIGHTLEELKDMKDLHGLLHIKNLENVTCKEEACNAQLCDKRFLKILKLEWSSAGSTFGPRTSMDAKVLQCLGPNENLEELHIKRYNGESSPSWLDVNISEVKILPQLKSLRLTNCRRWKLLPPLGQLPFLRVLHNPFKGTVIGGLPWFNLGKKFG

SEQ ID NO: 107630 - protein, 94 aa, Setaria italica
  Transcript Sequence Number=SeqID_41656
  Gene Ontology: Mol. function=protein serine/threonine kinase activity; Cellular component=integral to membrane; Biological process=protein amino acid phosphorylation
  Homolog annotation: Hit_ID=A2Q515; Match level="QueryCoverage=95%, HitCoverage=9%, E-value=3e-22, Identity=58%"; Hit description =Protein kinase
VVGMGASGKVYKAVLGRGGEVVAVKKLWGGGGGKAADGAAKDSFDAEVATLGRIRHKNIVRLWCCFRGGDDCRLLVYEYMPGGSLGDLLQEAAA

SEQ ID NO: 107631 - protein, 94 aa, Setaria italica
  Transcript Sequence Number=SeqID_41657
AIEASNERIEQQMEFEKEMEWKMDRANAMVMEQEQTEEDEEEQETTRSRSAEDGSQSDANTGLFLRAAVRPFTYRNLVKEIVLLRHHIIDGEIV

SEQ ID NO: 107632 - protein, 335 aa, Setaria italica
  Transcript Sequence Number=SeqID_41658
  Gene Ontology: Cellular component=integral to membrane
  Homolog annotation: Hit_ID=B9T6L8; Match level="QueryCoverage=100%, HitCoverage=100%, E-value=1e-132, Identity=68%"; Hit description =Organic anion transporter, putative
  Pfam annotation: Domain name=TPT; Domain location=156-299; Score =157.4; E_value=4.1e-44; Accession=PF03151.8; Description=Triose -phosphate Transporter family
  Pfam annotation: Domain name=UAA; Domain location=22-305; Score= -151.0; E_value=0.0083; Accession=PF08449.3; Description=UAA transporter family
  Pfam module annotation: Pfam domain module=TPT::UAA; Domain location =156-299::22-305
MAPGSKAERKAALDAGAWMFNVVTSVGIIMVNKALMATHGFSFATTLTGLHFATTTLMTLVMKWLGYIQPSYLPLPELVKFVFFANLSIVGMNVSLMWNSVGFYQIAKLCIIPVLCFLEILLDKVRYSRDTKLSIVLVLVGVAVCTVTDVSVNSQGLLAAAIAVWSTALQQHYVHHLQRKYSLGSFNLLGHTAPGQAASLLVLGPFVDFWLTNKRVDTFNYTSIVTFFIVLSCIIAVGTNLSQFICIGRFTAVSFQVLGHMKTILVLTLGFLFFGKEGLNFHVALGMLLAVIGMIWYGNASSKPGGKERQVYSTPSEKTQKHGILSSQSELDQKV

SEQ ID NO: 107633 - protein, 41 aa, Setaria italica
  Transcript Sequence Number=SeqID_41659
LLLFCHFCRLIVNCVLFDFDTSYMLMDTQELYVDGYLRALC

SEQ ID NO: 107634 - protein, 120 aa, Setaria italica
  Transcript Sequence Number=SeqID_41660
  Homolog annotation: Hit_ID=Q00RL3; Match level="QueryCoverage=92%, HitCoverage=16%, E-value=2e-27, Identity=63%"; Hit description =OSIGBa0117N13.4 protein
SYTTTNKKSAAPEMLLALMDEAYTGSAIEDSSGISGSDDSNPLDLADPMFLDLLKDENDGIAAKHWISPTISSTLQAAVNSTQSDRLKQSLEMAPHFLSLYFATALWDVNDCRFPIFLKL

SEQ ID NO: 107635 - protein, 177 aa, Setaria italica
  misc_feature (74)..(74): Xaa can be any naturally occurring amino acid
  Transcript Sequence Number=SeqID_41661
  Homolog annotation: Hit_ID=Q00RL3; Match level="QueryCoverage=84%, HitCoverage=37%, E-value=3e-34, Identity=85%"; Hit description =OSIGBa0117N13.4 protein
VRKRLSDFILAAFQRSPDIIAILKKPITDRLELALHLCWAIGEHGAGRDKSLSSTRELFANLELFVFVYLVTFXLGRVWQRACDYLGLMNEPAICLSVLGPSTAQGNGPGIVDWSEGGTKMLAHVPFYLLAEQKGPPFHDFSFADLLPGQNEEKLPSGIYHEGHGSGTDFASRIPCL

SEQ ID NO: 107636 - protein, 155 aa, Setaria italica
  misc_feature (17)..(17): Xaa can be any naturally occurring amino acid
  misc_feature (95)..(95): Xaa can be any naturally occurring amino acid
  Transcript Sequence Number=SeqID_41662
  Homolog annotation: Hit_ID=Q00RL3; Match level="QueryCoverage=88%, HitCoverage=18%, E-value=3e-41, Identity=67%"; Hit description =OSIGBa0117N13.4 protein
QSDRLKQSLEMAPSLSXFYIFATALWDVNDSLLCALIPVVMSRYAAMFPDKVFSFEVRKRLSDFILAAFQRSSDIIAMLRILLTISHDNFQPFCXKPITDRLGEAYDDPAKTELALHLCWAIGEHGAGGINRTDVARELFENLELLLYEFNAVIR

SEQ ID NO: 107637 - protein, 92 aa, Setaria italica
  Transcript Sequence Number=SeqID_41663
  Homolog annotation: Hit_ID=Q00RL3; Match level="QueryCoverage=52%, HitCoverage=8%, E-value=1e-12, Identity=84%"; Hit description =OSIGBa0117N13.4 protein
  Subcellular localization annotation: CTP_CleavageSite=53; ConfidenceScore=5.13e-01
LDIAKIGGLLLIFISFSSVFNFQPCIVGLCSVITVDFNSFVPLSLLRHPVLVVALEKVERSSGTLIGSSIATIQKSAAPEMLLALRVTIIRT

SEQ ID NO: 107638 - protein, 87 aa, Setaria italica
  Transcript Sequence Number=SeqID_41664
  Homolog annotation: Hit_ID=Q00RL3; Match level="QueryCoverage=70%, HitCoverage=10%, E-value=1e-27, Identity=95%"; Hit description =OSIGBa0117N13.4 protein
ILQFFLNFGEAVLHDADGSLKTFFRSCLSREFADPIVAERTLEFLIANKTKILGSFPTLIPLVHTREMITYFEIVNNAAHVVAKHCF

SEQ ID NO: 107639 - protein, 196 aa, Setaria italica
  misc_feature (189)..(189): Xaa can be any naturally occurring amino acid
  Transcript Sequence Number=SeqID_41665
  Homolog annotation: Hit_ID=Q00RL3; Match level="QueryCoverage=100%, HitCoverage=33%, E-value=1e-75, Identity=72%"; Hit description =OSIGBa0117N13.4 protein
VRKRLSDFILAAFQRSSDIIAMLKNFKPITDRLGEAYDDPAKTELALHLCWAIGEHGAGGINRKDVARELFENLELLLYENLATSRLGLSQEPGFDSMGASSRKSSQARLLCFVVTAIAKLATCHSELLPRARVSLAKVARTRTSDRRVWQRACDYLGLMNEPAICLSVLGPSTAQGNGPGIVDWSEGXTKMLAHV

SEQ ID NO: 107640 - protein, 89 aa, Setaria italica
  Transcript Sequence Number=SeqID_41666
QKQARVPPPLAPRLFNLVSLPTQSWINQDLESRRSLALRSHELENIALTMEHHRHKRYDRSSLLSRPGGTFIAQGYAYSVIMSCSIGIQ

SEQ ID NO: 107641 - protein, 273 aa, Setaria italica
  Transcript Sequence Number=SeqID_41667
  Gene Ontology: Mol. function=substrate-specific transmembrane transporter activity; Cellular component=integral to membrane; Biological process=transmembrane transport
  Homolog annotation: Hit_ID=Q6H454; Match level="QueryCoverage=97%, HitCoverage=62%, E-value=1e-140, Identity=92%"; Hit description =Putative hexose transporter
  Pfam annotation: Domain name=Sugar_tr; Domain location=1-272; Score= -44.4; E_value=3.3e-07; Accession=PF00083.16; Description=Sugar (and other) transporter
MNGQIEDIARELGFQGNPFLQGLVVSIFIVGAFFGSLGSSALVDKFGCKRTLQIDSIPLIIGALLSAQADSLDEMLLGRFLVGIGIGVNTVLVPLYISEVAPTKYRGFLGTLCQIGTCLGIIAALSLGIPSESDPHWWRTMLYAACVPGFLIGAGMQFAVESPRWLAKVGRFDDARKVVESLWEPSEVDKSMEEIKAVVANDDSQSSWSELLVEPHNRVALIGGSLFFLQQFAGINGVLYFSSLTFRDVGITSGALASLYVGITNFGLRKGEQ

SEQ ID NO: 107642 - protein, 95 aa, Setaria italica
  misc_feature (64)..(64): Xaa can be any naturally occurring amino acid
  misc_feature (91)..(91): Xaa can be any naturally occurring amino acid
  Transcript Sequence Number=SeqID_41668
  Homolog annotation: Hit_ID=B3VTC5; Match level="QueryCoverage=84%, HitCoverage=8%, E-value=6e-12, Identity=53%"; Hit description =Cf2/Cf5-like disease resistance protein
MPHLWTSLTTNFLILDLSNNLLTRGLPDCDREGLKQQNQSRSNSSRVGFGSAHSYSLKISALLXKHNCLSGGFPYLETCQIRRYLDLSQNXFSEV

SEQ ID NO: 107643 - protein, 83 aa, Setaria italica
  Transcript Sequence Number=SeqID_41669
KGKTRSKGNNGYSTRSEQVAQEESRYPKGRSNFSEPIARSRRKYQTNPPDRIYAGSVGGDRSYVPLARTWGREGGEAEVQPTS

SEQ ID NO: 107644 - protein, 139 aa, Setaria italica
  Transcript Sequence Number=SeqID_41670
  Gene Ontology: Mol. function=oxidoreductase activity; Biological process=oxidation reduction
  Homolog annotation: Hit_ID=B6T4W5; Match level="QueryCoverage=96%, HitCoverage=39%, E-value=3e-53, Identity=73%"; Hit description =Hyoscyamine 6-dioxygenase
  Pfam annotation: Domain name=2OG-FeII_Oxy; Domain location=1-83; Score=79.2; E_value=1.4e-20; Accession=PF03171.12; Description=2OG -Fe(II) oxygenase superfamily
MTLGLPPHCDRNLITLVHTGPVHGLEVLYNGDWIKVEPMPNAFVVNFGLQLEVVTNGILKSVEHRVMTNSMLARTSRAVFIQPKEDCLVGPADEFLSEDNPPSYRTVTFGDFRRTHSIVKLKSSLNLTTNLKNIQMKDI

SEQ ID NO: 107645 - protein, 184 aa, Setaria italica
  misc_feature (79)..(79): Xaa can be any naturally occurring amino acid
  Transcript Sequence Number=SeqID_41671
  Gene Ontology: Mol. function=oxidoreductase activity; Biological process=oxidation reduction
  Homolog annotation: Hit_ID=B6T4W5; Match level="QueryCoverage=98%, HitCoverage=42%, E-value=3e-52, Identity=60%"; Hit description =Hyoscyamine 6-dioxygenase
MDKMLHSAPIHTKPTRNCFVFPADKRPPATAAVVSLPIIDLSRSRDEVRRAILDAGKEIGFFQARPSIKLAVLSLKLSXPMPTQICITVIKLVDCRGDCMLQVVNHGVSEQAMQDMEAVCQEFFQLPAAEKAELYSEDTQKATRIYSSTMFETGGERYWRDCLRLACSFPVADSPMAWPDKDPK

SEQ ID NO: 107646 - protein, 168 aa, Setaria italica
  Transcript Sequence Number=SeqID_41672
  Gene Ontology: Mol. function=oxidoreductase activity; Biological process=oxidation reduction
  Homolog annotation: Hit_ID=B6T4W5; Match level="QueryCoverage=82%, HitCoverage=40%, E-value=1e-55, Identity=74%"; Hit description =Hyoscyamine 6-dioxygenase
  Pfam annotation: Domain name=2OG-FeII_Oxy; Domain location=59-156; Score=62.0; E_value=2.3e-15; Accession=PF03171.12; Description=2OG -Fe(II) oxygenase superfamily
GIKNNGSNELLFRSCPALYREVVEKFTVQTRGMGMEILRLLCEGLGLRHDYLEGDISGGDVVLHVNHYPPCPDPSTTLGLPPHCDRNLLTLLLPSMVPGLEVAYYGDWIKVQPVPNAFVVNFGCQLEVIHSPSLLLVAFKLFNHSVLWVSTLFTDNEVYWFWVSLSNV

SEQ ID NO: 107647 - protein, 339 aa, Setaria italica
  Transcript Sequence Number=SeqID_41673
  Gene Ontology: Mol. function=oxidoreductase activity; Biological process=oxidation reduction
  Homolog annotation: Hit_ID=B6T4W5; Match level="QueryCoverage=99%, HitCoverage=99%, E-value=1e-173, Identity=86%"; Hit description =Hyoscyamine 6-dioxygenase
  Pfam annotation: Domain name=2OG-FeII_Oxy; Domain location=185-284; Score=131.9; E_value=2e-36; Accession=PF03171.12; Description=2OG -Fe(II) oxygenase superfamily
MDKMLHSAPIHTNLPDCFVFPADKRPPATAAVVSLPIIDLSRSRDEVRRAILDAGKEIGFFQVVNHGVSEQAMQDMEAVCQEFFQLPAAEKAELYSEDTQKATRIYSSTMFETGGERYWRDCLRLACSFPVADSPMAWPDKPQRLREVVEKFTVQTRGMGMEILRLLCEGLGLRHDYLEGDISGGDVVLHVNHYPPCPDPSTTLGLPPHCDRNLLTLLLPSMVPGLEVAYYGDWIKVQPVPNAFVVNFGCQLEVVTNGLLKSIEHRVVTNLGVARTTVATFIMPTTDCLIGPAEEFLSEDNPPCYRTLTFGEFKRIYSVVKLGSSLNLTTNLKNVQKET

SEQ ID NO: 107648 - protein, 139 aa, Setaria italica
  Transcript Sequence Number=SeqID_41674
LPFAAAAAREAFMVSVGTMLYFSVIALIAQILKINHQREIREALIARAQRPLAGNIRRARRRQDPLIGPVTGSIYFVSCVFMVVGFLMLMLAPAKSCQKRAGYLVAEIGWFTHSVAFCFIICAAISGQWRSICAKLKND

SEQ ID NO: 107649 - protein, 52 aa, Setaria italica
  Transcript Sequence Number=SeqID_41675
  Gene Ontology: Mol. function=DNA binding; Cellular component=nucleus; Biological process=regulation of transcription
  Homolog annotation: Hit_ID=B4FMQ3; Match level="QueryCoverage=100%, HitCoverage=17%, E-value=2e-22, Identity=98%"; Hit description=MYB transcription factor TaMYB1
  Pfam annotation: Domain name=Myb_DNA-binding; Domain location=11-52; Score=39.6; E_value=1.2e-08; Accession=PF00249.23; Description=Myb -like DNA-binding domain
MGVGSECDRIKGPWSPEEDEALRRLVERHGARNWTAIGRGIPGRSGKSCRLR

SEQ ID NO: 107650 - protein, 67 aa, Setaria italica
  Transcript Sequence Number=SeqID_41676
  Gene Ontology: Mol. function=nucleic acid binding; Cellular component= nucleus; Biological process=cell redox homeostasis
  Homolog annotation: Hit_ID=B6U4V4; Match level="QueryCoverage=79%, HitCoverage=21%, E-value=4e-13, Identity=90%"; Hit description =Nucleic acid binding protein
QKESDAKDKEQQQAARALQQIEAKAKKSYQKDLENSQRNVDGDTSAAPGDGCVRFSCFYVSTMQYIL

SEQ ID NO: 107651 - protein, 246 aa, Setaria italica
  Transcript Sequence Number=SeqID_41677
  Gene Ontology: Mol. function=nucleic acid binding; Cellular component= nucleus; Biological process=cell redox homeostasis
  Homolog annotation: Hit_ID=B6U4V4; Match level="QueryCoverage=100%, HitCoverage=100%, E-value=1e-110, Identity=81%"; Hit description =Nucleic acid binding protein
  Pfam annotation: Domain name=zf-U1; Domain location=8-44; Score=34.1; E_value=5.7e-07; Accession=PF06220.4; Description=U1 zinc finger
MTEYWVSQGNKWCDFCKIFIANNPFSIRTHELGKRHKDNVTKRLSTMQKESDAKDKEQQQAARALQQIEAKAKKSYQKDLENSQRNVDGDTSAAPGDGWVFDSTSGYYYDKSTGLYYDSNSGFYYSDGLGKWVTQEEAYKSVQTSKTDVGQSSTSRTKAPPAAETAVPAIKGGPAPGRVVTKPLNPMRPTKGTPAPSAVAVNKRKREDGKPKVISKEEEAALKAREAARKRVEDREKPLMGLYRTY

SEQ ID NO: 107652 - protein, 64 aa, Setaria italica
  misc_feature (17)..(17): Xaa can be any naturally occurring amino acid
  misc_feature (53)..(53): Xaa can be any naturally occurring amino acid
  Transcript Sequence Number=SeqID_41678
  Gene Ontology: Mol. function=binding
  Homolog annotation: Hit_ID=B9SP95; Match level="QueryCoverage=95%, HitCoverage=6%, E-value=9e-10, Identity=55%"; Hit description =Microtubule-associated protein TORTIFOLIA1, putative
MTKSSAVTSKGKAAFEXLKHRLVQAVNKIADRDTYQIGLDELEKMADTLAPDXMIGPFLSCVIE

SEQ ID NO: 107653 - protein, 153 aa, Setaria italica
  Transcript Sequence Number=SeqID_41679
  Homolog annotation: Hit_ID=Q7Y194; Match level="QueryCoverage=45%, HitCoverage=16%, E-value=2e-27, Identity=83%"; Hit description =Membrane associated salt-inducible protein, putative
  Pfam annotation: Domain name=Peptidase_C12; Domain location=2-139; Score=-41.2; E_value=0.0018; Accession=PF01088.13; Description =Ubiquitin carboxyl-terminal hydrolase, family 1
FGFLFVFSKFVSYPAGFRPNRKYLEEVVRWQKMAFPSPYLNARRVESATPQARKRAVAVLHEILSLTMVKRLTSDKLDVFHNEYRLPCRLLLCLVKNHGIFYITNKGARSTVFLKEAYENSDLIDKCPLLKFHDQFASLIGRPCSNSDNPLPI

SEQ ID NO: 107654 - protein, 38 aa, Setaria italica
  Transcript Sequence Number=SeqID_41680
  Gene Ontology: Mol. function=transporter activity; Cellular component= membrane; Biological process=transport
  Homolog annotation: Hit_ID=B6TEJ2; Match level="QueryCoverage=86%, HitCoverage=6%, E-value=3e-11, Identity=96%"; Hit description =Permease I
WISVPYPFQWGAPTFDAGEAFAMMMTSFIVLVEVCLRY

SEQ ID NO: 107655 - protein, 58 aa, Setaria italica
  Transcript Sequence Number=SeqID_41681
  Gene Ontology: Mol. function=transporter activity; Cellular component= membrane; Biological process=transport
  Homolog annotation: Hit_ID=B6TEJ2; Match level="QueryCoverage=100%, HitCoverage=10%, E-value=7e-23, Identity=87%"; Hit description =Permease I
MATAPPPKADELQPHPPKEQLAGVSFCITSPPPWPEAIILGFQHFIVMLGTTVIIPSA

SEQ ID NO: 107656 - protein, 528 aa, Setaria italica
  Transcript Sequence Number=SeqID_41682
  Gene Ontology: Mol. function=transporter activity; Cellular component= membrane; Biological process=transport
  Homolog annotation: Hit_ID=B6TEJ2; Match level="QueryCoverage=100%, HitCoverage=100%, E-value=0.0, Identity=86%"; Hit description =Permease I
  Pfam annotation: Domain name=Xan_ur_permease; Domain location=35-442; Score=173.2; E_value=7.4e-49; Accession=PF00860.12; Description =Permease family
MATAPPPKADELQPHPPKEQLAGVSFCITSPPPWPEAIILGFQHFIVMLGTTVIIPSALVPQMGGGNEEKARVVQTILFVAGINTLFQTFFGTRLPVVMGGSYTFVAPTISIILAGRYSNEADPREKFLRTMRGTQGALIIASTIQIILGFSGLWRNVLKLSSPLSAVPLVSLVGFGLYELGFPGVAKCVEVGLPELLLLVVFSQYLPQVLHFGKDVFGRFGVLFTVPIVWLYAYILTIGGAYKNSPPKTQVHCRVDRSGLVGGAPWISVPYPFQWGAPTFDAGEAFAMMMTSFIVLVESTGAFIGASRYASATMIPPSIISRGIGWQGIGILLDSFFGTANGTSVSVENIGLLGLTRVGSRRVVQISAGFMIFFSVLGKFGALFASIPLPIFAGMYCLFFAYVGGVGLSFLQFCNLNSFRTKFIMGFAFFMGLSVPQYFNEYTAVAGYGPVHTGARWFNDMINVPFSSKPFVAGLVAYVLDNTLQVKDARKDRGYHWWDKFRSYKKDGRSTEFYSLPFNLNKFFPSV

SEQ ID NO: 107657 - protein, 164 aa, Setaria italica
  misc_feature (113)..(113): Xaa can be any naturally occurring amino acid
  Transcript Sequence Number=SeqID_41683
  Gene Ontology: Mol. function=binding
  Homolog annotation: Hit_ID=Q2QZN2; Match level="QueryCoverage=100%, HitCoverage=46%, E-value=4e-82, Identity=46%"; Hit description =Pentatricopeptide, putative
  Pfam annotation: Domain name=PPR; Domain location=123-157; Score=3.2; E_value=3.7; Accession=PF01535.12; Description=PPR repeat
  Pfam annotation: Domain name=PPR; Domain location=51-85; Score=41.6; E_value=3.2e-09; Accession=PF01535.12; Description=PPR repeat
  Pfam annotation: Domain name=PPR; Domain location=86-120; Score=18.1; E_value=0.037; Accession=PF01535.12; Description=PPR repeat
  Pfam module annotation: Pfam domain module=PPR::PPR::PPR; Domain location=123-157::51-85::86-120
EEGMQLHGLSVKCGLDSDSHVVNAAMDMYGKCGKMDDMLKMLPDPASRPTQCWNTLISGYAKYGYFKEAEDTFEQMVSMGQKPDYVTFVALLSACSHAGLVDKGINYYNSMAXSTFGVSPGIKHCVCIVDLLGRLGRFADAEKFIDEMPVLPNDLIWRSLLSSS

SEQ ID NO: 107658 - protein, 160 aa, Setaria italica
  misc_feature (112)..(112): Xaa can be any naturally occurring amino acid
  Transcript Sequence Number=SeqID_41684
  Subcellular localization annotation: CTP_CleavageSite=23; ConfidenceScore=5.36e-01
VIGSSLGQVAAKGLATPDSCVSDAAKVQSARRKRSRLVNKLCEATTWNTFCDVLLKHADGSMPVVDFEELYFSRYGATSKKLRFLKCWMKQVKQSYLNTLPSLHTEREKCLXQKDESEARLLVSEEDASAGRVNFSVDDADSNKVETPLNEADCNKVDIP

SEQ ID NO: 107659 - protein, 248 aa, Setaria italica
  Transcript Sequence Number=SeqID_41685
  Gene Ontology: Mol. function=protein binding; Cellular component =membrane; Biological process=protein transport
  Homolog annotation: Hit_ID=B6SUS9; Match level="QueryCoverage=100%, HitCoverage=100%, E-value=1e-106, Identity=78%"; Hit description =SNAP25 homologous protein SNAP29
  Pfam annotation: Domain name=SNARE; Domain location=188-248; Score =41.6; E_value=3.2e-09; Accession=PF05739.11; Description=SNARE domain
  Subcellular localization annotation: CTP_CleavageSite=2; ConfidenceScore=5.06e-01
MSVSMYKKQNSMGTPVHRTNPFDSDSDSEVPSKPSRAQSVPVKCTDQSVQELEDYAITKARETTHKVNDCVRAAEAIREDATQTLQTLHRQGEQIMRSHHLAADIEQDLTVSEKLLGSLGGLFSKAWRPKRNQQIKGPVSENSFSVRTANHMEQRWRLGIAPTQQNSPSSVQTAPATAMGKIQAEKEKQDDALSDLSNTLGQLKEMAVDMGTEIDRQNKALVPFSEDVDELNFRLKGANQRGRRLLGK

SEQ ID NO: 107660 - protein, 90 aa, Setaria italica
  Transcript Sequence Number=SeqID_41686
  Gene Ontology: Mol. function=protein binding; Cellular component =cellular_component; Biological process=cell cycle
  Homolog annotation: Hit_ID=B6T273; Match level="QueryCoverage=87%, HitCoverage=76%, E-value=4e-39, Identity=96%"; Hit description =Enhancer of rudimentary
  Pfam annotation: Domain name=ER; Domain location=2-90; Score=147.3; E_ value=4.7e-41; Accession=PF01133.9; Description=Enhancer of rudimentary
FICLLKVHELLNSINHALDGICGLYERKIRDINPMVPNITYDISDLYNFIDGLADISALVFDHSIQAFLPYDRQWIKQKLFQHLKKLSQR

SEQ ID NO: 107661 - protein, 99 aa, Setaria italica
  Transcript Sequence Number=SeqID_41687
  Subcellular localization annotation: CTP_CleavageSite=80; ConfidenceScore=5.27e-01
KSMRVRLEKGGPTCPPNPVQDSGLPKPFVESRHSQIPYNLFVALPSSLSFFSSMLFCFCMVHCYPNERIYSLRKTQTSTSCSLATDLKVTSSDTHHFYS

SEQ ID NO: 107662 - protein, 84 aa, Setaria italica
  Transcript Sequence Number=SeqID_41688
PCSELRGEEVCGISLVHARQNFQGISQLFGIFYHYVYETFGHQDRSQSGRHLPDHQSSRLKAALSKITQDSDQWTKPHNVSYSP

SEQ ID NO: 107663 - protein, 57 aa, Setaria italica
  Transcript Sequence Number=SeqID_41689
MCFQVLINGLQHIVSANVRPKLQTVDTFIKAYYLPETEYVHWARSHPVRTLRNFISH

SEQ ID NO: 107664 - protein, 789 aa, Setaria italica
  misc_feature (775)..(775): Xaa can be any naturally occurring amino acid
  Transcript Sequence Number=SeqID_41690
  Homolog annotation: Hit_ID=Q012F3; Match level="QueryCoverage=35%, HitCoverage=30%, E-value=2e-20, Identity=27%"; Hit description=[S] KOG2939 Uncharacterized conserved protein
  Pfam annotation: Domain name=DUF2450; Domain location=94-383; Score =510.7; E_value=1.9e-150; Accession=PF10475.1; Description=Protein of unknown function N-terminal
LVFLPLLLIQGGGMDLSRVGEKLLSSVRSARSLGLIPPIPAAPPPRPEVPERAAAAAAAARAIAGLPPHERINLPANSEDLVSIYGSNPQGEPVEELEEVFYEEEFDPINYILQSIPEEGGDATYFDKQSTLRLAQLDKIAERLSHHVMGHHEEMVKGMQLVMELEQDLKVANVICMNGRRHITSSKNELSRDLVVNVKSKKKQALLDVLPILTELRHALDMQMELETFVEKDNYFQAFQLLPEYLQILENYSGLSAVQEMGRGIEAWLARTIQKLDTHLLGVCQIFNEESYITVVDAYALMGDVSGMAEKMQSFFLQEVLSRTHYVLKEMLEEEVGNNTQKNRFTYSDLCVQVPEPKLRPCLLKTLESLFSLMCSYYAIMSFSPGDKNIESKGPHLADKNETSQNNDEALVDSGGGQSSAAVIQDGSAAERSDRASSSEVSNPDASTSGTDSPFYQLRTDATKLVAQTFQRGRRNLWQLATSRLSVLLSSSAVCSTSIYQFLKNYEDLAIFILAGEAFCGFEASEFRQKLKTVCLNYVVSFHRQNVYALKMVLEKESWTIMSAEASQIISLAGLTGDGAALCSPTSRSSKLPINSYHANSTTANPGKQKLGFASWLKIENPFSFRLENGSAESPKSNMLFDSSVSNNHGNGNNSSLDEENEDLLADFIDEDSQLPSRIPKAKIVKGNYSHWKDGDISSQTGSSLSLLRMMDKYARLMQKLEIVNVELFKGISQLFGIFYHYVYETFGHQDRSQSGRHLPDHQSSRLKAALSKIXQDSDQWTKPHNVHI

SEQ ID NO: 107665 - protein, 317 aa, Setaria italica
  Transcript Sequence Number=SeqID_41691
  Homolog annotation: Hit_ID=UPI000069EE40; Match level="QueryCoverage =93%, HitCoverage=59%, E-value=1e-30, Identity=32%"; Hit description =coiled-coil domain containing 132 isoform b
  Pfam annotation: Domain name=DUF2451; Domain location=85-314; Score =452.2; E_value=7.8e-133; Accession=PF10474.1; Description=Protein of unknown function C-terminus
DNLLIFYHYVYETFGHQDRSQSGRHLPDHQSSRLKAALSKITQDSDQWTKPHNVSYSPSSPLSMSSTFGQMDVMPTAPPSSMFTSYGLKERCAAAETVSLVARVLNRSKAHLHSVLSKNNTNAVEEFYRTLVDSVPDLTEHIHRMSARMLLHIDGYPDKIANAKWEVKELGIEHNGYVDLLLGEFKHYKTRLDHGGISKELQHLLMEYGIESIAEVLVEGLSRVKRCTDEGRALMSLDLQVLINGLQHIVSANVRPKLQTVDTFIKAYYLPETEYVHWARSHPEYSKSQVVGLVNLVATMKGWKRKTRLETVEKIEA

SEQ ID NO: 107666 - protein, 111 aa, Setaria italica
  misc_feature (23)..(23): Xaa can be any naturally occurring amino acid
  Transcript Sequence Number=SeqID_41692
SLSLPRFGCLSCSPLPSVIKARXTLIDEEIWLQSTAPVITPAEKKKKKKKKKKKKRSGGRPNLRSSEPSEGSSSLSQNEVAQMVNQFQCLTHQGSSGSTNLPHSRNFRQQS

SEQ ID NO: 107667 - protein, 72 aa, Setaria italica
  Transcript Sequence Number=SeqID_41693
SCGFYLPAVLLARVWDRCFSCCFIFTSNKIDSSHFVVFISLVSSLLSKTYSQVQDLCLPNENAISERVGSSV

SEQ ID NO: 107668 - protein, 78 aa, Setaria italica
  Transcript Sequence Number=SeqID_41694
  Subcellular localization annotation: CTP_CleavageSite=35; ConfidenceScore=5.36e-01
MEVVGGVSLRPSSAQAPARIGKLSPVDVGGRFVLRAAPRRQPARRALVVEARGRSWSERQMEQQRRMPQLPKIEDDGN

SEQ ID NO: 107669 - protein, 223 aa, Setaria italica
  Transcript Sequence Number=SeqID_41695
  Gene Ontology: Mol. function=serine-type carboxypeptidase activity; Cellular component=extracellular region; Biological process =proteolysis
  Homolog annotation: Hit_ID=Q7XKJ9; Match level="QueryCoverage=99%, HitCoverage=43%, E-value=1e-119, Identity=92%"; Hit description =OSJNBa0038O10.8 protein
  Pfam annotation: Domain name=Peptidase_S10; Domain location=1-223; Score=157.5; E_value=4.1e-44; Accession=PF00450.14; Description =Serine carboxypeptidase
KALFYWFFEAEREPEKKPLLLWLNGGPGCSSVAYGAAQELGPFLVRSYGANLTRNAYAWNKAVNLLFLEAPVGVGFSYTNRTADLRRLGDRVTAQDSYSFLLNWLDKFPEFKTRDFYIAGESYAGHYVPQLAELIYDGRKGASRERAINIKGFMIGNAVLNDATDQLGMVEYAWSHAIISDELYSAVRRECDSFKEEADGGRPGKGCSPALRAFLGAYDDIDS

SEQ ID NO: 107670 - protein, 332 aa, Setaria italica
  Transcript Sequence Number=SeqID_41696
  Gene Ontology: Mol. function=nucleic acid binding; Cellular component= nucleus; Biological process=regulation of transcription, DNA-dependent
  Homolog annotation: Hit_ID=B9H0U7; Match level="QueryCoverage=100%, HitCoverage=52%, E-value=1e-113, Identity=59%"; Hit description =Chromatin remodeling complex subunit (Fragment)
  Pfam annotation: Domain name=SNF2_N; Domain location=1-307; Score= -8.7; E_value=3.1e-08; Accession=PF00176.15; Description=SNF2 family N-terminal domain
NFLVKNLVGDKPGGCILAHAPGSGKTFMLISFIQSFLARYPSARPLVVLPKGILGTWKKEIQQWQVQDIPLYDFYSVKAEKRVDQLEVIKSWEDKMSILFLGYKQFSTIISDDGGSKAAAACRDRLLKVPNLLIMDEGHTPRNRETDVLESLNRVETPRKVVLSGTLFQNHVNEVFNILNLVRPKFLKMESSRPIVRRIMSQVVMSGRSSKGIADNAFTESVEETLLHDENFKRKAHIIRGLRELTKDVLHYYKGDILDELPGLVDFSVFLKLTPMQKEITQKKMGAYDKFKRSAVDSSLYVHPCLSEISEVNAEDRANTLTDKSIDIMIDS

SEQ ID NO: 107671 - protein, 139 aa, Setaria italica
  misc_feature (44)..(44): Xaa can be any naturally occurring amino acid
  misc_feature (76)..(76): Xaa can be any naturally occurring amino acid
  Transcript Sequence Number=SeqID_41697
  Gene Ontology: Mol. function=nucleic acid binding
  Homolog annotation: Hit_ID=B9SWF5; Match level="QueryCoverage=58%, HitCoverage=7%, E-value=2e-18, Identity=51%"; Hit description=ATP -dependent helicase, putative
RKRRTKKESDGLEEYWKDLFESTKASRRRTNCYGRSKDADEIDXGSVKLSEDSIVADIAIHPRQMRLHQLEDSTFXVKDFIGDKLGGCILAQAPGSGKTVMLMSSVQSFLARYPYARYRGVLLYGIIIWWKLVKLKLNF

SEQ ID NO: 107672 - protein, 741 aa, Setaria italica
  misc_feature (380)..(380): Xaa can be any naturally occurring amino acid
  misc_feature (472)..(472): Xaa can be any naturally occurring amino acid
  misc_feature (492)..(492): Xaa can be any naturally occurring amino acid
  Transcript Sequence Number=SeqID_41698
  Gene Ontology: Mol. function=nucleic acid binding; Cellular component= nucleus; Biological process=regulation of transcription, DNA-dependent
  Homolog annotation: Hit_ID=B9H0U7; Match level="QueryCoverage=62%, HitCoverage=99%, E-value=3e-88, Identity=53%"; Hit description =Chromatin remodeling complex subunit (Fragment)
  Pfam annotation: Domain name=Helicase_C; Domain location=586-664; Score=55.4; E_value=2.2e-13; Accession=PF00271.23; Description =Helicase conserved C-terminal domain
SLVFGSASKEWENIRQRKVQLINFLSSLESPSQNSAIAGKMAGSKLKNHSMEPTEQKGKPDIIILDSDDEDENNSGYNKLAPKTNKELTTSELASNVMKWVASNGMSQASETMHAEGDKNTQIVPYGQSAALVNQFPLQNSWQPSIQFERVVLQKRPEEQRMQDLVAANIAERRAETQVFLSLPTEKKRRRSDPSLHVREDASTAPRQRKRKSDTDPVGADLSSGLRQTDISSEPDLPIEEEEKPKNESDGLEEYWKDFALAVESTKLDAVDEAANEKEEDSGKMEDVDCIHDIRIHEDLGHVCRICGMIVRRAESIIDYQWKKASRRKTDCYGGHSKDVDEKDYGIVKLSEDFIVSDIAIHPRHARQMRLHQLEDSTFXVKDLIGDKLGGCILAQAPGSGKTVMLMSSVQSFLARYPYARYRGVLLYGILGKWKKEIQCWQVQDIPLHNFYSVKAEKRLEQLEVIKSYRLXVDFSVLLKLTTMQKETIQKXGAYDKFKRSAVDSSLYVHPCLSEISEVNAEDRANTLTDKSIDIMIDSINVRDGVKARFFMNILSLANSAGEKLLAFSQYILPMKFLERLLIKVKGWHVGKEIFMISGDTSQEDRELRVDQFNNSADAKVLFGSIRACGEGISLVGASRVVILDVHLNPSVTRQVIGRAFRPGQQKKVFIYRLVAADSAEEKHHETAFKKEVTPKLWFEWSEHCTTEDFKLSQVDIDDSGDELLLDTKAVHQDIKALYRR

SEQ ID NO: 107673 - protein, 435 aa, Setaria italica
  Transcript Sequence Number=SeqID_41699
  Gene Ontology: Mol. function=transporter activity; Cellular component= integral to membrane; Biological process=transport
  Homolog annotation: Hit_ID=B6SRZ4; Match level="QueryCoverage=100%, HitCoverage=87%, E-value=0.0, Identity=83%"; Hit description =Glycerol 3-phosphate permease
  Pfam annotation: Domain name=MFS_1; Domain location=7-375; Score =131.8; E_value=2.1e-36; Accession=PF07690.8; Description=Major Facilitator Superfamily
  Pfam annotation: Domain name=Sugar_tr; Domain location=4-420; Score= -153.0; E_value=0.0058; Accession=PF00083.16; Description=Sugar (and other) transporter
  Pfam module annotation: Pfam domain module=MFS_1::Sugar_tr; Domain location=7-375::4-420
FSHWGRLHASNSLNIGWLPFNTADGSALLGEIDVAFLAVYSVGMFFAGHIGDRMDLRIFLTIGMLGTAIFTTLFGAGYWLNVHSFYYFLVIQMISGLFQSIGWPSVVAVVGNWFGKSKRGLIMGIWNAHTSIGNIAGSLLAAFLLKFGWGWSFAIPSLIMAFVGLIVYIFLPVNPEVMEIDIDSGESNCVKDTVKEALLEPGQVKHKAVGFLEAWRIPGVAPFALCLFFSKLVAYTFLYWLPFYISHTRIGGEYLSDAMAGSLSTIFDVGGVLGGVLAGHISDRLNARAITAASFMYCAIPALFLYRTYGSMSIGWNICLMFITGMFVNGPYALITTAVSADLGTHSSLNGNSRALATVTAIIDGTGSVGAAIGPLLTGYISSKSWSAVFTMLMAAALLAGLLLTKLVCAELKGKVPSNASKDATDAQGTYSNEV

SEQ ID NO: 107674 - protein, 78 aa, Setaria italica
  misc_feature (74)..(74): Xaa can be any naturally occurring amino acid
  Transcript Sequence Number=SeqID_41700
YLESTGPKICIQECCKEYMNASNVLCCCTVTLRRTMVLWTSIPMTNLGLHNVIFEALESQQFSWSGKFPCILFXAIGT

SEQ ID NO: 107675 - protein, 82 aa, Setaria italica
  Transcript Sequence Number=SeqID_41701
  Subcellular localization annotation: CTP_CleavageSite=29; ConfidenceScore=5.31e-01
RAGPATGGPSPPRRRRGRAHRSGARGRPCCSGSAQREEESMGKIRSGFRSWRLPLRTKFPAFSSGRTSQEKLINSRERLVLM

SEQ ID NO: 107676 - protein, 70 aa, Setaria italica
  Transcript Sequence Number=SeqID_41702
LAFALKFKDINHTSISFCTFLSNMTLGVLDTESCAVNVPIFAGKVFPSIGENTSERSSGCIGTYQHNQHN

SEQ ID NO: 107677 - protein, 232 aa, Setaria italica
  misc_feature (177)..(177): Xaa can be any naturally occurring amino acid
  Transcript Sequence Number=SeqID_41703
  Gene Ontology: Mol. function=aspartyl esterase activity; Cellular component=cell wall; Biological process=cell wall modification
  Pfam annotation: Domain name=PMEI; Domain location=3-134; Score =102.1; E_value=1.9e-27; Accession=PF04043.7; Description=Plant invertasepectin methylesterase inhibitor
  Pfam annotation: Domain name=Pectinesterase; Domain location=186-232; Score=-262.0; E_value=0.1; Accession=PF01095.11; Description =Pectinesterase
  Pfam module annotation: Pfam domain module=PMEI::Pectinesterase; Domain location=3-134::186-232
ERALEATAGNATSPTDLAKVIFKVTSDRIEKAARESAVLNDLKNDPRTSGALRNCKELLDYAIDDLKTTFDRLGGFEMTNFKAAVDDLKTWLSSALTYQETCLDGFENTTTDAAAKMRRALNTSQELTENILALVDEFSETLASLGLPSFHRRLLAGNGGAPSWMTDDAKRRVLKAXPGSPDFKPDVTVAADGSGDFKTINAALAKVPTKSATAYVMYVKAGTYKEYVSVPR

SEQ ID NO: 107678 - protein, 134 aa, Setaria italica
  Transcript Sequence Number=SeqID_41704
  Gene Ontology: Mol. function=RNA binding; Cellular component =chloroplast
  Homolog annotation: Hit_ID=B6TPG8; Match level="QueryCoverage=77%, HitCoverage=34%, E-value=3e-50, Identity=89%"; Hit description=RNA -binding S4
SSAIAVAAAAARNSAMKGSVDRNAAEEVRNILDMAERASQLRDVFHTNFLTPPIIKEAMLAIEKLADIKAVAQGGYPQAERCRISVGHPDSMTSNPDVVAALSISGNFRLEPCSHGDFLTLRPISISGNFRLEP

SEQ ID NO: 107679 - protein, 69 aa, Setaria italica
  Transcript Sequence Number=SeqID_41705
  Gene Ontology: Mol. function=structural constituent of ribosome; Cellular component=intracellular; Biological process=translation
  Homolog annotation: Hit_ID=B6SQA2; Match level="QueryCoverage=56%, HitCoverage=26%, E-value=2e-12, Identity=89%"; Hit description=60S ribosomal protein L28
LCLTRHVSSCFDQVGIIDCHNGFCFLFVQVADNYYRPDLTKPALARLSAVYRSLQVAKSGVKKKNRQVN

SEQ ID NO: 107680 - protein, 305 aa, Setaria italica
  Transcript Sequence Number=SeqID_41706
  Gene Ontology: Mol. function=structural molecule activity; Cellular component=viral capsid; Biological process=intracellular protein transmembrane transport
  Homolog annotation: Hit_ID=Q2PYY1; Match level="QueryCoverage=99%, HitCoverage=99%, E-value=1e-138, Identity=80%"; Hit description =Protein transport SEC13-like protein
  Pfam annotation: Domain name=WD40; Domain location=1-39; Score=25.2; E_value=0.00027; Accession=PF00400.24; Description=WD domain, G-beta repeat
  Pfam annotation: Domain name=WD40; Domain location=140-195; Score =42.7; E_value=1.5e-09; Accession=PF00400.24; Description=WD domain, G-beta repeat
  Pfam annotation: Domain name=WD40; Domain location=203-245; Score =37.3; E_value=6.1e-08; Accession=PF00400.24; Description=WD domain, G-beta repeat
  Pfam annotation: Domain name=WD40; Domain location=252-290; Score =12.0; E_value=1.5; Accession=PF00400.24; Description=WD domain, G -beta repeat
  Pfam annotation: Domain name=WD40; Domain location=45-85; Score=45.1; E_value=2.8e-10; Accession=PF00400.24; Description=WD domain, G-beta repeat
  Pfam annotation: Domain name=WD40; Domain location=93-133; Score =30.9; E_value=5.1e-06; Accession=PF00400.24; Description=WD domain, G-beta repeat
  Pfam module annotation: Pfam domain module=WD40::WD40::WD40::WD40::WD4 0::WD40; Domain location=1-39::140-195::203-245::252-290::45-85::93 -133
MPPHKIETGHQDVVHDIAMDYYGKRLATASSDNTIKIIGVSGASHQQLATLSGHQGPVWQVAWAHPKFGSMLASCSYDGRVIIWKEGSKPDEWAQAHTFVEHKSSVNSIAWAPHELGLSLACGSSDGNISVFTARSDGGWDTTRIDQAHPVGVTSVSWAPSMAPGALISAGPSGQYEYVQKLASGGCDNTVKVWKLTNGSWRMDCFPALQMHKDWVRDVAWAPNLGLPKSTMASASQDGTVVIWTAAKEGEQWEGRVLYDFRTPVWRLSWSLTGNILAVSDGNNNVTLWKEAVDGEWQQVTTVEP

SEQ ID NO: 107681 - protein, 140 aa, Setaria italica
  misc_feature (87)..(87): Xaa can be any naturally occurring amino acid
  Transcript Sequence Number=SeqID_41707
  Gene Ontology: Mol. function=lyase activity
  Homolog annotation: Hit_ID=Q2QQE3; Match level="QueryCoverage=97%, HitCoverage=27%, E-value=2e-31, Identity=48%"; Hit description=F-box domain containing protein, expressed
  Pfam annotation: Domain name=FBD; Domain location=65-116; Score=34.4; E_value=4.5e-07; Accession=PF08387.2; Description=FBD
SNLLFGTTVIQNLHSDCFTTVASSVKILAICIFNLSLDMVIDLMRCFPCLEKLYIQSCLAKDKNLWRGKHRNLRRCLDIRLKTIVLXNYQGMMSQVNFATFFVLNAKMLEFMRFEVGADNDNEVFIAEQHRKLQLEKKGI

SEQ ID NO: 107682 - protein, 119 aa, Setaria italica
  Transcript Sequence Number=SeqID_41708
  Gene Ontology: Mol. function=transferase activity, transferring glycosyl groups; Cellular component=integral to membrane; Biological process=cell wall organization and biogenesis
  Homolog annotation: Hit_ID=B4YIV6; Match level="QueryCoverage=95%, HitCoverage=21%, E-value=2e-26, Identity=50%"; Hit description =Mannan synthase
CLVFWILFENVMSMHRSKAAVIGLLEASRANEWVVTDKLGSSKAAAAPPAIARRKKQPVRRREVHVLELVMGVCLLYCAIYDIVFFGQDHFYLYLLLQSAAAFIVGFGYVGASVPAAPS

SEQ ID NO: 107683 - protein, 155 aa, Setaria italica
  Transcript Sequence Number=SeqID_41709
  Gene Ontology: Mol. function=magnesium ion binding; Cellular component=chloroplast; Biological process=metabolic process
  Homolog annotation: Hit_ID=Q0JF02; Match level="QueryCoverage=78%, HitCoverage=15%, E-value=1e-38, Identity=61%"; Hit description=Syn -copalyl diphosphate synthase
  Pfam annotation: Domain name=Terpene_synth; Domain location=1-153; Score=61.2; E_value=4e-15; Accession=PF01397.13; Description=Terpene synthase, N-terminal domain
LAKIHNRKAAHDDSITTPFLYPVEIYERLWAIDRLERLGISSYFRCEIDDYLTYVYRHWTEEGLGYTRDCAVKDIDDTAMAFRLLRLHGYHVSPCVFKRFEKEDGEFVVYPGQSNQSVSAMYNMYRAADQAAFPGDDGGVLRRARRYYRRAFPSW

SEQ ID NO: 107684 - protein, 141 aa, Setaria italica
  misc_feature (18)..(18): Xaa can be any naturally occurring amino acid
  misc_feature (129)..(129): Xaa can be any naturally occurring amino acid
  Transcript Sequence Number=SeqID_41710
  Gene Ontology: Mol. function=ATP binding; Cellular component =endoplasmic reticulum; Biological process=cell division
  Homolog annotation: Hit_ID=P54774; Match level="QueryCoverage=100%, HitCoverage=17%, E-value=4e-38, Identity=61%"; Hit description=Cell division cycle protein 48 homolog
VAKEVDLNALAKYTQGFXSWLSDITEICQRAVKYAIRENIEKDIERERRRKDNPEAMEEDEVDDIAEIKAAHFEESMKYARRSVSDADIRKYQAFAQTLQQSRGFGSEFRFSEQSTTAGPAAAADPFAXSTGGADDDDLYS

SEQ ID NO: 107685 - protein, 139 aa, Setaria italica
  misc_feature (41)..(41): Xaa can be any naturally occurring amino acid
  Transcript Sequence Number=SeqID_41711
  Gene Ontology: Mol. function=nucleoside-triphosphatase activity; Cellular component=Cdc48p-Npl4p-Ufd1p AAA ATPase complex; Biological process=cell division
  Homolog annotation: Hit_ID=Q9SCN8; Match level="QueryCoverage=86%, HitCoverage=46%, E-value=2e-52, Identity=69%"; Hit description=Cell division control protein 48 homolog D
FVLTLVLLVNYFCCIGSSLIKREDEERLDEVGFLTPPTSSXQLRQDVGGVRKQMAQIRELVELPLRHPQLFKSIGVKPPKGILLYGPPGSGKTLIARAVANEIGAFFFLINGPEIMSKLAGESESNLRKAFEEAEKNAP

SEQ ID NO: 107686 - protein, 73 aa, Setaria italica
  Transcript Sequence Number=SeqID_41712
  Gene Ontology: Mol. function=nucleic acid binding; Cellular component= chromatin; Biological process=chromatin assembly or disassembly
  Homolog annotation: Hit_ID=Q852F5; Match level="QueryCoverage=87%, HitCoverage=5%, E-value=4e-13, Identity=51%"; Hit description =Retrotransposon protein, putative, unclassified
  Pfam annotation: Domain name=Chromo; Domain location=3-57; Score =52.4; E_value=1.8e-12; Accession=PF00385.16; Description='chromo' (CHRromatin Organisation MOdifier)
NLSVPITLLDHRIVSKGSSPVSQLLVQWSALPSDLATWEEVHDISRRFPDAPAWGQAGFRGGGSVMSLRAMAS

SEQ ID NO: 107687 - protein, 92 aa, Setaria italica
  misc_feature (36)..(36): Xaa can be any naturally occurring amino acid
  misc_feature (50)..(50): Xaa can be any naturally occurring amino acid
  Transcript Sequence Number=SeqID_41713
  Gene Ontology: Mol. function=catalytic activity
  Homolog annotation: Hit_ID=Q8H7V4; Match level="QueryCoverage=98%, HitCoverage=4%, E-value=4e-15, Identity=48%"; Hit description =Putative polyprotein from transposon TNT
GDLMARSVELGGDLRVSKDDKDLDSKTSEAWEGGSXFSFDGKFIGMNLFXVPGRAVFLPWSTISKRLECYWTSWQKVTGQVPLECLRVYGYV

SEQ ID NO: 107688 - protein, 194 aa, Setaria italica
  Transcript Sequence Number=SeqID_41714
  Gene Ontology: Mol. function=binding
  Homolog annotation: Hit_ID=B9T4E7; Match level="QueryCoverage=92%, HitCoverage=14%, E-value=1e-32, Identity=40%"; Hit description =Pentatricopeptide repeat-containing protein, putative
  Pfam annotation: Domain name=PPR; Domain location=125-159; Score =27.3; E_value=6.5e-05; Accession=PF01535.12; Description=PPR repeat
  Pfam annotation: Domain name=PPR; Domain location=20-54; Score=9.5; E_ value=0.67; Accession=PF01535.12; Description=PPR repeat
  Pfam annotation: Domain name=PPR; Domain location=55-89; Score=25.0; E_value=0.0003; Accession=PF01535.12; Description=PPR repeat
  Pfam annotation: Domain name=PPR; Domain location=90-124; Score=14.9; E_value=0.15; Accession=PF01535.12; Description=PPR repeat
  Pfam module annotation: Pfam domain module=PPR::PPR::PPR::PPR; Domain location=125-159::20-54::55-89::90-124
LEAKSCLNNLSKSEFIGSYMNFDGLIKKFCTIGDLRMSLNLLNTMLKKGKLPSEVSYSSVIYRLCILKEFDQALDFLAEMQFASLRPSESSCDALVHGLCALGRTCDARKILEMLTTLGSTPSHGMYRVVLDSYCRNSNLQKATALLHDMQQAGQVPNFEMHWSIISNFSSTNKKTEGNGEPILPNLFLCANPP

SEQ ID NO: 107689 - protein, 477 aa, Setaria italica
  Transcript Sequence Number=SeqID_41715
  Gene Ontology: Cellular component=nucleus
  Homolog annotation: Hit_ID=Q84VD9; Match level="QueryCoverage=98%, HitCoverage=91%, E-value=1e-141, Identity=57%"; Hit description =Centromere protein-like protein (Fragment)
LKESSQALQNQNSILQYEKKTLAHQVDSITVTLLNLERQYKELERRHSDLQKEKDLVLDEVIKLQEQIRLERKEHEDSTHSSNTRFDALQDKISLLLEEGRNREVQLGEEELKIVKAQVEIFVMQQCLNDMAEVNSDISAQLRKKKETCKVQEGKMYSLSQHNQKLTEGIDSVVKVLHLDRKYESLDQMKLEIIMQLILTEISCLLNNISDAQDVKQNELVERSLVVTLLEHFGQEVADLRSERHALKQDQQTKNEELLQLQREKEELMKISDEFLEEVEARNHKVDELKAEAKFLVGRLSELQESRRSLQSEMTKLLQANSFLSSELNDSIEKQKVFEHDFSNLVTEAVSKDILSVIFRSLHEERTLQLKSLHNNFGCMQTAGSELYQEIKMMNKRLGEIEIENNYLGKELSRTMSVYGGSVVQTAGGKGHPGRRDSSLLHSDRKTQEDYHVNTEVEHKEFGDADFQESNEIPRVS

SEQ ID NO: 107690 - protein, 46 aa, Setaria italica
  Transcript Sequence Number=SeqID_41716
  Gene Ontology: Mol. function=phosphoserine phosphatase activity; Biological process=L-serine biosynthetic process
  Homolog annotation: Hit_ID=B6SU38; Match level="QueryCoverage=84%, HitCoverage=13%, E-value=3e-10, Identity=76%"; Hit description =Phosphoserine phosphatase
PTHCSFCQSVALELGVPHENIFANQLLFGTSGEYVGFDPTKPTSRS

SEQ ID NO: 107691 - protein, 79 aa, Setaria italica
  Transcript Sequence Number=SeqID_41717
KDPPYHIHIHTKTSLRKILGEPITTTNSNVLSSEGINNTFSLDSFKLFSFAYMPQQISELPWFKIFAQSFTLILYASEM

SEQ ID NO: 107692 - protein, 140 aa, Setaria italica
  Transcript Sequence Number=SeqID_41718
  Homolog annotation: Hit_ID=Q6ASX1; Match level="QueryCoverage=100%, HitCoverage=12%, E-value=9e-24, Identity=46%"; Hit description=FYVE zinc finger containing protein
GELSQLLREVAPKSSEGKKSGGIDKSQVNALKRQALLLKREGRLAEAKEELKKAKILEKQLEEQEILGEAEDSDDDLAAIIRNMDDDKHDDILMDDTKFPALNFEQILGASNDLAIDGHFDVTDDDMNDPDMAAALQSFG

SEQ ID NO: 107693 - protein, 54 aa, Setaria italica
  Transcript Sequence Number=SeqID_41719
REDILTQVKKIPKPLPHPYTGACNPCETTTGLATTATTQVGGPKPTTATTLAGP

SEQ ID NO: 107694 - protein, 117 aa, Setaria italica
  Transcript Sequence Number=SeqID_41720
LGYLCSCKLYTQFGKWMEPLEFVYVFSCLMIKKTRPAGGKTALGLFSKREDLLTQVEKTPEPLPRPYPGARNPCETTTRLATTATTPSRRAQTNHSYDLAWALTCALVMVTEPEECY

SEQ ID NO: 107695 - protein, 122 aa, Setaria italica
  Transcript Sequence Number=SeqID_41721
RKRREVEMVINMFRACQICLIQPFTKRRRNKTILTKSAPQYFWHSSLNLSFSHFAQGWIIKFGEDTEQVKHYSPFLNFLAKIKNSAHLKQVRVLCHRYQIIKPMKQHTHPFMNHPPFLIAME

SEQ ID NO: 107696 - protein, 221 aa, Setaria italica
  misc_feature (20)..(20): Xaa can be any naturally occurring amino acid
  Transcript Sequence Number=SeqID_41722
  Gene Ontology: Mol. function=metal ion binding; Cellular component =cytoplasm
  Homolog annotation: Hit_ID=B6T6X4; Match level="QueryCoverage=90%, HitCoverage=41%, E-value=2e-84, Identity=81%"; Hit description=BRCA1- associated protein
KVWDYAGDNYVHRLIQSKTXDGKLVEYNCHGGHTAENTCSLCSGDAAMSEALLNSKFEAIVEEYNDLVTSQLEKQRNYYESRLLVEDKEETEEISAAVEKALSIKIQKLEAKIEKCMEEKRFLDEVHENLVRNQEKWIETIRKAQAREQAALKLKDEKIEKLNEETRDLIAHLECQYAIAQAPDSISGDIQGGTILPVASSTSSSNSDSSSPIPGTMKMGS

SEQ ID NO: 107697 - protein, 404 aa, Setaria italica
  Transcript Sequence Number=SeqID_41723
  Gene Ontology: Mol. function=metal ion binding; Cellular component =cytoplasm
  Homolog annotation: Hit_ID=B6T6X4; Match level="QueryCoverage=94%, HitCoverage=79%, E-value=0.0, Identity=87%"; Hit description=BRCA1 -associated protein
  Pfam annotation: Domain name=BRAP2; Domain location=1-80; Score=67.0; E_value=6.9e-17; Accession=PF07576.4; Description=BRCA1-associated protein 2
  Pfam annotation: Domain name=zf-C3HC4; Domain location=87-126; Score =40.5; E_value=6.6e-09; Accession=PF00097.17; Description=Zinc finger, C3HC4 type (RING finger)
  Pfam annotation: Domain name=zf-UBP; Domain location=138-209; Score =123.2; E_value=8.3e-34; Accession=PF02148.11; Description=Zn-finger in ubiquitin-hydrolases and other protein
  Pfam module annotation: Pfam domain module=BRAP2::zf-C3HC4::zf-UBP; Domain location=1-80::87-126::138-209
RFCGAFVPHTLEMRIVRTDGAEDQYSVLINFDTQNSTDNFYKHFNGKQFSSLEGDVCHVRFVEDVHYTQLIEHAHSSVTSLAEQPTCPVCLERLDQDPGGILTTICNHSFHCSCISKWTDSSCPVCRFCQQQPEKSMCSICGTLENLWICVICGHVGCGRYKGGHAIEHWKETQHCYSLELETQKVWDYAGDNYVHRLIQSKTDGKLVEYNCHGGHTAENTCSLCSGDAAMSEALLNSKFEAIVEEYNDLVTSQLEKQRNYYESRLLVEDKEETEEISAAVEKALSIKIQKLEAKIEKCMEEKRFLDEVHENLVRNQEKWIETIRKAQAREQAALKLKDEKIEKLNEETRDLIAHLECQYAIAQAPDSISGDIQGGTILPVASSTSSSNSDSSSPIPGTMKMGS

SEQ ID NO: 107698 - protein, 52 aa, Setaria italica
  Transcript Sequence Number=SeqID_41724
TELVEENDNAGPSMAVPRSTSRSMKAEAVEAAQEASSAGASQATRTSKRRKK

SEQ ID NO: 107699 - protein, 61 aa, Setaria italica
  Transcript Sequence Number=SeqID_41725
VAQKLLPSLRQQNFRSVIKMHGSMLHRKMSDNSEVKVQCAIICVSVNRTISYLIFHKYMHS

SEQ ID NO: 107700 - protein, 179 aa, Setaria italica
  misc_feature (121)..(121): Xaa can be any naturally occurring amino acid
  misc_feature (132)..(132): Xaa can be any naturally occurring amino acid
  Transcript Sequence Number=SeqID_41726
MENLKEQRGQDAAGGNGWMTVPAFGDWDMKNGALPDYSMDFSKIREMRKQNKKELSRASLGGDDDLAQTQQQQQRNQAQAKAQPKLGRPADDHRRPLHDRDHSPTGGKKFLSYFQCCIKAXKRKCCHCLFCXKHKTCEQLGLGFVKYPQKCVIYLSLYEEQTKPVYGVNSGLLVRVVSD

SEQ ID NO: 107701 - protein, 148 aa, Setaria italica
  Transcript Sequence Number=SeqID_41727
  Gene Ontology: Mol. function=protein serine/threonine kinase activity; Biological process=protein amino acid phosphorylation
  Homolog annotation: Hit_ID=B6SVE4; Match level="QueryCoverage=98%, HitCoverage=18%, E-value=2e-61, Identity=80%"; Hit description =MAPKKK5
SLEGKEFLQCCFKRNPAERPTASELLDHPFIRNSSHYNKHGSIHSFAGIKVNNIAHSLRDNKPTSKSDSSMKGKNTNIEPSRAARSSESTFRLAPLTIQEATQNLSPRPLGFGNNPGSTANFVNTMHFPSANPQPSPLPRPNGKEVLF

SEQ ID NO: 107702 - protein, 73 aa, Setaria italica
  Transcript Sequence Number=SeqID_41728
NSLKEPSVGTKLSLLYYAKSNSHVTVMSSNIRRSLLAQLSVVGGKLRHHIYSNLLDLHRLLAVAAARPPHARA

SEQ ID NO: 107703 - protein, 91 aa, Setaria italica
  Transcript Sequence Number=SeqID_41729
PATGRWRSWQGRWEPRRRGGSPARCRGAGASGSSPASAVCEDRSVHARPRAAPCLAYCRPASAGAGRWAWVRAGCRNLLVFLLSSRGGSKE

SEQ ID NO: 107704 - protein, 95 aa, Setaria italica
  Transcript Sequence Number=SeqID_41730
RVFLRRREGELRQRRGFRGGLVLGEREERAAVALPRGSVERAERVDRQLVLRALFGRLRTLRRSVRRRQRCAGPVPELRRLHPARLLRRLVPQYL

SEQ ID NO: 107705 - protein, 95 aa, Setaria italica
  Transcript Sequence Number=SeqID_41731
  Gene Ontology: Mol. function=DNA binding; Cellular component=nucleus; Biological process=regulation of transcription, DNA-dependent
  Homolog annotation: Hit_ID=Q9S7B2; Match level="QueryCoverage=73%, HitCoverage=19%, E-value=4e-17, Identity=67%"; Hit description =Protein rough sheath 2
RLKRVEQQLEMEREMRRREVWEEFEAKMRTMRLEQAAAAERVEREHREKVAELRRDAQLKEEKMAEQWAAKHARVAKFLEQLGCSRPWSAATDMN

SEQ ID NO: 107706 - protein, 98 aa, Setaria italica
  misc_feature (11)..(11): Xaa can be any naturally occurring amino acid
  Transcript Sequence Number=SeqID_41732
  Homolog annotation: Hit_ID=B6T3T4; Match level="QueryCoverage=75%, HitCoverage=20%, E-value=2e-22, Identity=74%"; Hit description=DNA -binding protein
LSASLAGPDGXVLGGAVAGPLTAASPVQVVIGSFLAGGKLELDPGSAPEKPIFGGFPTASSPPSRGTESSGGHGSPPNAAGSFNTCSQPGFPNFPQWR

SEQ ID NO: 107707 - protein, 223 aa, Setaria italica
  Transcript Sequence Number=SeqID_41733
  Gene Ontology: Mol. function=DNA binding; Cellular component=nucleus
  Homolog annotation: Hit_ID=B6T3T4; Match level="QueryCoverage=89%, HitCoverage=55%, E-value=6e-76, Identity=75%"; Hit description=DNA -binding protein
  Pfam annotation: Domain name=DUF296; Domain location=43-162; Score =183.1; E_value=8e-52; Accession=PF03479.7; Description=Domain of unknown function (DUF296)
  Subcellular localization annotation: CTP_CleavageSite=32; ConfidenceScore=5.33e-01
KTAAPPLPASDASSAKKRGRPLGSTNKKQQPQAAAPGPGWAGLKPHVFTVQAGEDIASRVMSFSGNGWAVCILTANGAVSNVTLRQGDSSGGTVTYEGRFEILSLAGSYLLSECAGMSSRTGGLSASLAGPDGRVLGGAVAGPLTAASPVQVVIGSFLAGGKLELDPGSAPEKPIFGGFPTASSPPSRGTESSGGHGSPPNAAGSFNTCSQPGFSLNILLVYL

SEQ ID NO: 107708 - protein, 64 aa, Setaria italica
  Transcript Sequence Number=SeqID_41734
VKGAPKSQGTPTIFHILGCGHPISKFIMLHRLKIVKNIVFSTHKKMTATIQVQIRPRCHCVKKQ

SEQ ID NO: 107709 - protein, 357 aa, Setaria italica
  Transcript Sequence Number=SeqID_41735
  Gene Ontology: Mol. function=protein binding
  Homolog annotation: Hit_ID=Q7XLJ0; Match level="QueryCoverage=99%, HitCoverage=68%, E-value=1e-124, Identity=64%"; Hit description =OSJNBa0009K15.20 protein
AGGGGKRIEVDGVENLDAFRAAVELMYEPDPMRWLAAAGVSLAIDVLEVCSSIMFDRGIKSCLTYIEAVPWSENEEDKLKNLFARFTFDEAISQDILARLRPHSWKSSDDLTVQLIQSVTSSTNSGARKDMQSLVNGLLSKSSVYQKDTSGLNKESLYQIFYSCLDSLVDLFEEATESTDHTGQAVVVRGSKPLIERVSSQTENLNWLLDILLNNDMAEEFVELWAKQDRLIRMHEQASPMIRYELSRISACVFIALGKGKVQCRGDVRSLLFHGWFSTMLLDFGWLQRCSKGLDIRSLEENLGRGLLTLPLRQQQSLFEEWFQFYATKGAECPNLIRSFQVWWRRSFIRSSVEPRS

SEQ ID NO: 107710 - protein, 75 aa, Setaria italica
  Transcript Sequence Number=SeqID_41736
  Homolog annotation: Hit_ID=B9RWS1; Match level="QueryCoverage=42%, HitCoverage=6%, E-value=4e-10, Identity=84%"; Hit description =Coenzyme F420 hydrogenase subunit beta, putative
LIIFLAIILYQLFSSYLAICLNRLLSTLGAEKQLTAKGSVCWKSVQDLVVGYMGVPKYSGVSMTQHPQYITVRND

SEQ ID NO: 107711 - protein, 57 aa, Setaria italica
  Transcript Sequence Number=SeqID_41737
ELLRVRLMCQTVSVQDTPLAPSYVLQQYEYFVVEKYVCRRLEVAWLASKGSQPCMGE

SEQ ID NO: 107712 - protein, 117 aa, Setaria italica
  Transcript Sequence Number=SeqID_41738
  Homolog annotation: Hit_ID=B6SJC1; Match level="QueryCoverage=79%, HitCoverage=77%, E-value=5e-27, Identity=70%"; Hit description=RALF
  Pfam annotation: Domain name=RALF; Domain location=52-117; Score =132.8; E_value=1.1e-36; Accession=PF05498.3; Description=Rapid ALkalinization Factor (RALF)
MAKLALALILLLAVAASASASASIDMDLGFLSAGAGRRECRGTVAECLAEEEEEELGSASAESHRRILRGRGYISYGALRRDNVPCSRRGASYYNCRPGAQANPYHRGCSRITRCRG

SEQ ID NO: 107713 - protein, 84 aa, Setaria italica
  Transcript Sequence Number=SeqID_41739
QPVSKLHCSSNNGGRKITHTWVKLSLDHMISRHGGKKEQRNVVSAAVSICTTSNYSVKPWREKSPKLPNRTQLTIAWYSNGIPR

SEQ ID NO: 107714 - protein, 127 aa, Setaria italica
  Transcript Sequence Number=SeqID_41740
  Homolog annotation: Hit_ID=Q10RT4; Match level="QueryCoverage=81%, HitCoverage=45%, E-value=4e-11, Identity=38%"; Hit description=(RAP Annotation release2) Galactose-binding like domain containing protein
  Pfam annotation: Domain name=DUF1997; Domain location=1-122; Score =31.0; E_value=4.8e-07; Accession=PF09366.2; Description=Protein of unknown function (DUF1997)
LESFAPAGSGPGTFTCALRRIGFLGFEIAPVLDLRVAPTSTDCTIEMLSCRFEGSESIELQNELFSAFMSNRITWSDNDKEPCLDIDVNLEVTLEVYTKPFSMLPLSAVEKPGNLYVGLCNILQILK

SEQ ID NO: 107715 - protein, 174 aa, Setaria italica
  misc_feature (2)..(2): Xaa can be any naturally occurring amino acid
  misc_feature (23)..(23): Xaa can be any naturally occurring amino acid
  misc_feature (27)..(27): Xaa can be any naturally occurring amino acid
  Transcript Sequence Number=SeqID_41741
  Gene Ontology: Mol. function=serine-type endopeptidase activity; Cellular component=chloroplast; Biological process=proteolysis
  Homolog annotation: Hit_ID=B6SVB6; Match level="QueryCoverage=98%, HitCoverage=22%, E-value=2e-60, Identity=68%"; Hit description =Acylamino-acid-releasing enzyme
TXKYTMYSHITRAGTNSLDFQWXPFPXEMTGMSVIVPSPSGSKLLVVRSGEKGCPTKLEIVDQSHMEKEIHVGQSMHGPLYTDEWFHGISWNQEETLIAYIAEAPPQPRTAFNDCGYRKEDSSEEDCNSWKGQGGLGKKTGGERYCRKGRPSLFILDIASGEVRAAKGIATSLS

SEQ ID NO: 107716 - protein, 141 aa, Setaria italica
  Transcript Sequence Number=SeqID_41742
IGTVQPPVPFSLSLFFLVLIQHVIKSQIVNFHYVESYICIISILGAVKVYLITDKILLLAFVIFCAKAQFITTTNTCVCILMFDYSHYFTFVKPKLNELRDRVEALSRKVARLKKEEDVRQANNMQTSAGGHEKDPGGHQA

SEQ ID NO: 107717 - protein, 72 aa, Setaria italica
  Transcript Sequence Number=SeqID_41743
LLSMKKEQNIKFIFSLFKIGSMSVHCYGQNEYINPPCWYMHIFVSPATKYILAQIFKNRHKYSRRGTQGCSE

SEQ ID NO: 107718 - protein, 160 aa, Setaria italica
  Transcript Sequence Number=SeqID_41744
  Gene Ontology: Mol. function=transferase activity; Biological process= amino acid biosynthetic process
  Homolog annotation: Hit_ID=Q9LQY8; Match level="QueryCoverage=98%, HitCoverage=46%, E-value=7e-57, Identity=66%"; Hit description =T24P13.2
LAREGIPSVGMSPFACGWSTKQRKLASADASQIIQSLHAGFVPVLHGDAVLDELLDCTILSGDVIIRHLSQLLSPKYVVFLTDVHGVYDRPPTDPNAVLLREIEVDDNGSWSIVKPALLQGNNKGVEISVAAHDTTGGMETKILEAAVIARLGIDVTLRR

SEQ ID NO: 107719 - protein, 86 aa, Setaria italica
  Transcript Sequence Number=SeqID_41745
CAARSAYVSISLWPILSAQGLGASSHLYLASADLGTTPVPEHLGNCRHNTSSTPPRSELSSGSTLMSSLPQWYGPIPTCVPYCSMA

SEQ ID NO: 107720 - protein, 63 aa, Setaria italica
  Transcript Sequence Number=SeqID_41746
QRGSAHKLEASRQGSALSKQARSCNHDHCWRSENCLRGNHDLQHLPRFNSTLLAELTCFMLTI

SEQ ID NO: 107721 - protein, 93 aa, Setaria italica
  Transcript Sequence Number=SeqID_41747
  Gene Ontology: Cellular component=plasma membrane
  Homolog annotation: Hit_ID=B6T2F7; Match level="QueryCoverage=98%, HitCoverage=100%, E-value=2e-23, Identity=68%"; Hit description =Nitrate-induced NOI protein
  Pfam annotation: Domain name=NOI; Domain location=1-91; Score=92.1; E_ value=2e-24; Accession=PF05627.3; Description=Nitrate-induced NOI protein
MATPGRAGRPLPKFGEWDVKNPATADGFTVIFQKARDGKKTTAGPGHAQAGIPPAFRDQYGSAGDGGYRSGDSHQYDTPPKRAKSKWAFCTCG

SEQ ID NO: 107722 - protein, 113 aa, Setaria italica
  misc_feature (99)..(99): Xaa can be any naturally occurring amino acid
  Transcript Sequence Number=SeqID_41748
  Gene Ontology: Mol. function=protein serine/threonine phosphatase activity; Cellular component=protein serine/threonine phosphatase complex; Biological process=protein amino acid dephosphorylation
  Homolog annotation: Hit_ID=Q6L5H6; Match level="QueryCoverage=94%, HitCoverage=27%, E-value=2e-49, Identity=86%"; Hit description =Probable protein phosphatase 2C 50
METLVAGDRYLKPFVIPKPEVTVIPRAKDDDCLVLASDGLWDVVSNEEACKVARRQIQLWHKNNGVTTSLCDEGDESTDPAAQSAADYLMRLALKKGTXDNITVIVVDLKPRK

SEQ ID NO: 107723 - protein, 300 aa, Setaria italica
  Transcript Sequence Number=SeqID_41749
  Gene Ontology: Mol. function=protein serine/threonine phosphatase activity; Cellular component=protein serine/threonine phosphatase complex; Biological process=protein amino acid dephosphorylation
  Homolog annotation: Hit_ID=Q6L5H6; Match level="QueryCoverage=91%, HitCoverage=71%, E-value=1e-116, Identity=76%"; Hit description =Probable protein phosphatase 2C 50
  Pfam annotation: Domain name=PP2C; Domain location=3-283; Score =226.0; E_value=9.9e-65; Accession=PF00481.13; Description=Protein phosphatase 2C
LPVRLLASRRDLDGLGLDADALRLPAHLFGVFDGHGGAEVANYCRERLQVLLSQELGLLGDDLGEVGEADMKEHWDELFRKCFQRVDDEVSGRASRLVGGVPESRPVAAENVGSTAVVAVVCSSHLVVANCGDSRVVLCRGKEPVALSIDHKPDRKDERGRIEALGGKVIQWNGYRVSGILAMSRSIGDRYLKPFVIPKPEVTVIPRAKDDDCLVLASDGLWDVVSNEEACKVARRQIQLWHKNNGVTTSLCDEGDESTDPAAQSAADYLMRLALKKGTEDNITVIVVDLKPRKKLKNNS

SEQ ID NO: 107724 - protein, 75 aa, Setaria italica
  Transcript Sequence Number=SeqID_41750
GSLYLIRLVKELVLHLIYLLTEVDYSSMVTYFSSLVILLLTALTCTTWASCKSAELGMTCSCKIVMHCKGIRVHV

SEQ ID NO: 107725 - protein, 151 aa, Setaria italica
  Transcript Sequence Number=SeqID_41751
  Gene Ontology: Mol. function=structural constituent of ribosome; Cellular component=intracellular; Biological process=translation
  Homolog annotation: Hit_ID=Q69UI2; Match level="QueryCoverage=100%, HitCoverage=100%, E-value=9e-63, Identity=73%"; Hit description=40S ribosomal protein S13-1
  Pfam annotation: Domain name=Ribosomal_S13_N; Domain location=1-60; Score=116.8; E_value=7.4e-32; Accession=PF08069.4; Description =Ribosomal S13S15 N-terminal domain
  Pfam annotation: Domain name=Ribosomal_S15; Domain location=65-151; Score=75.4; E_value=2.1e-19; Accession=PF00312.14; Description =Ribosomal protein S15
  Pfam module annotation: Pfam domain module=Ribosomal_S13_N::Ribosomal_ S15; Domain location=1-60::65-151
MGRMYGPGKGMSSSVLPYARSAPGWVRSSAAEVEDMIVRAAKKGQQPSQIGTLLRDAHGVPLVHGVTGGKILRVLRARGLAPEVPEDLYFLIKKAVAIRKHLDRNRTDVDAKFRLILVESRVHRLARYYRRAKKIPASWKYESTAASTLVA

SEQ ID NO: 107726 - protein, 84 aa, Setaria italica
  Transcript Sequence Number=SeqID_41752
RRAVLCSYIWWGEGPLHVQRGNEEACEGLQGPFCQLPMPICGRYWFLPSSNEKVFMVGSRLRFYFCMIVLKSLLERNVLHSALI

SEQ ID NO: 107727 - protein, 445 aa, Setaria italica
  misc_feature (430)..(430): Xaa can be any naturally occurring amino acid
  Transcript Sequence Number=SeqID_41753
  Gene Ontology: Mol. function=nucleic acid binding; Cellular component= RSC complex; Biological process=transcription from RNA polymerase II promoter
  Homolog annotation: Hit_ID=Q656N0; Match level="QueryCoverage=99%, HitCoverage=12%, E-value=0.0, Identity=80%"; Hit description =Putative STH1 protein
  Pfam annotation: Domain name=DEAD; Domain location=231-399; Score= -31.6; E_value=0.0079; Accession=PF00270.21; Description=DEADDEAH box helicase
  Pfam annotation: Domain name=ResIII; Domain location=227-393; Score =12.4; E_value=4.9e-06; Accession=PF04851.7; Description=Type III restriction enzyme, res subunit
  Pfam annotation: Domain name=SNF2_N; Domain location=233-445; Score =198.6; E_value=1.7e-56; Accession=PF00176.15; Description=SNF2 family N-terminal domain
  Pfam module annotation: Pfam domain module=DEAD::ResIII::SNF2_N; Domain location=231-399::227-393::233-445
KSVIELKKLQLLPLQRRVRSEFLMDFFKPNTADLERIKAVKKHRHGRRVKQLEKIEQKMKEERQKRIRERQKEFFADIEAHREKLEDSFKVKRERLKGFNRYIKEFHKRKERIHREKLDRIQREKINLLKNNDVEGYLRMVKDAKSDRVKQLLRETEKYLQKLGNKLQNAKSTDGRASYVSDKSDPANDIEDESYQPQHYLESNEKYYQLAHSVKETVNDQPSYLQGGKLREYQMNGLRWLVSLYNNNLNGILADEMGLGKTVQVISLLCYLMETKNDRGPFLVVVPSSVLPGWESELNFWAPSINKIAYAGPPEERRRMFKEMIVHQKFNVLLTTYEYLMNKHDRPKLSKIQWHYIIIDEGHRIKNASCKLNADLKLYRSSHRLLLTGTPLQNNLEELWALLNFLLPNIFNSSEDFSQWFNKPFESNGXDNSPDEALLSEEETC

SEQ ID NO: 107728 - protein, 172 aa, Setaria italica
  Transcript Sequence Number=SeqID_41754
  Gene Ontology: Mol. function=oxidoreductase activity; Biological process=oxidation reduction
  Homolog annotation: Hit_ID=B6SSL8; Match level="QueryCoverage=94%, HitCoverage=46%, E-value=1e-69, Identity=76%"; Hit description =Leucoanthocyanidin dioxygenase
  Pfam annotation: Domain name=2OG-FeII_Oxy; Domain location=82-172; Score=103.3; E_value=8.1e-28; Accession=PF03171.12; Description=2OG -Fe(II) oxygenase superfamily
GLRVTYRVGRSEDQVLDWCDRLYLKVEPQDERNLALWPARLRDVLHEFTAKCTTLKDRLLPEMAKLLELDDDYFGNQFGDKADTYARFSYYPPCPRPDLVFGLKPHSDASFISLLMVDSSVGGLQVLRDGVWYDVPTKPHTLLINLGDQMEIMSNGIFKSPVHRVVTNAKKE

SEQ ID NO: 107729 - protein, 39 aa, Setaria italica
  Transcript Sequence Number=SeqID_41755
NHPFLKKFEDKDLDLRILVASLLGLSSYLSLWKFFDARS

SEQ ID NO: 107730 - protein, 70 aa, Setaria italica
  Transcript Sequence Number=SeqID_41756
THRRQGARFMSHQLSLNNSAVQHAATMNIPMLREPAGRLFVYVFVSYISTCRLMDLYDYFTCPFSILCLD

SEQ ID NO: 107731 - protein, 72 aa, Setaria italica
  Transcript Sequence Number=SeqID_41757
EELSSRKDPASMVKLPRALIGLCSSAYVKNQMVQLRLHLQGPKKSKSGGRHSSVGKNGLILVALHEMNYGFL

SEQ ID NO: 107732 - protein, 268 aa, Setaria italica
  Transcript Sequence Number=SeqID_41758
  Gene Ontology: Mol. function=binding
  Homolog annotation: Hit_ID=B9RZX3; Match level="QueryCoverage=91%, HitCoverage=30%, E-value=2e-35, Identity=38%"; Hit description=Yth domain-containing protein, putative
  Subcellular localization annotation: CTP_CleavageSite=32; ConfidenceScore=5.67e-01
RPYFSTKEQPRWPAPWKRQFSGGSMVPARLPRARRASQQSTQVAVPSVRSSLQTNLSYNNEVSNVGSDHCKMLSAERSQPYARTISYANRRLSSVSQQNISKAKMPIGSLSSEIIGKSYTSRLLIGNPEGRIIIRTDQYNRDDFQVVYTNAKFFVIKSYNEADIHKSIKYGVWSTSSVGNLKLDTAFRDAQVIAASSSTLCPVLLFFSVNGCSHFWLAAFIWFHILELELLSPILWSNRLTEVSHFCGVAEMVCPVDYQNDMDFWCRK

SEQ ID NO: 107733 - protein, 173 aa, Setaria italica
  Transcript Sequence Number=SeqID_41759
  Gene Ontology: Mol. function=protein binding
  Homolog annotation: Hit_ID=B9RPX6; Match level="QueryCoverage=83%, HitCoverage=16%, E-value=2e-22, Identity=40%"; Hit description=Pre -mRNA-processing protein PRP40, putative
  Pfam annotation: Domain name=WW; Domain location=110-139; Score=33.2; E_value=1e-06; Accession=PF00397.18; Description=WW domain
  Subcellular localization annotation: CTP_CleavageSite=50; ConfidenceScore=5.46e-01
KGNGIVPPQPLWGHLHPPQPTGFQQPPFQSYPGPVGSLGKPMVGASAATMAFANVQPSGDPTAGEDRKEQMSTNPGSEQPTHASAGPDSTGHGGQVNEQLEDKRSTIVQGSDAWSAHKTETGVVYYYNALTGESTYQKPPGYKGEPEKVATQPVPVSWDKVAGTDWSIVTTSD

SEQ ID NO: 107734 - protein, 76 aa, Setaria italica
  Transcript Sequence Number=SeqID_41760
GFLLPAIPHSLRELFCVAKSVVLSTGTLLPQWLENCPTPKGLQLAPQMESQSADPPEIGPAWLCISTCPGSLTQRT

SEQ ID NO: 107735 - protein, 141 aa, Setaria italica
  Transcript Sequence Number=SeqID_41761
GQRGHDKRELGRSRPGGLEIEGSEMPRKVSRKSFEENESNVDHMEHYKYVLSKLLRGQDDSFRKGGCKEVQGGSTQNKGKDGNICNRTFPLFTEPISGLSNNDKERIKLCLHEIITFLNNDVDEVDQDIKAMEERGEACQD

SEQ ID NO: 107736 - protein, 139 aa, Setaria italica
  Transcript Sequence Number=SeqID_41762
  Pfam annotation: Domain name=GRP; Domain location=1-122; Score=55.3; E_value=2.3e-13; Accession=PF07172.3; Description=Glycine rich protein family
MAFKSVLLLAIVLVSLRLITQDVAAATDRFTNKANESDGKKVKLTSGDGTNEEKLGHGHEYYGGYGYGGGYGGGGYGGGYSGGYGGYTPGHGWYGGGYGHYHGHGGGYGHYPRHGGGYGHYPGHGGEYSGRYGGYGGGG

SEQ ID NO: 107737 - protein, 179 aa, Setaria italica
  misc_feature (164)..(164): Xaa can be any naturally occurring amino acid
  Transcript Sequence Number=SeqID_41763
  Gene Ontology: Mol. function=ubiquitin-protein ligase activity; Cellular component=ubiquitin ligase complex; Biological process =ubiquitin-dependent protein catabolic process
  Homolog annotation: Hit_ID=B9R8Q6; Match level="QueryCoverage=97%, HitCoverage=21%, E-value=3e-46, Identity=51%"; Hit description =Ubiquitin-protein ligase, putative
  Pfam annotation: Domain name=U-box; Domain location=10-90; Score =38.1; E_value=3.4e-08; Accession=PF04564.7; Description=U-box domain
TNRTSLRVEPIYESFLCPLTKQVMRDPVTIDSGVTFERDAILKWFNDCLHKTEKRLICPVTKKELSTTDLNPSIALRNTIDEWMNRNEAAKLDVARKSLTSDCTESDILQALQYVDEICQRSRSSRQVVRRDGLISMIADLLKNSSTKVRQKALGKLFVPFQKXHDNKVEIAAGDNIRT

SEQ ID NO: 107738 - protein, 75 aa, Setaria italica
  Transcript Sequence Number=SeqID_41764
  Gene Ontology: Mol. function=acid phosphatase activity; Cellular component=plasma membrane; Biological process=translation
  Homolog annotation: Hit_ID=B6T003; Match level="QueryCoverage=96%, HitCoverage=26%, E-value=2e-30, Identity=87%"; Hit description=Stem 28 kDa glycoprotein
VRNLASAGYTGYLKLLLKPQNVRMHSLEFKSGERKKLVDAGYVIVGNIGDQWSDLLGAPEGDRTFKLPDPMYYIA

SEQ ID NO: 107739 - protein, 83 aa, Setaria italica
  Transcript Sequence Number=SeqID_41765
RLPLRSFEEEEPVLRLRRLMRKAIEEERFEVFYSCITVVPSNSTPSLPRLVAMCLKSKQALALSNLEDKDLIRQDFLKSEDHA

SEQ ID NO: 107740 - protein, 204 aa, Setaria italica
  Transcript Sequence Number=SeqID_41766
  Gene Ontology: Mol. function=hydrolase activity, hydrolyzing O -glycosyl compounds; Biological process=carbohydrate metabolic process
  Homolog annotation: Hit_ID=Q2MV13; Match level="QueryCoverage=98%, HitCoverage=40%, E-value=2e-83, Identity=68%"; Hit description=Beta -mannosidase 4
  Pfam annotation: Domain name=Glyco_hydro_1; Domain location=2-204; Score=-43.2; E_value=1.8e-16; Accession=PF00232.10; Description =Glycosyl hydrolase family 1
NRGLSNWDVFAHTPGKIEDGSNGDTADDHYHRYMEDIELMHSMGVNSYRFSIAWTRILPRGRFGHVNPDGVAFYNNLIDALLQKGIQPFVTISHYDIPQELETQYGGWLSPEIQKDFGYLAEVCFMMFGDRVKFWITFNQPNLWLKFSYMDGLYPPGRCSQPFGNCAFGNSSIEPYIAGHNMILSHANAVSIYRKKYQVQTTVL

SEQ ID NO: 107741 - protein, 502 aa, Setaria italica
  Transcript Sequence Number=SeqID_41767
  Gene Ontology: Mol. function=hydrolase activity, hydrolyzing O -glycosyl compounds; Biological process=carbohydrate metabolic process
  Homolog annotation: Hit_ID=Q7XSK0; Match level="QueryCoverage=94%, HitCoverage=93%, E-value=1e-175, Identity=60%"; Hit description =OSJNBa0004N05.26 protein
  Pfam annotation: Domain name=Glyco_hydro_1; Domain location=27-502; Score=623.6; E_value=1.9e-184; Accession=PF00232.10; Description =Glycosyl hydrolase family 1
MASGLVWLALLLAHGLLSWPCASAAVDRGQFPDGFLFGTTTSAYQIEGANLEGNRGLSNWDVFAHTPGKIEDGSNGDTADDHYHRYMEDIELMHSMGVNSYRFSIAWTRILPRGRFGHVNPDGVAFYNNLIDALLQKGIQPFVTISHYDIPQELETQYGGWLSPEIQKDFGYLAEVCFMMFGDRVKFWITFNQPNLWLKFSYMDGLYPPGRCSQPFGNCAFGNSSIEPYIAGHNMILSHANAVSIYRKKYQGKQGGHIGISMCSRWYEPFSNTTVDILAVERALAFDGPWFLDPIIFGDYPTKMREILGPNLPEFTSQQKKKLKATKLDFIGLSHYTTLYTKDCIFSPCEIDPIDGDARVFSSGVGEDGVLIGEVTGSPFFYSVPEGMEKVVMYYMQRYNNIPTYITENGYAQASNSSMTAKDFTNDTGRVDYIRDYLTFLASAIRKGADVRGYFVWSLLDCFEWTSGYTQRLGLYHVDLKTLERTPKLSAKWFSEFLKGGS

SEQ ID NO: 107742 - protein, 154 aa, Setaria italica
  Transcript Sequence Number=SeqID_41768
  Gene Ontology: Mol. function=hydrolase activity, hydrolyzing O -glycosyl compounds; Biological process=carbohydrate metabolic process
  Homolog annotation: Hit_ID=Q7XSK0; Match level="QueryCoverage=80%, HitCoverage=24%, E-value=1e-38, Identity=58%"; Hit description =OSJNBa0004N05.26 protein
  Pfam annotation: Domain name=Glyco_hydro_1; Domain location=1-136; Score=-306.8; E_value=0.0031; Accession=PF00232.10; Description =Glycosyl hydrolase family 1
MIAISFMQTGSPFFYSVPEGMEKVVMYYMQRYNNIPTYITENGYAQASNSSMTAKDFTNDTGRVDYIRDYLTFLASAIRKGADVRGYFVWSLLDCFEWTSGYTQRLGLYHVDLKTLERTPKLSAKWFSEFLKGGSLVGTRPRKENPQSKQYAAQ

SEQ ID NO: 107743 - protein, 741 aa, Setaria italica
  misc_feature (219)..(219): Xaa can be any naturally occurring amino acid
  Transcript Sequence Number=SeqID_41769
  Gene Ontology: Mol. function=nucleic acid binding
  Homolog annotation: Hit_ID=Q6YYC0; Match level="QueryCoverage=99%, HitCoverage=77%, E-value=0.0, Identity=59%"; Hit description=Zinc finger CCCH domain-containing protein 55
  Pfam annotation: Domain name=zf-CCCH; Domain location=104-129; Score =32.3; E_value=2e-06; Accession=PF00642.16; Description=Zinc finger C- x8-C-x5-C-x3-H type (and similar)
  Pfam annotation: Domain name=zf-CCCH; Domain location=163-188; Score =25.6; E_value=0.00021; Accession=PF00642.16; Description=Zinc finger C-x8-C-x5-C-x3-H type (and similar)
  Pfam annotation: Domain name=zf-CCCH; Domain location=20-45; Score =20.6; E_value=0.0029; Accession=PF00642.16; Description=Zinc finger C-x8-C-x5-C-x3-H type (and similar)
  Pfam module annotation: Pfam domain module=zf-CCCH::zf-CCCH::zf-CCCH; Domain location=104-129::163-188::20-45
LILSDRGPEWRVERGRTSGGPALPCRDFVAGRCRRGTNCRFLHEDGGQRPFEDHYPADPRERYGFQNKEFMDSREPNDYLRNRQSRDHYDDGPWERSEPRRDYRSTEQCYNFAKGRCARGASCRFAHGDSASHGGWRDEARESAHDRVGPDSSYGNRTEHRRVNKNPCKFFAEGRCRRGENCPYLHEEAPQSQIGVSAPDEPLNYSDGRSARGDYSNWXKQNNAMRATSQILSRDDRENPISQNIGRNDSHYEYENRLSKDAGKSQYQIIPQEDFRSQVENKHEVAVSQQPQLLTPVQITADNMNNENISGMGGQNAPATEMSMQSGMHSANIIAEQSLGQILQRHDAIPHIPGPSTLPVTTQLQKVASSFHSNSHAQQSNFPVHQNRQEQFVVPQASANNTPSTQGQPVAPNMGHGQHGYGLEPQALPNPSAHNGHNFSVASQVPQNLPTTVLQATVDIPRLSQDSGSQSIRNMQNFQPPNMQNQPLQGLPLVPTSSSTDVAGVPVSHNAAKSEEVSRVTASLAQYFGNTAFGTGTVGLQSSQPNVNSSLMATSSAAPPAVQPNQWPWAQQQTGIVQPGLAVPSEQQQQAPQTFQMPIAVGISNGNSMHLPHGGAPSGPAAAASVVNETVPPESKKGENKDSDAEAHEDGDNKKSKDSKTLKMFKVALADFVKEALKPTWKEGQMSREVHKTIVKKVVDKVTSTVENTPPTKEKIEIYMSYSKEKLNKLVQAYVGKYAKA

SEQ ID NO: 107744 - protein, 122 aa, Setaria italica
  misc_feature (89)..(89): Xaa can be any naturally occurring amino acid
  Transcript Sequence Number=SeqID_41770
  Gene Ontology: Mol. function=voltage-gated potassium channel activity; Cellular component=integral to membrane; Biological process=potassium ion transport
  Homolog annotation: Hit_ID=Q5D1L6; Match level="QueryCoverage=81%, HitCoverage=14%, E-value=9e-48, Identity=92%"; Hit description=KZM2
FLLVLVVYSAWICPFELAFLRHLSWELFLVENIIDSFFAIDIILTFFIAYLDQKSYLLVDNPKRIAARYISSWFIFDVCSTIPYQSFGXLFKKRANGLAYRMLNMLRLWRLRRLSVFICQVC

SEQ ID NO: 107745 - protein, 108 aa, Setaria italica
  Transcript Sequence Number=SeqID_41771
  Gene Ontology: Mol. function=voltage-gated potassium channel activity; Cellular component=integral to membrane; Biological process=ion transport
  Homolog annotation: Hit_ID=Q5D1L6; Match level="QueryCoverage=57%, HitCoverage=8%, E-value=3e-26, Identity=91%"; Hit description=KZM2
IWETFLLVLVVYSAWICPFELAFLRHLSWELFLVENIIDSFFAIDIILTFFIAYLDQKSYLLVVQGSCRTRNFVSSLPNTSSYSFYSSGDVDITALYNLSKRTEVENK

SEQ ID NO: 107746 - protein, 75 aa, Setaria italica
  Transcript Sequence Number=SeqID_41772
WSTCLNVLACNVASSLNNMWCVLSYFPNKIWSMIYIACASISFISDNACDLHCMCISEKEVLTCFSFYQEGMEDH

SEQ ID NO: 107747 - protein, 118 aa, Setaria italica
  misc_feature (106)..(106): Xaa can be any naturally occurring amino acid
  Transcript Sequence Number=SeqID_41773
  Gene Ontology: Mol. function=transferase activity, transferring glycosyl groups; Cellular component=integral to membrane; Biological process=cell wall organization and biogenesis
  Homolog annotation: Hit_ID=B1P2T3; Match level="QueryCoverage=99%, HitCoverage=13%, E-value=5e-52, Identity=80%"; Hit description =Cellulose synthase-like CslF4
SKAKEFGESALFINSMLDGANQERSITPIFLEESVNDELTSLMTCAYEDGTPWGRDVGWVYNIATEDVVTGFRMHRQGWRSIYCSIEPAAFRGTAPINLTERLLQXLRWSGGSLEMFF

SEQ ID NO: 107748 - protein, 152 aa, Setaria italica
  Transcript Sequence Number=SeqID_41774
  Gene Ontology: Mol. function=transferase activity, transferring glycosyl groups; Cellular component=integral to membrane; Biological process=cell wall organization and biogenesis
  Homolog annotation: Hit_ID=Q84S11; Match level="QueryCoverage=86%, HitCoverage=14%, E-value=2e-65, Identity=85%"; Hit description=Mixed- linked glucan synthase 2
LNLFRSLRLGYVWFVRYFRLLHRQGWRSIYCSIEPAAFRGTAPINLTERLLQILRWSGGSLEMFFSHSNAFLAGPRMHPLQRIAYLNMSTYPIVTIFILAYNLFPVMWLISEQYYIQRPFGSYILYLVIIIAMIHLIGMFELKWASITLLDW

SEQ ID NO: 107749 - protein, 228 aa, Setaria italica
  misc_feature (106)..(106): Xaa can be any naturally occurring amino acid
  Transcript Sequence Number=SeqID_41775
  Gene Ontology: Mol. function=hydrolase activity, hydrolyzing O -glycosyl compounds; Cellular component=cytoplasm; Biological process= protein transport
  Homolog annotation: Hit_ID=B6T4W1; Match level="QueryCoverage=100%, HitCoverage=49%, E-value=1e-80, Identity=65%"; Hit description =Autophagy-related 4 variant 1
  Pfam annotation: Domain name=Peptidase_C54; Domain location=127-227; Score=-49.3; E_value=3.6e-10; Accession=PF03416.11; Description =Peptidase family C54
TSLPERGEAPSSNSLCKEDTAPATSSSTSEHKEDSSSKQPKISILSSVFTPPFTIFEGQQDSTCDKKSPKSSSGSYGWSRILRRIVGSTSMWRLLGCAKVLTSSDXWFLGKCYKESPEESSGGSDSESGHAAFLEDFSSRIWITYRKGFDVISDSKLTSDVNWGCMVRSSQMLVAQALIFHHLGRSWRKPPEKPYNPEYIGVLHLFGDSEACAFSIHNLLQAGKGYGL

SEQ ID NO: 107750 - protein, 146 aa, Setaria italica
  Transcript Sequence Number=SeqID_41776
YEFDPQKRVVRYRGQHEICGRCPVKDTCSPTMTAREVTMPVDPWPYSEAGLFHRGMTVCVMVAALALPGGMLFVARTVAEVVTLIATIAIVCLALVPTAASMRRRPVDIPEGLPLEASVPDTGTAHDDGRVRVLGVHGQATTDRAG

SEQ ID NO: 107751 - protein, 160 aa, Setaria italica
  Transcript Sequence Number=SeqID_41777
  Gene Ontology: Mol. function=histone acetyltransferase activity; Cellular component=nucleus; Biological process=regulation of transcription, DNA-dependent
  Homolog annotation: Hit_ID=Q5Z8V7; Match level="QueryCoverage=92%, HitCoverage=10%, E-value=5e-26, Identity=40%"; Hit description =Probable histone acetyltransferase HAC-like 2
  Pfam annotation: Domain name=zf-TAZ; Domain location=7-63; Score=5.0; E_value=0.0039; Accession=PF02135.8; Description=TAZ zinc finger
FTISPCPLGGSCKSPICARLQEILKHSNDCQTIDCLYGYCKQSKEAIYHYNNCVNKHCPICSKAKSLSHYCDQTNKRNTFERSINGANGDRMGINMVTAETFDDQPPMSKRLRLQLLPPNVSHSADASVPQACTGIVSQQAHPKHLGQDKMIFPKQEQKH

SEQ ID NO: 107752 - protein, 162 aa, Setaria italica
  misc_feature (126)..(126): Xaa can be any naturally occurring amino acid
  Transcript Sequence Number=SeqID_41778
  Gene Ontology: Cellular component=nucleus
  Homolog annotation: Hit_ID=Q84VX3-3; Match level="QueryCoverage=73%, HitCoverage=20%, E-value=7e-12, Identity=39%"; Hit description =Isoform 3 of Aberrant root formation protein 4
SSFTISDILDAAAAGMSAEADDGSDDDDDTAAASVYEELLREVHEFLCRSSSNQMAIDALSLVLPIPVAKLGAQTVCWDIAAAILKFLVTNCSPRDLLSILCEALDAPMELPNCSSSFVLLLNALXKRRHIEQVKVVLPAVLKVMSATVSECDEEHGKAAVD

SEQ ID NO: 107753 - protein, 110 aa, Setaria italica
  misc_feature (19)..(19): Xaa can be any naturally occurring amino acid
  misc_feature (48)..(48): Xaa can be any naturally occurring amino acid
  misc_feature (106)..(106): Xaa can be any naturally occurring amino acid
  Transcript Sequence Number=SeqID_41779
  Gene Ontology: Mol. function=Rab GTPase activator activity; Cellular component=intracellular; Biological process=regulation of Rab GTPase activity
  Homolog annotation: Hit_ID=Q7XVE9; Match level="QueryCoverage=93%, HitCoverage=19%, E-value=3e-17, Identity=47%"; Hit description =OSJNBa0083D01.9 protein
FSIPSDVTLLLTQEFNFAXTIHIWDTLLSDPDGPQVATRTLVYSPKLXILFLFLNFIRRTQETFPRICCAILILVRKQLLADNFTSNFKRGQNCPRMNISHLLYVXNKLH

SEQ ID NO: 107754 - protein, 112 aa, Setaria italica
  Transcript Sequence Number=SeqID_41780
  Gene Ontology: Mol. function=aminoacyl-tRNA ligase activity; Cellular component=cytoplasm; Biological process=tRNA aminoacylation for protein translation
  Homolog annotation: Hit_ID=B6T638; Match level="QueryCoverage=66%, HitCoverage=19%, E-value=4e-35, Identity=93%"; Hit description =Tyrosyl-tRNA synthetase
FARKNNVKRIMRCCQIMGRNDQEELTAAQIFYPCMQCADIFFLKADICQLGMDQRKVNMLAREYCDDIKRKNKPIILSHRILILIFFSLSTFFGHMCLVMKFRTSGCSLLGL

SEQ ID NO: 107755 - protein, 385 aa, Setaria italica
  Transcript Sequence Number=SeqID_41781
  Gene Ontology: Mol. function=aminoacyl-tRNA ligase activity; Cellular component=cytoplasm; Biological process=tRNA aminoacylation for protein translation
  Homolog annotation: Hit_ID=B6T638; Match level="QueryCoverage=90%, HitCoverage=91%, E-value=0.0, Identity=94%"; Hit description=Tyrosyl- tRNA synthetase
  Pfam annotation: Domain name=tRNA-synt_1b; Domain location=64-359; Score=218.2; E_value=2.2e-62; Accession=PF00579.17; Description=tRNA synthetases class I (W and Y)
  Subcellular localization annotation: CTP_CleavageSite=35; ConfidenceScore=5.04e-01
MDPSPAPESAPVASSSSAPVPAAAAAVDNLAGAVAAMTLEERFATLRGIGEECIQEDELMRLLQNKPVPICYDGFEPSGRMHIAQGIVKTINVNKMVRAGCKVKIWIADWFAQLNNKMGGDLKKIQTVGRYMIEIWKAAGMNLDGVEFLWSSEEINKRAGEYWPLVMDIARKNNVKRIMRCCQIMGRNDQEELTAAQIFYPCMQCADIFFLKADICQLGMDQRKVNMLAREYCDDIKRKNKPIILSHHMLPGFKEGQEKMSKSDPTSAIFMEDDEAQVNVKIKQAFCPPKIVEGNPCLEYIKYIVFPWFGRFEVIRKENNGGNKTFVTMDELISDYESGALHPADVKPALAKAINEILQPVRDHFNNNSEAKVLLNTVKKYRVTN

SEQ ID NO: 107756 - protein, 284 aa, Setaria italica
  Transcript Sequence Number=SeqID_41782
  Gene Ontology: Mol. function=oxidoreductase activity, acting on single donors with incorporation of molecular oxygen, incorporation of two atoms of oxygen; Cellular component=chloroplast; Biological process=abscisic ...
  Gene Ontology: Biological process=acid biosynthetic process
  Homolog annotation: Hit_ID=O24592; Match level="QueryCoverage=100%, HitCoverage=47%, E-value=1e-155, Identity=92%"; Hit description=9 -cis-epoxycarotenoid dioxygenase 1, chloroplastic
  Pfam annotation: Domain name=RPE65; Domain location=1-284; Score =250.4; E_value=4.5e-72; Accession=PF03055.7; Description=Retinal pigment epithelial membrane protein
GMVHALRIRNGAAESYACRFTETARLRQELAIGRPVFPKAIGELHGHSGIARLALFYARAACGLVDPSHGTGVANAGLVYFNGHLLAMSEDDLPYHVRVTDGGDLETVGRYDFDGQLGCAMIAHPKLDPATGELHALSYDVIKKPYLRYFYFRPDGTKSDDVEIPLDQPTMIHDFAITENFVVVPDHQVVFKLGEMFRGGSPVVLDGEKTSRFGVLPKYAGDASEMVWVDVPDCFCFHLWNAWEDEESDEIVVIGSCMTPADSIFNESDDRLESVLTEIRLDTR

SEQ ID NO: 107757 - protein, 111 aa, Setaria italica
  Transcript Sequence Number=SeqID_41783
  Gene Ontology: Mol. function=protein binding
  Homolog annotation: Hit_ID=C3SAA8; Match level="QueryCoverage=99%, HitCoverage=16%, E-value=5e-19, Identity=57%"; Hit description=EIN3 -binding F-box protein
MPAFCAYEDGGCLVSAPAELSGLFCRGAVQQRKRTLVAASAVAVAAATECLRAAKKQRQQQLPLPSLDALPDGCLFEILRRVPGGRGRGASACVSRRWLALLGSIRASELA

SEQ ID NO: 107758 - protein, 146 aa, Setaria italica
  Transcript Sequence Number=SeqID_41784
  Gene Ontology: Mol. function=metal ion binding; Cellular component =nucleus
  Homolog annotation: Hit_ID=B9RUU8; Match level="QueryCoverage=84%, HitCoverage=5%, E-value=3e-25, Identity=49%"; Hit description=DNA binding protein, putative
  Pfam annotation: Domain name=FYRN; Domain location=1-46; Score=62.2; E_value=1.9e-15; Accession=PF05964.6; Description=FY-rich N-terminus
DFFITSLGEIDNRTSYHNSYQIWPVGFTSYWHDRVTGSLFECEVCDGGNFGPMFKVRRVPCSAFQLPDASTTVCPNIVRKADTIETMESSGVIEDTANDTDDNISMLLSDFSETNQDFLSCLSKDMEGKGSLGCRMKQTSNMAVPA

SEQ ID NO: 107759 - protein, 643 aa, Setaria italica
  Transcript Sequence Number=SeqID_41785
  Gene Ontology: Cellular component=pre-autophagosomal structure membrane; Biological process=protein transport
  Homolog annotation: Hit_ID=Q10A37; Match level="QueryCoverage=100%, HitCoverage=68%, E-value=0.0, Identity=68%"; Hit description =Autophagy protein Apg9 containing protein, expressed
  Pfam annotation: Domain name=APG9; Domain location=1-275; Score =376.1; E_value=6.3e-110; Accession=PF04109.8; Description=Autophagy protein Apg9
CIFQSMFDSKFCVGKDFLTSPSVLKKRLILMGIAILLLSPCLVIFPLVYMFLRHAEEFYNHPSTASSRRWSNLSRWILREYNEVEHFFRHRMNNCTLHSLNYLKQFPTPLISIVAKFVSFVSGGLAGILLILGFLGESILEGHVFGRNLFWYTVVFGTIATVSRKVVADELQVIDPEGAMTLVVQHTHYMPKRWRGKESSELVRKEFETLFQYTITMLLEEMASIFITPYLLIFVLPKRVNDILCFISEFTVYVDGVGDVCSLSLFDFQRHGNRNYGSPLDSVKDMRSSQGKMEKSLLSFQSTYTSWQPNPDGKQFLCNLQRFKEKQIRKYTFQAMEDSQLRSSIGQSGGSIFHRLLSREVFLGNGIIYNFSPLGLLDTDQRAYPYILDWYYTCHSERLGRDVDSSTHRDEPGEDIWPPLTGSKPLTEIEEEEIWDSNLYERARSHLEASTSSAFFQRATFKRQGREQNSTSCPWWAQASIRRTDPRDSYVEPPHSSFIEPPDFANHYTSDHCSSQHSDWALNTAHPNGPEDSFHEPPNFGNHYVSGYHSSYHSSDVSEGTKELDQRDYRTTSSCSPQAALSKTRYMDDDPDLEQGLSFHFADIPQNDDGNEDKADGHGVTGICSSMPASLHVRIVPRSSDPV

SEQ ID NO: 107760 - protein, 328 aa, Setaria italica
  Transcript Sequence Number=SeqID_41786
  Gene Ontology: Mol. function=GDP-L-fucose synthase activity; Biological process=cellular metabolic process
  Homolog annotation: Hit_ID=Q67WR2; Match level="QueryCoverage=100%, HitCoverage=100%, E-value=1e-178, Identity=92%"; Hit description =Probable GDP-L-fucose synthase 1
  Pfam annotation: Domain name=Epimerase; Domain location=21-253; Score= 336.4; E_value=5.6e-98; Accession=PF01370.13; Description=NAD dependent epimerasedehydratase family
  Pfam annotation: Domain name=NmrA; Domain location=21-282; Score= -106.9; E_value=0.049; Accession=PF05368.5; Description=NmrA-like family
  Pfam annotation: Domain name=RmlD_sub_bind; Domain location=19-321; Score=-143.4; E_value=0.00028; Accession=PF04321.9; Description=RmlD substrate binding domain
  Pfam module annotation: Pfam domain module=Epimerase::NmrA::RmlD_sub _bind; Domain location=21-253::21-282::19-321
MGTVTAADPHPSFLADKDAKVFVAGHRGLVGSAILRRLLSLGFTSVVARTHAELDLTRQADVEAFFAAERPRYVVLAAAKVGGIHANSTFPADFIAANLQIQTNVVDAALRCGSVRKLLFLGSSCIYPKFAPQPITEGALLSGPLEPTNEWYAVAKIAGIKMCQAYRIQHGLDAVSAMPTNLYGPHDNFHPENSHVLPALIRRFHEAKACDAPEVVVWGSGSPLREFLHVDDLADAVIFLMDHYSGLEHVNVGSGSEVTIKELAELVKEVVGFQGKLVWDSSKPDGTPRKLMDSSKIQGMGWKPKIELKEGLVETYKWYVENVVSDKK

SEQ ID NO: 107761 - protein, 131 aa, Setaria italica
  Transcript Sequence Number=SeqID_41787
  Gene Ontology: Mol. function=GDP-L-fucose synthase activity; Biological process=cellular metabolic process
  Homolog annotation: Hit_ID=Q67WR2; Match level="QueryCoverage=93%, HitCoverage=37%, E-value=3e-60, Identity=91%"; Hit description =Probable GDP-L-fucose synthase 1
QIPTRLPTKAKACDAPEVVVWGSGSPLREFLHVDDLADAVIFLMDHYSGLEHVNVGSGSEVTIKELAELVKEVVGFQGKLVWDSSKPDGTPRKLMDSSKIQGMGWKPKIELKEGLVETYKWYVENVVSDKK

SEQ ID NO: 107762 - protein, 159 aa, Setaria italica
  misc_feature (42)..(42): Xaa can be any naturally occurring amino acid
  Transcript Sequence Number=SeqID_41788
  Gene Ontology: Mol. function=metal ion binding; Cellular component =integral to membrane
  Homolog annotation: Hit_ID=Q4ZH50; Match level="QueryCoverage=79%, HitCoverage=50%, E-value=6e-29, Identity=51%"; Hit description =Putative alfin-like transcription factor
  Pfam annotation: Domain name=C1_3; Domain location=93-123; Score=7.6; E_value=0.076; Accession=PF07649.4; Description=C1-like domain
  Pfam annotation: Domain name=PHD; Domain location=94-145; Score=28.5; E_value=2e-05; Accession=PF00628.21; Description=PHD-finger
  Pfam module annotation: Pfam domain module=C1_3::PHD; Domain location= 93-123::94-145
  Subcellular localization annotation: CTP_CleavageSite=45; ConfidenceScore=5.00e-01
VYGVLFLVTSLSKGKRLFVMINNLPTIYEVVTGTAKKQTKEXTPKSSSKNNKSGTKPPRQPEPNSRGSKMPPPKDEDDSGGEEDEEEEDHENTLCGSCGDNYGQDEFWICCDACETWFHGKCVKITPAKAEHIKHYKCQIYCSCCCFWSFSWSASWQFL

SEQ ID NO: 107763 - protein, 119 aa, Setaria italica
  misc_feature (21)..(21): Xaa can be any naturally occurring amino acid
  Transcript Sequence Number=SeqID_41789
  Gene Ontology: Mol. function=metal ion binding; Cellular component =integral to membrane
  Homolog annotation: Hit_ID=Q4ZH50; Match level="QueryCoverage=94%, HitCoverage=44%, E-value=9e-27, Identity=53%"; Hit description =Putative alfin-like transcription factor
  Pfam annotation: Domain name=C1_3; Domain location=62-92; Score=7.6; E_value=0.076; Accession=PF07649.4; Description=C1-like domain
  Pfam annotation: Domain name=PHD; Domain location=63-113; Score=45.3; E_value=2.3e-10; Accession=PF00628.21; Description=PHD-finger
  Pfam module annotation: Pfam domain module=C1_3::PHD; Domain location= 62-92::63-113
TGTSQEADQEKTPKSSSKNLXTHTQPPRQPEPNSRGSKMPPPKDEDDSGGEEDEEEEDHENTLCGSCGDNYGQDEFWICCDACETWFHGKCVKITPAKAEHIKHYKCPNCSGSSKRARA

SEQ ID NO: 107764 - protein, 236 aa, Setaria italica
  Transcript Sequence Number=SeqID_41790
  Gene Ontology: Mol. function=metal ion binding; Cellular component =integral to membrane
  Homolog annotation: Hit_ID=Q53M06; Match level="QueryCoverage=96%, HitCoverage=85%, E-value=2e-85, Identity=69%"; Hit description =Probable zinc finger protein-alfalfa
  Pfam annotation: Domain name=C1_3; Domain location=197-227; Score =7.6; E_value=0.076; Accession=PF07649.4; Description=C1-like domain
  Pfam annotation: Domain name=PHD; Domain location=198-236; Score =16.5; E_value=0.00041; Accession=PF00628.21; Description=PHD-finger
  Pfam module annotation: Pfam domain module=C1_3::PHD; Domain location= 197-227::198-236
MDGGGTPRSPEDVFRDFRARRAGMIKALTTDVEKFYQQCDPEKENLCLYGLPNETWEVNLPAEEVPPELPEPALGINFARDGMDEKDWLSLVAVHSDAWLLAVAFYFGARFGFDKESRKRLFVMINNLPTIYEVVTGTAKKQTKEKTPKSSSKNNKSGTKPPRQPEPNSRGSKMPPPKDEDDSGGEEDEEEEDHENTLCGSCGDNYGQDEFWICCDACETWFHGKCVKITPDCPCR

SEQ ID NO: 107765 - protein, 239 aa, Setaria italica
  Transcript Sequence Number=SeqID_41791
  Gene Ontology: Mol. function=protein dimerization activity; Cellular component=nucleus; Biological process=regulation of transcription, DNA-dependent
  Homolog annotation: Hit_ID=B6SRX0; Match level="QueryCoverage=98%, HitCoverage=66%, E-value=1e-106, Identity=83%"; Hit description=DNA binding protein
  Pfam annotation: Domain name=bZIP_1; Domain location=95-153; Score =25.0; E_value=0.00031; Accession=PF00170.13; Description=bZIP transcription factor
  Pfam annotation: Domain name=bZIP_2; Domain location=93-151; Score =9.3; E_value=0.054; Accession=PF07716.7; Description=Basic region leucine zipper
  Pfam module annotation: Pfam domain module=bZIP_1::bZIP_2; Domain location=95-153::93-151
NRKCAGAPEFFPEPSSFGRPQGRPWESRQMYRQGGGMPIPGREKNVGRHGPSSSFGDHEHGHVPNGVDRKGHGDAAHDQRIGVERKDGLRHSQSEADTKRAKQQYAQRSRVRKLQYIAELERRVQSLQTEGIDVTAEMDFLGQQNIMLDLENKALKQRLESLSQEHLIKRYQQEMFEREIGRLRQLFQQQQQQQQHVPQQQAPTHSRSNSRDLDSQFANLSLKHGDPNSTRDAVSGLRI

SEQ ID NO: 107766 - protein, 142 aa, Setaria italica
  Transcript Sequence Number=SeqID_41792
  Gene Ontology: Mol. function=sequence-specific DNA binding; Cellular component=nucleus; Biological process=regulation of transcription, DNA-dependent
  Homolog annotation: Hit_ID=B0LX55; Match level="QueryCoverage=96%, HitCoverage=40%, E-value=8e-35, Identity=52%"; Hit description =Homeobox-like resistance
MDGSQVQYEAKSARDGAWYDVDAFVSSRMSESGEQEVMVKFSGFGVEEAEWVNARTCVRRRSFPFRASECELVKLWHHVLCYKETEQSGLYFDAQVHGRKVKAHGPEECDCTFLVRYEHDQSEEIVRLRKLCGRPETYELSK

SEQ ID NO: 107767 - protein, 86 aa, Setaria italica
  Transcript Sequence Number=SeqID_41793
  Gene Ontology: Mol. function=electron carrier activity; Biological process=oxidation reduction
  Homolog annotation: Hit_ID=B6SYC8; Match level="QueryCoverage=82%, HitCoverage=13%, E-value=1e-31, Identity=92%"; Hit description =Cytochrome P450 CYP71Y10
VGGVEFKGADFELLPFGAGRRMCPGMAFGLANVELALASLLFHFDWEAPGIADPAELDMAEAFGITARRKADLLLRPILRVPVPGV

SEQ ID NO: 107768 - protein, 302 aa, Setaria italica
  misc_feature (124)..(124): Xaa can be any naturally occurring amino acid
  misc_feature (263)..(263): Xaa can be any naturally occurring amino acid
  misc_feature (293)..(293): Xaa can be any naturally occurring amino acid
  Transcript Sequence Number=SeqID_41794
  Gene Ontology: Mol. function=aspartic-type endopeptidase activity; Cellular component=chromatin; Biological process=chromatin assembly or disassembly
  Homolog annotation: Hit_ID=Q6UUS2; Match level="QueryCoverage=98%, HitCoverage=36%, E-value=1e-123, Identity=73%"; Hit description =Putative gag-pol protein
  Pfam annotation: Domain name=RVT_1; Domain location=105-274; Score =179.5; E_value=9.4e-51; Accession=PF00078.19; Description=Reverse transcriptase (RNA-dependent DNA pol
FFLCLCQLFPNRWTQKTGILFVMSGDQEVPLRVDDILVVCRYPDVFPDELPGLPPEREAIFHIKLVPGTQPIYKTPYKMAPVEQVELKKQLDELLAKGFIRPSTSPWAAPVLFVEKKDGTKRLXVDYRALNQVTIKNKYPLPRIDALFDQLRGAKVFSKIDLQSGYHQLRIKEEDIEKTAFNTRYGHYEYVVMSFGLTNAPAVFMEAMNRMLHEYLDVFVVVFIDDILVYSKSEEEHKVHLSLVLDALRKNKFYAKLKKCAFXLSEVSFLGHVINQHGIKVDTKNVASVVEWXRPTNVTEVR

SEQ ID NO: 107769 - protein, 332 aa, Setaria italica
  Transcript Sequence Number=SeqID_41795
  Gene Ontology: Mol. function=amino acid transmembrane transporter activity; Cellular component=integral to membrane; Biological process=amino acid transport
  Homolog annotation: Hit_ID=B9SNC5; Match level="QueryCoverage=98%, HitCoverage=67%, E-value=1e-102, Identity=57%"; Hit description =Amino acid transporter, putative
  Subcellular localization annotation: CTP_CleavageSite=58; ConfidenceScore=5.37e-01
VGLSALVLTAFSLSPFVALAVLAAPKIRPSRWLAFNAGAVNLRGYFNSMFWNLNYWDKASTLAGEVEEPRKTFPKAVFGAVGLVVGAYLIPLLAGTGALPSETAAEWTDGFFSEVGQRIGGPWLRVWIQAAAAMSNMGLFEAEMSSDSFQLLGMAEMGMIPAIFARRSKHGTPTFSILCSATGVVILSFMSFQEIIEFLNFLYGLGMLVVFAAFVKLRAKNPDLPRPYRIPVGTAGAAAMCVPPVALITTVMCLASARTVIVNAVVVAAGVALYYGVEHAKRHAWVEFLAPVPPPPDSSHGSTTALEDADVEDVRAGLLADETADEGGSKVE

SEQ ID NO: 107770 - protein, 150 aa, Setaria italica
  misc_feature (20)..(20): Xaa can be any naturally occurring amino acid
  Transcript Sequence Number=SeqID_41796
  Gene Ontology: Mol. function=nucleoside-triphosphatase activity; Cellular component=membrane; Biological process=transport
  Homolog annotation: Hit_ID=B6SL34; Match level="QueryCoverage=96%, HitCoverage=20%, E-value=8e-62, Identity=82%"; Hit description=ATP -binding cassette sub-family G member 2
  Pfam annotation: Domain name=ABC_tran; Domain location=1-150; Score =20.2; E_value=1.2e-07; Accession=PF00005.19; Description=ABC transporter
  Subcellular localization annotation: CTP_CleavageSite=44; ConfidenceScore=5.01e-01
TALMGPSGSGKSTLLDALAXRLAANAFLSGTVLLIGRKANLSFGAAAYVTQDDNLIGTLTVRETISYSARLRLPDKMPWEEKQALVEGTIIEMGLQDCADTVVGNWHLRGISGGEKRRVSIALEILMRPRLLFLDEPNASSTSSTTKEID

SEQ ID NO: 107771 - protein, 98 aa, Setaria italica
  misc_feature (77)..(77): Xaa can be any naturally occurring amino acid
  Transcript Sequence Number=SeqID_41797
  Gene Ontology: Mol. function=carbon-sulfur lyase activity
  Homolog annotation: Hit_ID=B5ATU2; Match level="QueryCoverage=93%, HitCoverage=22%, E-value=3e-24, Identity=58%"; Hit description =Tryptophan aminotransferase
MAARETGGMAVRCAGRIGVAASVAVNLALLVMYIRRRYFGGSRSGEENTVEPSKGKPPVTPDSVVNLDHGDPTMYKXFWKGIGHRATIVIPGLASTYC

SEQ ID NO: 107772 - protein, 74 aa, Setaria italica
  Transcript Sequence Number=SeqID_41798
QLLKYLNILPCSSILKIIVTHMWQYLQSCIHAPEISNRSLIYIHVQSLMQIFLHSCTLSNLYFSLISIYAMVLS

SEQ ID NO: 107773 - protein, 162 aa, Setaria italica
  Transcript Sequence Number=SeqID_41799
SINEVTGAVFSQVNFDVINSRFFVVLPNATSLEVSGFWMMVYLVCLCSYFFSDLDVQYENLKLTEIIYEDNEVPTVGAYDSHFSEAAKQRHKTHQKLINAIITLVLVCVLPPSCSSEICGHVSMQPSGVLKVESIYFRLVSSRQCKYFSLLSMEPNTDALFS

SEQ ID NO: 107774 - protein, 77 aa, Setaria italica
  misc_feature (4)..(4): Xaa can be any naturally occurring amino acid
  Transcript Sequence Number=SeqID_41800
  Gene Ontology: Mol. function=serine-type endopeptidase inhibitor activity; Cellular component=extracellular region
  Homolog annotation: Hit_ID=P81367; Match level="QueryCoverage=76%, HitCoverage=50%, E-value=2e-15, Identity=71%"; Hit description=Alpha- amylase inhibitor 4
KKEXLAAVPSRCRCAALGFMMDGNPGRLQGFRGCSREAQRSFARRLTRQAECDLPTVDGGMCYELAGEHWGGAVSAY

SEQ ID NO: 107775 - protein, 117 aa, Setaria italica
  Transcript Sequence Number=SeqID_41801
  Gene Ontology: Mol. function=peptidase activity; Biological process =lipid transport
  Homolog annotation: Hit_ID=B6TEM4; Match level="QueryCoverage=76%, HitCoverage=71%, E-value=5e-31, Identity=79%"; Hit description =Cortical cell-delineating protein
  Pfam annotation: Domain name=Tryp_alpha_amyl; Domain location=32-116; Score=36.2; E_value=1.3e-07; Accession=PF00234.14; Description =Protease inhibitorseed storageLTP f
  Subcellular localization annotation: CTP_CleavageSite=24; ConfidenceScore=5.06e-01
MASRFTALLLAATLLLSSAAVVVRGQQRGNPCPTNALADLKVCADVLVLLKLKINVPRSQQCCPLLGSLVNLDLAACLCAAIRLNVIGIPVNLPLDVPLVLNYCGRNASAVPGSNCS

SEQ ID NO: 107776 - protein, 105 aa, Setaria italica
  Transcript Sequence Number=SeqID_41802
  Gene Ontology: Cellular component=membrane
  Homolog annotation: Hit_ID=C1DZA6; Match level="QueryCoverage=72%, HitCoverage=46%, E-value=3e-10, Identity=39%"; Hit description =Fanciful K+ uptake-b family transporter
  Pfam annotation: Domain name=YGGT; Domain location=22-102; Score =55.7; E_value=1.8e-13; Accession=PF02325.9; Description=YGGT family
TLEAGLRSVNLAPLRAPVAAAMSAAVRWLGVYREVLLVGVLLSWFPNIPWDRQPFSALRDLCDPFLALCREVMPPVFGRKLDLSPLVAFMAIDIIIMILRPQPRM

SEQ ID NO: 107777 - protein, 55 aa, Setaria italica
  Transcript Sequence Number=SeqID_41803
  Gene Ontology: Cellular component=membrane
CPSGSFGSSKSSYLQPVLCREVMPPVFGRKLDLSPLVAFMAIDIIIMILRPQPRM

SEQ ID NO: 107778 - protein, 92 aa, Setaria italica
  Transcript Sequence Number=SeqID_41804
FICIIRKLFEMATEFSTVQKWDRTLMAIICLEKSISLADLFFLGKQSCPCGLQKRIKYDLAYPFFLESQERRPLWPYLFSLNKSKKECEELL

SEQ ID NO: 107779 - protein, 58 aa, Setaria italica
  misc_feature (29)..(58): Xaa can be any naturally occurring amino acid
  Transcript Sequence Number=SeqID_41805
LQLSYFIWIFTWLTRTLVLEPVKKKKKKXXXXXXXXXXXXXXXXXXXXXXXXXXXXXX

SEQ ID NO: 107780 - protein, 154 aa, Setaria italica
  misc_feature (9)..(9): Xaa can be any naturally occurring amino acid
  Transcript Sequence Number=SeqID_41806
  Gene Ontology: Mol. function=substrate-specific transmembrane transporter activity; Cellular component=integral to membrane; Biological process=transmembrane transport
  Homolog annotation: Hit_ID=Q6AAH6; Match level="QueryCoverage=98%, HitCoverage=28%, E-value=4e-84, Identity=99%"; Hit description=Sugar transporter family protein
  Subcellular localization annotation: CTP_CleavageSite=61; ConfidenceScore=5.27e-01
SVNAAISAXHGGPSLMVTADPTGRLSPGTYSWDTLQAMTTSHGGAMTDQAFHAFLTQLSVSAGSGGAWRWMLVVCTLPAIALWIGMRKMPESARWHLSHGQLRETVACLKQVRVEGVDEPIVDEVTEMVELNGEGGRLSHRQQWAVVMESRKVT

SEQ ID NO: 107781 - protein, 75 aa, Setaria italica
  misc_feature (12)..(12): Xaa can be any naturally occurring amino acid
  misc_feature (25)..(25): Xaa can be any naturally occurring amino acid
  Transcript Sequence Number=SeqID_41807
RNISKTMRPWKXNFQTAPNFLENEXRNHKDSGTCALREAYSTTALASHPFKTKSFQLVTREQPKGRHLKLSTINT

SEQ ID NO: 107782 - protein, 83 aa, Setaria italica
  Transcript Sequence Number=SeqID_41808
RTGFMSRASYPSTAAAGGGGGGMADTNIGMLAALNAYNRGGSEEQQQHQQPEGEQQHGGDGGGNDEEDDDDSGEENHGNNSSQ

SEQ ID NO: 107783 - protein, 136 aa, Setaria italica
  misc_feature (67)..(67): Xaa can be any naturally occurring amino acid
  Transcript Sequence Number=SeqID_41809
  Gene Ontology: Mol. function=transferase activity; Cellular component= mitochondrion; Biological process=isoprenoid biosynthetic process
  Homolog annotation: Hit_ID=Q7XPX7; Match level="QueryCoverage=94%, HitCoverage=29%, E-value=3e-59, Identity=85%"; Hit description =OSJNBa0071I13.16 protein
  Pfam annotation: Domain name=polyprenyl_synt; Domain location=2-136; Score=-55.6; E_value=1e-05; Accession=PF00348.9; Description =Polyprenyl synthetase
ERDSSADIFREKTYYIDISELWNEIALQTSLGQMLDLISTHNGADELAKYNIEGYRRIVKYKTSYYXFYLPVACALLLSGAKLENFSELRDILIEMGIYFQAQDDYLDCFANPNTIGKIGTDIEDHKCSWLIVASL

SEQ ID NO: 107784 - protein, 117 aa, Setaria italica
  Transcript Sequence Number=SeqID_41810
MASVQRASFLLQVVRTSSRSRSRKREEAGAFSAVAPWRHPVYGGGGRFQPPRPAKLLDTIVEEDSSSVVSSMAAHDAGGGGGYFLQGGASSSSSSSSVPKAFRFASAAAGGGAQQSR

SEQ ID NO: 107785 - protein, 218 aa, Setaria italica
  misc_feature (20)..(20): Xaa can be any naturally occurring amino acid
  Transcript Sequence Number=SeqID_41811
  Homolog annotation: Hit_ID=A2Q539; Match level="QueryCoverage=79%, HitCoverage=63%, E-value=1e-12, Identity=31%"; Hit description=IMP dehydrogenase/GMP reductase, putative
LEVSHCLIPKLPNLLESTVXGRQRTAKQKSLAAQKTVRHLLQKHSLIDQAQEADHFSLFETSPSAFPLNISFEDSPGTPESYLNSGSLGKFSRSSSARKKTFSRLRAERAEPSPAVLKPIKNLILHEKYVNQLSRREGTKRPRKRTPGSKAAHSGKALSRQQVGGLKAAKNALISEATDFISQFKKLQANSLAHIVENSEDDDIDGDASDSCHDDDKE

SEQ ID NO: 107786 - protein, 322 aa, Setaria italica
  misc_feature (25)..(25): Xaa can be any naturally occurring amino acid
  misc_feature (140)..(140): Xaa can be any naturally occurring amino acid
  misc_feature (208)..(208): Xaa can be any naturally occurring amino acid
  misc_feature (232)..(232): Xaa can be any naturally occurring amino acid
  misc_feature (256)..(256): Xaa can be any naturally occurring amino acid
  misc_feature (306)..(306): Xaa can be any naturally occurring amino acid
  Transcript Sequence Number=SeqID_41812
  Gene Ontology: Mol. function=aspartic-type endopeptidase activity; Cellular component=chromatin
  Homolog annotation: Hit_ID=Q5JQV5; Match level="QueryCoverage=84%, HitCoverage=41%, E-value=3e-16, Identity=26%"; Hit description =OSJNBa0061C06.7 protein
GTTMTAFAMEGNNLWLRHLLNLVQXATGFLSLYVFWKSIRRHSVELLVSGTFVFVAGIIKYGERTWSLKCGSFKSLQSSTGNHCKHRFPELIDGELEMMVILTLCTGLRSMLDVLNFFSGRTLFVGDQLRFGREGLGRGXPNQVLKVLRVELGMMYDDLFTKVLVLRTRSGINTLRCTSQLSALVAFLLFLAGKKHKYSRADIATTYXTIFVGTFFLELCALVIFDSIVQPXWTWTWLKARKYGRLRYSVSFFQWXIGWEEKRALWSNAMGQYNLRAWFEGSGEPKSCGQRVMNMTRKLATSIGVXRRKFWLSKLLDYGVCQ

SEQ ID NO: 107787 - protein, 70 aa, Setaria italica
  Transcript Sequence Number=SeqID_41813
  Gene Ontology: Mol. function=protein dimerization activity; Cellular component=nucleus; Biological process=regulation of transcription, DNA-dependent
  Homolog annotation: Hit_ID=Q2R3F5; Match level="QueryCoverage=98%, HitCoverage=8%, E-value=9e-32, Identity=95%"; Hit description=Auxin response factor 23
  Pfam annotation: Domain name=Auxin_resp; Domain location=33-68; Score= 6.9; E_value=4e-05; Accession=PF06507.5; Description=Auxin response factor
  Subcellular localization annotation: CTP_CleavageSite=59; ConfidenceScore=5.01e-01
LRVGVRRAMRQQANVPSSVISSHSMHLGVLATAWHAVNTGTMFTVYYKPRTSPAEFVVPCDRYMESLKRI

SEQ ID NO: 107788 - protein, 39 aa, Setaria italica
  Transcript Sequence Number=SeqID_41814
TCCKPLPLSIRFRCTEPKRPRSNAVASLPDFFSSEQKEA

SEQ ID NO: 107789 - protein, 125 aa, Setaria italica
  misc_feature (85)..(85): Xaa can be any naturally occurring amino acid
  misc_feature (106)..(106): Xaa can be any naturally occurring amino acid
  Transcript Sequence Number=SeqID_41815
  Gene Ontology: Mol. function=protein dimerization activity; Cellular component=nucleus; Biological process=regulation of transcription, DNA-dependent
  Homolog annotation: Hit_ID=Q2R3F5; Match level="QueryCoverage=98%, HitCoverage=16%, E-value=2e-41, Identity=67%"; Hit description=Auxin response factor 23
TQCKSQGGSTRSCKKVHKQGIALGRSVDLTKFKGYTELVSELDEMFDFNGELKGSNKEWMVVYTDNEGDMMLVGDDPLDLLRCVXKILWTMLQNSGSEDSPANSMXRGSAVRETLPASSLNSGNC

SEQ ID NO: 107790 - protein, 79 aa, Setaria italica
  Transcript Sequence Number=SeqID_41816
  Homolog annotation: Hit_ID=Q2R3F5; Match level="QueryCoverage=93%, HitCoverage=7%, E-value=5e-15, Identity=59%"; Hit description=Auxin response factor 23
FDREKSTIGTQSKLGSDSWMQMSRPESYNEMLSGLSGYQQPKDLQNQQGFCSLPDQIAAGRPNFLYHWIVLSVQPEAST

SEQ ID NO: 107791 - protein, 62 aa, Setaria italica
  Transcript Sequence Number=SeqID_41817
MAASLVSLLTAPLISAVLGGAIALVFLAGYLRRKRAAIAHIPPSATAAAPDQPKHVRPSNQA

SEQ ID NO: 107792 - protein, 142 aa, Setaria italica
  Transcript Sequence Number=SeqID_41818
  Gene Ontology: Mol. function=protein dimerization activity; Cellular component=nucleus
  Homolog annotation: Hit_ID=Q2R3F5; Match level="QueryCoverage=78%, HitCoverage=13%, E-value=2e-41, Identity=71%"; Hit description=Auxin response factor 23
PNLPSNTIGSWCDASEFCKYQIWEWSINSIPKFGICRTLRHRTKFGNGVYTPLPGRGIDQYSAGWFGHMVPGSRMDDAQPRVIKPQPLVLAHGDAQKMKGNSCKLFGIHLDSPAKSEPLKSPPSVANDGMPQTPAAAEWRRV

SEQ ID NO: 107793 - protein, 181 aa, Setaria italica
  Transcript Sequence Number=SeqID_41819
  Gene Ontology: Mol. function=protein dimerization activity; Cellular component=nucleus; Biological process=regulation of transcription, DNA-dependent
  Homolog annotation: Hit_ID=Q2R3F5; Match level="QueryCoverage=71%, HitCoverage=15%, E-value=1e-57, Identity=83%"; Hit description=Auxin response factor 23
  Pfam annotation: Domain name=AUX_IAA; Domain location=23-148; Score= -93.7; E_value=0.011; Accession=PF02309.8; Description=AUXIAA family
DPQTCQGRIPCLWTFLQLLVDPPCDLHCVLLEDCGHGTGSACGASSCFGVLGGSTRSCKKVHKQGIALGRSVDLTKFKGYTELVSELDEMFDFNGELKGSNKEWMVVYTDNEGDMMLVGDDPWDEFCNMVHKIFIYTTEEVQRMNPGTLNSGSEDSPANSMERGSAVRETLPASSLNSGNC

SEQ ID NO: 107794 - protein, 154 aa, Setaria italica
  Transcript Sequence Number=SeqID_41820
  Gene Ontology: Mol. function=protein dimerization activity; Cellular component=nucleus; Biological process=regulation of transcription, DNA-dependent
  Homolog annotation: Hit_ID=Q2R3F5; Match level="QueryCoverage=84%, HitCoverage=15%, E-value=9e-57, Identity=80%"; Hit description=Auxin response factor 23
MAPPAAARGGGGFGGGGGGGAEDGMYTELWNLCAGPLVTVPRVGDKVYYFPQGHIEQVEASTNQVAEQHMQLYNLPWKILCEVMNVELKAEPDTDEVYAQLTLLPESKQPDENGSSEQEMPAAPSAAPARPRVHSFCKTLTASDTSTHGGFSVL

SEQ ID NO: 107795 - protein, 106 aa, Setaria italica
  Transcript Sequence Number=SeqID_41821
  Gene Ontology: Mol. function=protein dimerization activity; Cellular component=nucleus; Biological process=regulation of transcription, DNA-dependent
  Homolog annotation: Hit_ID=Q2R3F5; Match level="QueryCoverage=100%, HitCoverage=12%, E-value=5e-44, Identity=80%"; Hit description=Auxin response factor 23
KFKGYTELVSELDEMFDFNGELKGSNKEWMVVYTDNEGDMMLVGDDPWDEFCNMVHKIFIYTTEEVQRMNPGTLNSGSEDSPANSMERGSAVRETLPASSLNSGNC

SEQ ID NO: 107796 - protein, 94 aa, Setaria italica
  Transcript Sequence Number=SeqID_41822
QQNLHSIVLDKYAMYSCCLRQCHVATNEQITTGKRNNFVYMTSYKRSPGTKKTSYMVLPACDYQKVQLKLEGYSWKQKRNQIKLHLHLEFLLQH

SEQ ID NO: 107797 - protein, 260 aa, Setaria italica
  Transcript Sequence Number=SeqID_41823
  Gene Ontology: Mol. function=protein binding; Cellular component =nucleus; Biological process=cell division
  Homolog annotation: Hit_ID=P93411; Match level="QueryCoverage=100%, HitCoverage=100%, E-value=1e-134, Identity=90%"; Hit description =Cyclin-C1-1
  Pfam annotation: Domain name=Cyclin_N; Domain location=4-147; Score =52.1; E_value=2.1e-12; Accession=PF00134.15; Description=Cyclin, N -terminal domain
MAANFWASSHCKQLLDNPEDADLVPAADRERGITPEEFRLVKIHMSFHIWRLAQAVKVRQRVIATAVTYFRRVYTRKSMSEYDPRLVAPTCLYLASKVEESTVQARLLVFYIKKMCGTGSDDKYRFEIKDILEMEMKLLEALDYYLVVFHPYRPLLQLLQDAGITDLTQFAWGLVNDTYKMDLILIYAPYMIALACIYIASVLKDKDTTSWFEELRVDMNIVKNISMEILDFYDTYKIDPQRGLPEDKISPVLNKLPAKS

SEQ ID NO: 107798 - protein, 56 aa, Setaria italica
  Transcript Sequence Number=SeqID_41824
MVVALRFPAVARESPAALAAAAAKLGREQDFVCASARPGPQCWRRRGLVVRCQTGA

SEQ ID NO: 107799 - protein, 91 aa, Setaria italica
  Transcript Sequence Number=SeqID_41825
  Gene Ontology: Mol. function=protein dimerization activity; Cellular component=nucleus; Biological process=regulation of transcription, DNA-dependent
  Homolog annotation: Hit_ID=Q41558; Match level="QueryCoverage=100%, HitCoverage=19%, E-value=6e-29, Identity=75%"; Hit description =Transcription factor HBP-1b(c1) (Fragment)
  Pfam annotation: Domain name=bZIP_1; Domain location=43-91; Score =15.3; E_value=0.0087; Accession=PF00170.13; Description=bZIP transcription factor
  Pfam annotation: Domain name=bZIP_2; Domain location=43-86; Score =13.0; E_value=0.022; Accession=PF07716.7; Description=Basic region leucine zipper
  Pfam module annotation: Pfam domain module=bZIP_1::bZIP_2; Domain location=43-91::43-86
MAYASPGTDTSTDLDTDEKNQMLELGQLASLTASGSGDKSNDKLGQKALRRLAQNREAARKSRLRKKAYVEQLENSRLKLAQLEQELQRAR

SEQ ID NO: 107800 - protein, 54 aa, Setaria italica
  Transcript Sequence Number=SeqID_41826
SGTILYSALTCTGMMETFRPMTSKIHISFTVTHCLGPAGMEIHCNGGYGIFNSS

SEQ ID NO: 107801 - protein, 81 aa, Setaria italica
  Transcript Sequence Number=SeqID_41827
TEEVTDSCQRGAGDGSPFVGVYKPLTMMLILPLGAEVSVIHIFIQKKHGISHNCGGSCKCSKYCCTCKSSCCDVFTHVNFL

SEQ ID NO: 107802 - protein, 175 aa, Setaria italica
  Transcript Sequence Number=SeqID_41828
  Subcellular localization annotation: CTP_CleavageSite=61; ConfidenceScore=5.39e-01
YNRNVSSVKTASIYLYSLSFSNSQVQCSILSALSNANSLTLVSPSVYEDVVPKVLQRDLPRCETFSKLKRLHLGEWFLSGGCYPLIYLLRRSPSVEKVILQLDTSGADDYDRLANAISEICRPCKEATMTFGCEKLKKIRIYCHLERDKRAQIIMLILSTHISPLPSIKIKPLPV

SEQ ID NO: 107803 - protein, 137 aa, Setaria italica
  Transcript Sequence Number=SeqID_41829
  Gene Ontology: Mol. function=protein serine/threonine kinase activity; Biological process=protein amino acid phosphorylation
  Homolog annotation: Hit_ID=B6SW37; Match level="QueryCoverage=97%, HitCoverage=19%, E-value=5e-52, Identity=76%"; Hit description =Protein kinase
RPFDLREHLPDSVAVGFSAATGEAAELHQVLYWEFTSTIDPKKETVILWVVLGLCCLLLVLVGAGVVWFVRQWRKAGELDDGDIEVDDVMGGEYDELADEFVVESGPRRFRYAELAAATRNFAEDRKLGQGGFGAVY

SEQ ID NO: 107804 - protein, 54 aa, Setaria italica
  Transcript Sequence Number=SeqID_41830
FIQQPSQSAENLGSTKLAFHLSKKHEQQLAGNFRNHPKINNFLQWIYKMQYDET

SEQ ID NO: 107805 - protein, 65 aa, Setaria italica
  misc_feature (31)..(31): Xaa can be any naturally occurring amino acid
  Transcript Sequence Number=SeqID_41831
  Gene Ontology: Mol. function=calcium ion binding; Cellular component =integral to membrane; Biological process=protein processing
  Homolog annotation: Hit_ID=B4FZF8; Match level="QueryCoverage=73%, HitCoverage=8%, E-value=4e-18, Identity=85%"; Hit description=Nicalin
MLMMIETKIYWLCLVLLQRHIYGLKGRNIDXFAENSSLAINPHYIQSWLDLLSRTSRVAPFLQKM

SEQ ID NO: 107806 - protein, 525 aa, Setaria italica
  Transcript Sequence Number=SeqID_41832
  Gene Ontology: Mol. function=calcium ion binding; Cellular component =integral to membrane; Biological process=protein processing
  Homolog annotation: Hit_ID=B4FZF8; Match level="QueryCoverage=96%, HitCoverage=91%, E-value=0.0, Identity=83%"; Hit description=Nicalin
  Pfam annotation: Domain name=Nicastrin; Domain location=184-389; Score=-53.7; E_value=1.8e-05; Accession=PF05450.7; Description =Nicastrin
RRGCWRRHALRSCRSHGDVGSRSAALNHHAAALPLPPGADLSRSALVAPLLDLPLSFLREYLVEKKHLGGLLILLPTKLSDKDGTGNDVDRGQVKGVLAELEKLLVHEEVPYPVYFAFHDDDFDNLLADIRKIASSGQPASATTGGYKLVVSSAEPRKVSSPTISNIQGWLPGLKGEGDTEQLPTIAIVANYDTFGAAPALSVGSDGNGSGVVALLEIARLFSRLYSNPKTRGKYNLLFGLTSGGPYNYNGTSKWLRSFDQRVRESIDYAICLNSVGSWSNDLWMHVSKPPENPYIKQIFEDFSDVSKEMGVSVGIKHKKINVSNPRVAWEHEQFSRFRVTALTLSEMSSPPEFLESTGGLHDTRESTNVDSVIRTVRLVSESLARHIYGLKGRNIDVFAENSSLAINPHYIQSWLDLLSRTPRVAPFLQKNDPFIAALKKELSEHTADVHVQNDALDGMFTFYDATKATLNVYQVASVTFDLLFLLLLGSYLIVLFCFLVITTRGVDDLINIFRRPPSRKLKGA

SEQ ID NO: 107807 - protein, 300 aa, Setaria italica
  Transcript Sequence Number=SeqID_41833
  Gene Ontology: Cellular component=chloroplast envelope
  Homolog annotation: Hit_ID=Q5VPC4; Match level="QueryCoverage=66%, HitCoverage=37%, E-value=4e-86, Identity=73%"; Hit description =Pherophorin-like protein
PCDFGLRLPRPAECVRRVPEVVEFYHSLMRRDSRWRDGCAASEAANGGGAAAARDMIGEIENRSAHLLAIKSDVERQGDFIRFLIKEVEGAAFVDIEDVVSFVKWLDVELSRLVDERAVLKHFEWPEHKADALREAAFGYCDLKKLEGEAASFRDDARQPCAAALKKMQALFEKLEHGVYNLARVRDAATSRYTRFQIPWEWMKQDAGIVSQIKLQSVKLAMKYLKRVSSELEAIKGGPEEEELMLQGVRFAFRVHQFAGGFDVDTMRAFQELKEKASMCRIQRKKQSRHLRQHTLVART

SEQ ID NO: 107808 - protein, 165 aa, Setaria italica
  misc_feature (22)..(22): Xaa can be any naturally occurring amino acid
  misc_feature (138)..(138): Xaa can be any naturally occurring amino acid
  Transcript Sequence Number=SeqID_41834
  Gene Ontology: Mol. function=protein serine/threonine kinase activity; Biological process=protein amino acid phosphorylation
  Homolog annotation: Hit_ID=Q5W239; Match level="QueryCoverage=99%, HitCoverage=26%, E-value=1e-74, Identity=82%"; Hit description =Ser/Thr receptor-like kinase
  Pfam annotation: Domain name=Pkinase; Domain location=1-150; Score= -107.0; E_value=0.04; Accession=PF00069.17; Description=Protein kinase domain
FDIKPHNILLDYNFNPKISDFXGLAKLCARDQSIVTLTAARGTMGYIAPELYSRNFGGISYKSDVYSFGMLVLEMVSGRRNSDPGIENQGDVYLPQWIYERVIAGQDLVLNREVTEEEKEKVKQLAIVALCCIQWNPXNRPSMTKVVNMLTGRLKNLQIPPKPYI

SEQ ID NO: 107809 - protein, 95 aa, Setaria italica
  Transcript Sequence Number=SeqID_41835
  Subcellular localization annotation: CTP_CleavageSite=51; ConfidenceScore=5.79e-01
MAYAAHVVAKIQPAASLAATPRSNPRRPSSLRVGALSGSTTVQQKKFVAKSATSVVEGGDAFVGVKQNTRPIIVIDNYDSFTYNLCQYMGEVGAN

SEQ ID NO: 107810 - protein, 121 aa, Setaria italica
  misc_feature (13)..(13): Xaa can be any naturally occurring amino acid
  Transcript Sequence Number=SeqID_41836
  Gene Ontology: Mol. function=methyltransferase activity; Cellular component=nucleus; Biological process=intracellular signaling cascade
  Homolog annotation: Hit_ID=B9SP39; Match level="QueryCoverage=77%, HitCoverage=8%, E-value=2e-23, Identity=53%"; Hit description=Phd finger protein, putative
  Pfam annotation: Domain name=PWWP; Domain location=1-63; Score=-3.7; E_value=0.059; Accession=PF00855.9; Description=PWWP domain
WPAVVVDESDVPXNRALKRFVLDQSILVQFFGTHDFARVKLKQAVPFLNGLLSSLHLKCKQASFSRSLEEAKEFLRTQQLPEIMMQLRKCVQHDGSDDNSCEDRVDSCGNLSEDRAVQNGE

SEQ ID NO: 107811 - protein, 85 aa, Setaria italica
  misc_feature (28)..(28): Xaa can be any naturally occurring amino acid
  Transcript Sequence Number=SeqID_41837
  Homolog annotation: Hit_ID=B6SMC5; Match level="QueryCoverage=91%, HitCoverage=30%, E-value=2e-25, Identity=70%"; Hit description=Cupin, RmlC-type
  Pfam annotation: Domain name=DUF1637; Domain location=1-82; Score= -24.9; E_value=4.1e-09; Accession=PF07847.4; Description=Protein of unknown function (DUF1637)
IHADGLAKVVAVDDLREAPCKASVLFPXSGGNIHTLTAVTPCALLDVHAPPYAEDLGRSSTYFSDMPVPALPGYAVLEEAEVRQY

SEQ ID NO: 107812 - protein, 112 aa, Setaria italica
  misc_feature (83)..(83): Xaa can be any naturally occurring amino acid
  Transcript Sequence Number=SeqID_41838
  Gene Ontology: Mol. function=protein dimerization activity; Cellular component=nucleus; Biological process=regulation of transcription, DNA-dependent
  Homolog annotation: Hit_ID=Q39162; Match level="QueryCoverage=83%, HitCoverage=18%, E-value=1e-15, Identity=50%"; Hit description =Transcription factor TGA4
TLTAAADPFGLPDGYMLQMATAVEKLKELVGFVTQVTNRPGRQAPSASGRSPASHTLPILQADHLRQTTMQQMHKILTTRQAXRGLLALGDYFQRLRALSHLWATRREAAIS

SEQ ID NO: 107813 - protein, 50 aa, Setaria italica
  Transcript Sequence Number=SeqID_41839
MMELYHGYLEDHFNLHKLSAASPPEFMTSASAVQFAAVPVRMGVYERPAP

SEQ ID NO: 107814 - protein, 131 aa, Setaria italica
  Transcript Sequence Number=SeqID_41840
  Gene Ontology: Mol. function=cation transmembrane transporter activity
  Homolog annotation: Hit_ID=A0N0D7; Match level="QueryCoverage=88%, HitCoverage=19%, E-value=2e-19, Identity=49%"; Hit description =Putative sodium transporter HKT7-A1
VLIRAMSAVEMEVFSNGQLLIITALMFAGGEVFISLVGLASKWSKLRKQIINRSQRVESHDDGVELETPAAIAAEAEAAADADDERSSMTITTVTEDHTGPVVDAKMLRLNAVRSMFYIVLAILLVVHVVG

SEQ ID NO: 107815 - protein, 76 aa, Setaria italica
  Transcript Sequence Number=SeqID_41841
GHVCQLPTPCRDFVTSLFFLLIHAAYHIASFPAMACHAQLCSLLFILYFSFHEIADSLNFCALISYRVCSGLKYRL

SEQ ID NO: 107816 - protein, 123 aa, Setaria italica
  misc_feature (121)..(121): Xaa can be any naturally occurring amino acid
  Transcript Sequence Number=SeqID_41842
NHSLVNKNVTSKIVKWNKEKRPASNINISSAALLMMKNRIYPGDMVAATEHRTMQLLQAVLEPEASGEEEKVHLVLSMEDGHKLQQALQLVPRIRKIVLVHIHRPAMMIPVPTSKNSPVEXYK

SEQ ID NO: 107817 - protein, 85 aa, Setaria italica
  Transcript Sequence Number=SeqID_41843
  Subcellular localization annotation: CTP_CleavageSite=62; ConfidenceScore=5.88e-01
FTSNRPQPLSSPPPLLSPPFPASPPTAPRESSSPIPLHKPQRQPQARTRGISLRRRSPQAPRARAGISGPERCWGSSSRRSCCCS

SEQ ID NO: 107818 - protein, 347 aa, Setaria italica
  misc_feature (309)..(309): Xaa can be any naturally occurring amino acid
  Transcript Sequence Number=SeqID_41844
  Gene Ontology: Mol. function=oxidoreductase activity; Cellular component=extracellular region; Biological process=lignin catabolic process
  Homolog annotation: Hit_ID=Q0DHL2; Match level="QueryCoverage=91%, HitCoverage=53%, E-value=1e-152, Identity=81%"; Hit description =Laccase-12/13
  Pfam annotation: Domain name=Cu-oxidase; Domain location=162-316; Score=202.1; E_value=1.5e-57; Accession=PF00394.14; Description =Multicopper oxidase
  Pfam annotation: Domain name=Cu-oxidase_3; Domain location=36-152; Score=231.0; E_value=2.9e-66; Accession=PF07732.7; Description =Multicopper oxidase
  Pfam module annotation: Pfam domain module=Cu-oxidase::Cu-oxidase_3; Domain location=162-316::36-152
  Subcellular localization annotation: CTP_CleavageSite=8; ConfidenceScore=5.05e-01
MASSSAVPSSAVAVAAAVLLLAAVGAEAETRKYQFNVQMASVTRLCGTKSIVTVNGQYPGPTLFAREGDHMEVTVVNRSPYNVSLHWHGVRQLLSGWADGPAYITQCPIQPGGSYVYRYQIVGQRGTLWWHAHISWLRSTLYGPIVILPPAGVPYPFPKPDEEVPLMFGEWWRNDTEAVIAQALQTGGGPNISDAYTINGLPGPLYNCSAQDTFRLKVKPGKTYMLRLINAALNDELFFSVANHTLTVVDVDALYVKPFAVDTLVIAPGQTSNVLLAAKPAFPGARYYMEARPYTNTQGTFDNTTVAGXILEYEDPSSSSSSSSSSSATTAAAANLPIFAPTLPQIN

SEQ ID NO: 107819 - protein, 510 aa, Setaria italica
  Transcript Sequence Number=SeqID_41845
  Gene Ontology: Mol. function=electron carrier activity; Cellular component=integral to membrane; Biological process=oxidation reduction
  Homolog annotation: Hit_ID=C0KHM0; Match level="QueryCoverage=89%, HitCoverage=85%, E-value=0.0, Identity=68%"; Hit description =Putative ferulate 5-hydroxylase
  Pfam annotation: Domain name=p450; Domain location=60-510; Score =300.4; E_value=3.8e-87; Accession=PF00067.14; Description=Cytochrome P450
  Subcellular localization annotation: CTP_CleavageSite=47; ConfidenceScore=5.39e-01
MAQALVQSGLGLHQQLTTASPQALAVSLLVVFCPLLLLLARFATTAKATTPREKLLAKLPSPPSRLPVIGHLHLVGSLPHVSLRDLTAKHGRGGVMLLRLGAVPTLVVSSARAAQAVLRTHDHLFASRPRSVVTDILFYGSSDIAFSPYGEHWRNIRKIVTTQLLTVKKVRAYRFVREHEVRLVMEKIGESAALGKAVDLSRLLPSFTNEIMCNIVSGKLFKDEGRNKLFRELTEANSQLLGGFNLEDYFPRLGRLGVVRRVVCAKAEKVHKRWDDFLDMLIDGHASKSVANCSDDNKISDLIDVLLSIQQQYGLTRDNVKAILVDMFQAGTDTSSIVMEYAMAELMQKPCLMTKLQAEVRRIVPRGKDMVTEDDLNSMTYLKAVIKETLRLHPPLVLLVPHLCLADCDIEGYTIPAGTRVIINGWAIGRDASSWERADEFEPERFMEGSSIAAVDYNGNDFLFLPFGSGRRMCPGTNFAISTMEIMLANLMYHFDWKLPDGYMNVNMTE

SEQ ID NO: 107820 - protein, 202 aa, Setaria italica
  Transcript Sequence Number=SeqID_41846
  Gene Ontology: Mol. function=binding; Cellular component=integral to membrane; Biological process=phagocytosis, engulfment
  Homolog annotation: Hit_ID=Q9M7X4; Match level="QueryCoverage=95%, HitCoverage=24%, E-value=3e-46, Identity=45%"; Hit description =F3E22.19 protein
LCFCARHHYHRMKVNIFASNAMEKILTLTCQREAALVVAAVRFMRTVIGRKDEFLNSRIIKLNLLKPIIEAFVENGDRYNMLHSTFLDLLDFIRKENLEFLIEYVAESFWDQLVKFERLESIQAFKLKYQQIMESAKTKQSASVVDMRKKADERGADKEEENYFKDSDGEDSATAATGAQKQSMPARPKSGGHADCDDDNDE

SEQ ID NO: 107821 - protein, 56 aa, Setaria italica
  Transcript Sequence Number=SeqID_41847
ASLTKPASLTSLSLAITIAHENHIRVPFCFLAISLISTWEIMNVVTTRKHKNSGLL

SEQ ID NO: 107822 - protein, 63 aa, Setaria italica
  Transcript Sequence Number=SeqID_41848
ISMFGLFLKVYACYFHLSLVLPMEYVLNLYVWFLSESMLVSFHLSFCSSYGICTVDAPIMPAA

SEQ ID NO: 107823 - protein, 76 aa, Setaria italica
  Transcript Sequence Number=SeqID_41849
SNARKLDFDSSHPTCVSIQYIEHHPSACRKTHQLKGTSALQIPLSAFCFFLHPSMKQPLFLVQSFCPPFCCNISLP

SEQ ID NO: 107824 - protein, 60 aa, Setaria italica
  Transcript Sequence Number=SeqID_41850
GLTLSACPAVHSHETSMGRIKWSMSPSDEPTGALGSSKCQTPKRQMVLELKGVFWTLARG

SEQ ID NO: 107825 - protein, 160 aa, Setaria italica
  Transcript Sequence Number=SeqID_41851
  Subcellular localization annotation: CTP_CleavageSite=44; ConfidenceScore=5.70e-01
MKPRPPAGASASAYAAPARLRPHLARLASFLVVFAVGYSLGLLSSSTRPSPRPSQTTIVRPHAAHLTDASTTDPAPNATAAATESYPRSPPHDLFRFREECGEPVPSEAVVPTLLEKLFDGESPYAGFPAPHTAALLHPARARPRGWGSTGAVFAELIEA

SEQ ID NO: 107826 - protein, 162 aa, Setaria italica
  misc_feature (15)..(15): Xaa can be any naturally occurring amino acid
  misc_feature (25)..(25): Xaa can be any naturally occurring amino acid
  Transcript Sequence Number=SeqID_41852
  Gene Ontology: Mol. function=transporter activity; Cellular component= integral to membrane; Biological process=response to antibiotic
  Homolog annotation: Hit_ID=B4FA49; Match level="QueryCoverage=99%, HitCoverage=31%, E-value=2e-50, Identity=60%"; Hit description =Carbohydrate transporter/ sugar porter/ transporter
AIGGYLSQPTESIQXVFPANSLFGXRFPYLLPCLCISVFCFVILLSSIWLPETLHKHKPVEKKDQENQCIIEHLAADSEEFVEQNTSSALNKSLLKNWPLMSSIILYCIACFDDMAYSEIFPLWAESDRSYGGLSLSSEDVGQVLTITGASLLLYQTFIYPY

SEQ ID NO: 107827 - protein, 29 aa, Setaria italica
  Transcript Sequence Number=SeqID_41853
LYTSAKCSAQVKHYMNHFENSLNGQRAQK

SEQ ID NO: 107828 - protein, 46 aa, Setaria italica
  Transcript Sequence Number=SeqID_41854
ILFEKHLNSGRKKREDVKVNIPDRFNLGRWHQAGMLTLTSSLMPSS

SEQ ID NO: 107829 - protein, 105 aa, Setaria italica
  Transcript Sequence Number=SeqID_41855
IVKFCKIFEYLPARGMLQIFVAVMTKAATNVERNDLLLLQEIASYMLLACGAVYIISGILCLGVLKRRKQQKETSREQAVKDLKELEKRREELESLLIAERSEAA

SEQ ID NO: 107830 - protein, 133 aa, Setaria italica
  Transcript Sequence Number=SeqID_41856
  Gene Ontology: Mol. function=protein serine/threonine kinase activity; Biological process=protein amino acid phosphorylation
  Homolog annotation: Hit_ID=Q2L855; Match level="QueryCoverage=76%, HitCoverage=57%, E-value=6e-24, Identity=57%"; Hit description =Resistance protein
GVIIIRMMAGKKGYFDCVDTPPEEFIKLVHGNWRKRLQATTMSSYYASQEVRTCIEIALRCVDHDRAKRPTIAQIVNELSNIGTAKSSAAGQTAWRASLLFTHFKYWLPLLVALVAIFLAWPRLCPESWCRET

SEQ ID NO: 107831 - protein, 596 aa, Setaria italica
  Transcript Sequence Number=SeqID_41857
  Gene Ontology: Mol. function=protein serine/threonine kinase activity; Biological process=protein amino acid phosphorylation
  Homolog annotation: Hit_ID=Q2L855; Match level="QueryCoverage=89%, HitCoverage=88%, E-value=0.0, Identity=63%"; Hit description =Resistance protein
  Pfam annotation: Domain name=Pkinase; Domain location=1-206; Score =2.5; E_value=1.2e-08; Accession=PF00069.17; Description=Protein kinase domain
  Pfam annotation: Domain name=Pkinase; Domain location=238-521; Score =178.5; E_value=1.9e-50; Accession=PF00069.17; Description=Protein kinase domain
  Pfam annotation: Domain name=Pkinase_Tyr; Domain location=238-521; Score=33.3; E_value=6.1e-16; Accession=PF07714.9; Description =Protein tyrosine kinase
  Pfam module annotation: Pfam domain module=Pkinase::Pkinase::Pkinase _Tyr; Domain location=1-206::238-521::238-521
EHNGEYVSARVEERALCFEYLEGQSLDKHLSNESCGLDWYICYKIIRGICEGLQYLHKGLEHPIYHLDLKPTNILLNDHMIPRIGGFGLSLFDSLETNNISEDMETSVYMPPEYIDKQQISPKFDVFSLGVIIIQIMAGKESYSKYADTPPEEFIQLVHGLWAKRVPETSWRYASREVRACIEIALKCVKSDRVMRPTITEIVDKLNKIYIAEGSSIEQLYRTREFTLEFLERITSNFSMENIVGRGGFGVIYKGVLDNGEEVAVKKLHPMAWIGDRQLFKNELNNLMKVQHKNIVRLVGYCNHTTQILVEYNGKLVAASVEQRALCLEYLQGLSLDKHLSDEACRLDWDTCYKIIKGICEGLHYLHNGSDHPIYHLDLKPENILLDKDMMPKIGDFGLSRLFDSVETYITQSENVTGTRGYMPPEYIHRQTISPKFDVFSLGVIIIRMMAGKKGYFDCVDTPPEEFIKLVHGNWRKRLQATTMSSYYASQEVRTCIEIALRCVDHDRAKRPTIAQIVNELSNIGTAKSSAAGQSNHEEDIHDSCVHSEFKFTAWRASLLFTHFKYWLPLLVALVAIFLAWPRLCCKFLYHIHIWD

SEQ ID NO: 107832 - protein, 146 aa, Setaria italica
  misc_feature (118)..(118): Xaa can be any naturally occurring amino acid
  Transcript Sequence Number=SeqID_41858
  Gene Ontology: Mol. function=ubiquitin binding; Cellular component =cytoplasm; Biological process=ubiquitin-dependent protein catabolic process
  Homolog annotation: Hit_ID=Q9VUQ8; Match level="QueryCoverage=64%, HitCoverage=32%, E-value=1e-20, Identity=48%"; Hit description=DCN1 -like protein
  Pfam annotation: Domain name=DUF298; Domain location=7-123; Score =85.4; E_value=2e-22; Accession=PF03556.7; Description=Domain of unknown function (DUF298)
MPHTVIMDGIFADIPKLMPFIDLDMGLFSCFYDFVFFICREKGQKSITIQRAVAAWKIVLNGRFRLLDRWCNFVEKYQRHNISEDTWQQLLAFSRCVNEDLEGYDPRGAWPVLIDDFXVEQMHRIYHSTDCSSCVLVILLIVTYFP

SEQ ID NO: 107833 - protein, 62 aa, Setaria italica
  Transcript Sequence Number=SeqID_41859
MGSEGFVAAAAACPAAAEAFAKYYGTVSGGTNVKARQGLVELSHAIDGIEGMRDGIFADIPK

SEQ ID NO: 107834 - protein, 295 aa, Setaria italica
  Transcript Sequence Number=SeqID_41860
  Gene Ontology: Mol. function=molecular_function; Cellular component =cellular_component; Biological process=ubiquitin-dependent protein catabolic process
  Homolog annotation: Hit_ID=Q96GG9; Match level="QueryCoverage=43%, HitCoverage=46%, E-value=5e-23, Identity=43%"; Hit description=DCN1 -like protein 1
  Pfam annotation: Domain name=DUF298; Domain location=58-167; Score =99.6; E_value=1e-26; Accession=PF03556.7; Description=Domain of unknown function (DUF298)
KFLAKTTLASLTSPAEAFAKYYGTVSGGTNVKARQGLVELSHAIDGIEGMRDGIFADIPKLMPFIDLEDMGLFSCFYDFVFFICREKGQKSITIQRAVAAWKIVLNGRFRLLDRWCNFVEKYQRHNISEDTWQQLLAFSRCVNEDLEGYDPRGAWPVLIDDFVEQMHRIYHSTDCSSAMESQCTISSTFKGLDLLPGSKRKCPPHFRSNEEDVELSDSFTRSVHLTPIKRLKESHGTNYGVGESNKGTDFSNSCSDYLEDTNLHNPRGCLQNSPCNVEDALSKGFEGCISMKCSF

SEQ ID NO: 107835 - protein, 112 aa, Setaria italica
  Transcript Sequence Number=SeqID_41861
  Gene Ontology: Mol. function=DNA binding; Biological process =regulation of transcription
  Homolog annotation: Hit_ID=Q8RUX5; Match level="QueryCoverage=66%, HitCoverage=28%, E-value=2e-19, Identity=63%"; Hit description=One repeat myb transcriptional factor
LQVYGRGNWKNISKFFVTTRTPVQISSHAQKYFHRQQNSAKKQRYSINDVGLHEGNPLVLNNASDRERTSSSSLVEPTTRMTAAFPASSAVVIPHKSGERERQEHSSICLLR

SEQ ID NO: 107836 - protein, 73 aa, Setaria italica
  Transcript Sequence Number=SeqID_41862
MGDCRPLGFLLSLPFAFLSLLLSVVGVALWLVAITLCCICPCFSCCVKVVELAVALMKLPVSIIIFFINLIPC

SEQ ID NO: 107837 - protein, 44 aa, Setaria italica
  Transcript Sequence Number=SeqID_41863
SILDSLDASFIGINAPESKFGMHHIQVLINLIKWINSLSNLQFT

SEQ ID NO: 107838 - protein, 63 aa, Setaria italica
  Transcript Sequence Number=SeqID_41864
GSLELGQEEAHGEAGDGVDDDVLVYFHGGGFIIESARSATYHNYLTSLAAAAGVLAVSVDYRL

SEQ ID NO: 107839 - protein, 97 aa, Setaria italica
  Transcript Sequence Number=SeqID_41865
ATPTRNMVRRATRRHHRKPGAGGELKRRDEAAEGRGAEHKGKNSRSRTVVNDGMAVHPYDHLELPQAAAKVWVSSVCCSADHVPREAGVVIHLTQIC

SEQ ID NO: 107840 - protein, 62 aa, Setaria italica
  Transcript Sequence Number=SeqID_41866
HSHYSAISVLSLTKADLVADAVVDLELKLLPSCLHLCFGTSLALHAHPLHVLSCLSAKSFCS

SEQ ID NO: 107841 - protein, 421 aa, Setaria italica
  Transcript Sequence Number=SeqID_41867
  Gene Ontology: Mol. function=molecular_function; Cellular component =outer membrane; Biological process=biological_process
  Homolog annotation: Hit_ID=B6SPX1; Match level="QueryCoverage=99%, HitCoverage=80%, E-value=0.0, Identity=80%"; Hit description=Outer membrane protein, OMP85 family protein
  Pfam annotation: Domain name=Bac_surface_Ag; Domain location=77-420; Score=82.1; E_value=2e-21; Accession=PF01103.15; Description=Surface antigen
RDLVRAAAAAPTYLRLLGAFDTVSITLDAPPPGTPGSAVVVLVDVSEARGRAATEFGVFANTQTRSCSLEGSLKLKNLFGYCETWDAAGALELDQTAELSAGVEMPRIGAIPTPLVARISFLSEDWLKSSLKEHLMGVSVGLLSTMNHNLAYNLTWRKLTDPARMSSNSVQEQLAHSLLSSVKYAYTVDQRDSSIRPTRGYAFLSSSQVGGLAPGSKYSQFLRQEFDLRVALPLGVLNGALNAGVAAGVIHPLERGSTGSVSPLSERFYLGGNRSLVCRLGGPSSLLGFKTRGLGATELRTCDPNNSENGTSTSPELNGLGGDIAVTAFADLSFDIPLKPLRDLGIHGHAFVCAGNLGKLTECDLRKFPLTNFLQTFRSSAGFGVVVPTRLFRIEVNYCHILRQFDHDKGKTGIQFSFASP

SEQ ID NO: 107842 - protein, 72 aa, Setaria italica
  Transcript Sequence Number=SeqID_41868
HGAKGIVRARLSRLSLRPFQDMQLSCQINQINAADCRQSGSARGASMPSVCRARLCNFISSVPAVPMNVSIS

SEQ ID NO: 107843 - protein, 142 aa, Setaria italica
  Transcript Sequence Number=SeqID_41869
  Gene Ontology: Mol. function=protein disulfide oxidoreductase activity; Biological process=intracellular signaling cascade
  Homolog annotation: Hit_ID=B9RY43; Match level="QueryCoverage=99%, HitCoverage=21%, E-value=6e-60, Identity=71%"; Hit description =Electron transporter, putative
  Pfam annotation: Domain name=DUF547; Domain location=1-70; Score =14.3; E_value=2e-08; Accession=PF04784.6; Description=Protein of unknown function, DUF547
NGILRANRRQPYTLAKPFGSNDRRLELAQRRANPLVHFALCDATRSSPIVRFYTTQSVEPELRHAAREFFLHGGVEIDLESRTVHLTRIVKWYSADFGQDRDILRWLLNYLDPTKAGLLTHLLNDGGPINVSYMNYDWSLNV

SEQ ID NO: 107844 - protein, 74 aa, Setaria italica
  Transcript Sequence Number=SeqID_41870
  Subcellular localization annotation: CTP_CleavageSite=48; ConfidenceScore=5.05e-01
RPNSMKEFFRLSFTPPLWSLVQSFNWYPSRLRFLNTLIDFKTHYGERSSSTVAPYLLALTIGIGKPPHESPSKM

SEQ ID NO: 107845 - protein, 46 aa, Setaria italica
  Transcript Sequence Number=SeqID_41871
  Homolog annotation: Hit_ID=B9SPR5; Match level="QueryCoverage=91%, HitCoverage=4%, E-value=7e-13, Identity=88%"; Hit description =Ubiquinone biosynthesis protein coq-8, putative
MASGVLIPEVIQSTDKVLILEYMDGIRLNDNDSLEAYGVDKQKLVE

SEQ ID NO: 107846 - protein, 942 aa, Setaria italica
  Transcript Sequence Number=SeqID_41872
  Gene Ontology: Mol. function=protein kinase activity; Biological process=protein amino acid phosphorylation
  Homolog annotation: Hit_ID=B9SPR5; Match level="QueryCoverage=99%, HitCoverage=99%, E-value=0.0, Identity=64%"; Hit description =Ubiquinone biosynthesis protein coq-8, putative
  Pfam annotation: Domain name=ABC1; Domain location=108-235; Score =118.2; E_value=2.8e-32; Accession=PF03109.8; Description=ABC1 family
  Pfam annotation: Domain name=Beta-lactamase; Domain location=480-914; Score=157.6; E_value=3.8e-44; Accession=PF00144.16; Description=Beta -lactamase
  Pfam module annotation: Pfam domain module=ABC1::Beta-lactamase; Domain location=108-235::480-914
MGWGNTITRRLKVFSMALLIYFDYKAVQKRVQWVSTGKKSAIWTKTHERNARRVLNLMIELEGLWVKMGQYLSTRADVLPEPYINVLKQLQDSLPPRPSEEVRGTIEKELGKPMSDLFADFALDPLATASIAQVHRATLADGREVVVKIQHDGIKEIILEDLKNAKSLIEWIAWAEPQYNFNPMIDEWCKEAPKELDFNHEAENTRTVSRNLSRETDCGSGSSSSAVDVLIPEVIQSTDKVLILEYMDGIRLNDNDSLEAYGVDKQKLVEEITRAYAHQIYIDGFFNGDPHPGNFLVSKEPPHKPILLDFGLTKRISKSMRQALAKMFLSCAEGDHVALLSAFAEMGLKLRVDMPQQAMDIATIFFRQSTTASEAKENIKALNDQRERNVKALQEKMKLNKKEVQRFNPVDAFPGDAIIFMRVLNLLRGLSASLNVRIVYLDIMRPFAESTLLGSLMHGQIPNSQWIYDSPANSDVESKLRNYLLELGSDKILGIQVCAYKDGKVIIDTAAGMLGKYDPRPVQHDSLFPVFSVTKGVTAGMVHWLVNEGKLKYEETVANIWPNFGTNSKELIKVHHLLNHTSGLHNALGDVVKSDPMLVCDWEETLNQVAKCTPETEPGSAQIYHYLSFGWLCGGVIEHASGKKFQEVLEEAIVRPLHIEGELYIGIPPGVESRLATLTVDTEELQKLSGIRAGPGVPPELLSNIAQMASGVPVLFNTLNVRRAIIPAANGHCSARALARYYAALATGGSIPPPHSADSKPPLGSHVHTPKFPTAPLKKKKGAGKKGVGSTGNLQDVSNTDKNGYSQLRTSDANDEAAAGSGGRIFSSDKILDAFMGVGEYQSMVHPNGKFGLGFRRYNNPSGGTLRCFGHSGMGGSTGFCDVENNFAMAVMVNKMSLGSVTRGIVRFILEELGLPVPDEFSTSGEKGPDMVLNLAPPQQQR

SEQ ID NO: 107847 - protein, 56 aa, Setaria italica
  Transcript Sequence Number=SeqID_41873
CESCLIQLVGLVRKIAAKKPLIRLQECLLLAQHESFNKNPTQEKKHQQQIIYTLLT

SEQ ID NO: 107848 - protein, 44 aa, Setaria italica
  Transcript Sequence Number=SeqID_41874
SRAPRIAECLVGDDTGAIVFTARNDQGAYFYLPSLLFLLWRVAG

SEQ ID NO: 107849 - protein, 133 aa, Setaria italica
  misc_feature (123)..(123): Xaa can be any naturally occurring amino acid
  Transcript Sequence Number=SeqID_41875
  Gene Ontology: Mol. function=hydrolase activity, hydrolyzing O -glycosyl compounds; Cellular component=extracellular region; Biological process=carbohydrate metabolic process
  Homolog annotation: Hit_ID=Q19AL0; Match level="QueryCoverage=81%, HitCoverage=36%, E-value=1e-37, Identity=66%"; Hit description=Class III chitinase
  Pfam annotation: Domain name=Glyco_hydro_18; Domain location=26-133; Score=-50.3; E_value=0.02; Accession=PF00704.20; Description =Glycosyl hydrolases family 18
MAGRALAPFLLAATILAALLATCHAGGIAVYWGQNDGEASLSETCASSNYKFVILAFVYKFGKGQTPQLDLASHCDPSSGGCRGLSKDIQSCQRRGIKVLLSIGGGDGSYGLTSEGDARNVAXYLWNNYLGGT

SEQ ID NO: 107850 - protein, 194 aa, Setaria italica
  misc_feature (11)..(11): Xaa can be any naturally occurring amino acid
  misc_feature (17)..(17): Xaa can be any naturally occurring amino acid
  misc_feature (123)..(123): Xaa can be any naturally occurring amino acid
  misc_feature (132)..(132): Xaa can be any naturally occurring amino acid
  Transcript Sequence Number=SeqID_41876
  Gene Ontology: Mol. function=1,3-beta-glucan synthase activity; Cellular component=1,3-beta-glucan synthase complex; Biological process=1,3-beta-glucan biosynthetic process
  Homolog annotation: Hit_ID=Q5SMM3; Match level="QueryCoverage=99%, HitCoverage=10%, E-value=5e-82, Identity=81%"; Hit description =Putative callose synthase 1 catalytic subunit
LQSTGLLAFWXCFVSQXSFIFQYGIIYHLNISAGNKSISVYGLSWLVIIVVVLVLKVVSMGRKKFSADYQLMFRLLKLSLFIGSVGTLAVLFTVLHLTVGDIFASFLAFAPTGWAILQISQAXKPVVKAFGXWGSVKALSRGYEYLMGIVIFVPVAVLAWFPFVSEFQTRLLFNQAFSRGLQISRILAGGKKQR

SEQ ID NO: 107851 - protein, 190 aa, Setaria italica
  Transcript Sequence Number=SeqID_41877
  Gene Ontology: Mol. function=2 iron, 2 sulfur cluster binding; Cellular component=chloroplast envelope; Biological process =oxidation reduction
  Homolog annotation: Hit_ID=B6ST74; Match level="QueryCoverage=99%, HitCoverage=35%, E-value=8e-74, Identity=68%"; Hit description =Pheophorbide a oxygenase
  Pfam annotation: Domain name=PaO; Domain location=99-190; Score =118.2; E_value=2.7e-32; Accession=PF08417.4; Description =Pheophorbide a oxygenase
KDVLQRKRPPHIKEIDDPSFVTAFGIRDLFYVYDILAENLMDPSHVPYAHKGLIGGPRNTEDPGRVEHDKEGGGPIKLKIEEASMDGFLSSWERGFWKFVAPCTFHSSGTSMQAKPGKKKAPRFMLVVFCVPVAPGRSRLIWAFPRNFAVWLDMIIPRWVYHINQNSVLDSDAYILHIEERKFAASGLDN

SEQ ID NO: 107852 - protein, 225 aa, Setaria italica
  Transcript Sequence Number=SeqID_41878
  Gene Ontology: Mol. function=microtubule motor activity; Cellular component=microtubule associated complex; Biological process =microtubule-based movement
  Homolog annotation: Hit_ID=Q8L5E3; Match level="QueryCoverage=96%, HitCoverage=63%, E-value=8e-87, Identity=73%"; Hit description =Putative CENP-E-like kinetochore protein (Fragment)
SAAAVELKNLAEEVTRLSYENAKLNADLAAAKEQTASVSRSNIHNDTKRCDNENGILVEELQKELVASCQREAVLEDTLSQKDRRESELIKIIDDAKCREHELENELASMWVLVSKVKKESSQEDVFEFKAKQNGFHSSKTDSGRAVSELQSSDNGSWDGLSTIEEARAAYNFERRRCKELESVVSRLKGEDLRGLGVKVLEELQNFHVEALSRICQEKMASQVL

SEQ ID NO: 107853 - protein, 292 aa, Setaria italica
  Transcript Sequence Number=SeqID_41879
  Gene Ontology: Mol. function=nucleotide binding; Biological process =defense response
  Homolog annotation: Hit_ID=B9V0H2; Match level="QueryCoverage=98%, HitCoverage=23%, E-value=6e-54, Identity=37%"; Hit description=NBS -LRR disease resistance protein family-1
  Pfam annotation: Domain name=LRR_1; Domain location=182-204; Score =8.7; E_value=6.7; Accession=PF00560.25; Description=Leucine Rich Repeat
  Pfam annotation: Domain name=LRR_1; Domain location=206-228; Score =14.6; E_value=0.43; Accession=PF00560.25; Description=Leucine Rich Repeat
  Pfam annotation: Domain name=LRR_1; Domain location=230-252; Score =6.6; E_value=16; Accession=PF00560.25; Description=Leucine Rich Repeat
  Pfam annotation: Domain name=LRR_1; Domain location=25-46; Score=1.2; E_value=1.8e+02; Accession=PF00560.25; Description=Leucine Rich Repeat
  Pfam annotation: Domain name=LRR_1; Domain location=254-275; Score =0.0; E_value=3e+02; Accession=PF00560.25; Description=Leucine Rich Repeat
  Pfam module annotation: Pfam domain module=LRR_1::LRR_1::LRR_1::LRR _1::LRR_1; Domain location=182-204::206-228::230-252::25-46::254-275
DLSLEGYSSPRFPSWLMAISHHLPNLTCIELKNLPTCSNLPPLGQLPYLESLRLCDIPNVIKIERGICGGKGAFPRLAKFTVAHMDGLEEWNTTCPGEDGVEEFMFPMLDALKVYECPMLRLKPCPPKCREFLISQSDQVISSLVEVQTSSHRCNSTPTITSLVISWIRYHQSCRLFHHFLALQELQFYSCQNLTSLPEGIQQLSSLQSLELSNCHSISALPEWLSDISSLEKLIIRRCDSIKSLPTCIQYLTNLKELVIDGNTELQQWCESEENKAKLAHINIMYRDFNFL

SEQ ID NO: 107854 - protein, 191 aa, Setaria italica
  Transcript Sequence Number=SeqID_41880
HGCRWGILQFFGFRGRLRSMKMLADKKHGQRKSSGGGRRRSCYAPLKNEDSGTMDDEKNTEIRKKQKASKKNSGKASLRSFILKKLYGKEGQKEKMLPVAPKLLRTISIHYLESNEYVIDGESASSGDGSSHSTKLSLQNATDTNLRHSTSSIPDGCVSDLSSSLLLKRDDSRVKRKSHRSISMDGVLHKV

SEQ ID NO: 107855 - protein, 283 aa, Setaria italica
  Transcript Sequence Number=SeqID_41881
  Gene Ontology: Mol. function=zinc ion binding
  Homolog annotation: Hit_ID=Q8W0Q6; Match level="QueryCoverage=99%, HitCoverage=24%, E-value=1e-144, Identity=86%"; Hit description =Putative far-red impaired response protein
  Pfam annotation: Domain name=SWIM; Domain location=171-207; Score =39.8; E_value=1.1e-08; Accession=PF04434.9; Description=SWIM zinc finger
YDFINCINMSQTIDEFEANWKALISMVSSQNTEWLNSMYNCRHQWVPVYLRDTFFGDLSLKQQCATRSSLFEGYISARTDSQSFIQQYEKALDCCYEKEVKEEFETKYSLPDIKTSSPIEKQGAELYTRSMFLKFQQEMIDASVYTAEMVKEESGVSIYIVTKSEGSEKPVTVQFSSSGSSATCSCRMFEYFGIVCRHILTVFGVRGISALPSQYFVKRWTKNAMDRSSSKKVDEVNRVEEPKEEQRSSAEDDEHSPTWRYNSLCREALRYAEEGASSLEVYI

SEQ ID NO: 107856 - protein, 82 aa, Setaria italica
  Transcript Sequence Number=SeqID_41882
HARTGGRAESDRRYQVSRFTGSRTVHKNPQANTTAHQAGVQFRNHPQVRQTAVAHPNHSPQNYTTVHQTAPYQNHTVPQVYS

SEQ ID NO: 107857 - protein, 589 aa, Setaria italica
  Transcript Sequence Number=SeqID_41883
  Gene Ontology: Mol. function=transferase activity; Cellular component= cytoplasm; Biological process=mRNA processing
  Homolog annotation: Hit_ID=B9SDZ7; Match level="QueryCoverage=72%, HitCoverage=89%, E-value=2e-88, Identity=42%"; Hit description=Zinc finger protein, putative
  Pfam annotation: Domain name=NTP_transf_2; Domain location=36-126; Score=4.2; E_value=0.1; Accession=PF01909.15; Description =Nucleotidyltransferase domain
MVDSVHDNIVLRNCVKDILAQIKPVEDDRSKRLSTIQELENCIHSLASLAGTAVKPFGSFVSDLYSKSGDLDLSVQFGNGLNLPINKKKKQNVLREVRRALQIRGVAGYIQFIPHARVPVIQYVSNRFGISCDISVNNFAGRIKSKIFYWVNTLDERFGDMVLLIKEWAKAQNINDPKSGSLNSYSLCLLVLFHFQTSEPPILPPLKDIYEGNITEDITEATLYDEQHLDELCVTNIARYRLQNMHQRNESSLCRLLGTFFKKFAHISALLDNVISTYSGQIERIQDNPSWMTKSYHLFVEDPVERPDNAARAVSMKGLDRIASAFNDACHKFDSLEHIDRKELLALLCTPGVGLKLGGRVTANYYTRTPPQRNNQHARTGGRAESDRRYQVSRFTGSRTVHKNPQANTTAHQAGVQFRNHPQVRQTAVAHPNHSPQNYTTVHQTAPYQNHTVPQVYSAQPQTAGPYQNQYQQVYAAGFQTEGPYLDHNQVHGTGFQTARPYQGHNQVYQAGFQPAGTYQNQNQQVRTPGLQTTGPNQNQQRRKGYTSNHQTNRHAATTARYEPVRGQFNNGSIWDSRSQASNSAASQR

SEQ ID NO: 107858 - protein, 56 aa, Setaria italica
  Transcript Sequence Number=SeqID_41884
QSLSTRSIYHLDVVNYSMIILMFSCISLISYFHRNNHMDMDLECFQAFRFRNAIHT

SEQ ID NO: 107859 - protein, 166 aa, Setaria italica
  misc_feature (145)..(145): Xaa can be any naturally occurring amino acid
  Transcript Sequence Number=SeqID_41885
  Gene Ontology: Mol. function=ATPase activity, coupled to transmembrane movement of substances; Cellular component=integral to membrane; Biological process=transport
  Homolog annotation: Hit_ID=Q7XTT6; Match level="QueryCoverage=98%, HitCoverage=9%, E-value=7e-69, Identity=77%"; Hit description =OSJNBa0058K23.17 protein
MGFDPMDWYCQPVKHGAWSHVVENAFGPYTPCGIDTLVVCISHLALFGVCFYRIWRTTRDYRVQRYKLRSPYYNYLLGLLLVYCIAEPLYRIATGTSIMNLDGQPGLAPFEIVSLIIESAAWCCMLVMILLETRIYIYEFRWYIXRFVVIYVLIGEAAMFNLVKKK

SEQ ID NO: 107860 - protein, 126 aa, Setaria italica
  Transcript Sequence Number=SeqID_41886
  Gene Ontology: Mol. function=hydrolase activity, acting on acid anhydrides, catalyzing transmembrane movement of substances; Cellular component=integral to membrane; Biological process =metabolic process
  Homolog annotation: Hit_ID=Q40409; Match level="QueryCoverage=100%, HitCoverage=28%, E-value=6e-52, Identity=78%"; Hit description =Plasma membrane H+ ATPase (Fragment)
LGMGTNMYPSSALLGQCKDEAIASIPVDDLIEKADGFAGVFPEHKYEIVKKLQERKHICGMTGDGVNDAPALKKADIGIAVADATDAARSASDIVLTEPGLSVIISAVLTSRAIFQRMKNYTIYAV

SEQ ID NO: 107861 - protein, 115 aa, Setaria italica
  Transcript Sequence Number=SeqID_41887
LVWHHLKKIMENNPDPEDLVGEATRESQEQNILFIVLRAGQWKTETNLPAERYVVVDSSAVSRRRASHALGTEPSGHPAGHASSVGGWCPRDPRARGRYCLLALESGTVLFSSPP

SEQ ID NO: 107862 - protein, 164 aa, Setaria italica
  misc_feature (126)..(126): Xaa can be any naturally occurring amino acid
  misc_feature (159)..(159): Xaa can be any naturally occurring amino acid
  Transcript Sequence Number=SeqID_41888
  Gene Ontology: Mol. function=structural constituent of ribosome; Cellular component=ribonucleoprotein complex; Biological process =translation
  Homolog annotation: Hit_ID=P0C477; Match level="QueryCoverage=84%, HitCoverage=85%, E-value=3e-63, Identity=91%"; Hit description=30S ribosomal protein S18, chloroplastic
  Pfam annotation: Domain name=Ribosomal_S18; Domain location=49-102; Score=90.6; E_value=5.4e-24; Accession=PF01084.12; Description =Ribosomal protein S18
  Subcellular localization annotation: CTP_CleavageSite=46; ConfidenceScore=5.67e-01
MYISKQPFHKFKQPFRKSKQTFHKSKQPFRKFKQPFRKSKQPFRRRSRIGPGDRIDYRNMSLINRFISEQGKLLSRRINRLTLKQQRLITLAIKQARILSFLPFRNYENEKQFQAQSISIITGPRXQKNRHIPQLTQKFNSNRNLRNSNQNLRNNNRNXLSSDC

SEQ ID NO: 107863 - protein, 71 aa, Setaria italica
  Transcript Sequence Number=SeqID_41889
LLNCAWLEGSQTFNQRAYRSHHVDQIVTTGYFRKPQVWQRKIMENLEGKNKQTRIAFTRSHVTALENMTIA

SEQ ID NO: 107864 - protein, 148 aa, Setaria italica
  misc_feature (47)..(47): Xaa can be any naturally occurring amino acid
  Transcript Sequence Number=SeqID_41890
  Gene Ontology: Mol. function=transferase activity, transferring glycosyl groups; Cellular component=integral to Golgi membrane; Biological process=protein amino acid glycosylation
  Homolog annotation: Hit_ID=Q2WBH4; Match level="QueryCoverage=86%, HitCoverage=26%, E-value=8e-66, Identity=92%"; Hit description =Sialyltransferase like protein
YLSGRLLYKYIFCQLHYYFRTRYFSAPRKGHNPLQGRAYYQLLECLXVIRIHSPMRAQRVEDWSDIPSKEEIRRAHAAAFRLKKHETGQQAELGPFSNCKVWGTVDPDYGPVSGTSDMSEARKNSNYSKWELLPLEKLRREAQEHYIQ

SEQ ID NO: 107865 - protein, 369 aa, Setaria italica
  Transcript Sequence Number=SeqID_41891
  Gene Ontology: Mol. function=transferase activity, transferring glycosyl groups; Cellular component=integral to Golgi membrane; Biological process=protein amino acid glycosylation
  Homolog annotation: Hit_ID=Q2WBH4; Match level="QueryCoverage=100%, HitCoverage=76%, E-value=0.0, Identity=96%"; Hit description =Sialyltransferase like protein
  Pfam annotation: Domain name=Glyco_transf_29; Domain location=1-249; Score=-20.3; E_value=8e-06; Accession=PF00777.10; Description =Glycosyltransferase family 29 (sialyltransferase)
LEYKYDVCETILLWEQYRNMTTVLTREYLDVRPDGWLDYAAKRIAQLGADKCYNRTLCDELLSILLPAKPPFHPRQFATCAVVGNSGDLLKTEFGQEIDAHDAVFRDNEAPVNKKYAKHVGLKRDFRLVVRGAARNMAPILKGSSDEALIIKSLTHKEINAVIKELPNPVYLFQGIVLRRGAKGTGMKSIELALSMCDIIDMYGFTVDPGYTEWTRYFSAPRKGHNPLQGRAYYQLLECLGVIRIHSPMRAQRVEDWSDIPSKEEIRRAHAAAFRLKKHETGQQAELGPFSNCKVWGTVDPDYGPVSGTSDMSEARKNSNYSKWELLPLEKLRREAQEHYIQMGGVSLYKMDGNKLDDLVCVRHQRSSS

SEQ ID NO: 107866 - protein, 187 aa, Setaria italica
  Transcript Sequence Number=SeqID_41892
  Gene Ontology: Mol. function=protein kinase activity; Cellular component=integral to membrane; Biological process=protein amino acid phosphorylation
  Homolog annotation: Hit_ID=Q7F8Q8; Match level="QueryCoverage=100%, HitCoverage=24%, E-value=5e-70, Identity=71%"; Hit description =Putative leucine-rich repeat transmembrane protein kinase 2
ILLDAQLMPYLCDSGLTKLSHFVSTARIMKDPEAITSAKGYAAPELTEPGADAIKADIYSFGVILLVLLTGQKAFDSSRRQNEQFLVEWAAPHLNDLDSLERITDPRISGSMPAKAISSLGIIILLCIKQSPDLRPPMTIIANKLVKLVQSTGLQKTSTAQHFEFNAQDPSFVTTRPYFEPSSTVSQ

SEQ ID NO: 107867 - protein, 161 aa, Setaria italica
  misc_feature (139)..(139): Xaa can be any naturally occurring amino acid
  Transcript Sequence Number=SeqID_41893
  Gene Ontology: Cellular component=mitochondrion
  Homolog annotation: Hit_ID=Q9AS81; Match level="QueryCoverage=98%, HitCoverage=21%, E-value=3e-73, Identity=84%"; Hit description =P0028E10.11 protein
  Pfam annotation: Domain name=PPR; Domain location=20-54; Score=26.0; E_value=0.00015; Accession=PF01535.12; Description=PPR repeat
  Pfam annotation: Domain name=PPR; Domain location=55-89; Score=7.9; E_ value=1; Accession=PF01535.12; Description=PPR repeat
  Pfam annotation: Domain name=PPR; Domain location=90-124; Score=39.3; E_value=1.5e-08; Accession=PF01535.12; Description=PPR repeat
  Pfam module annotation: Pfam domain module=PPR::PPR::PPR; Domain location=20-54::55-89::90-124
GSYREGESICGPISRPNLALLCSSLLRTMAKCRRGLDAMELLEEMMARGVLPDLQTFSGLMEHLAGAGDLKGVHRLLGLVRQCELRPDAYMYSVLVRAYCKRERAALALRVFDEMRAAGVAPDAPTKALLVKSLWREGXLREAALVEERCEDVTGGLPEAS

SEQ ID NO: 107868 - protein, 152 aa, Setaria italica
  Transcript Sequence Number=SeqID_41894
  Gene Ontology: Mol. function=solute:hydrogen antiporter activity; Cellular component=integral to membrane; Biological process =regulation of pH
  Homolog annotation: Hit_ID=B9HXD0; Match level="QueryCoverage=96%, HitCoverage=19%, E-value=1e-57, Identity=71%"; Hit description =Cation proton exchanger (Fragment)
  Subcellular localization annotation: CTP_CleavageSite=11; ConfidenceScore=5.09e-01
PTSFITTPVVMAIYKPAHRGAPYKNRAVQRGNPNDEFRMMACFHSTRNIPTIINLMESSRGTRRRGIIVYAMHLVELSERSSAISMVHKARRNGMPFWNRRRDGDGDQLVVAFETYQQLSRVSIRAMTAISDLHTIHEDIVTSAHTRSGCAH

SEQ ID NO: 107869 - protein, 264 aa, Setaria italica
  misc_feature (138)..(138): Xaa can be any naturally occurring amino acid
  Transcript Sequence Number=SeqID_41895
  Gene Ontology: Mol. function=amino acid binding; Cellular component =chloroplast
  Homolog annotation: Hit_ID=B9SAK5; Match level="QueryCoverage=76%, HitCoverage=68%, E-value=4e-78, Identity=71%"; Hit description=Amino acid binding protein, putative
  Subcellular localization annotation: CTP_CleavageSite=53; ConfidenceScore=5.45e-01
MAEMAVTVAAAGTLRPCTGVSARGAAVLGRWRPLVPAAPAMLRLSSPAVRVPRAASPAAVEDGSNTDAVPTPKVIIDQDSDPDATIVEVTLGDRLGDLLDTMNALKNLGLNVVKASVCLDSTGKHNKFAITKASCLEXVTGMLYRSTGRKIDDPELLEAVRLTIINNMIQYHPESSSQLAMGATFGPEAPAEQVDVDIATHIDIYADGPERSLLVVETADRPGLLVDLVRIISDINITVQSGEFDTEGLLAKAKFHVSYRGKHF

SEQ ID NO: 107870 - protein, 100 aa, Setaria italica
  Transcript Sequence Number=SeqID_41896
  Gene Ontology: Mol. function=amino acid binding; Cellular component =chloroplast
  Homolog annotation: Hit_ID=B9SAK5; Match level="QueryCoverage=91%, HitCoverage=32%, E-value=2e-36, Identity=78%"; Hit description=Amino acid binding protein, putative
KTFLGSLVNRQVDVDIATHIDIYADGPERSLLVVETADRPGLLVDLVRIISDINITVQSGEFDTEGLLAKAKFHVSYRGKHLTEALKQILSNSLRYFLRR

SEQ ID NO: 107871 - protein, 278 aa, Setaria italica
  Transcript Sequence Number=SeqID_41897
  Gene Ontology: Mol. function=amino acid binding; Cellular component =chloroplast
  Homolog annotation: Hit_ID=B9SAK5; Match level="QueryCoverage=78%, HitCoverage=78%, E-value=6e-93, Identity=74%"; Hit description=Amino acid binding protein, putative
  Pfam annotation: Domain name=ACT; Domain location=200-264; Score =16.2; E_value=0.13; Accession=PF01842.17; Description=ACT domain
  Pfam annotation: Domain name=ACT; Domain location=85-154; Score=5.3; E_value=2.2; Accession=PF01842.17; Description=ACT domain
  Pfam module annotation: Pfam domain module=ACT::ACT; Domain location =200-264::85-154
  Subcellular localization annotation: CTP_CleavageSite=53; ConfidenceScore=5.45e-01
MAEMAVTVAAAGTLRPCTGVSARGAAVLGRWRPLVPAAPAMLRLSSPAVRVPRAASPAAVEDGSNTDAVPTPKVIIDQDSDPDATIVEVTLGDRLGDLLDTMNALKNLGLNVVKASVCLDSTGKHNKFAITKASTGRKIDDPELLEAVRLTIINNMIQYHPESSSQLAMGATFGPEAPAEQVDVDIATHIDIYADGPERSLLVVETADRPGLLVDLVRIISDINITVQSGEFDTEGLLAKAKFHVSYRGKHLTEALKQILSNSLRYFLRRPTTEDASF

SEQ ID NO: 107872 - protein, 79 aa, Setaria italica
  Transcript Sequence Number=SeqID_41898
  Gene Ontology: Cellular component=plasma membrane
  Homolog annotation: Hit_ID=B6U344; Match level="QueryCoverage=96%, HitCoverage=88%, E-value=1e-23, Identity=56%"; Hit description =Negatively light-regulated protein
  Pfam annotation: Domain name=Lg106; Domain location=23-79; Score =44.7; E_value=3.6e-10; Accession=PF07844.3; Description=Lg106-like protein
ALEMASFNEENRAAPQREEASFQGKYGGISPKKPLINKDHERAYFDSADWVLGKQQGASSNSAKVPAAETLKPKLQRTA

SEQ ID NO: 107873 - protein, 66 aa, Setaria italica
  Transcript Sequence Number=SeqID_41899
  Homolog annotation: Hit_ID=B6U344; Match level="QueryCoverage=93%, HitCoverage=80%, E-value=2e-14, Identity=49%"; Hit description =Negatively light-regulated protein
  Pfam annotation: Domain name=Lg106; Domain location=4-66; Score=44.8; E_value=3.3e-10; Accession=PF07844.3; Description=Lg106-like protein
CRQGILPRFQTDHERAYFDSADWVLGKQQGASSNSAKVPAAETLKPKLQRTAYHQLPPRRPACTSE

SEQ ID NO: 107874 - protein, 113 aa, Setaria italica
  misc_feature (72)..(72): Xaa can be any naturally occurring amino acid
  Transcript Sequence Number=SeqID_41900
  Gene Ontology: Mol. function=nucleoside-triphosphatase activity; Cellular component=integral to membrane; Biological process=protein catabolic process
  Homolog annotation: Hit_ID=Q0DHL4; Match level="QueryCoverage=99%, HitCoverage=13%, E-value=9e-19, Identity=50%"; Hit description=Cell division protease ftsH homolog 8, mitochondrial
FLLASSQFRRLFSDGSNKNYEKYHPKEKQEEPKGDGSDKSNPKKDSNSKFQWNFKEDVMKKFQELLAPLLFXGLVLATLPRGNSAQQISFQEFKNKLLEPGLVDHIVVSNKSV

SEQ ID NO: 107875 - protein, 107 aa, Setaria italica
  Transcript Sequence Number=SeqID_41901
NGVISMPSDLVLLGSVSGGSFLRSVRLEVAGLQLAESILVFVKKIILWIEFWEANNGCSEFRDGIIWKWPKVPDSGDGNPRLSRPTFQDCILAVTFIQSRYTIQTRR

SEQ ID NO: 107876 - protein, 133 aa, Setaria italica
  Transcript Sequence Number=SeqID_41902
VISHQLHKKFPIRNKSLISISEAVLRLRTLPVVLWKYRVKFQIHSCSIKLMNFLLENCYLCHIRNAGNAGMAGTFHSYLKTHPDSKCIRNNEGLHFHWCVCSNISVHYLSTFRRDSILRLISSNLFCVVPEIS

SEQ ID NO: 107877 - protein, 114 aa, Setaria italica
  misc_feature (53)..(53): Xaa can be any naturally occurring amino acid
  Transcript Sequence Number=SeqID_41903
  Gene Ontology: Mol. function=nucleotide binding; Biological process =defense response
  Homolog annotation: Hit_ID=Q2QZR9; Match level="QueryCoverage=72%, HitCoverage=7%, E-value=8e-19, Identity=59%"; Hit description=NB-ARC domain containing protein
MTIILESFVGSCAKKLQEIVTEEAILILGVKDELTELQRRMEKIHHFLNDPEXGASSKESDNNNCLGQLRDAMYDGDDIIDLARSKGSKLLPHHSLSLSSKSNTCSCLPPSLVF

SEQ ID NO: 107878 - protein, 207 aa, Setaria italica
  misc_feature (31)..(31): Xaa can be any naturally occurring amino acid
  misc_feature (202)..(202): Xaa can be any naturally occurring amino acid
  Transcript Sequence Number=SeqID_41904
  Gene Ontology: Mol. function=nucleic acid binding
  Homolog annotation: Hit_ID=B9SBN6; Match level="QueryCoverage=100%, HitCoverage=10%, E-value=1e-14, Identity=32%"; Hit description =Helicase, putative
  Subcellular localization annotation: CTP_CleavageSite=74; ConfidenceScore=5.28e-01
VNVTSELPNNELLLQKHFMAVLSSVWRSNAXRDPRRVISTYSSALRMLSPVKNPAGSSVNWSMVNFRPSFNLVRTALADAQAQSTQIVIPPPMRNQEYCRNHLELELDFLTDQHHYEEDFPSIVNVSILEPEPIKQAVEPVEQSLLSGLSCRQAETRLRMASEACYEGEGSHWASSAFHINDATRHKSGPKSIGKHKAASEXGRPPK

SEQ ID NO: 107879 - protein, 341 aa, Setaria italica
  misc_feature (158)..(158): Xaa can be any naturally occurring amino acid
  Transcript Sequence Number=SeqID_41905
  Gene Ontology: Mol. function=nucleic acid binding
  Homolog annotation: Hit_ID=B9SBN6; Match level="QueryCoverage=100%, HitCoverage=17%, E-value=6e-29, Identity=31%"; Hit description =Helicase, putative
HCCERYRELFCKHAMSATDNSNSEKVPSGTGKAILRVSEDQAQMLVNVTSELPNNELLLQKHFMAVLSSVWRSKCWRDPRRVISTYSSALRMLSPVKNPAGSSVNWSMVNFRPSFNLVRTALADAQAQSTQIVIPPPMRNQEYCRNHLELELDVWTHXYRWEVPSIVNVSILEPEPIKQAVEPVEQSLLSGLSCRQAETRLRMASEACYEGEGSHWASSAFHINDATRHKSGPKSIGKHKAASECGRPPKSKIQKITESHQEGPSTSSNFLRMPGQLFPGAADFHISESLSDFGISDSEFNYSEDLWQEVDYNEFLLDQDDSGLLPGIEEIEPLSDFTDIG

SEQ ID NO: 107880 - protein, 410 aa, Setaria italica
  Transcript Sequence Number=SeqID_41906
  Gene Ontology: Mol. function=zinc ion binding; Cellular component =nucleus; Biological process=regulation of transcription
  Homolog annotation: Hit_ID=Q10NX9; Match level="QueryCoverage=100%, HitCoverage=40%, E-value=0.0, Identity=81%"; Hit description =Transposon protein, putative, unclassified, expressed
  Pfam annotation: Domain name=SWIM; Domain location=44-80; Score=28.9; E_value=2e-05; Accession=PF04434.9; Description=SWIM zinc finger
VTMFQAFQDEIKQLMHVICKEVDRSGSSITYMASELIQGKKVDYTVVYNNSDKDVWCICRSFPSRGILCSHALAVLKQENVLMLPSKYILDRWRKDFRILTSSANTDCTESDRNLGIYDDLYSRGHEYFEDVIDIGAREPELKEFVLSAMKEAKDRLIRPDHSQPGDQRVDVNMTVTGPVSADTRVDVNMASHASALIQGDRRVDANMASNPPALVHGDTMTSNATALIHRDRRVEMKMPTTHLIHGEGRVDMNMASPHLMQRERRVDMNMASPHLIQGDTRVDMNLASPHFIHSDRRVDMNLASPHLMHGDRRVDMNMASPHLIPGDTRVDMNMVSTSQNGMHTFDLVNVNLESGSLPMAATEFMQLHPHPPVYHPKQLLDMRDQVMDANKRPNMETNTYFMGGGMHVG

SEQ ID NO: 107881 - protein, 167 aa, Setaria italica
  Transcript Sequence Number=SeqID_41907
  Pfam annotation: Domain name=Fasciclin; Domain location=15-130; Score= -12.6; E_value=0.022; Accession=PF02469.14; Description=Fasciclin domain
QYNQPTVDKEMQRARYFTFVMLVRMVQEKIPRNTTFLMPSDRLMSTASISESQVLEFLSRHSIAAPLKFDDLIKLPNGTVVPTRHSGDTITVTNSRDQKLYINGIKLTIPDLCHSGKLFRCHGINGVIRPTAAQRVKAACTRTSAAPVIPLAENQSLSTSSLSPILP

SEQ ID NO: 107882 - protein, 124 aa, Setaria italica
  Transcript Sequence Number=SeqID_41908
  Gene Ontology: Cellular component=integral to membrane; Biological process=response to stress
  Homolog annotation: Hit_ID=Q5JM42; Match level="QueryCoverage=100%, HitCoverage=79%, E-value=1e-63, Identity=91%"; Hit description =Abscisic acid-induced protein-like
  Pfam annotation: Domain name=TB2_DP1_HVA22; Domain location=1-69; Score=63.5; E_value=7.7e-16; Accession=PF03134.11; Description =TB2DP1, HVA22 family
ESPSSLDDQQWLTYWVLYSLITLLELSCWKVLQWFPLWPYMKLLFCCWLVLPIFNGAAYIYEAHVRRYFKIGNYVNPYYNERQRRVLQMMSLDARKSVERFIETHGPDALDKIIRAAEEEAKRT

SEQ ID NO: 107883 - protein, 79 aa, Setaria italica
  Transcript Sequence Number=SeqID_41909
TFLTTLISPSRDCWFSCRSVHSSNYADVKYSILFQRGLNPDEKSEILCHCPSALLLAQSTSDDKSSESGLAAAMARSTI

SEQ ID NO: 107884 - protein, 108 aa, Setaria italica
  Transcript Sequence Number=SeqID_41910
  Gene Ontology: Mol. function=kinase activity; Biological process =protein amino acid phosphorylation
  Homolog annotation: Hit_ID=O80540; Match level="QueryCoverage=90%, HitCoverage=10%, E-value=4e-15, Identity=43%"; Hit description =F14J9.26 protein
  Pfam annotation: Domain name=DUF579; Domain location=1-98; Score =129.2; E_value=1.4e-35; Accession=PF04669.5; Description=Protein of unknown function (DUF579)
SSLYDVSWDVILVDGPRGYTASSPGRMSAIFTAGVLARTRAGEGATTDVLVHDYEREVERACSREFLCEENRVAETSTRSLAHFVVRGGSAVRRDAFCSGAAAAAAAH

SEQ ID NO: 107885 - protein, 229 aa, Setaria italica
  Transcript Sequence Number=SeqID_41911
  Gene Ontology: Mol. function=kinase activity; Biological process =protein amino acid phosphorylation
  Homolog annotation: Hit_ID=O80540; Match level="QueryCoverage=96%, HitCoverage=22%, E-value=7e-37, Identity=37%"; Hit description =F14J9.26 protein
  Pfam annotation: Domain name=DUF579; Domain location=74-221; Score =313.7; E_value=3.8e-91; Accession=PF04669.5; Description=Protein of unknown function (DUF579)
DALVQYAAAAGNTSGCMPEPDVRAIASVLRRRAPCNLLVFGLGAETPLWRALNHGGRTVFLDENPYYVEHLEGRHPGLEAYDVAYATAVRELPDLLDAARTARAAECRPVQNLLFSECRLAINDLPNQLYDVAWDVILVDGPRGFTEGSPGRMSAIYSAAVMARTKGAETEVLVHDYEREVERACGREFLCDENRVAATSTPSLAHFRVRGGAAANREAFCGPPAEKSN

SEQ ID NO: 107886 - protein, 64 aa, Setaria italica
  Transcript Sequence Number=SeqID_41912
VSVRSCRLLCRSIYQLMLLSSWARCEFLASVSVNEHVVGSSGVDLMAWHHALPDSSLKCYCQPV

SEQ ID NO: 107887 - protein, 49 aa, Setaria italica
  Transcript Sequence Number=SeqID_41913
FFFCNKLSPTYNLIKTAIATDTYNYATQYKYQNLESLNKSLPTCILKLQ

SEQ ID NO: 107888 - protein, 68 aa, Setaria italica
  misc_feature (1)..(2): Xaa can be any naturally occurring amino acid
  Transcript Sequence Number=SeqID_41914
XXFLIKQSFQAPTLLIKCIIVTFCTGSYQCISSIFQVPFLGKGQAFFFTKLKLQTSASRAEHFPSRNS

SEQ ID NO: 107889 - protein, 86 aa, Setaria italica
  misc_feature (67)..(67): Xaa can be any naturally occurring amino acid
  Transcript Sequence Number=SeqID_41915
TKIRIQTGPAEKTDAQKGTKIKQKRKAHNEELKQENKNNFNFFAFKEPVLFVGHLLDGSILVVEKTXRMDVVEGFGAPVHRHIYGT

SEQ ID NO: 107890 - protein, 92 aa, Setaria italica
  Transcript Sequence Number=SeqID_41916
  Homolog annotation: Hit_ID=B9SED3; Match level="QueryCoverage=100%, HitCoverage=7%, E-value=2e-30, Identity=69%"; Hit description =Nucleotide binding protein, putative
FNLEVQRQHWFISRMNGGSVTSGGFCPKNNALVITTSKNEVYVFDVEAKQLGEWSKRYTHHLPRSFQEFPGEVIGLSFPPQSSSIVVVYSTR

SEQ ID NO: 107891 - protein, 307 aa, Setaria italica
  Transcript Sequence Number=SeqID_41917
  Gene Ontology: Mol. function=molecular_function; Cellular component =nucleolus; Biological process=biological_process
  Homolog annotation: Hit_ID=B9SED3; Match level="QueryCoverage=81%, HitCoverage=21%, E-value=1e-73, Identity=54%"; Hit description =Nucleotide binding protein, putative
GTLLAYSDCVRPCLFALKHKSGKKYTLDKLELPKGLPCSQSMMFTVDSSNLILAGRDGKIYVIDIETREISNVFHPTRKADATKVSSRESPVTKMFLSVDGQWLAAVNCFGDIYVFNLEVQRQHWFISRMNGGSVTSGGFCPKNNALVITTSKNEVYVFDVEAKQLGEWSKRYTHHLPRSFQEFPGEVIGLSFPPQSSSIVVVYSTRAMCLIDFGLPVIEDVQLPNRSTGPAEKTDAQKGTKIKQKRKAHNEELKQENKNNFNFFAFKEPVLFVGHLLDGSILVVEKRWMDVVEGFGAPVHRHIYGT

SEQ ID NO: 107892 - protein, 542 aa, Setaria italica
  Transcript Sequence Number=SeqID_41918
  Gene Ontology: Mol. function=molecular_function; Cellular component =ribonucleoprotein complex; Biological process=ribosome biogenesis
  Homolog annotation: Hit_ID=B9SED3; Match level="QueryCoverage=98%, HitCoverage=45%, E-value=1e-165, Identity=55%"; Hit description =Nucleotide binding protein, putative
  Pfam annotation: Domain name=WD40; Domain location=154-192; Score =24.0; E_value=0.00061; Accession=PF00400.24; Description=WD domain, G-beta repeat
  Pfam annotation: Domain name=WD40; Domain location=204-241; Score =1.1; E_value=29; Accession=PF00400.24; Description=WD domain, G-beta repeat
  Pfam annotation: Domain name=WD40; Domain location=245-283; Score =24.5; E_value=0.00044; Accession=PF00400.24; Description=WD domain, G-beta repeat
  Pfam annotation: Domain name=WD40; Domain location=303-373; Score =8.8; E_value=3.6; Accession=PF00400.24; Description=WD domain, G -beta repeat
  Pfam annotation: Domain name=WD40; Domain location=54-147; Score =20.6; E_value=0.0063; Accession=PF00400.24; Description=WD domain, G- beta repeat
  Pfam annotation: Domain name=WD40; Domain location=8-50; Score=9.5; E_ value=3; Accession=PF00400.24; Description=WD domain, G-beta repeat
  Pfam module annotation: Pfam domain module=WD40::WD40::WD40::WD40::WD4 0::WD40; Domain location=154-192::204-241::245-283::303-373::54 -147::8-50
PPGSVGWHHQLTIQGNAESRVTSLVWGRSGVGAAGRLLSSSVDGSVVEWDLFHLQQKTVLDTAGGPLWQMAIEPSDDSKNTEINGSGIAINGHANNNDSSDSDLSNVDDGDDSEDEDSPANTRSSYHVNELQRLALACDDGSVRLYNVPESGALTYYRSLPRVSGRTLSVTWSSNAKFIFSGSSDGLIRCWDSTSFQEKYRITAGLGGAGTGSELCIWTLLFLRCGTLVSGDSTGSVQFWDSSHGTLLQAHSYHKGDVNALATLPSQNRVFSAGSDGQVILYKVSKDDSGTSKNVVKEQVRKWVYVGYVRAHTHDVRALTMAVPICREDELSEEKAVKIRRREKRQFSYHKWAHLGVPMLISGGDDTKLFAYSAREFTQFAPHNFCPAPQRPLINLARDSTVNGDSVMLVQSANWLDVLLVTVQNKLTPSTSSREDAKVRQLARLKSKGSRKIISSAASTNGTLLAYSDCVRPCLFALKHKSGKKYTLDKLELPKGLPCSQSMMFTVDSSNLILAGRDGKIYVIDIETREISNVFTSLYFVP

SEQ ID NO: 107893 - protein, 71 aa, Setaria italica
  Transcript Sequence Number=SeqID_41919
MNPPAAAASTGGADRAAAAPEYAPYPRLSPEDVAPPPPPPYHAATATAAPPPYVGNPYVSSPAGGAATAPK

SEQ ID NO: 107894 - protein, 77 aa, Setaria italica
  Transcript Sequence Number=SeqID_41920
RSVGGGSGPIRSEGADSWRTAEVCESVSGVRPVRVVWCGDATGPLSQLIVRWLTRGPELLSLSQEKCNFGYVSRIFV

SEQ ID NO: 107895 - protein, 134 aa, Setaria italica
  Transcript Sequence Number=SeqID_41921
CILGAEVGIWLAEVRFTSSSTRQREQFGPTCQPPNNQLGEWSRGVTAPYNSHRPHARHRLTHLSSPPAVRSLAPDWPAASSHGSRPQDESPPSPSSRSNGAHPTSRGSPPPPCPSSPLTPLAAIKAAQPSKQRN

SEQ ID NO: 107896 - protein, 400 aa, Setaria italica
  Transcript Sequence Number=SeqID_41922
  Gene Ontology: Mol. function=methyltransferase activity; Cellular component=ribonucleoprotein complex; Biological process=metabolic process
  Homolog annotation: Hit_ID=A3BMN9; Match level="QueryCoverage=98%, HitCoverage=63%, E-value=0.0, Identity=84%"; Hit description =Probable protein arginine N-methyltransferase 3
  Pfam annotation: Domain name=Methyltransf_11; Domain location=76-194; Score=12.8; E_value=0.0058; Accession=PF08241.4; Description =Methyltransferase domain
  Pfam annotation: Domain name=Methyltransf_12; Domain location=76-192; Score=15.9; E_value=0.018; Accession=PF08242.4; Description =Methyltransferase domain
  Pfam module annotation: Pfam domain module=Methyltransf _11::Methyltransf_12; Domain location=76-194::76-192
QAEDRESLAHETNDSQLKIARASVNAKAIKTVDDNYFGSYSSFGIHREMLGDKVRTDAYRDALLGNPSLLRGAAVLDVGCGTGILSLFAAKAGASRVVAVDGSAKMASVATQVAKNNGLLYDENLKAEQKRGAQVISVVHTKAEELNQKIQVPQHGFDVLVSEWMGYCLLFESMLSSVIYARDHFLKPGGAILPDTATIVGAGFGKGGTSLPFWENVYGFDMSCIGKEVTSTSARFPVVDVIASQDIVTETAVLHSFDLATMKESEMDFTASFELRLSESATVVPGVTWCYGIVLWFDTGFTDRFCKEKPVVLSTSPFSTPTHWSQTIFTFEEPIAMVKEESTLGSSASVGTDECPATMLRSRISIVRASEHRSIDISVETTAFSSDGWKRSWPIQIFNL

SEQ ID NO: 107897 - protein, 87 aa, Setaria italica
  misc_feature (69)..(69): Xaa can be any naturally occurring amino acid
  misc_feature (81)..(81): Xaa can be any naturally occurring amino acid
  Transcript Sequence Number=SeqID_41923
  Gene Ontology: Mol. function=aspartic-type endopeptidase activity; Cellular component=oxygen evolving complex; Biological process=DNA integration
  Homolog annotation: Hit_ID=Q2QXP9; Match level="QueryCoverage=95%, HitCoverage=5%, E-value=1e-14, Identity=47%"; Hit description =Retrotransposon protein, putative, unclassified
MPYPKEIRTGRILGTGTVHNGLYYLDEGSDEVALATKMSPCQELLLLHRRLGHPSFATMSCCYPSLFGXLSKGALVCDACXLAKHTR

SEQ ID NO: 107898 - protein, 137 aa, Setaria italica
  misc_feature (13)..(13): Xaa can be any naturally occurring amino acid
  Transcript Sequence Number=SeqID_41924
  Gene Ontology: Mol. function=kinase activity; Cellular component =plasma membrane
  Homolog annotation: Hit_ID=B9T6U1; Match level="QueryCoverage=85%, HitCoverage=10%, E-value=4e-26, Identity=53%"; Hit description =Myosin-1, putative
SWRQRVFDAKAQXGVDSGSASQSARKQESAALEKTFRDLSTDLQVWLEKNVLLQEELESRFSLLCSIQEEISKITTLDQTSEAHFTPFQAAKFQGEVSNMKQENNKVTKELQAGLDHVRGLQVEIGRAILKLRDNIV

SEQ ID NO: 107899 - protein, 57 aa, Setaria italica
  Transcript Sequence Number=SeqID_41925
INKRRHLNPIYLDDCSASPLSWNIGLPALMLNICKLDFYIIISFGRPKMSHMKSNQH

SEQ ID NO: 107900 - protein, 120 aa, Setaria italica
  Transcript Sequence Number=SeqID_41926
  Gene Ontology: Mol. function=nucleic acid binding
  Homolog annotation: Hit_ID=Q7F2F5; Match level="QueryCoverage=100%, HitCoverage=12%, E-value=1e-33, Identity=62%"; Hit description =P0402A09.11 protein
  Pfam annotation: Domain name=Filamin; Domain location=1-79; Score =32.6; E_value=1.6e-06; Accession=PF00630.11; Description =FilaminABP280 repeat
PATFTVVAKDRHSRRLTAGGARVRVRVSPAAGVGGDDLDGAVKDNGDGSYTVTYAVPKRGNYMVHVELDGSPVMGSPFPVFFSGSTATPTSAFPSTLPAVSSAYPNMVNQTMPNMPNYTG

SEQ ID NO: 107901 - protein, 67 aa, Setaria italica
  Transcript Sequence Number=SeqID_41927
GLILVIRILSSERGAAALADVLSFGGSPDSVHRVGGSPVGVALALTLIVVLLYYRTSLFGGDGGDDE

SEQ ID NO: 107902 - protein, 219 aa, Setaria italica
  Transcript Sequence Number=SeqID_41928
  Gene Ontology: Cellular component=plasma membrane
  Homolog annotation: Hit_ID=Q8RU34; Match level="QueryCoverage=99%, HitCoverage=26%, E-value=1e-78, Identity=62%"; Hit description=Bzip transcription factor-like
  Pfam annotation: Domain name=DUF632; Domain location=1-109; Score= -61.4; E_value=4.9e-05; Accession=PF04782.4; Description=Protein of unknown function (DUF632)
QSISQSGVASEASRELERELTKWYRCFNKWISSQRSCVEALNGWLKKWFPEAEAPQEDTADGVPPFSPGRLGAPPVFVTSNDWFQAIEMVSKTDALRAIDHFSKLVHEFKKSLEEEQRQKRKADHASRDYNRKSEVLQEELGLSTMENPHYSHDDRVMDLERLRKRRDEERTSHEKILNHAHVAASATLLIGLVPVLQQITTFFQKNQQVYMGIRILGT

SEQ ID NO: 107903 - protein, 72 aa, Setaria italica
  Transcript Sequence Number=SeqID_41929
  Gene Ontology: Mol. function=DNA-directed RNA polymerase activity; Cellular component=integral to membrane; Biological process =transcription
  Homolog annotation: Hit_ID=A3LP81; Match level="QueryCoverage=84%, HitCoverage=5%, E-value=2e-15, Identity=60%"; Hit description=DNA -directed RNA polymerase
NRGTTFIDCNSWNKSLQAYGSLILAIFSPFLHIEIEPLSILGVVSGLIPYPHHNQSPRNTYQCAMGYGVDKE

SEQ ID NO: 107904 - protein, 269 aa, Setaria italica
  misc_feature (10)..(10): Xaa can be any naturally occurring amino acid
  Transcript Sequence Number=SeqID_41930
  Gene Ontology: Mol. function=DNA-directed RNA polymerase activity; Cellular component=nucleus; Biological process=transcription
  Homolog annotation: Hit_ID=Q84R88; Match level="QueryCoverage=100%, HitCoverage=22%, E-value=1e-145, Identity=91%"; Hit description=DNA -directed RNA polymerase
  Pfam annotation: Domain name=RNA_pol_Rpb2_6; Domain location=1-243; Score=232.0; E_value=1.5e-66; Accession=PF00562.20; Description=RNA polymerase Rpb2, domain 6
NMRALDEDGXAAPGQIIRNHDVYVNKQSPKVIDRRGAGAPLMDRDYKDSPAIYKGVDGETTVVDRVMLCSDTNEKLSIKCIIRHTRRPEVGDKFSSRHGQKGVCGTIVQQEDFPFSERGICPDLIMNPHGFPSRMTIGKMIELIGGKAGVSCGRFHYGSAFGEPSGNADKVEDISNTLIKHGFSYNGKDFLYSGILGHPLEAYIFMGPIYYQKLKHMVLDKMHARASGPRVLLTRQPTEGRSRDGGLRLGEMERDCLIAYGASMLIFER

SEQ ID NO: 107905 - protein, 488 aa, Setaria italica
  misc_feature (323)..(323): Xaa can be any naturally occurring amino acid
  Transcript Sequence Number=SeqID_41931
  Gene Ontology: Mol. function=DNA-directed RNA polymerase activity; Cellular component=nucleus; Biological process=transcription
  Homolog annotation: Hit_ID=Q84R88; Match level="QueryCoverage=99%, HitCoverage=45%, E-value=0.0, Identity=83%"; Hit description=DNA -directed RNA polymerase
  Pfam annotation: Domain name=RNA_pol_Rpb2_5; Domain location=45-90; Score=52.6; E_value=1.5e-12; Accession=PF04567.9; Description=RNA polymerase Rpb2, domain 5
  Pfam annotation: Domain name=RNA_pol_Rpb2_6; Domain location=95-433; Score=454.2; E_value=1.9e-133; Accession=PF00562.20; Description=RNA polymerase Rpb2, domain 6
  Pfam annotation: Domain name=RNA_pol_Rpb2_7; Domain location=435-488; Score=55.9; E_value=1.5e-13; Accession=PF04560.12; Description=RNA polymerase Rpb2, domain 7
  Pfam module annotation: Pfam domain module=RNA_pol_Rpb2_5::RNA_pol _Rpb2_6::RNA_pol_Rpb2_7; Domain location=45-90::95-433::435-488
IEQLHCIHIASDGGRVCRPLIIADKGISRVKEHHMKELRDGVRSFDDFLRDGLIEYLDVNEENNALIALYEHVDQDDVERSSITHIEIEPLSILGVVSGLIPYPHHNQSPRNTYQCAMGKQAMGNIAYNQLFRADSLLYLLVYAQRPLLTTKTIELVGYDKLGAGQNATVAVMGYSGYDIEDAIVMNKSSLDRGFGRCIAMKKYTVIKEYYGEGVSDRIAKPQRDKDGALVKQNMRALDEDGIAAPGQIIRNHDVYVNKQSPKVIDRRGAGAPLMDRDYKDSPAIYKGVDGETTVVDRVMLCSDTNEKLSIKCIIRHTRRPEXRMTIGKMIELIGGKAGVSCGRFHYGSAFGEPSGNADKVEDISNTLIKHGFSYNGKDFLYSGILGHPLEAYIFMGPIYYQKLKHMVLDKMHARASGPRVLLTRQPTEGRSRDGGLRLGEMERDCLIAYGASMLIFERLLLSSDPYQVQVCRKCGLLGYYNYKLKTS

SEQ ID NO: 107906 - protein, 163 aa, Setaria italica
  misc_feature (51)..(51): Xaa can be any naturally occurring amino acid
  misc_feature (59)..(59): Xaa can be any naturally occurring amino acid
  Transcript Sequence Number=SeqID_41932
  Gene Ontology: Mol. function=DNA-directed RNA polymerase activity; Cellular component=DNA-directed RNA polymerase III complex; Biological process=transcription
  Homolog annotation: Hit_ID=B9F8X6; Match level="QueryCoverage=100%, HitCoverage=14%, E-value=2e-82, Identity=89%"; Hit description=DNA -directed RNA polymerase
  Pfam annotation: Domain name=RNA_pol_Rpb2_7; Domain location=71-161; Score=152.5; E_value=1.3e-42; Accession=PF04560.12; Description=RNA polymerase Rpb2, domain 7
TLIKHGFSYNGKDFLYSGILGHPLEAYIFMGPIYYQKLKHMVLDKMHARAXSGPRVVVXTRQPTEGRSRDGGLRLGEMERDCLIAYGARIFERLLLSSDPYQVQVCRKCGLLGYYNYKLKTSYCSMCKNGENMAKMRLPYACKLLFQELQSMNVVPRLKLTEG

SEQ ID NO: 107907 - protein, 477 aa, Setaria italica
  Transcript Sequence Number=SeqID_41933
  Gene Ontology: Mol. function=nucleic acid binding
  Homolog annotation: Hit_ID=A0SPK3; Match level="QueryCoverage=89%, HitCoverage=76%, E-value=1e-105, Identity=47%"; Hit description =Marker Xucw84
EERTKRRQLTLTRLKREWEQEAAAAAQEAAVKDNVEKQDRPKLDKAALDGSKINLYFPKLRKVKALPFKGTGKHKYSFRHIEVPSYPIHFCDCEEHCGPPEAANNEYAAVLNAVVYEKERNIMNSVMNKLFEKENEHFDSSEMKRCDVHTDTIEPSDAVNNMQIEETDEAPEEDMQVEEVEESSDEDLDDDLVINIAPRKSNKPAGQANMKKQEVKNDPQLRKCPNIEEASLPKKRQRNEASSEPGKGKQEPISVILDTRTTGKPLTVKAEDSKSQLKSPGFTGKGTYALSSTLPRDESSADLQGVEAQTSSTKNESAQNVAANEPKKGSMWTQKSAWRDLVGGMGSTPFSISQVLPNTHPTPSVLPNVIENARSSEVLEATMQLPSELKLPSSVEMLSSGTTDGSTGGKCKDINKPQKVRVVPKITIGEVCPFMRNAESQKQWSKAKKAITGFSKKSNESSGSKSNARKGKPLKKL

SEQ ID NO: 107908 - protein, 125 aa, Setaria italica
  Transcript Sequence Number=SeqID_41934
  Gene Ontology: Mol. function=oxidoreductase activity; Biological process=metabolic process
  Homolog annotation: Hit_ID=B6U607; Match level="QueryCoverage=100%, HitCoverage=40%, E-value=7e-52, Identity=75%"; Hit description =Carbonyl reductase 1
FRSEELKQELNDADNLTEERLDELLDMFLKDFGAGALDARGWPGELASYKVAKAAVNAYSRIMARRHPRLRVNCAHPGYVKTDMTRNSGLLTPEEGANNVVKVALLPAGGPTGAFFAIGKEASFL

SEQ ID NO: 107909 - protein, 109 aa, Setaria italica
  Transcript Sequence Number=SeqID_41935
  Gene Ontology: Mol. function=protein binding; Cellular component =cytoplasm; Biological process=multicellular organismal development
  Homolog annotation: Hit_ID=A8WET3; Match level="QueryCoverage=100%, HitCoverage=58%, E-value=1e-46, Identity=82%"; Hit description=ZCN26
  Pfam annotation: Domain name=PBP; Domain location=1-98; Score=64.1; E_ value=5.2e-16; Accession=PF01161.12; Description=Phosphatidylethanolam ine-binding protein
VMVDPDAPNPSNPTLREYLHWMVTDIPASTDDSFGREIITYESPSPTMGIHRIVLVLYQQLGRGTVFAPQVRQNFNLRNFARRFNLGKPVAAMYFNCQRQTGTGGRRFT

SEQ ID NO: 107910 - protein, 155 aa, Setaria italica
  misc_feature (136)..(136): Xaa can be any naturally occurring amino acid
  Transcript Sequence Number=SeqID_41936
  Gene Ontology: Mol. function=protein binding; Cellular component =membrane; Biological process=protein transport
  Homolog annotation: Hit_ID=Q9S7P9; Match level="QueryCoverage=95%, HitCoverage=50%, E-value=8e-37, Identity=53%"; Hit description =SNAP25 homologous protein SNAP33
RRQLTTDVTKAEETTDALAGCLRIAEDIKKDASDTLITLHKQGEQISRTHEKAVEIDQDLTKSESLLGSLGGFFSKPWKPKKTRQIKGPAMVSRDDSFKKKASRMEQRDKLGLSPRGKNANRHYGEANSAMDKVQXEKQKQDDALDDLSGVLGQL

SEQ ID NO: 107911 - protein, 100 aa, Setaria italica
  Transcript Sequence Number=SeqID_41937
  Subcellular localization annotation: CTP_CleavageSite=34; ConfidenceScore=5.36e-01
PSLGHRPPGTSTFSAIWKLLNPIILSFYGSFRKSAFLPPGYEAGSSQRRVIRPTIRKLGRLESCLGTGERRAGKRFCFLRPNTPNIITRDYKKAMGQEPA

SEQ ID NO: 107912 - protein, 114 aa, Setaria italica
  misc_feature (23)..(23): Xaa can be any naturally occurring amino acid
  Transcript Sequence Number=SeqID_41938
  Gene Ontology: Mol. function=transposase activity; Biological process= transposition, DNA-mediated
MTDKADWCDANVRHFIDICKGEXEAGNRPLEMFTRADWKNLVTKYEEKTELKQIKKQLKNKLDGKTEFKNSATGLGWNEAKQTVDCSNEWWDKHLRTRCNNPDKGIKCNHVRFR

SEQ ID NO: 107913 - protein, 463 aa, Setaria italica
  misc_feature (104)..(104): Xaa can be any naturally occurring amino acid
  misc_feature (124)..(124): Xaa can be any naturally occurring amino acid
  Transcript Sequence Number=SeqID_41939
  Gene Ontology: Mol. function=carbon-nitrogen ligase activity, with glutamine as amido-N-donor; Cellular component=chloroplast
  Homolog annotation: Hit_ID=B6SPG6; Match level="QueryCoverage=92%, HitCoverage=73%, E-value=0.0, Identity=83%"; Hit description=Amidase
  Pfam annotation: Domain name=Amidase; Domain location=1-312; Score= -108.8; E_value=5.3e-06; Accession=PF01425.13; Description=Amidase
  Pfam annotation: Domain name=TPR_1; Domain location=347-380; Score =23.6; E_value=0.00083; Accession=PF00515.20; Description =Tetratricopeptide repeat
  Pfam annotation: Domain name=TPR_1; Domain location=381-414; Score =39.6; E_value=1.2e-08; Accession=PF00515.20; Description =Tetratricopeptide repeat
  Pfam annotation: Domain name=TPR_1; Domain location=415-448; Score =31.0; E_value=4.7e-06; Accession=PF00515.20; Description =Tetratricopeptide repeat
  Pfam annotation: Domain name=TPR_2; Domain location=347-380; Score =24.2; E_value=0.00055; Accession=PF07719.9; Description =Tetratricopeptide repeat
  Pfam annotation: Domain name=TPR_2; Domain location=381-414; Score =30.2; E_value=8.7e-06; Accession=PF07719.9; Description =Tetratricopeptide repeat
  Pfam annotation: Domain name=TPR_2; Domain location=415-448; Score =28.7; E_value=2.3e-05; Accession=PF07719.9; Description =Tetratricopeptide repeat
  Pfam module annotation: Pfam domain module=Amidase::TPR_1::TPR_1::TPR_ 1::TPR_2::TPR_2::TPR_2; Domain location=1-312::347-380::381-414::415 -448::347-380::381-414::415-448
  Subcellular localization annotation: CTP_CleavageSite=52; ConfidenceScore=5.21e-01
PINPASSSLVPGGSCSGSAVAVAAQLVDFALGTDTVGDVRIPASFCGLLCFRPSYGVVSTLGTIANSQSLAFVGWFARDPCVLHRVGEVLLPATAGGLKQTRQXVFADDCFQLLKVSNQKTVHXAIKNAVQTLPGYQPPKHINIGQYLYSNVPSLKEFCEPATKLQEGMSALKALSTVMLLLQRYEFKENHENWVNTVKPKLGLDISTCVLRAVNFAHDNIKSLYAIRNELRAALKNLLKDSGILVLPTTAGYPLKRNSKERLSSGFEDRMYKFVGIAALSGCCEVTIPWSNLDHHVSLSFVAAHGSDKSLLRTIVDTYSLIQDQVVLASKLVAAPVVNGDVDIDESELLKEKGNSAFKRRQWSKAAEFYSEAISLSDTNATYYCNRAAAYLELGRFKQAEADCDQALLLDRKNVKAYLRRGCAREVTLNYKEALQDFRHALALEPQNKTSLAAERRLQKLLK

SEQ ID NO: 107914 - protein, 76 aa, Setaria italica
  Transcript Sequence Number=SeqID_41940
  Homolog annotation: Hit_ID=B6TEE3; Match level="QueryCoverage=100%, HitCoverage=68%, E-value=1e-27, Identity=84%"; Hit description=Rapid alkalinization factor 1
  Pfam annotation: Domain name=RALF; Domain location=9-76; Score=130.0; E_value=7.8e-36; Accession=PF05498.3; Description=Rapid ALkalinization Factor (RALF)
LGVVDAAEDEEFGFPDGDSVARRVLQNQNNGYISYGALRRDNVPCSVRGASYYNCRPGAQANPYSRGCNAITRCRG

SEQ ID NO: 107915 - protein, 98 aa, Setaria italica
  Transcript Sequence Number=SeqID_41941
  Gene Ontology: Mol. function=N-acetyltransferase activity; Cellular component=nucleus; Biological process=metabolic process
  Homolog annotation: Hit_ID=B9SE60; Match level="QueryCoverage=83%, HitCoverage=5%, E-value=2e-20, Identity=54%"; Hit description=DNA binding protein, putative
  Pfam annotation: Domain name=C1_1; Domain location=35-86; Score=-1.4; E_value=0.044; Accession=PF00130.14; Description=Phorbol estersdiacylglycerol binding do
  Pfam annotation: Domain name=PHD; Domain location=1-43; Score=42.9; E_ value=1.2e-09; Accession=PF00628.21; Description=PHD-finger
  Pfam module annotation: Pfam domain module=C1_1::PHD; Domain location= 35-86::1-43
VGRSGDGGELICCDNCPASYHQACLPYQDIPDGNWYCSSCLCDICGEVINSKELRTSVPALECLQCERQYHAKCLSGKVLRNEKGGPDSILHDIDVHT

SEQ ID NO: 107916 - protein, 72 aa, Setaria italica
  Transcript Sequence Number=SeqID_41942
  Subcellular localization annotation: CTP_CleavageSite=48; ConfidenceScore=5.38e-01
MEDNDIHITLKFATKAPNFVSPISGSQPSYAESAGFASSGFLVGISVPISALRSLMLCSSSSILVPISSSAM

SEQ ID NO: 107917 - protein, 78 aa, Setaria italica
  Transcript Sequence Number=SeqID_41943
  Gene Ontology: Biological process=response to stress
  Homolog annotation: Hit_ID=Q8RUA7; Match level="QueryCoverage=100%, HitCoverage=100%, E-value=1e-34, Identity=93%"; Hit description=Heat shock factor-binding protein 1
  Pfam annotation: Domain name=HSBP1; Domain location=10-63; Score =120.6; E_value=5.1e-33; Accession=PF06825.4; Description=Heat shock factor binding protein 1
MDSEPSSQNPTDMTAFVQNLLGQMQTRFESMSQNIVSKIDEMGTKIDELEQSINDLKAEMGTEMPTKKPEEAKPADSA

SEQ ID NO: 107918 - protein, 50 aa, Setaria italica
  Transcript Sequence Number=SeqID_41944
  Pfam annotation: Domain name=HSBP1; Domain location=2-40; Score=6.6; E_value=0.056; Accession=PF06825.4; Description=Heat shock factor binding protein 1
LIASFPFQVQNLLGQMQTRFESMSQNIVSKNILICNHFIVFILFIFSKKI

SEQ ID NO: 107919 - protein, 95 aa, Setaria italica
  Transcript Sequence Number=SeqID_41945
  Gene Ontology: Biological process=response to stress
  Homolog annotation: Hit_ID=B6UEC8; Match level="QueryCoverage=82%, HitCoverage=17%, E-value=2e-35, Identity=93%"; Hit description=GTP binding protein
  Pfam annotation: Domain name=HSBP1; Domain location=27-80; Score =120.6; E_value=5.1e-33; Accession=PF06825.4; Description=Heat shock factor binding protein 1
  Subcellular localization annotation: CTP_CleavageSite=49; ConfidenceScore=5.28e-01
MSGPHNLALQFPAAPTNMDSEPSSQNPTDMTAFVQNLLGQMQTRFESMSQNIVSKIDEMGTKIDELEQSINDLKAEMGTEMPTKKPEEAKPADSA

SEQ ID NO: 107920 - protein, 123 aa, Setaria italica
  Transcript Sequence Number=SeqID_41946
EPCRSPWSELAIGVCVTVSSLAQGAPIEKQHYHSQMGEGDRFLYEPSFCYPDSTVLSPQHIIIRYSWRFRVSFSFVPPSHRVQRKVYAIRWHGITTCRSYPALVHPVVLVTFGCRNDYQHGVK

SEQ ID NO: 107921 - protein, 190 aa, Setaria italica
  misc_feature (10)..(10): Xaa can be any naturally occurring amino acid
  Transcript Sequence Number=SeqID_41947
  Gene Ontology: Mol. function=binding
  Homolog annotation: Hit_ID=Q9ZTU4; Match level="QueryCoverage=93%, HitCoverage=55%, E-value=3e-55, Identity=60%"; Hit description=MS5 -like protein (Fragment)
  Pfam annotation: Domain name=TPR_1; Domain location=23-56; Score =31.8; E_value=2.9e-06; Accession=PF00515.20; Description =Tetratricopeptide repeat
  Pfam annotation: Domain name=TPR_2; Domain location=23-56; Score =30.6; E_value=6.3e-06; Accession=PF07719.9; Description =Tetratricopeptide repeat
  Pfam module annotation: Pfam domain module=TPR_1::TPR_2; Domain location=23-56::23-56
PKRTKTARSXGRKFQVTLEQEATRLLGNLGWALMQKENYTEAEGAYRRALLIGPDNNKMCNLGICLMKQGRVLEAKDVLKQVRPAAVDGLRGADSHLKAYERAQEMLRDLEAKLVGRPRADQLDTSWLFDALLLGSSSSIWQPQPCIDHLLPPSAPAPVPAPAPARRDHFADENACVSKKLAALQANMLN

SEQ ID NO: 107922 - protein, 126 aa, Setaria italica
  Transcript Sequence Number=SeqID_41948
  Gene Ontology: Mol. function=oxidoreductase activity; Cellular component=cytoplasm; Biological process=metabolic process
  Homolog annotation: Hit_ID=A3QQM8; Match level="QueryCoverage=99%, HitCoverage=32%, E-value=7e-37, Identity=60%"; Hit description=12 -oxophytodienoic acid reductase 1
DPKVLALRVIGHTLNPLTVLLTHMVEPRMRVNPDDGKLTFPHMLMPFRRAFHGTFIVSGGYDREEGNAAIAEGYSDLFAYGRLFLANPDLPARFATNAGLNKYDRSTFYTSDAVVGYTDYPFLDQF

SEQ ID NO: 107923 - protein, 142 aa, Setaria italica
  misc_feature (86)..(86): Xaa can be any naturally occurring amino acid
  Transcript Sequence Number=SeqID_41949
  Gene Ontology: Cellular component=cytoplasm
  Homolog annotation: Hit_ID=A8WES3; Match level="QueryCoverage=99%, HitCoverage=86%, E-value=5e-46, Identity=64%"; Hit description=ZCN11
  Pfam annotation: Domain name=PBP; Domain location=18-139; Score=47.0; E_value=7.4e-11; Accession=PF01161.12; Description=Phosphatidylethanol amine-binding protein
VSHVDPLVVGRVIGDVVDLFVPTVPLSVRFGTRDLTNGCEIKPPIAANMPAVQIAGRANDLFTLLMTDPDAPSPSEPSMRELLHWXTVVPYVGPRPQVGIHRYVLVLFQQRARMNAPRRWPWVGEAARANFTTRAFASRHDL

SEQ ID NO: 107924 - protein, 44 aa, Setaria italica
  Transcript Sequence Number=SeqID_41950
RIVACHFSRDPYITLNIYTQSYIGVVASVLVLHIEIRESETTAS

SEQ ID NO: 107925 - protein, 60 aa, Setaria italica
  Transcript Sequence Number=SeqID_41951
YFHSSYSSSNSIEHCYDFNTTVFWNLEVSCLLLDMCFLLCLLPRNQSSLLCFLIFLFRYF

SEQ ID NO: 107926 - protein, 145 aa, Setaria italica
  misc_feature (135)..(135): Xaa can be any naturally occurring amino acid
  Transcript Sequence Number=SeqID_41952
  Gene Ontology: Mol. function=4 iron, 4 sulfur cluster binding; Cellular component=nucleus; Biological process=base-excision repair
  Homolog annotation: Hit_ID=B3W6G6; Match level="QueryCoverage=99%, HitCoverage=7%, E-value=5e-30, Identity=50%"; Hit description =Putative transcriptional activator DEMETER
SDSYWKLPARLHESRPVAAGAESFVEAENGSLEDVVSSQNSAISSQNSPDYLFHRNEHMFSSTPLKFTAEAFVHRNKPIGTSSSMTYTELLRMQEIKSKYSENIASWEYCEVPDLFTKKGPPLNELQDLKKKTSXLYTSDTYQQN

SEQ ID NO: 107927 - protein, 74 aa, Setaria italica
  misc_feature (61)..(61): Xaa can be any naturally occurring amino acid
  Transcript Sequence Number=SeqID_41953
  Homolog annotation: Hit_ID=B9SU37; Match level="QueryCoverage=100%, HitCoverage=9%, E-value=2e-14, Identity=48%"; Hit description =Pentatricopeptide repeat-containing protein, putative
  Pfam annotation: Domain name=PPR; Domain location=15-49; Score=40.1; E_value=8.7e-09; Accession=PF01535.12; Description=PPR repeat
LFSLMKESGCFPDVLTYTAMIKAYRDDGSWRRAWDLFKEMESNDVQPDAIVCSSLMEALNXGSQPEMVLQLMEF

SEQ ID NO: 107928 - protein, 294 aa, Setaria italica
  Transcript Sequence Number=SeqID_41954
  Gene Ontology: Mol. function=transferase activity, transferring glycosyl groups; Biological process=metabolic process
  Homolog annotation: Hit_ID=B6THM4; Match level="QueryCoverage=100%, HitCoverage=60%, E-value=1e-128, Identity=76%"; Hit description =Anthocyanidin 3-O-glucosyltransferase
VDIFCTTLFDAVHELRVPAYVYLITSAAMCALLLRSPALDEELEAEVEFEESEEGGVDVPGLPPVPASCLPTGLENRKIPTYKWFVYNGRRYMEASGIVVNTVAELEPRVLGAIADGQCTRGTRAPSVYTIGPVIPFTPSTGEKAAAHECVRWLDSQPPASVVFLCFGGTGSFTAPQAHEIAHGLERSGHRFLWVLRGQPEPGTKLPTDGNLVELLPAGFLEETKGRGLVWPAKAPQKEILAHAAVGGFVTHCGWNSILESLWHGVPMVPWPLGAEQHYNAFTLVADMGVAVPM

SEQ ID NO: 107929 - protein, 137 aa, Setaria italica
  misc_feature (83)..(83): Xaa can be any naturally occurring amino acid
  Transcript Sequence Number=SeqID_41955
  Gene Ontology: Mol. function=nucleic acid binding; Biological process= DNA integration
  Homolog annotation: Hit_ID=Q8RVS9; Match level="QueryCoverage=95%, HitCoverage=83%, E-value=4e-48, Identity=70%"; Hit description =Putative transposase-like protein (Fragment)
  Pfam annotation: Domain name=DUF659; Domain location=1-76; Score= -12.7; E_value=2.3e-07; Accession=PF04937.7; Description=Protein of unknown function (DUF 659)
MKKENVVQVITDNDPVCRSAGALIQEKYSHIQWTPSIAHTLSLALKNICAGKSSEDVDLRDCHWISKVVDDATFVKNFIINHXMKLSIFEEFSKLKILVIADTRFASDIVMLKRFRLIKQSLLRMVISDQWPAYRKG

SEQ ID NO: 107930 - protein, 130 aa, Setaria italica
  misc_feature (26)..(26): Xaa can be any naturally occurring amino acid
  misc_feature (28)..(28): Xaa can be any naturally occurring amino acid
  misc_feature (37)..(37): Xaa can be any naturally occurring amino acid
  Transcript Sequence Number=SeqID_41956
  Gene Ontology: Mol. function=structural constituent of ribosome; Cellular component=intracellular; Biological process=protein modification process
  Homolog annotation: Hit_ID=B6TTD8; Match level="QueryCoverage=89%, HitCoverage=56%, E-value=2e-16, Identity=41%"; Hit description =UBiQuitin family member
  Pfam annotation: Domain name=Ribosomal_L40e; Domain location=68-117; Score=16.1; E_value=0.026; Accession=PF01020.9; Description =Ribosomal L40e family
GRTLADYSIRKESTLHLVLRLNSAKXGXYPMNVEPNXLQLALKYRQRKMICRECDESHNLPSQIFSIGCYRSLTVPSAISSGWMPCRCYARNPVRANNCLKKKCDHCNELKAVSPFHVQHCCMIVDVGGY

SEQ ID NO: 107931 - protein, 117 aa, Setaria italica
  Transcript Sequence Number=SeqID_41957
  Gene Ontology: Mol. function=metal ion binding
MDAAGMAAGAPILPPDASPPPVAGQGAAFPIAIVIAIGFMVTSLILISYYFLVVRCWLRGGGPGSGLLHRARREDLVERVSAVFFTDLEAAELPGGLDPDVVAALPVVKYRRTRAAS

SEQ ID NO: 107932 - protein, 123 aa, Setaria italica
  Transcript Sequence Number=SeqID_41958
MAFPFVLSDSECGDSSYDSSFSEQSSTISTPSTPFTVQSDTQSEDLDRTDIWVSSLDLDAEDSALLPGKEQFLDILDSDFPSPSFSAVRSLQCGPPSSSAGTSQRKEANDSDEPIFWPFERTC

SEQ ID NO: 107933 - protein, 122 aa, Setaria italica
  Transcript Sequence Number=SeqID_41959
  Gene Ontology: Mol. function=carbon-sulfur lyase activity
  Homolog annotation: Hit_ID=B6U5R4; Match level="QueryCoverage=100%, HitCoverage=29%, E-value=1e-43, Identity=68%"; Hit description =Alliin lyase 2
  Pfam annotation: Domain name=Alliinase_C; Domain location=1-122; Score=-165.4; E_value=2.8e-05; Accession=PF04864.5; Description =Allinase, C-terminal domain
CDGYELSPASEANRLFHFAQRKMAERWSRLRATVAASGIFSLPNELSGYCTFAKEIVAANPPFAWLRCHKDGVEDLEGFLRENKIMTRGGPKFGVDERVVRVSMLDTDEAFDVFINRVASLK

SEQ ID NO: 107934 - protein, 136 aa, Setaria italica
  misc_feature (28)..(28): Xaa can be any naturally occurring amino acid
  Transcript Sequence Number=SeqID_41960
  Gene Ontology: Mol. function=DNA binding; Cellular component =cytosolic ribosome; Biological process=protein transport
  Homolog annotation: Hit_ID=B6T903; Match level="QueryCoverage=93%, HitCoverage=61%, E-value=5e-59, Identity=91%"; Hit description =Nascent polypeptide-associated complex alpha subunit-like protein
  Pfam annotation: Domain name=NAC; Domain location=3-53; Score=33.3; E_ value=9.6e-07; Accession=PF01849.10; Description=NAC domain
  Pfam annotation: Domain name=UBA; Domain location=97-134; Score=25.5; E_value=0.00022; Accession=PF00627.23; Description=UBATS-N domain
  Pfam module annotation: Pfam domain module=NAC::UBA; Domain location =3-53::97-134
FATGITFLPLTGVSRVTVKKSKNILFVXISKPDVFKSPNSDTYVIFGEAKIEDLSSQLQTQAAEQFKAPDLSQMISKPETSGLGQEDNEEEVDDTGVEPKDIELVMTQASVSRPKAVKALKAADGDIVTAIMELTN

SEQ ID NO: 107935 - protein, 135 aa, Setaria italica
  Transcript Sequence Number=SeqID_41961
  Gene Ontology: Mol. function=DNA binding; Cellular component =cytosolic ribosome; Biological process=protein transport
  Homolog annotation: Hit_ID=B6T903; Match level="QueryCoverage=93%, HitCoverage=61%, E-value=2e-60, Identity=92%"; Hit description =Nascent polypeptide-associated complex alpha subunit-like protein
  Pfam annotation: Domain name=NAC; Domain location=3-52; Score=42.6; E_ value=1.6e-09; Accession=PF01849.10; Description=NAC domain
  Pfam annotation: Domain name=UBA; Domain location=96-133; Score=25.5; E_value=0.00022; Accession=PF00627.23; Description=UBATS-N domain
  Pfam module annotation: Pfam domain module=NAC::UBA; Domain location =3-52::96-133
FATGITFLPLTGVSRVTVKKSKNILFVISKPDVFKSPNSDTYVIFGEAKIEDLSSQLQTQAAEQFKAPDLSQMISKPETSGLGQEDNEEEVDDTGVEPKDIELVMTQASVSRPKAVKALKAADGDIVTAIMELTN

SEQ ID NO: 107936 - protein, 205 aa, Setaria italica
  Transcript Sequence Number=SeqID_41962
  Gene Ontology: Mol. function=DNA binding; Cellular component =cytosolic ribosome; Biological process=protein transport
  Homolog annotation: Hit_ID=B6T903; Match level="QueryCoverage=99%, HitCoverage=99%, E-value=5e-71, Identity=73%"; Hit description =Nascent polypeptide-associated complex alpha subunit-like protein
  Pfam annotation: Domain name=NAC; Domain location=63-122; Score=94.1; E_value=4.9e-25; Accession=PF01849.10; Description=NAC domain
  Pfam annotation: Domain name=UBA; Domain location=166-203; Score =23.8; E_value=0.00068; Accession=PF00627.23; Description=UBATS-N domain
  Pfam module annotation: Pfam domain module=NAC::UBA; Domain location =63-122::166-203
MTAQTAEELAAQIEQQKLEEQKNEAEEVVVEDDDDDDEDDDDDDKDDDEGQEGDASGKSKQSRSEKKSRKAMLKLGMKPITGVSRVTVKKSKNILFVISKPDVFKSPNSDTYVIFGEAKIEDLSSQLQTQAAEQFKAPDLSQMISKPETSGLGQEDNEEEVDDTGVEPKDIELVMTQASVSRPKAVKALKAAEGDIVTAIMELTN

SEQ ID NO: 107937 - protein, 103 aa, Setaria italica
  misc_feature (7)..(7): Xaa can be any naturally occurring amino acid
  misc_feature (9)..(9): Xaa can be any naturally occurring amino acid
  misc_feature (90)..(90): Xaa can be any naturally occurring amino acid
  Transcript Sequence Number=SeqID_41963
  Gene Ontology: Mol. function=transferase activity, transferring groups other than amino-acyl groups
  Homolog annotation: Hit_ID=Q01MP2; Match level="QueryCoverage=97%, HitCoverage=22%, E-value=3e-45, Identity=91%"; Hit description =H1005F08.2 protein
GRLGVDXQXNRAILLNDAGARFVEATADVTLDSVMPLKPTPEVLSLHPSGDGATELMLIQVTRFACGSLVVGFTTQHIVADGRGTNNFFXAWSQATRGAASTR

SEQ ID NO: 107938 - protein, 67 aa, Setaria italica
  misc_feature (4)..(4): Xaa can be any naturally occurring amino acid
  Transcript Sequence Number=SeqID_41964
SALXFLNPPPKLQARYRVGKVAYKVQVMFIKNQARYIHVFTGDLWFFTQFMDGNRGANHDSEIIPYS

SEQ ID NO: 107939 - protein, 51 aa, Setaria italica
  Transcript Sequence Number=SeqID_41965
FSCPLVLTDMFHAMMEMQCLHLVHDLMFNLPHLCDLFFRSDLLGIMPLVVL

SEQ ID NO: 107940 - protein, 110 aa, Setaria italica
  Transcript Sequence Number=SeqID_41966
TQVAFSSPPQNERENVERSCSRFVTDEASVLDKRADSENAPPSFGEKRRCISPGDNALEGSCSRSQSPPGSDSNIHETSLRHEEPQAERLLSVNVDKVAMVFRCSVTWRS

SEQ ID NO: 107941 - protein, 267 aa, Setaria italica
  Transcript Sequence Number=SeqID_41967
  Gene Ontology: Mol. function=serine-type peptidase activity; Biological process=proteolysis
  Homolog annotation: Hit_ID=B6THH6; Match level="QueryCoverage=88%, HitCoverage=46%, E-value=1e-100, Identity=73%"; Hit description =Prolyl carboxypeptidase like protein
  Pfam annotation: Domain name=Peptidase_S28; Domain location=41-267; Score=-101.9; E_value=1.8e-06; Accession=PF05577.4; Description =Serine carboxypeptidase S28
MMGSRARLVSLLLAFLLARAAEAGGGSGSRYLTKDERWMNQRLDHFSPTDHRRFKQRYFEFLDYHRAPGGPIFLRICGESACGGIPNDYLAVLAKKFGAAVVTPEHRYYGKSSPFKRLTTENLRFLSSKQALFDLAVFRQYYQESLNARYNRTGFDNPWFVIGVSYSGALSAWFRLKFPHLTCGSLASSGVVRAVYNYTAFDKQVGESAGPECKAVLQEITKLVDEQLRTDSRSVKALFSAQALKNDGDFLFFLADAAATTFQYGDP

SEQ ID NO: 107942 - protein, 266 aa, Setaria italica
  Transcript Sequence Number=SeqID_41968
  Homolog annotation: Hit_ID=Q2R1J5; Match level="QueryCoverage=79%, HitCoverage=49%, E-value=4e-98, Identity=81%"; Hit description=Kelch repeat-containing F-box family protein, putative, expressed
  Pfam annotation: Domain name=F-box; Domain location=94-141; Score =17.0; E_value=0.081; Accession=PF00646.25; Description=F-box domain
  Pfam annotation: Domain name=Kelch_1; Domain location=181-223; Score =0.4; E_value=3; Accession=PF01344.17; Description=Kelch motif
  Pfam annotation: Domain name=Kelch_1; Domain location=225-266; Score =15.4; E_value=0.048; Accession=PF01344.17; Description=Kelch motif
  Pfam module annotation: Pfam domain module=F-box::Kelch_1::Kelch_1; Domain location=94-141::181-223::225-266
  Subcellular localization annotation: CTP_CleavageSite=44; ConfidenceScore=5.00e-01
MLGDQRMILALDSATSSSSAPGLTLSEDLTSGSSNCVTESLQVPCAQKGGQVEGLVNCYRKKNKVGSGSGNPAIEGWGSNMEDGDQNGEVNTSELISGIGRELAISCLLRLPRSYYYDVACVNRSFYSLVRSGELYRLRREARIVEQMIYCSCNVLEWDGFDPCRQRWFSIPSMPPIECFTLADKESLAVGTNILVFGRRVEAHVVLSYSLLTNSWTTGEMMNTPRCLFGSASFGEKAIVAGGIGENGTLSSAELYDSEMRTWTTL

SEQ ID NO: 107943 - protein, 230 aa, Setaria italica
  Transcript Sequence Number=SeqID_41969
  Homolog annotation: Hit_ID=Q2R1J5; Match level="QueryCoverage=96%, HitCoverage=51%, E-value=1e-110, Identity=85%"; Hit description =Kelch repeat-containing F-box family protein, putative, expressed
  Pfam annotation: Domain name=Kelch_1; Domain location=122-162; Score =8.4; E_value=0.34; Accession=PF01344.17; Description=Kelch motif
  Pfam annotation: Domain name=Kelch_1; Domain location=21-66; Score =42.9; E_value=1.3e-09; Accession=PF01344.17; Description=Kelch motif
  Pfam annotation: Domain name=Kelch_1; Domain location=68-115; Score =41.1; E_value=4.4e-09; Accession=PF01344.17; Description=Kelch motif
  Pfam annotation: Domain name=Kelch_2; Domain location=122-162; Score =6.6; E_value=5.7; Accession=PF07646.7; Description=Kelch motif
  Pfam annotation: Domain name=Kelch_2; Domain location=21-66; Score =18.8; E_value=0.023; Accession=PF07646.7; Description=Kelch motif
  Pfam annotation: Domain name=Kelch_2; Domain location=68-115; Score =8.4; E_value=3.4; Accession=PF07646.7; Description=Kelch motif
  Pfam module annotation: Pfam domain module=Kelch_1::Kelch_1::Kelch _1::Kelch_2::Kelch_2::Kelch_2; Domain location=122-162::21-66::68 -115::122-162::21-66::68-115
KLNLKENKTNSWTTGEMMNTPRCLFGSASFGEKAIVAGGIGENGTLSSAELYDSEMRTWTTLPSMNRARQMCSGFFMDGKFYVIGGKSEKHNEILSCAEEFDLENGTWRLIPDMARGLNGGCGAPPLVAVVNNELYAADYASREVRKYDKENNSWITLGSLPGRYTSVHGWGLAFRSCGDMLIVIGGMSLGGSGVIEICSWVPNNGLPDWKIIGTRHSGSFVYNCAVMNC

SEQ ID NO: 107944 - protein, 121 aa, Setaria italica
  Transcript Sequence Number=SeqID_41970
  Subcellular localization annotation: CTP_CleavageSite=24; ConfidenceScore=5.30e-01
MGKAGRAEQAFPNGAPATRFSRCRCGAVVGKVVSAKCASVLLLAVGGFLSAAFVMLHLRASGGGVPDDPDILAEIEAGFILLVPHSQIASQGGTLEKEIYDQIGVPNSKVSVSMRPYNYTN

SEQ ID NO: 107945 - protein, 70 aa, Setaria italica
  Transcript Sequence Number=SeqID_41971
MQPVALESAHLKSFSLIRFWVLQLRSVSLLHPHSHTFSCSILFSETYSKFWLCLNIPLYIMLNFPRNCYT

SEQ ID NO: 107946 - protein, 393 aa, Setaria italica
  Transcript Sequence Number=SeqID_41972
  Gene Ontology: Mol. function=aspartate kinase activity; Cellular component=chloroplast; Biological process=amino acid biosynthetic process
  Homolog annotation: Hit_ID=Q5JK18; Match level="QueryCoverage=99%, HitCoverage=68%, E-value=0.0, Identity=94%"; Hit description =Aspartokinase
  Pfam annotation: Domain name=AA_kinase; Domain location=3-203; Score =121.0; E_value=4e-33; Accession=PF00696.20; Description=Amino acid kinase family
  Pfam annotation: Domain name=ACT; Domain location=237-306; Score =16.5; E_value=0.11; Accession=PF01842.17; Description=ACT domain
  Pfam annotation: Domain name=ACT; Domain location=314-376; Score =11.1; E_value=0.57; Accession=PF01842.17; Description=ACT domain
  Pfam module annotation: Pfam domain module=AA_kinase::ACT::ACT; Domain location=3-203::237-306::314-376
LGLPRSEIHDMLDELEQLLKGIAMMKELTLRTRDYLVSFGECMSTRIFAAYLNKIGVKARQYDAFDIGFITTDDFGNADVLEATYPAVAKRLHGDWIRDPAIPVVTGFLGKGWKSGAVTTLGRGGSDLTATTIGKALGLREIQVWKDVDGVLTCDPNIYPHAKTVPYLTFEEATELAYFGAQVLHPQSMRPAREGDIPVRVKNSYNPKAPGTLITKQREMDKVVLTSIVLKSNVTMLDIVSTRMLGQFGFLARVFSIFEDLGISVDCVATSEVSISVSLDPSKIWSRELIQQELDNVVEELEKIAIVHLLQQRAIISLIGNVKRSSLILEKTFQVLRKCGVNIQMISQGASKVNMSLIVHDSEAKACIKALHQAFFEDEDVLTQVETENLLVG

SEQ ID NO: 107947 - protein, 119 aa, Setaria italica
  Transcript Sequence Number=SeqID_41973
  Gene Ontology: Mol. function=nucleotide binding; Cellular component =nucleus; Biological process=defense response
  Homolog annotation: Hit_ID=Q5ZAJ3; Match level="QueryCoverage=100%, HitCoverage=11%, E-value=2e-46, Identity=76%"; Hit description =Putative powdery mildew resistance protein PM3b
MAGLAASLVVGPLVSLVKEKASNYLLDKYKVMEGMEKQHEVLKRKLPAILDVIADAEKQASSHREGVKKWLGVLKTVAYQAIDIFDEFEYEALRRQAKKNGHITKLGKAGVKLFPTHNR

SEQ ID NO: 107948 - protein, 34 aa, Setaria italica
  misc_feature (21)..(21): Xaa can be any naturally occurring amino acid
  Transcript Sequence Number=SeqID_41974
  Gene Ontology: Mol. function=protein serine/threonine kinase activity; Biological process=protein amino acid phosphorylation
  Homolog annotation: Hit_ID=Q5QN75; Match level="QueryCoverage=100%, HitCoverage=9%, E-value=2e-09, Identity=88%"; Hit description =Mitogen-activated protein kinase kinase 1
MRGKKPVMELKLAVPAQETPXDKFLTASGTFKDG

SEQ ID NO: 107949 - protein, 399 aa, Setaria italica
  misc_feature (289)..(289): Xaa can be any naturally occurring amino acid
  Transcript Sequence Number=SeqID_41975
  Gene Ontology: Mol. function=inositol-1,3,4-trisphosphate 5/6-kinase activity; Cellular component=intracellular; Biological process =inositol trisphosphate metabolic process
  Homolog annotation: Hit_ID=B6TBA5; Match level="QueryCoverage=84%, HitCoverage=81%, E-value=1e-134, Identity=75%"; Hit description =Inositol-tetrakisphosphate 1-kinase 3
  Pfam annotation: Domain name=Ins134_P3_kin; Domain location=1-277; Score=524.0; E_value=1.9e-154; Accession=PF05770.3; Description =Inositol 1, 3, 4-trisphosphate 56-kinase
MIGCCKKVAALSIDESLPLSEGPFFDVILHKITSKEWQQVLEDYHEEHPEVTVLDPPNAIEHLNNRQSMLEEVADLNLSNLYGEVCTPRQLVITKDPSSIPTAVAMAGLTWPLVAKPLVVDGTSKGHELYLAYDEASLSMLHPPLVLQEFINHGGILFKVYIIGETVKVVRRFSLPDVNAYDLLNNVGVYRLPRVSCAAASADDAELDPLIAELPPRPLLEKLGRELRSRLGLRLFNVDMIRELGTKDRYYIIDINYFPGFGKMPGYEIMFTDFLLSLAQSKYKKYLSXDLKCKEVCEERRLTKWHIMVAAVLPHQCTYSGDISISRRLEEVAVCVPSKVVVHAGSGVGNKQGNAWMPCAHVVRCCLPNEYLRRDGLPLNTKIKLGRTGLLRDQRLTTQ

SEQ ID NO: 107950 - protein, 84 aa, Setaria italica
  Transcript Sequence Number=SeqID_41976
FMLNLYSTKQLKRYSYIHHKWFARTDTRSPTVERADQRIHRKRRFASIVHTLMTLLLAYYHHHLACFYFLLLISIFISCEMMVI

SEQ ID NO: 107951 - protein, 213 aa, Setaria italica
  Transcript Sequence Number=SeqID_41977
  Gene Ontology: Mol. function=translation release factor activity, codon specific; Cellular component=cytoplasm; Biological process =translational termination
  Homolog annotation: Hit_ID=B6ST15; Match level="QueryCoverage=100%, HitCoverage=48%, E-value=1e-114, Identity=93%"; Hit description =Eukaryotic peptide chain release factor subunit 1-1
  Pfam annotation: Domain name=eRF1_2; Domain location=1-52; Score= -16.3; E_value=0.011; Accession=PF03464.7; Description=eRF1 domain 2
  Pfam annotation: Domain name=eRF1_3; Domain location=55-192; Score =221.9; E_value=1.6e-63; Accession=PF03465.7; Description=eRF1 domain 3
  Pfam module annotation: Pfam domain module=eRF1_2::eRF1_3; Domain location=1-52::55-192
LAGSADFKNELGKSEMFDPRLQAKVVKMIDVSYGGDSGFNQAIEMSAEVLSDVKFVQEKKLIGKYFEEISQDTGKYVLGVQDTMTALEMGAVETLIVWENLDVRRYELKNSATGETIVKYLNPAQEADQSNFTDEATSGELEVVDNTLLLEWFAENYHQFGCTLEFVTNKSQEGSQFCRGFGGIGGILRYPADVTAFQEGDDLSDGEYDEDFE

SEQ ID NO: 107952 - protein, 208 aa, Setaria italica
  misc_feature (190)..(190): Xaa can be any naturally occurring amino acid
  Transcript Sequence Number=SeqID_41978
  Gene Ontology: Mol. function=ATP-dependent helicase activity; Biological process=DNA recombination
  Homolog annotation: Hit_ID=UPI00017390E4; Match level="QueryCoverage =100%, HitCoverage=21%, E-value=1e-64, Identity=60%"; Hit description= ATP binding / ATP-dependent DNA helicase/ ATP-dependent helicase/ helicase/ nucleic acid binding
  Pfam annotation: Domain name=DEAD; Domain location=1-141; Score=-7.0; E_value=0.00014; Accession=PF00270.21; Description=DEADDEAH box helicase
AFMVPTEVLAVQHYEHLTSLLDEFDGDDKPNIALLTGSTSTRESRIIRNGLKTGEIAMVIGTHSLIADKTDFSALRISVIDEQQRFGVVQRGRFNSKLYTSSSKLSDENTSSDEASDSETFMAPHVLAMSATPIPRTLALALYGDMSLTQITDLPPGRQPIETLAFEGNDAGFKTVFQMMRDELIEWGQXVTVVYPIIDESEHLPQLH

SEQ ID NO: 107953 - protein, 141 aa, Setaria italica
  Transcript Sequence Number=SeqID_41979
  Gene Ontology: Mol. function=sequence-specific DNA binding; Cellular component=intracellular; Biological process=regulation of transcription, DNA-dependent
  Homolog annotation: Hit_ID=Q5Z8C9; Match level="QueryCoverage=79%, HitCoverage=35%, E-value=6e-23, Identity=44%"; Hit description=Hap5 protein-like
  Pfam annotation: Domain name=CBFD_NFYB_HMF; Domain location=51-116; Score=31.5; E_value=3.3e-06; Accession=PF00808.15; Description =Histone-like transcription factor (CBFNF-Y) and archaeal histone
  Pfam annotation: Domain name=Histone; Domain location=45-119; Score =9.4; E_value=0.01; Accession=PF00125.16; Description=Core histone H2AH2BH3H4
  Pfam module annotation: Pfam domain module=CBFD_NFYB_HMF::Histone; Domain location=51-116::45-119
MSNGSKERFGHPQELHGLPPTPLTSLQQKELDEFWRKTVEDIENTMNFDNHILPMSYVAKIIRDNQGSLMISSETPSCLTKVLEIFIQELTLRAWMCAKSHDRSSTILESDIYEAINSKESYVFLNDVLQRLEEQNTITTR

SEQ ID NO: 107954 - protein, 242 aa, Setaria italica
  misc_feature (18)..(18): Xaa can be any naturally occurring amino acid
  Transcript Sequence Number=SeqID_41980
  Gene Ontology: Mol. function=signal transducer activity; Biological process=G-protein coupled receptor protein signaling pathway
  Homolog annotation: Hit_ID=Q2R941; Match level="QueryCoverage=99%, HitCoverage=28%, E-value=1e-101, Identity=79%"; Hit description=G -protein alpha subunit, putative, expressed
MAEAMDGSTWEDMMRRIXLPPGTPIPEAPPNLDYSIALEYDGPPVPYDLPRVDPVEIPAIPTAEPVSGPQVPGGLPVAPVVEPIRLPVSRIARCADPVSMQVGGSSESVLHNEEFDDDDDDSRTQSHGSAQSSPGPQNRPEMQEGRRAPVVTFGFTPNSKYESKEFEEMSEQYVAVTKKEKRRRACYRCGKRKWESKESCIVCDARYCSYCVLRMMGSMPEGRKCVTCIGQPIDESKRAKLR

SEQ ID NO: 107955 - protein, 61 aa, Setaria italica
  Transcript Sequence Number=SeqID_41981
  Gene Ontology: Mol. function=acetyl-CoA carboxylase activity; Biological process=fatty acid biosynthetic process
  Homolog annotation: Hit_ID=Q41743; Match level="QueryCoverage=78%, HitCoverage=2%, E-value=4e-12, Identity=70%"; Hit description=Acetyl- coenzyme A carboxylase
CICAPTSSCIFKAIDTKNGQGTVLGRTRWGAMVAVKSVESARTAIVAALKDSAQHASSEGN

SEQ ID NO: 107956 - protein, 135 aa, Setaria italica
  Transcript Sequence Number=SeqID_41982
  Gene Ontology: Mol. function=ferredoxin reductase activity; Cellular component=chloroplast; Biological process=lipoate biosynthetic process
  Homolog annotation: Hit_ID=P80680; Match level="QueryCoverage=60%, HitCoverage=83%, E-value=2e-37, Identity=91%"; Hit description =Ferredoxin-thioredoxin reductase, variable chain
  Pfam annotation: Domain name=FeThRed_A; Domain location=55-128; Score= 145.6; E_value=1.5e-40; Accession=PF02941.7; Description=Ferredoxin thioredoxin reductase variable alpha chain
  Subcellular localization annotation: CTP_CleavageSite=45; ConfidenceScore=5.21e-01
PRSAALPSPAPAFARRLGPPSLPPRRARLLLQVALTSEVSSDDVAAEEAAAAPKIGKRVRVTEPLRVYHVLKAPDLDIQGMEGVIKQYVCVWKGKRITANFPFKVEFQLAVEGQAKPVRFFVHLREDEFEFVDEE

SEQ ID NO: 107957 - protein, 81 aa, Setaria italica
  misc_feature (69)..(69): Xaa can be any naturally occurring amino acid
  Transcript Sequence Number=SeqID_41983
  Homolog annotation: Hit_ID=Q01K95; Match level="QueryCoverage=97%, HitCoverage=3%, E-value=2e-31, Identity=81%"; Hit description =OSIGBa0148A10.3 protein
EETSQRMDAVQIYDPIFILRFSIHTLLMGYIEPAEFARLGLLAITLVSIASPDQELRMLGYECLGAFKXSLETSQRSKETW

SEQ ID NO: 107958 - protein, 122 aa, Setaria italica
  Transcript Sequence Number=SeqID_41984
KTWLDAVCGVTIQKLVQNSCYIGCFNPHVSKKNAIVASDTISLVGMILLLTIHNLIDFFTLFSGELVMYITCFWTFTSCLPYLELYFISRDFVEFPGNIDFALFFCSLSVLTSTSDSCALDY

SEQ ID NO: 107959 - protein, 95 aa, Setaria italica
  misc_feature (15)..(15): Xaa can be any naturally occurring amino acid
  Transcript Sequence Number=SeqID_41985
  Gene Ontology: Mol. function=oxidoreductase activity; Biological process=oxidation reduction
  Homolog annotation: Hit_ID=B6TQU4; Match level="QueryCoverage=96%, HitCoverage=26%, E-value=9e-43, Identity=92%"; Hit description =Oxidoreductase/ zinc ion binding protein
  Pfam annotation: Domain name=ADH_N; Domain location=38-93; Score= -1.8; E_value=0.002; Accession=PF08240.4; Description=Alcohol dehydrogenase GroES-like doma
MEALVVRRLGEPTAXPGGEASPFAAVSGDHPVPELSSPTAVRVRVAATSLNFATFLQVQGRYQERPPLPFVPGSDYAGVVDAVGPGVRGLRPATA

SEQ ID NO: 107960 - protein, 95 aa, Setaria italica
  Transcript Sequence Number=SeqID_41986
LYSHILRIQYFDFCFFQQTKDSNDTSSRQCEFDGFHSTLRYPCATQLRLTSQFLRHITSDFSYENALGSGGFGDVYKKCWHNAGPLLPGRQKCLG

SEQ ID NO: 107961 - protein, 122 aa, Setaria italica
  Transcript Sequence Number=SeqID_41987
  Gene Ontology: Mol. function=hydrolase activity
  Homolog annotation: Hit_ID=B6TCN5; Match level="QueryCoverage=88%, HitCoverage=36%, E-value=8e-48, Identity=82%"; Hit description=Nudix type motif 22
  Subcellular localization annotation: CTP_CleavageSite=28; ConfidenceScore=5.08e-01
MAATSAAADPGTAFKLLLSCPAGLPRSRVSVKFGQSFDRIPHPDAGLEESICEIWNQRLQRNPSLYNGTKFRYGGNAVHYKDDSKQDYHVSLHLGLTDYRTFVGTNLNPLWEKFLVPSEGNL

SEQ ID NO: 107962 - protein, 235 aa, Setaria italica
  Transcript Sequence Number=SeqID_41988
GVRSDLKQDKCRKLDVVQTVKSTVEKRKCLFSTEIQLLDGGQPVNDNNEVLGCEWSDLIATTSGELLAFDSTMDDHHRGMHLAAKNAESCGYLLSKLAGDGEISERAYPNASGQVYYQELVMGEDQTENAQIFQDGQQTISTEEIQDNIYEANGCIPLDYKVESQQQRGVRRRCLVFEAAGFSNSVVQKESVEDLSVSTCKGKGHVQTQPRGLRGIGLHLNALALTPKGKMACQD

SEQ ID NO: 107963 - protein, 67 aa, Setaria italica
  misc_feature (36)..(36): Xaa can be any naturally occurring amino acid
  Transcript Sequence Number=SeqID_41989
  Gene Ontology: Mol. function=ATP binding
  Homolog annotation: Hit_ID=B6TEA3; Match level="QueryCoverage=100%, HitCoverage=18%, E-value=5e-20, Identity=76%"; Hit description =Nucleotide-binding protein 1
EAFDSSKGGAEKMRREMGVPFLGKVTMDPQLGKAVXKGRSCFTDQKCSASASAPALKQIVEKLIKPQ

SEQ ID NO: 107964 - protein, 43 aa, Setaria italica
  Transcript Sequence Number=SeqID_41990
CAVKCLRCKSSGCAVAANMFLCQQSLTGSFLITLVSRARDTGN

SEQ ID NO: 107965 - protein, 318 aa, Setaria italica
  Transcript Sequence Number=SeqID_41991
  Gene Ontology: Mol. function=endonuclease activity; Cellular component=chloroplast; Biological process=tRNA processing
  Homolog annotation: Hit_ID=B6UER4; Match level="QueryCoverage=95%, HitCoverage=85%, E-value=1e-171, Identity=95%"; Hit description =Nuclear ribonuclease Z
  Pfam annotation: Domain name=Lactamase_B; Domain location=53-259; Score=2.8; E_value=0.058; Accession=PF00753.19; Description=Metallo -beta-lactamase superfamily
GGGGGGGGGTKGGLLSVLDRALADEEEYRRARAQVQRKGVEVEGYAIEGISVGGHETCVTVPSLNVAFDIGRGPPFAVSQDYLFITHAHLDHIGGLPMYIATRGLYNLKPPTVFVPPCIKDDVEELLQVHRRMSQIERSVQLVALDLGETYEIRNDLVARPFQTYHAIPSQGYVIYSIRRKLKKQYAHLKGSQIMKLKQSGTEITDTILYPEVAFTGDTKSDFILDPRNADALRAKVLITEATFLDDHVDVEHAREHGHMHLSEIMENSQWFRNETIVLTHFSNRYSLEDIRQAVSRLQPKLHSKVVALTEGFKSEHR

SEQ ID NO: 107966 - protein, 126 aa, Setaria italica
  misc_feature (13)..(13): Xaa can be any naturally occurring amino acid
  misc_feature (18)..(18): Xaa can be any naturally occurring amino acid
  Transcript Sequence Number=SeqID_41992
  Gene Ontology: Mol. function=nucleic acid binding; Cellular component= intracellular
AVCQVRATSKAKXKKHLXGKKHLKRKLALYGASVAASVAGPSDAHKKIHILVDGEMHEVVQQGNYVWCERCSVRCINAATMADHLRGKKHSLLNRVWRSIKAVRMKNKSKEDTAATCEGKVNDNGQ

SEQ ID NO: 107967 - protein, 101 aa, Setaria italica
  Transcript Sequence Number=SeqID_41993
  Gene Ontology: Mol. function=electron carrier activity; Cellular component=integral to membrane; Biological process=oxidation reduction
  Homolog annotation: Hit_ID=C0KHM0; Match level="QueryCoverage=100%, HitCoverage=18%, E-value=2e-22, Identity=47%"; Hit description =Putative ferulate 5-hydroxylase
EEVRLVIAKLREAAAEGTEVDIGKMMNAFANDIICRAVCGKFFRAEGRNKLFRELNHMTTVLIAGFNVEDYFPGLAHSVGSLFSRFTSNRVKQTHEKWNKL

SEQ ID NO: 107968 - protein, 82 aa, Setaria italica
  Transcript Sequence Number=SeqID_41994
LVLPSSIAPGNLQGMDNVLQLVLKHQRVIEELREENENLRQILVEELKVSPTKLQIDRKNGVKAYYPCSDCFECRRRSRKTR

SEQ ID NO: 107969 - protein, 69 aa, Setaria italica
  misc_feature (25)..(25): Xaa can be any naturally occurring amino acid
  Transcript Sequence Number=SeqID_41995
TYSLITDSVHIVLLTKLIAWCKLIXFLYMSFPKTVLLLDKLTVEISKYRSALFETAQLQHILYYILFPR

SEQ ID NO: 107970 - protein, 123 aa, Setaria italica
  Transcript Sequence Number=SeqID_41996
  Gene Ontology: Mol. function=lyase activity
  Homolog annotation: Hit_ID=B6SL02; Match level="QueryCoverage=93%, HitCoverage=23%, E-value=1e-28, Identity=51%"; Hit description =Ribosomal RNA apurinic site specific lyase
  Pfam annotation: Domain name=FBD; Domain location=42-91; Score=58.9; E_value=1.9e-14; Accession=PF08387.2; Description=FBD
VFGVRNDAKMLPSFFRCFPNVERLHIYSKKTDEPTGKLNLKFWQEAGAIECVRSHINQLILHDFRGEKNELAFLKFFIESAQMLKNLVIVCAKGCFNSKAEVNSKLQTLFAGKKASKCCYHWL

SEQ ID NO: 107971 - protein, 94 aa, Setaria italica
  Transcript Sequence Number=SeqID_41997
  Subcellular localization annotation: CTP_CleavageSite=7; ConfidenceScore=5.28e-01
TFNKPSWATNLAKANILYMVNSIRTFFLLSLRSIFLPLKLYCLSTSDNFHTLPFFFSHSIIFSTDTETGILASPSRYIILELYYMEVLSILKMP

SEQ ID NO: 107972 - protein, 129 aa, Setaria italica
  misc_feature (35)..(35): Xaa can be any naturally occurring amino acid
  misc_feature (109)..(109): Xaa can be any naturally occurring amino acid
  Transcript Sequence Number=SeqID_41998
  Gene Ontology: Mol. function=hydrolase activity; Cellular component =nucleus; Biological process=mRNA processing
  Homolog annotation: Hit_ID=B6U1S6; Match level="QueryCoverage=90%, HitCoverage=17%, E-value=1e-53, Identity=84%"; Hit description =Cleavage and polyadenylation specificity factor, 100 kDa subunit
KVSDFDLFTLDDVDAAFKNVVRLKYLQNYLLTDQXKGEGIVIVPHVAGHHLGGTVWKITKDGEDVVYAVDFNHRKERHLNGTALGSFARPAVLITDAYNALNNQCYKKXQDEDFVGTAFSTGIFLLCFF

SEQ ID NO: 107973 - protein, 49 aa, Setaria italica
  Transcript Sequence Number=SeqID_41999
RGCGVGVCSHSSMAGTIAGMLVPDLHLQRHIKLSLTLCLTKSEANLIRI

SEQ ID NO: 107974 - protein, 117 aa, Setaria italica
  Transcript Sequence Number=SeqID_42000
SAISSSEPSYSASQSRHPLAVPFKSPHLNLPHLALKLHDPLLTQPIYSLAAIAGFPTAVHHRAAMTTIPSPAQYAQHRPSSFNRPSQHLDNLPRYLLDLSPPLAIVSAAGNGRFPAR

SEQ ID NO: 107975 - protein, 192 aa, Setaria italica
  Transcript Sequence Number=SeqID_42001
  Gene Ontology: Mol. function=nucleic acid binding; Cellular component= nucleus; Biological process=regulation of transcription, DNA-dependent
  Homolog annotation: Hit_ID=Q7XI63; Match level="QueryCoverage=97%, HitCoverage=29%, E-value=2e-92, Identity=85%"; Hit description =Putative DNA repair protein rhp54
  Pfam annotation: Domain name=Helicase_C; Domain location=126-192; Score=2.3; E_value=0.03; Accession=PF00271.23; Description=Helicase conserved C-terminal domain
TKENNLPGIRVYTLFMKPTDIQEEVLAKVTMPVPGIARYPLEVELLITIASIHPWLIKTTKCASTYFTPKEVARVEKYKQKYTVGCKTKFVIDLLHKSSFRGERVLIFCHNVSPINFLVKLIEIVFGWRLGEEVLVLQGDQELPVRSDVMDKFNGDRKGKRKVLIASTTACAEGISLTGASRLVMLDSEWNH

SEQ ID NO: 107976 - protein, 137 aa, Setaria italica
  misc_feature (130)..(130): Xaa can be any naturally occurring amino acid
  Transcript Sequence Number=SeqID_42002
  Gene Ontology: Mol. function=diacylglycerol kinase activity; Biological process=activation of protein kinase C activity
  Homolog annotation: Hit_ID=B9T3T5; Match level="QueryCoverage=91%, HitCoverage=20%, E-value=2e-28, Identity=46%"; Hit description =Pentatricopeptide repeat-containing protein, putative
  Pfam annotation: Domain name=PPR; Domain location=40-74; Score=11.1; E_value=0.43; Accession=PF01535.12; Description=PPR repeat
  Pfam annotation: Domain name=PPR; Domain location=5-39; Score=1.4; E _value=6; Accession=PF01535.12; Description=PPR repeat
  Pfam annotation: Domain name=PPR; Domain location=76-110; Score=8.0; E_value=1; Accession=PF01535.12; Description=PPR repeat
  Pfam module annotation: Pfam domain module=PPR::PPR::PPR; Domain location=40-74::5-39::76-110
LVRSYCITKSTQALAMNGHGVAALVRFAQMLREGFQPDEVIFLSVLNACGHSSLVNEGCQLFKSMVEEYSITPWMEHYGSMVDMLCKAGALGEAFAFVLAMPVKPDHMIWRVLAGACRDHGNASLARKVXDHVIGME

SEQ ID NO: 107977 - protein, 279 aa, Setaria italica
  misc_feature (22)..(22): Xaa can be any naturally occurring amino acid
  misc_feature (239)..(239): Xaa can be any naturally occurring amino acid
  Transcript Sequence Number=SeqID_42003
  Homolog annotation: Hit_ID=Q93ZR8; Match level="QueryCoverage=92%, HitCoverage=50%, E-value=1e-111, Identity=73%"; Hit description =Putative auxin-independent growth promoter protein
  Pfam annotation: Domain name=DUF246; Domain location=7-231; Score =269.9; E_value=5.7e-78; Accession=PF03138.6; Description=Plant protein family
GLYPIGSISSKLLRCRVNYNAXLRFTPEIEKLGIRLVQALRRNGPFVVLHLRYEMDMLAFSGCTHGCSNKEAEELTKMRYAYPWWKEKVIDSDAKRKDGLCPLTPEETALVLQALGIDRSYQIYIAAGEIYGGQRRMAALTLAYPNVVRKETLLPSDLNLFQNHSSQMAALDYMVSLESDIFIPTYDGNMAKVVEGHRRYLGFKKTVLLDRRLIVELVDQYRNGTLRWADFSSAVKASXTSRMGEPSRRQAIPDKPKEEDYFYANPHECLHQPEDLSAL

SEQ ID NO: 107978 - protein, 155 aa, Setaria italica
  misc_feature (19)..(19): Xaa can be any naturally occurring amino acid
  Transcript Sequence Number=SeqID_42004
  Gene Ontology: Mol. function=kinase activity; Cellular component =cytoplasm; Biological process=coenzyme A biosynthetic process
  Homolog annotation: Hit_ID=Q01DV2; Match level="QueryCoverage=83%, HitCoverage=35%, E-value=6e-31, Identity=50%"; Hit description=[R] KOG4584 Uncharacterized conserved protein
  Pfam annotation: Domain name=DUF89; Domain location=1-151; Score= -68.8; E_value=0.00018; Accession=PF01937.11; Description=Protein of unknown function DUF89
FRDIFKKVKDEENAKAMSXWFEGVVQRNDEIEDDGKRVENLVRGILAGNIFDLGSAQLAEVFAKDGMSFLASCQNLVSRPWVIDDLDAFKSKWTKKSWEKAVIFVDNSGADVILGILPFARELLRRGTKRSLTGTWVLLEKTCNKSAFMKITRWQ

SEQ ID NO: 107979 - protein, 46 aa, Setaria italica
  misc_feature (39)..(39): Xaa can be any naturally occurring amino acid
  Transcript Sequence Number=SeqID_42005
  Gene Ontology: Mol. function=kinase activity
EPWLLQVILAANDMPSINDVTYPELMEIINKLKDADGKXAGVDASD

SEQ ID NO: 107980 - protein, 108 aa, Setaria italica
  Transcript Sequence Number=SeqID_42006
  Gene Ontology: Mol. function=kinase activity; Cellular component =cytoplasm; Biological process=coenzyme A biosynthetic process
  Homolog annotation: Hit_ID=Q01DV2; Match level="QueryCoverage=94%, HitCoverage=29%, E-value=1e-20, Identity=49%"; Hit description=[R] KOG4584 Uncharacterized conserved protein
EPWLLQVILAANDMPSINDVTYPELMEIINKLKDADGKLAGVDASDLLVANSGNDLPVIDLSSVSPELAFMANDADLVVLEGMGRALETNLYAQMKCDSIKIGMVKHP

SEQ ID NO: 107981 - protein, 67 aa, Setaria italica
  misc_feature (36)..(36): Xaa can be any naturally occurring amino acid
  Transcript Sequence Number=SeqID_42007
QPGVEDARFWVTRQYSAKSVYEGLFHGAVLFRSLEXIWKSCAPGKCCFFMWLVAHNRAGLLINFLDG

SEQ ID NO: 107982 - protein, 95 aa, Setaria italica
  Transcript Sequence Number=SeqID_42008
  Subcellular localization annotation: CTP_CleavageSite=43; ConfidenceScore=5.21e-01
IHLFIKLKATPISVSPYSSIGQSFLRARVLEDCSCASARLSTCSSTLGGNESPSAALDHGHQCRTTFPSTQSAIPTTRTPSTSYYYSSASKFQRP

SEQ ID NO: 107983 - protein, 365 aa, Setaria italica
  Transcript Sequence Number=SeqID_42009
  Gene Ontology: Mol. function=kinase activity; Cellular component =cytoplasm; Biological process=coenzyme A biosynthetic process
  Homolog annotation: Hit_ID=Q01DV2; Match level="QueryCoverage=87%, HitCoverage=88%, E-value=2e-71, Identity=45%"; Hit description=[R] KOG4584 Uncharacterized conserved protein
  Pfam annotation: Domain name=DUF89; Domain location=48-359; Score =273.7; E_value=4.1e-79; Accession=PF01937.11; Description=Protein of unknown function DUF89
MESSSPSVSFPLLQAPVESTYRACTIPYRFPSDNPRKATPVEIQWIDLFLNSVPSFKQRAENDPTVPDAPAKAEKFAQRYTAMLEEMKKNPESHGGPPDCILLCRLRELVLRELGFRDIFKKVKDEENAKAMSLFEGVVQRNDEIEDDGKRVENLVRGILAGNIFDLGSAQLAEVFAKDGMSFLASCQNLVSRPWVIDDLDAFKSKWTKKSWEKAVIFVDNSGADVILGILPFARELLRRGTKVILAANDMPSINDVTYPELMEIINKLKDADGKLAGVDASDLLVANSGNDLPVIDLSSVSPELAFMANDADLVVLEGMGRALETNLYAQMKCDSIKIGMVKHPEVAQFLGGRLYDCVFKFNEA

SEQ ID NO: 107984 - protein, 369 aa, Setaria italica
  Transcript Sequence Number=SeqID_42010
  Gene Ontology: Mol. function=metal ion binding
  Homolog annotation: Hit_ID=Q2QML2; Match level="QueryCoverage=100%, HitCoverage=93%, E-value=1e-124, Identity=65%"; Hit description=Zinc finger family protein, putative, expressed
NDEDLDHCPVCKIDLGCTPVEKLRPDHNIQDVRSKVFPFKRKKVNAEEAESPITLPVKRKERSISSLVVNTPRITPAGSTGRRTRAVTRKAAALRGLGPIIADPLKKDKDNSNKQTDNSSLLDSLSKVPQTRRQVLSNGDTSSHPSGKDKASDNKDLDKAELWKPLNCLVEAASKTKPRTSAQSSAFKGDKPSESPSTEQSSRAKAREPPQKSKVEDDKKDDPEPIVLLRKKGPGRKKKHPLPSANAASSAAAIQKGKKFIPIWFSLIASFDQKGDPPLPQIPAHYLRIKDGSIPASSIQKYIMQKLSLPSESEVEISCCGQSVNPAQPVRNLVERWLRVGPVRPLQTVIGSSGGDYVMVISYGRPKSA

SEQ ID NO: 107985 - protein, 58 aa, Setaria italica
  Transcript Sequence Number=SeqID_42011
CIINREQNFELLLYPEVQNQCTCVLFFLNFVDCTSTTKYFFLSFISERKARTIHELHY

SEQ ID NO: 107986 - protein, 127 aa, Setaria italica
  misc_feature (33)..(33): Xaa can be any naturally occurring amino acid
  misc_feature (53)..(53): Xaa can be any naturally occurring amino acid
  Transcript Sequence Number=SeqID_42012
  Gene Ontology: Mol. function=transposase activity; Biological process= transposition, DNA-mediated
  Homolog annotation: Hit_ID=Q2QWY8; Match level="QueryCoverage=95%, HitCoverage=23%, E-value=3e-23, Identity=47%"; Hit description =Transposon protein, putative, CACTA, En/Spm sub-class
MALEDQQRLLIARSAALITAMYAFLFSRIRNAXSSRPQISYGPLSTMDEECQXNLDRIYNCNDIECVAMLRMRKALFFALCNLLRERNLLTDSLHSCVEEKLAMFLHIVGHNQHFRVIHQHWRRSIE

SEQ ID NO: 107987 - protein, 106 aa, Setaria italica
  Transcript Sequence Number=SeqID_42013
  Gene Ontology: Mol. function=ATPase activity, coupled to transmembrane movement of substances; Cellular component=integral to membrane; Biological process=transport
  Homolog annotation: Hit_ID=Q8GU74; Match level="QueryCoverage=100%, HitCoverage=7%, E-value=5e-52, Identity=90%"; Hit description=MDR -like ABC transporter
RSHSKTFSRPLDIFDSFHAEDSKKPQTKAPSFWRLAELSLAEYFYALLGSAGAACFGSFNPLLAYTISLIVVAYYKIGVRDVHDEVNKYCSFIVGMGIITVLIHFI

SEQ ID NO: 107988 - protein, 58 aa, Setaria italica
  Transcript Sequence Number=SeqID_42014
CPHLFLGCFTVGFLLVLFNLTGKWCEVLCVLIIRHCVTLMNNFDYWRFHSIDGQHGVG

SEQ ID NO: 107989 - protein, 68 aa, Setaria italica
  Transcript Sequence Number=SeqID_42015
  Subcellular localization annotation: CTP_CleavageSite=55; ConfidenceScore=5.18e-01
KKAPWSLSLCLISRSHSVPMKKNSTLPSFGMPKHKRKHVWVLGYLSVLAKYSVIVALVGVGTIDFYFN

SEQ ID NO: 107990 - protein, 129 aa, Setaria italica
  Transcript Sequence Number=SeqID_42016
  Gene Ontology: Mol. function=nucleoside-triphosphatase activity; Cellular component=intracellular; Biological process=regulation of transcription, DNA-dependent
  Homolog annotation: Hit_ID=Q9ZW94; Match level="QueryCoverage=95%, HitCoverage=2%, E-value=2e-19, Identity=39%"; Hit description=F5A8.4 protein
NKTTKGNFIWYSKETCVNRNCMYLQSLSAQYAAYQIYNLKESSPLLVPVGNMHPYIIPTTSLRELQFPTVSGQSVDTLVTGEFDSDLADQMLFFAANWVMEQSTEHDLELYTVWFEWYNDLFQPYCNFF

SEQ ID NO: 107991 - protein, 53 aa, Setaria italica
  Transcript Sequence Number=SeqID_42017
  Gene Ontology: Mol. function=deoxyhypusine synthase activity; Cellular component=cytosol; Biological process=peptidyl-lysine modification to hypusine
  Homolog annotation: Hit_ID=Q69P66; Match level="QueryCoverage=98%, HitCoverage=13%, E-value=1e-20, Identity=88%"; Hit description =Putative Deoxyhypusine synthase
GSDSGAQPDEAVSWGKIKGSAKPVKVHCDASIAFPLVVAATFARKVHGSKSTN

SEQ ID NO: 107992 - protein, 204 aa, Setaria italica
  misc_feature (58)..(58): Xaa can be any naturally occurring amino acid
  Transcript Sequence Number=SeqID_42018
  Gene Ontology: Mol. function=magnesium ion binding; Biological process=metabolic process
  Homolog annotation: Hit_ID=B6SYF3; Match level="QueryCoverage=100%, HitCoverage=36%, E-value=5e-61, Identity=59%"; Hit description =Terpene synthase 7
  Pfam annotation: Domain name=Terpene_synth; Domain location=1-186; Score=182.8; E_value=9.5e-52; Accession=PF01397.13; Description =Terpene synthase, N-terminal domain
YTPTSSQRSEEWMRERSEQLKGEVCRKFEVGKAMSVADTVRLVDTLERLGIENHFGQXVEKALEGVHDEELDFGSSNDLHVVALRFRLLRQHGFWVSADVFDKFRDDTGSFNVNLSNDPRGLLSLYNAAHMAVPGETILDDAIAFTRRHLEAAKGKLTSPIKEQVSRALEIPLPRFMRQLETMHYLTEYEKEEPHDIMMLELAK

SEQ ID NO: 107993 - protein, 85 aa, Setaria italica
  Transcript Sequence Number=SeqID_42019
LLNIYCFLENLLFARLSLFFCQLRFVLILINVKDNCLIVAHVMELEQRCAHGSARYMMKKGATMDLVLRLLITFLWLISVSIISG

SEQ ID NO: 107994 - protein, 96 aa, Setaria italica
  Transcript Sequence Number=SeqID_42020
  Subcellular localization annotation: CTP_CleavageSite=51; ConfidenceScore=5.33e-01
SARPCFPVSSAPIPDHPLSSVPAIESRPAQISLRVAVASRNPWPMGLDLVTSAADVERGNLIRPPSARGSIRASFSSAFTPFTQYCWFAGCCRHLR

SEQ ID NO: 107995 - protein, 44 aa, Setaria italica
  Transcript Sequence Number=SeqID_42021
LQLVLQNGTLKDLQMRRRSAICNFQNALSITNSLAGLNSNGNYN

SEQ ID NO: 107996 - protein, 302 aa, Setaria italica
  Transcript Sequence Number=SeqID_42022
  Gene Ontology: Cellular component=chloroplast; Biological process =cellular metabolic process
  Homolog annotation: Hit_ID=Q8YSS1; Match level="QueryCoverage=78%, HitCoverage=95%, E-value=1e-68, Identity=55%"; Hit description =All3013 protein
  Pfam annotation: Domain name=DUF561; Domain location=48-292; Score =336.2; E_value=6.6e-98; Accession=PF04481.4; Description=Protein of unknown function (DUF561)
  Subcellular localization annotation: CTP_CleavageSite=42; ConfidenceScore=5.63e-01
MAAPGSLGLLHAPSFTAVKCQPVASRAAAPARRAPRALFAVRASAAGAADKDAVLKAFRENRALKIISGLQNFDRSSVASVVTAADKGGATHVDIACHEDLVKLALDLTTLPICVSSVDPSAFHSAVQAGAKMIEIGNYDSFYEMGIEFSSEQILKLTRETRKMLPGIALSVTVPHTLSLPDQMRLAELLEEEGADIIQTEGGKCSSPTKPGVLGLIEKATPTLAAAYSISRAVSIPVMCSSGLSSVTAPMAVTAGAAGVGVGSAVNKLNDVVVMIAEVRSIAQSMGLASRIVSENLRTVHH

SEQ ID NO: 107997 - protein, 66 aa, Setaria italica
  Transcript Sequence Number=SeqID_42023
RGSNTMLGIALVFITGALGPYIYRYKKGKIYRKPPNRKGKSPTVHIHLTVITSSLEIETNSIALTN

SEQ ID NO: 107998 - protein, 181 aa, Setaria italica
  misc_feature (48)..(48): Xaa can be any naturally occurring amino acid
  misc_feature (127)..(127): Xaa can be any naturally occurring amino acid
  Transcript Sequence Number=SeqID_42024
  Gene Ontology: Mol. function=heat shock protein binding; Cellular component=mitochondrion; Biological process=protein folding
  Homolog annotation: Hit_ID=Q69QB3; Match level="QueryCoverage=77%, HitCoverage=33%, E-value=4e-43, Identity=62%"; Hit description =Putative chaperone protein DnaJ
  Pfam annotation: Domain name=DnaJ_C; Domain location=71-161; Score =6.5; E_value=6.4e-07; Accession=PF01556.10; Description=DnaJ C terminal region
  Pfam annotation: Domain name=DnaJ_CXXCXGXG; Domain location=2-58; Score=-11.1; E_value=0.00013; Accession=PF00684.11; Description=DnaJ central domain (4 repeats)
  Pfam module annotation: Pfam domain module=DnaJ_C::DnaJ_CXXCXGXG; Domain location=71-161::2-58
VCDSCGGRGHLANAKRYVCLSCNGLGRVTNYPFTSTCGVCRGVGKVIXGSGVVDGMKHVEVNLPAGIDSGDTIHVREAGDSGGLGTEHGSLYITIQVANDPVFTRDGADIHVDRKISFTQAMIGGKXVEVPTLNGKTEVKVIIDAEKRHAWPLTKIMREETLVYYIICCVKNTQRSSTRSS

SEQ ID NO: 107999 - protein, 79 aa, Setaria italica
  misc_feature (44)..(44): Xaa can be any naturally occurring amino acid
  Transcript Sequence Number=SeqID_42025
  Gene Ontology: Mol. function=heat shock protein binding; Biological process=protein folding
  Homolog annotation: Hit_ID=Q69QB3; Match level="QueryCoverage=94%, HitCoverage=14%, E-value=1e-09, Identity=54%"; Hit description =Putative chaperone protein DnaJ
CTICSVVTERQRALLEEFAVEEATKEQNTSMVGNWLYQQLSTGXTYRWELVAENMTGQKVMIGVGILILIHMILSKAVS

SEQ ID NO: 108000 - protein, 440 aa, Setaria italica
  misc_feature (359)..(359): Xaa can be any naturally occurring amino acid
  misc_feature (402)..(402): Xaa can be any naturally occurring amino acid
  misc_feature (420)..(420): Xaa can be any naturally occurring amino acid
  Transcript Sequence Number=SeqID_42026
  Gene Ontology: Mol. function=heat shock protein binding; Cellular component=mitochondrion; Biological process=protein folding
  Homolog annotation: Hit_ID=Q69QB3; Match level="QueryCoverage=95%, HitCoverage=95%, E-value=1e-175, Identity=73%"; Hit description =Putative chaperone protein DnaJ
  Pfam annotation: Domain name=DnaJ; Domain location=73-121; Score =55.8; E_value=1.7e-13; Accession=PF00226.23; Description=DnaJ domain
  Pfam annotation: Domain name=DnaJ_C; Domain location=273-392; Score =127.9; E_value=3.2e-35; Accession=PF01556.10; Description=DnaJ C terminal region
  Pfam annotation: Domain name=DnaJ_CXXCXGXG; Domain location=184-260; Score=23.7; E_value=4.4e-08; Accession=PF00684.11; Description=DnaJ central domain (4 repeats)
  Pfam module annotation: Pfam domain module=DnaJ::DnaJ_C::DnaJ _CXXCXGXG; Domain location=73-121::273-392::184-260
MGRFGWLRHASRSLAFCSGEVAAPRSTWIRPDAPCSFTGIYIGDKYYGRFMLTSSVLSRSFHATGHRCSIDKDYYKILGVPKDASQDDIKKAFHSLAKKYHPDTNKGNTATKRIGSRGDFDGSYHDTFSGSNHDPFTEFHRQNDGHFSSKFYKIFSEVFGQDTDMRANDIKVELNLSFNEAANGCIKKVSFSAKNVCDSCGGRGHLANAKRYVCLSCNGLGRVTNYPFTSTCGVCRGVGKVIKDYCLTCKGSVVVDGMKHVEVNLPAGIDSGDTIHVREAGDSGGLGTEHGSLYITIQVANDPVFTRDGADIHVDRKISFTQAMIGGKVEVPTLNGKTEVKIPKGVQPGQVVVLGKDCXNLAGYSGDQYVRFLIHFPSVVTERQRALLEEFAVEEATKEQNXSMVGNWWELVAENMTGQXVMIGVGILILIHMILSKAVS

SEQ ID NO: 108001 - protein, 214 aa, Setaria italica
  misc_feature (27)..(27): Xaa can be any naturally occurring amino acid
  misc_feature (38)..(38): Xaa can be any naturally occurring amino acid
  Transcript Sequence Number=SeqID_42027
  Gene Ontology: Mol. function=protein serine/threonine kinase activity; Cellular component=plasma membrane; Biological process =protein amino acid phosphorylation
  Homolog annotation: Hit_ID=Q01LH4; Match level="QueryCoverage=85%, HitCoverage=26%, E-value=7e-73, Identity=72%"; Hit description =B0222C05.5 protein
  Pfam annotation: Domain name=Pkinase; Domain location=1-169; Score= -105.0; E_value=0.031; Accession=PF00069.17; Description=Protein kinase domain
  Pfam annotation: Domain name=Pkinase_Tyr; Domain location=9-169; Score=-171.5; E_value=0.025; Accession=PF07714.9; Description =Protein tyrosine kinase
  Pfam module annotation: Pfam domain module=Pkinase::Pkinase_Tyr; Domain location=1-169::9-169
DVANALEYLHIYCDPPLYHGDVKPSNXLLDKNYLAKLXGCVLVHRPSSGNTTPSSTPVNVKIQATPGYMDPEYAVTQEVTPKSDVYSYGVLLLELVTGKPVVQEESNRSLVEWSRELIGTDCRLHELVDPAVAGAFDLDELQVVADVIHWCTHRDGAARPSMKQVLRILHERLDPLSGRFARAVEGEEGYVLLPSRRRRVAGQGEAGGRRRGGA

SEQ ID NO: 108002 - protein, 105 aa, Setaria italica
  Transcript Sequence Number=SeqID_42028
  Homolog annotation: Hit_ID=B6TQN4; Match level="QueryCoverage=100%, HitCoverage=100%, E-value=1e-53, Identity=97%"; Hit description =EMB2752
MSSRFWRWYADRQFHKWEKTVLWDMVEHYRPPRSFAPLVGTYVAAFYTGVIGAAVTEQLYKEKYWEDHPGEAVPIMPPKFYWGPWRVMNGEVPRFIQTPDEAKTA

SEQ ID NO: 108003 - protein, 208 aa, Setaria italica
  misc_feature (204)..(204): Xaa can be any naturally occurring amino acid
  Transcript Sequence Number=SeqID_42029
  Gene Ontology: Mol. function=protein serine/threonine kinase activity; Biological process=protein amino acid phosphorylation
  Homolog annotation: Hit_ID=B9V0H3; Match level="QueryCoverage=93%, HitCoverage=27%, E-value=4e-54, Identity=55%"; Hit description =Protein kinase domain containing protein
  Pfam annotation: Domain name=Pkinase; Domain location=17-208; Score =20.9; E_value=9.7e-10; Accession=PF00069.17; Description=Protein kinase domain
  Pfam annotation: Domain name=Pkinase_Tyr; Domain location=7-208; Score=-63.1; E_value=1.6e-09; Accession=PF07714.9; Description =Protein tyrosine kinase
  Pfam module annotation: Pfam domain module=Pkinase::Pkinase_Tyr; Domain location=17-208::7-208
MQKHMPVLIREFKQGVLQNGETIAEKKLNSSIPGVTDRQFENEAYHLMRLRHPNVVLLTACCSETENTYVEYNGKYICAEKSERLLCLEYMPKGSLRGYLSDEFSGLSWDTRYKIIEGICYGLHYLHEEWQLNAPIVHMDLKPANILLDNNMVPKIADFGLSRLFSEEKTWTCTTSRDGTLGYMAPEYINRGLITTKSDIFSFXVIII

SEQ ID NO: 108004 - protein, 73 aa, Setaria italica
  Transcript Sequence Number=SeqID_42030
MDSESSRYEKLESMLHNGSSEPCNLPLEYLRNITNNFSDERLLGEGGFGKVYKGVLQNGETIAEKKLNSSIPG

SEQ ID NO: 108005 - protein, 82 aa, Setaria italica
  Transcript Sequence Number=SeqID_42031
YPPQIQNQPPHDTISISSSAQLGNFKPSPWGEIYLALRIGKVPLMRLEISHQILKNPKTIDSNQSIRTNPRHRMGKILITPK

SEQ ID NO: 108006 - protein, 69 aa, Setaria italica
  Transcript Sequence Number=SeqID_42032
AKYCSFILVGKVLSPNIIVASLYCLGEHNLLFLSYEFYPMANRSASYLLVCSYCSKGLSCGCFWRIYLY

SEQ ID NO: 108007 - protein, 52 aa, Setaria italica
  Transcript Sequence Number=SeqID_42033
NAQNCLMKYIALHNIEKYFSNSCIYYCLIQSHIIANLESYYCFVSKLFCLIQ

SEQ ID NO: 108008 - protein, 111 aa, Setaria italica
  Transcript Sequence Number=SeqID_42034
RCESARFLSCGWKYPTKSCFTSLPSICTSPYTNRRIWEAWSHGRELATKEERRERAITRERESSSRNKMKCFSVNPSPSSDCGTEGSRHDARAWIVTSHRGASERNWTIHD

SEQ ID NO: 108009 - protein, 228 aa, Setaria italica
  Transcript Sequence Number=SeqID_42035
  Pfam annotation: Domain name=TPR_2; Domain location=128-161; Score =23.7; E_value=0.00077; Accession=PF07719.9; Description =Tetratricopeptide repeat
  Pfam annotation: Domain name=TPR_4; Domain location=128-153; Score =15.1; E_value=0.29; Accession=PF07721.6; Description=Tetratricopeptid e repeat
  Pfam annotation: Domain name=TPR_4; Domain location=162-187; Score =4.8; E_value=12; Accession=PF07721.6; Description=Tetratricopeptide repeat
  Pfam annotation: Domain name=TPR_4; Domain location=97-122; Score =2.4; E_value=22; Accession=PF07721.6; Description=Tetratricopeptide repeat
  Pfam module annotation: Pfam domain module=TPR_2::TPR_4::TPR_4::TPR _4; Domain location=128-161::128-153::162-187::97-122
  Subcellular localization annotation: CTP_CleavageSite=50; ConfidenceScore=5.72e-01
MAFLAPASLRAPIYVVAAASGRRSVLPAAVKATASSGSATSPHPILSSLRMAASAAVLLAATSPALACTPSAPPPPPAPLTAAVHPDDPIQDASHPFEKLIVESAALARAGRAEAARARLSAAEGCESYARLLAAQALFVEGKVDEAIAAFEELAREDPADYRPLFCQSVLYLVLGREAEGESMIERCREVGGDALLADPVMMVSEASAEAVDAEAGAEKVEPEPAEV

SEQ ID NO: 108010 - protein, 207 aa, Setaria italica
  Transcript Sequence Number=SeqID_42036
  Gene Ontology: Cellular component=plasma membrane
  Homolog annotation: Hit_ID=Q5ZC72; Match level="QueryCoverage=88%, HitCoverage=33%, E-value=2e-65, Identity=72%"; Hit description=Light stress-responsive one-helix protein-like
MLLAVEGGRFFSSSASGYSHGLALLLLGRKAEEKPVKVSPWNQYRLVDREAEQVCHLASGKDEAPGKCAPFVCFGCTANGLEVASPAKAGSSNALGSTQEDEASCRANKKLTTSGSITGNERRGCLKSNSKRDSLEHCIVVSEGEEPRESLEEVQTLRASMERRKVQWTDTCGKDLFEIREFETSDEGLSDDDAENEGFRKCECVIQ

SEQ ID NO: 108011 - protein, 99 aa, Setaria italica
  Transcript Sequence Number=SeqID_42037
RPPVQYGDLTHLFLFFPLYFIFLAFHCVFMPVVPYEAVLLGCYDPLFLFCFASDVLSDGLIFSFKLVKFMSLLYKSGSKPFGLFNSVILCFDVGLFSCP

SEQ ID NO: 108012 - protein, 517 aa, Setaria italica
  misc_feature (436)..(436): Xaa can be any naturally occurring amino acid
  misc_feature (496)..(496): Xaa can be any naturally occurring amino acid
  misc_feature (506)..(506): Xaa can be any naturally occurring amino acid
  Transcript Sequence Number=SeqID_42038
  Gene Ontology: Mol. function=protein serine/threonine kinase activity; Biological process=protein amino acid phosphorylation
  Homolog annotation: Hit_ID=Q10D24; Match level="QueryCoverage=74%, HitCoverage=51%, E-value=1e-159, Identity=72%"; Hit description =Protein kinase domain containing protein, expressed
NRLTSLGSVKLVSMLTLQYLNLQFNRLSHSYVIPSWICCDMRGNGENAIKGGKLKYSGVGSMNSLAESRTSSRACDIALLCLQPEASPSLKHHAPQKMKKGWRRRDCLQQQARQERLESSRSKLNEKYIDEMAVNMAEDECPSSLHDEETSVQDSLKETSSISEDVSSIVDDDLDGHAKDSGMMLQDHYGEEKPGFNIRVHHDDNSCISAEPTCFSRGRIRSVENELDDTASSTHDVVEIAQGNPSVASKFASKSKRHPDVDNNPKPSKCPRAIDERSKLSYKYSVESFCSIDDHLPDGFYDAGRDMPFMSLEEYERSLGLYAREVILLDREQDEELDAIASSAQLLLSNLRRPSSFEMDEDPSHDLLRASVLALFVSDCFGGCDRSASLGRTRRAIVRLRKEQPFVCTCSAGNMCDNNEASKQTNTLSGSFDFTXLCNRSIHIIKERRNSGIVPIGALQFGVCRHRAVLMKYLCDRADPPIPCELVRGHLDYNPXMTWNVVPVRXNGNGWVRMIVM

SEQ ID NO: 108013 - protein, 233 aa, Setaria italica
  misc_feature (8)..(8): Xaa can be any naturally occurring amino acid
  misc_feature (37)..(37): Xaa can be any naturally occurring amino acid
  misc_feature (135)..(135): Xaa can be any naturally occurring amino acid
  misc_feature (167)..(167): Xaa can be any naturally occurring amino acid
  Transcript Sequence Number=SeqID_42039
  Gene Ontology: Mol. function=zinc ion binding; Cellular component =nucleus; Biological process=regulation of transcription, DNA -dependent
  Homolog annotation: Hit_ID=Q7XTS2; Match level="QueryCoverage=99%, HitCoverage=24%, E-value=8e-97, Identity=69%"; Hit description =OSJNBa0008M17.13 protein
  Pfam annotation: Domain name=MULE; Domain location=18-114; Score =99.3; E_value=1.3e-26; Accession=PF10551.1; Description=MULE transposase domain
FFWADARXIMDYHYFCDVVCFDMIYKEFDCSRPLALXLGMNHHRQMVIFGAAFLYDETVESFKWLLETFKIAMCGKHPKTILTDRSVPLKEALGVTWPGTIHRFCVWQIYRSTVKSIAHMLITSEEFTNDYRHCXFDIEDEQEFVGTWNMIMEKYNLRENEWLIKLXEDRENWAMPYNQQIFSGEIRSMLQVENVGTRLKEYLDIDTDLSPFLKIFESSAEKRRQEEMQADYQ

SEQ ID NO: 108014 - protein, 509 aa, Setaria italica
  Transcript Sequence Number=SeqID_42040
  Gene Ontology: Mol. function=3-dehydroquinate dehydratase activity; Cellular component=cytoplasm; Biological process=aromatic amino acid family biosynthetic process
  Homolog annotation: Hit_ID=B6UCV5; Match level="QueryCoverage=100%, HitCoverage=100%, E-value=0.0, Identity=85%"; Hit description =Shikimate biosynthesis protein aroDE
  Pfam annotation: Domain name=DHquinase_I; Domain location=4-221; Score=225.4; E_value=1.5e-64; Accession=PF01487.7; Description=Type I 3-dehydroquinase
  Pfam annotation: Domain name=IlvN; Domain location=354-497; Score= -91.6; E_value=0.098; Accession=PF07991.4; Description=Acetohydroxy acid isomeroreductase, cata
  Pfam annotation: Domain name=Shikimate_DH; Domain location=344-462; Score=91.0; E_value=4.1e-24; Accession=PF01488.12; Description =Shikimate  quinate 5-dehydrogenase
  Pfam annotation: Domain name=Shikimate_dh_N; Domain location=236-316; Score=119.2; E_value=1.4e-32; Accession=PF08501.3; Description =Shikimate dehydrogenase substrate bind
  Pfam module annotation: Pfam domain module=DHquinase_I::IlvN::Shikimat e_DH::Shikimate_dh_N; Domain location=4-221::354-497::344-462::236-316
MTLICVPLVARTVEEMVADAVAAAAAGGDLVEIRLDFIEGFRPREHLPLLLRGCPLPALVTYRPNWEGGQYEGDDTTRFEALHIAMELGVDYVDVELKVADKFMNFISGNKPEKCKLIVSSHNYEYTPSCEELANLVASIQAVGADIVKIATTAKDIVDVSRMFQVMVHCQVPMIGLVMSEKGLMSRVLAPKFGGYLTFGILNAAKTSASGQPTVEELLEIYNIRRIGPDTKVLGLIANPVKQSKSPILHNKCLQSVGYNAVYLPLLGDNLASFLETYSSPDFSGFSCSLPFKVDAVQCCDEHDPVAKSIGAINTIIRRPDGKLVGYNTDYIGAISAIEDGIGGPGSKDAAISLLAGRLIVVVGAGGAGKAIAYGAKEKGARVVVANRTYEKAVSLANAIGGQALRLADLETFRPEEGMILANATSLGMYPNIDGTPIPKKSLSFYNVVFDAVYAPKVTRLLREAEECGVKVVSGVEMFIRQAMGQFEHFTGGIEAPESLMREIAVKYT

SEQ ID NO: 108015 - protein, 187 aa, Setaria italica
  Transcript Sequence Number=SeqID_42041
  Homolog annotation: Hit_ID=A0SH20; Match level="QueryCoverage=97%, HitCoverage=60%, E-value=8e-46, Identity=52%"; Hit description =Embryonic flower 1-like protein (Fragment)
MPDILECTQEQQTDICRDEEVTIACTSPIFSHHQHIAEVPTQSWSKKGEKKLMWDSFKTASRNSPTSTYGFQFRNRIREVDSTPIPAYGASNDYATHQPVIAAVDQYTKEAVNQVQPRSAPSTSLTMEVGRPYDHRIAGHSGLYPKEPMPATHLLRLMDSSTSQGFTNYQRANRRQIELRTQNLSSQ

SEQ ID NO: 108016 - protein, 69 aa, Setaria italica
  Transcript Sequence Number=SeqID_42042
  Gene Ontology: Mol. function=oxidoreductase activity
  Homolog annotation: Hit_ID=B6TBV5; Match level="QueryCoverage=100%, HitCoverage=21%, E-value=2e-14, Identity=59%"; Hit description =Leucoanthocyanidin dioxygenase
MEAASNKIVHRDEITDDAFTDSAHIPEKYIRTDEVSAGAVVGEDEAYELPVIDMAKLLDPELSASETAK

SEQ ID NO: 108017 - protein, 161 aa, Setaria italica
  misc_feature (151)..(151): Xaa can be any naturally occurring amino acid
  Transcript Sequence Number=SeqID_42043
  Gene Ontology: Mol. function=actin binding; Cellular component =cytoskeleton
  Homolog annotation: Hit_ID=Q84TX2; Match level="QueryCoverage=81%, HitCoverage=6%, E-value=5e-68, Identity=89%"; Hit description=SCAR -like protein 1
MQFSIGFYLCIQVFLFASMRNEFAAEIFHDLHEDVMATASRGHGLMLRLQQLEAEFPAVEKAIISQTDHSNYPHDDGVDWHANLQLKQNMITQGDMPRFILDSYEECRGPPHLFTLDKFDVAGAGASLKRYSDPSFFKAEHTSNMLEIDVXIEKKPRRLKK

SEQ ID NO: 108018 - protein, 436 aa, Setaria italica
  Transcript Sequence Number=SeqID_42044
  Gene Ontology: Mol. function=translation release factor activity, codon specific; Cellular component=cytoplasm; Biological process =translational termination
  Homolog annotation: Hit_ID=B6UHD9; Match level="QueryCoverage=100%, HitCoverage=97%, E-value=0.0, Identity=86%"; Hit description=Peptide chain release factor 2
  Pfam annotation: Domain name=PCRF; Domain location=146-258; Score =166.0; E_value=1.1e-46; Accession=PF03462.10; Description=PCRF domain
  Pfam annotation: Domain name=RF-1; Domain location=289-402; Score =197.5; E_value=3.6e-56; Accession=PF00472.12; Description=Peptidyl -tRNA hydrolase domain
  Pfam module annotation: Pfam domain module=PCRF::RF-1; Domain location=146-258::289-402
  Subcellular localization annotation: CTP_CleavageSite=42; ConfidenceScore=5.71e-01
RVAAAVHYPRCTARSSFNPGRSPFSVCFSRRRRNPIPVQSASAGTGSQSSVADEPEAAEWAMQDFYALRKEVELAIERVSEVRQSAGLEQLKEEIASLEKKSADSSLWDDPSKAQEILVSLTELKDRVKLLNDFKSQVEEAETIVKLTEELDSIDTGLLEEASNIVKSFNKALDNFETTQLLSGPYDKEGAVINISAGAGGTDAQDWADMLLRMYVRWGEKQRYKTRVVEKSPGEEAGIKSATVELEGRYAYGYLSGEKGTHRIVRQSPFNAKGLRQTSFAGVEVMPLLPEESMAVEIPEEDLEISFTRAGGKGGQNVNKVETAVRMVHIPTGIAVRCSEERSQLANKIKALSRLKAKLLVIAEEQRASEIKQIRGDMVKAEWGQQIRNYVFHPYKLVKDVRTGCETSDITGVMDGELDPFIRAYLKYKLTAAASS

SEQ ID NO: 108019 - protein, 200 aa, Setaria italica
  misc_feature (30)..(30): Xaa can be any naturally occurring amino acid
  misc_feature (79)..(79): Xaa can be any naturally occurring amino acid
  Transcript Sequence Number=SeqID_42045
  Gene Ontology: Mol. function=sequence-specific DNA binding; Cellular component=nucleus; Biological process=regulation of transcription, DNA-dependent
  Homolog annotation: Hit_ID=Q7XTS2; Match level="QueryCoverage=99%, HitCoverage=17%, E-value=3e-41, Identity=45%"; Hit description =OSJNBa0008M17.13 protein
  Pfam annotation: Domain name=FAR1; Domain location=12-100; Score =125.5; E_value=1.8e-34; Accession=PF03101.7; Description=FAR1 family
GMEFESEEKAYEFYNKYAGHIGFSVRKSTXQHKSSENITKVRTFVCSREGYNRDKKSLEAKKPRLDTRIGCPARLIIKXTPECKYRVTDFKAEHNHQLAPPSTMHMLRSQRILTELQSGEAELSDDSVVTPTTKATGDLVVRQVSFLRNISLLPADYKNYLRSKRMKAMQPGDGGAILKYLQTMQMDNPSFFYTTQIDEE

SEQ ID NO: 108020 - protein, 51 aa, Setaria italica
  Transcript Sequence Number=SeqID_42046
ARPRATGKVVFSQSIHQKGSVQQSIMKKAGQMPGQMLHFLDVGGRGHLLSG

SEQ ID NO: 108021 - protein, 275 aa, Setaria italica
  misc_feature (266)..(266): Xaa can be any naturally occurring amino acid
  Transcript Sequence Number=SeqID_42047
  Gene Ontology: Mol. function=RNA binding; Biological process=RNA processing
  Homolog annotation: Hit_ID=B9STX5; Match level="QueryCoverage=83%, HitCoverage=25%, E-value=1e-34, Identity=40%"; Hit description=RNA binding protein, putative
  Pfam annotation: Domain name=Surp; Domain location=174-218; Score =49.0; E_value=1.8e-11; Accession=PF01805.12; Description=Surp module
MPDHNLHSYFRYLVDHPQLLKDGADSFDTNKGNKIVEGEHASSGGALSLLGTAYDSGDEDEGTLLPASKGTDPGNSMTPDALGHVKPASTIPDNKELGKNQNAFSEAAASVKSKPILAKKNPALTGNIIVAAQQEEVKDAITASTTAKSQITNSGLSETKEMILEPPSFMKRTMEKIVEFILTNGKEFEAKLIEQDKTTGRFPFLLSSNPYHSYYLRFLQESQESKSHGRSPDRNDRRGSSDRRDRRSSSERDDRRSSRQHNDRSXSRELNDRRS

SEQ ID NO: 108022 - protein, 187 aa, Setaria italica
  Transcript Sequence Number=SeqID_42048
  Gene Ontology: Mol. function=nucleotide binding; Biological process =apoptosis
  Homolog annotation: Hit_ID=Q2R8J8; Match level="QueryCoverage=100%, HitCoverage=19%, E-value=4e-28, Identity=41%"; Hit description=NB -ARC domain containing protein, expressed
MRELPMITSAIDGQLLGQDDHILRLSVEELRHVAHEMEDCIDHIMYDASWDQQPWYCKYMKSGRKRKSRSQLGEEMQHLRYRLEEALQRQQRYSVSHSSSSQLAQSSWDQHVLPDDLVGIDAPLEELLEQLAEAEGQPKQLRVISIVGFCGLGKTILARELYNSEIGKQFEERAWVSGTHGDPGELL

SEQ ID NO: 108023 - protein, 314 aa, Setaria italica
  Transcript Sequence Number=SeqID_42049
  Pfam annotation: Domain name=DUF573; Domain location=119-214; Score= -10.6; E_value=0.0014; Accession=PF04504.6; Description=Protein of unknown function, DUF573
MYFITLLSFFYVILDLNNLYLYFFDYRMSVLTHCELWIFYCELFFVRWEYPTFQILASPLSTASSDDTTTTNVSDEHLSPPSSPSISFDSVSESDASTSSSVASDGSSGSEPVVSKKPRLPVRSWLASDEIALLEAVSEHRQKHGRLPSPNHLAAALRSRLRAKDRLSADEISRRLRALRSRYDNAVLRMSRGTIPVKDDDVTIYKLSKLIWEGTRKGKREKKTRAADMRKDPREFGELTGLYPCLSAEVEAIDTGSGAAAAGLLKRAFERIGDDTAARLEAKVKMQRVAEARASAKLDQLRTNVAKVLLQLIE

SEQ ID NO: 108024 - protein, 130 aa, Setaria italica
  Transcript Sequence Number=SeqID_42050
  Gene Ontology: Mol. function=electron carrier activity; Cellular component=peroxisome; Biological process=oxidation reduction
  Homolog annotation: Hit_ID=B6TS46; Match level="QueryCoverage=78%, HitCoverage=25%, E-value=3e-53, Identity=93%"; Hit description =Sulfite oxidase
  Pfam annotation: Domain name=Oxidored_molyb; Domain location=1-76; Score=-11.3; E_value=1.7e-06; Accession=PF00174.11; Description =Oxidoreductase molybdopterin binding d
SGEKGRFLYTASIPLKQATDPDADVLLAYEMNGEILNRDHGYPLRVVVPGVIGARSVKWLDSINISEEECQGFFTQKDYKMFPPTVDWDNIDWSTRRPQMDFPVQSAICTNWKECKNVNTKERKRTKELD

SEQ ID NO: 108025 - protein, 397 aa, Setaria italica
  Transcript Sequence Number=SeqID_42051
  Gene Ontology: Mol. function=electron carrier activity; Cellular component=peroxisome; Biological process=oxidation reduction
  Homolog annotation: Hit_ID=B6TS46; Match level="QueryCoverage=100%, HitCoverage=100%, E-value=0.0, Identity=92%"; Hit description =Sulfite oxidase
  Pfam annotation: Domain name=Mo-co_dimer; Domain location=258-389; Score=182.1; E_value=1.6e-51; Accession=PF03404.8; Description=Mo-co oxidoreductase dimerisation domain
  Pfam annotation: Domain name=Oxidored_molyb; Domain location=49-238; Score=301.2; E_value=2.2e-87; Accession=PF00174.11; Description =Oxidoreductase molybdopterin binding d
  Pfam module annotation: Pfam domain module=Mo-co_dimer::Oxidored _molyb; Domain location=258-389::49-238
MPGLTAPSSYAEEPPRHPALKINSKEPFNAEPHRSALVSSYITPVDFFYKRNHGPIPKVEDLSRYSVSISGLVNKPIQLSMADIWALPKYNVTATLQCAGNRRTAMSKVRKVRGVGWDISALGNATWGGAKLSDVLELVGIPKLSSVSSLGGKHVEFVSVDKCKEEKGGPYTASIPLKQATDPDADVLLAYEMNGEILNRDHGYPLRVVVPGVIGARSVKWLDSINISEEECQGFFTQKDYKMFPPTVDWDNIDWSTRRPQMDFPVQSAICTLEDVDVIKEGKARIAGYALSGGGRGIERVDISVDGGKTWVEARRYQKDNVPYVSDGPQSDKWAWVLFEATLDIPANAEIVAKAVDSAANVQPENVEDIWNLRGILNTSWHRIKIQNSSCVGRSKL

SEQ ID NO: 108026 - protein, 208 aa, Setaria italica
  Transcript Sequence Number=SeqID_42052
  Gene Ontology: Mol. function=protein binding; Cellular component =cytoplasm; Biological process=multicellular organismal development
  Homolog annotation: Hit_ID=Q9LPV9; Match level="QueryCoverage=87%, HitCoverage=46%, E-value=2e-61, Identity=65%"; Hit description=WD repeat-containing protein LWD1
MGGVGDGDAWADQEQGNGGGSRGGGGGEAKRSEIYTYEAGWHIYAMNWSVRRDRKYRLAIASLLEQVPNRVEVVQLDEASGDIAPVLAFDHQYPPTKTMFIPDPHAIRPDLLATSADHLRIWRIPSADDADAAANNNNNSGSVRCNGAPQPGVELRCELNGNRNSDYCGPLTSFDWNDADPRRIGTSSIDTTCTIWDVEREAVDTQLI

SEQ ID NO: 108027 - protein, 974 aa, Setaria italica
  Transcript Sequence Number=SeqID_42053
  Gene Ontology: Mol. function=transferase activity, transferring glycosyl groups; Cellular component=cytoplasm; Biological process =protein amino acid O-linked glycosylation
  Homolog annotation: Hit_ID=Q9M8Y0; Match level="QueryCoverage=95%, HitCoverage=94%, E-value=0.0, Identity=72%"; Hit description =Probable UDP-N-acetylglucosamine--peptide N-acetylglucosaminyltransfe rase SEC
  Pfam annotation: Domain name=TPR_1; Domain location=118-151; Score =38.1; E_value=3.6e-08; Accession=PF00515.20; Description =Tetratricopeptide repeat
  Pfam annotation: Domain name=TPR_1; Domain location=152-185; Score =37.7; E_value=4.8e-08; Accession=PF00515.20; Description =Tetratricopeptide repeat
  Pfam annotation: Domain name=TPR_1; Domain location=186-219; Score =26.3; E_value=0.00013; Accession=PF00515.20; Description =Tetratricopeptide repeat
  Pfam annotation: Domain name=TPR_1; Domain location=220-253; Score =28.3; E_value=3.1e-05; Accession=PF00515.20; Description =Tetratricopeptide repeat
  Pfam annotation: Domain name=TPR_1; Domain location=254-287; Score =27.7; E_value=4.8e-05; Accession=PF00515.20; Description =Tetratricopeptide repeat
  Pfam annotation: Domain name=TPR_1; Domain location=288-321; Score =34.0; E_value=6.1e-07; Accession=PF00515.20; Description =Tetratricopeptide repeat
  Pfam annotation: Domain name=TPR_1; Domain location=322-355; Score =37.0; E_value=7.3e-08; Accession=PF00515.20; Description =Tetratricopeptide repeat
  Pfam annotation: Domain name=TPR_1; Domain location=356-389; Score =11.1; E_value=0.27; Accession=PF00515.20; Description=Tetratricopepti de repeat
  Pfam annotation: Domain name=TPR_1; Domain location=390-423; Score =34.1; E_value=5.5e-07; Accession=PF00515.20; Description =Tetratricopeptide repeat
  Pfam annotation: Domain name=TPR_1; Domain location=424-457; Score =29.1; E_value=1.8e-05; Accession=PF00515.20; Description =Tetratricopeptide repeat
  Pfam annotation: Domain name=TPR_1; Domain location=458-491; Score =33.8; E_value=7.1e-07; Accession=PF00515.20; Description =Tetratricopeptide repeat
  Pfam annotation: Domain name=TPR_1; Domain location=84-117; Score =16.4; E_value=0.064; Accession=PF00515.20; Description =Tetratricopeptide repeat
  Pfam annotation: Domain name=TPR_2; Domain location=118-151; Score =30.5; E_value=7e-06; Accession=PF07719.9; Description=Tetratricopepti de repeat
  Pfam annotation: Domain name=TPR_2; Domain location=152-185; Score =32.2; E_value=2.1e-06; Accession=PF07719.9; Description =Tetratricopeptide repeat
  Pfam annotation: Domain name=TPR_2; Domain location=186-219; Score =20.7; E_value=0.0063; Accession=PF07719.9; Description =Tetratricopeptide repeat
  Pfam annotation: Domain name=TPR_2; Domain location=220-253; Score =17.1; E_value=0.071; Accession=PF07719.9; Description=Tetratricopepti de repeat
  Pfam annotation: Domain name=TPR_2; Domain location=254-287; Score =21.9; E_value=0.0027; Accession=PF07719.9; Description =Tetratricopeptide repeat
  Pfam annotation: Domain name=TPR_2; Domain location=288-321; Score =28.1; E_value=3.7e-05; Accession=PF07719.9; Description =Tetratricopeptide repeat
  Pfam annotation: Domain name=TPR_2; Domain location=322-355; Score =31.5; E_value=3.3e-06; Accession=PF07719.9; Description =Tetratricopeptide repeat
  Pfam annotation: Domain name=TPR_2; Domain location=356-389; Score =9.4; E_value=2.3; Accession=PF07719.9; Description=Tetratricopeptide repeat
  Pfam annotation: Domain name=TPR_2; Domain location=390-423; Score =32.7; E_value=1.4e-06; Accession=PF07719.9; Description =Tetratricopeptide repeat
  Pfam annotation: Domain name=TPR_2; Domain location=424-457; Score =26.1; E_value=0.00014; Accession=PF07719.9; Description =Tetratricopeptide repeat
  Pfam annotation: Domain name=TPR_2; Domain location=458-491; Score =24.9; E_value=0.00034; Accession=PF07719.9; Description =Tetratricopeptide repeat
  Pfam annotation: Domain name=TPR_2; Domain location=50-83; Score=1.4; E_value=23; Accession=PF07719.9; Description=Tetratricopeptide repeat
  Pfam annotation: Domain name=TPR_2; Domain location=84-117; Score =16.4; E_value=0.12; Accession=PF07719.9; Description=Tetratricopeptid e repeat
  Pfam module annotation: Pfam domain module=TPR_1::TPR_1::TPR_1::TPR _1::TPR_1::TPR_1::TPR_1::TPR_1::TPR_1::TPR_1::TPR_1::TPR_1::TPR _2::TPR_2::TPR_2::TPR_2::TPR_2::TPR_2::TPR_2::TPR_2::TPR_2::TPR _2::TPR_2::TPR_2::TPR_2; ...
  Pfam module annotation: Pfam domain module=Domain location=118 -151::152-185::186-219::220-253::254-287::288-321::322-355::356 -389::390-423::424-457::458-491::84-117::118-151::152-185::186 -219::220-253::254-287::288-321::...
  Pfam module annotation: =322-355::356-389::390-423::424-457::458 -491::50-83::84-117
MLSICGRGGGAVAAAEELRGPYPLPPIHPRPQQLGAAIDALLLNPLQVDEGTRLEIAQQSYNAGDYRAALEQSNAVYRENPRRLENLLLLGAVYYQLREFDMCIAKNEEAVAIQPNFPECFNNMANAWREKGDMDRAIQYYKHAIQLRPSFADAFSNLANAYTRKGNLIEATKYCHQALALNPRLVDAYCNLGDVLKAQGSCRDAYNCFREAVSIAPSCATAWHNIAGLFTQWGDFNKAVLYYKEAIKFKPAFHDAHMNLGNLYKAVGMCQDAIVCYQNAAQACPQNAMAYGNLGDAYYEQGQLDLAILSYRHATTCNPSYVEAYNNLGNALKGSGRCDEAIGCYQTCLALQPNHPQALTNLGNVYMERSMLDIAASHFMAALTVTTGLSAPYNNLAMIYKQQGNYANAIACYNEVLRVDPLAADGLVNRGNTLKEAGRVSEAIQDYLRAAAIRPTMAEAHANLAYAYKDTGLMDLAIISYKQALLLRPDFPEVTCNLLHTLQCVCDWDEREENFIKVEGIIRQQIKMSLLPSVQPFHAMAFPIDPTLALEISKKYADHYSLVASRFGLPAFSHPSCAPIKADDKTSRLRIGYVSSDFGNHPLSHLMGSVFGMHNNDIVEVFCYALSQDDGTEWRQRIKGEAEHFIDVSAMSSDMIAKVINEDKIQILINLNGYTKGARNEIFAMQPAPIQVSYMGFPATTGASYIDYLITDEFVSPLKYSHIYSEKLVHLPHCYFVNDYKQKNQDVLDPVCPHKRADYGLPEDKFIFACFNQLYKMDPDIFNTWCNILKRVPNSVLWLLRFPAAGEMRLRAYAISIGVRADQIIFTDVAAKNEHIRRSTLADLFLDTPLCNGHTTGTDVLWAGLPMITLPLEKMATRVAGSLCIATGVGEEMIVDSLTEYEERAVFLATNPSKLQALTNRLKAVRMTCPLFDTSRWVKNLDRAYLKMWHLYCSGSHPQHFKVVEDDNQFAFDQ

SEQ ID NO: 108028 - protein, 114 aa, Setaria italica
  Transcript Sequence Number=SeqID_42054
MECVFLLTRKQQTKYSVEKIRALHRLCELPPPDHQAIVTCTTEQKEAVLHDCKKFVMPGNQHPRPIPIMEQPCCNAVNKVPKKAIKIDMQCIVEVLTGEEKNHHDVSKILNLPK

SEQ ID NO: 108029 - protein, 152 aa, Setaria italica
  Transcript Sequence Number=SeqID_42055
  Subcellular localization annotation: CTP_CleavageSite=46; ConfidenceScore=5.66e-01
GRGCTTLGPSTAADSSSCSSGSSSGSGSGSGSGTGDSSGSGSGSANGSNVGDLTIGWHKTYEMSFKEIWNDASYRHTHLLPMIPEIVLVSPRNPNVVCFFLQTSLFFVDVPAHRVIGVFKDARELLEAPGHRHCFLPWDLPPSIAKGIITFL

SEQ ID NO: 108030 - protein, 265 aa, Setaria italica
  misc_feature (239)..(239): Xaa can be any naturally occurring amino acid
  Transcript Sequence Number=SeqID_42056
  Gene Ontology: Mol. function=electron carrier activity
  Homolog annotation: Hit_ID=B6T6F0; Match level="QueryCoverage=47%, HitCoverage=48%, E-value=2e-51, Identity=77%"; Hit description=Early nodulin 20
  Pfam annotation: Domain name=Cu_bind_like; Domain location=41-121; Score=125.3; E_value=2e-34; Accession=PF02298.9; Description =Plastocyanin-like domain
MPSAVKMAEMKALLVCVTVALSLIHAVTAADYVVGNPAGGWDGRTDYKSWAAAQTFGPGDTLTFNYNSYHNVLEVTKDAFEACTTTNPITFDNSGSTTVVLTMPGTRYFICGAPGHCLGGMKMEIEVADRPAPTTPSSPPPLPPPPAHDAKTKPPAMAPTMALSPAPTPWMPGPAAAPPRHAGHKTKHRKNSKKGCPPETLVAPARPPAVQAVENLFPFAEVAPMSSTPPPPATSSGGXAVLRATWGEATASLAALGGFMLLLAP

SEQ ID NO: 108031 - protein, 598 aa, Setaria italica
  Transcript Sequence Number=SeqID_42057
  Gene Ontology: Mol. function=metal ion binding; Cellular component =endoplasmic reticulum membrane; Biological process=ubiquitin -dependent protein catabolic process
  Homolog annotation: Hit_ID=Q67WE0; Match level="QueryCoverage=100%, HitCoverage=89%, E-value=6e-92, Identity=34%"; Hit description=Zinc finger (C3HC4-type RING finger)protein-like
LLVGYGFILMVALLFTGLHTFQQYSRGERPTITIYFGVLTDWVCWLSSPLRMLPSIHGMLDRTWSFLQQFFWGILSVANVSLNLAAILVICPLFFGWLLDICTSKLFGVKVPQKLQLLFASSFASTALHWLIGCVCLKLHSSLSSLLHPVFRLGVRAPFVHTTGGQIKIGEPFCKFYFKILPGLFLSAIYVAMVIFVPVEIAFHLAPTVFPLDITYFDPPTQGTVLWQAARNYAELLSGVLLLKFLLCNALKYLQPGVLVQKVLWYLFATTGQVLGLSDLLIAQPDDSGQSEIGNSVIPKDQHGRTAEAKDKRRSAAVHMVLLMVLAWLIVVIFNAALLVAPVSVGRALLFAIPQVPVAGALKSNDIFAFAVGFCILSTIIAASRDAFAYVMSGRTRLLASIVCNWGTTALKSSPLLFLWVVIIPFLIGLLVDYLLISPFGPPYNEVPVLDFFCTWFLGLQLLKFWTKLVRWTRVAPFLAYFIDERWDRKLSQAREDGFSGLRAMWVLRDILMPMIVKLLSAVCVPYVLAKVVAPVLGYSAPVNSVVLRFAWLGSLAMCVLCYIAKVLCRLVVRLHDSIRDERYLVGQRLQNYYTDNM

SEQ ID NO: 108032 - protein, 56 aa, Setaria italica
  Transcript Sequence Number=SeqID_42058
FHFRVNIRVTINDLVSDLEFSIKSKIPGNGTDLQLSIRYTNLTYLTVTRTLSSASS

SEQ ID NO: 108033 - protein, 99 aa, Setaria italica
  misc_feature (29)..(29): Xaa can be any naturally occurring amino acid
  Transcript Sequence Number=SeqID_42059
LVSVPLLVLLLCRRRSEEVSQEVQLPCLXKQQLLTDVDAAKREKLLQARLRACGAPPPRPARHGPLRDQGDRIPWSTAAHPRSCWSSAASALKPPRPRK

SEQ ID NO: 108034 - protein, 111 aa, Setaria italica
  Transcript Sequence Number=SeqID_42060
LYLQSTSCSGDGEAAEPRKGAQAAAAAPSCHAFPGPIHRIEQDARCGCLPGQDGLLPPAPPPPPPCPCPTPTSYPPPPPAPAPPSRPSVSRLALAQLLRWLVLRRRGRRRR

SEQ ID NO: 108035 - protein, 147 aa, Setaria italica
  misc_feature (20)..(20): Xaa can be any naturally occurring amino acid
  Transcript Sequence Number=SeqID_42061
  Gene Ontology: Mol. function=hydrolase activity, hydrolyzing O -glycosyl compounds; Cellular component=anchored to membrane; Biological process=carbohydrate metabolic process
  Homolog annotation: Hit_ID=B6UAM9; Match level="QueryCoverage=97%, HitCoverage=29%, E-value=4e-72, Identity=90%"; Hit description =Glucan endo-1,3-beta-glucosidase 5
  Pfam annotation: Domain name=X8; Domain location=48-132; Score=128.2; E_value=2.6e-35; Accession=PF07983.5; Description=X8 domain
KSVLPGRFERHWGLFTYDGXPKFSMDLSGNGKDNYLAEVKGVQYLPSQWCVFNKDAKDKYKDLPASVNYACSNADCTPLGYGSSCNGLSHDENISYAFNIYFQTMDQDVRACSFGGLAKITTTNASQGGCMFPVQILSVSGRVASST

SEQ ID NO: 108036 - protein, 110 aa, Setaria italica
  Transcript Sequence Number=SeqID_42062
PPPLTVSGPVAGATRCGAAAVPLPAPEARGRREGGGAGGRPEGGRGGPAPPHPRERSTTCLDRWGQRARAGRGADGEVDGGTGRRHGGGTGWGSGGVEALERGEVICVST

SEQ ID NO: 108037 - protein, 55 aa, Setaria italica
  Transcript Sequence Number=SeqID_42063
  Gene Ontology: Mol. function=hydrolase activity, acting on glycosyl bonds; Cellular component=beta-galactosidase complex; Biological process=carbohydrate metabolic process
  Homolog annotation: Hit_ID=B8A0V4; Match level="QueryCoverage=70%, HitCoverage=4%, E-value=2e-13, Identity=92%"; Hit description=Beta -galactosidase
WYSTSFTVKGDEPYLNGSQSNLLVNSLGHVLQVYVNGKIAGTARDDSTNSFIPGI

SEQ ID NO: 108038 - protein, 60 aa, Setaria italica
  Transcript Sequence Number=SeqID_42064
  Gene Ontology: Mol. function=hydrolase activity, acting on glycosyl bonds; Cellular component=beta-galactosidase complex; Biological process=carbohydrate metabolic process
  Homolog annotation: Hit_ID=B8A0V4; Match level="QueryCoverage=66%, HitCoverage=4%, E-value=3e-15, Identity=95%"; Hit description=Beta -galactosidase
MAATALLLPAAAVLLLCLASGSRATNVTYDHRALVIDGVRRVLVSGSIHYPRSTPDMWPG

SEQ ID NO: 108039 - protein, 823 aa, Setaria italica
  Transcript Sequence Number=SeqID_42065
  Gene Ontology: Mol. function=hydrolase activity, acting on glycosyl bonds; Cellular component=beta-galactosidase complex; Biological process=carbohydrate metabolic process
  Homolog annotation: Hit_ID=B8A0V4; Match level="QueryCoverage=99%, HitCoverage=96%, E-value=0.0, Identity=93%"; Hit description=Beta -galactosidase
  Pfam annotation: Domain name=Gal_Lectin; Domain location=745-822; Score=132.7; E_value=1.2e-36; Accession=PF02140.10; Description =Galactose binding lectin domain
  Pfam annotation: Domain name=Glyco_hydro_35; Domain location=6-312; Score=629.5; E_value=3.4e-186; Accession=PF01301.11; Description =Glycosyl hydrolases family 35
  Pfam annotation: Domain name=Glyco_hydro_42; Domain location=27-343; Score=-234.2; E_value=0.007; Accession=PF02449.7; Description=Beta -galactosidase
  Pfam module annotation: Pfam domain module=Gal_Lectin::Glyco_hydro _35::Glyco_hydro_42; Domain location=745-822::6-312::27-343
PKDHRALVIDGVRRVLVSGSIHYPRSTPDMWPGLIQKAKDGGLDVIETYVFWDIHEPVRGQYDFEGRKDLAAFVKAVADAGLYVHLRIGPYVCAEWNYGGFPLWLHFIPGIKFRTDNEPFKSEMQRFTTKVVDTMKGAGLYASQGGPIILSQIENEYGNVDKAYGAPGKAYMRWAAGMAVSLDTGVPWVMCQQADAPDPLINTCNGFYCDQFTPNSAAKPKMWTENWSGWFLSFGGAVPYRPVEDLAFAVARFYQRGGTFQNYYMYHGGTNLDRSTGGPFIATSYDYDAPIDEYGLVRRPKWGHLRDVHKAIKLCEPALIATDPSYTSLGQNAEAAVYKAGSVCAAFLANIDGQSDKTVTFNGKMYNLPAWSVSILPDCKNVVLNTAQINSQVTNSEMRYLESSTIASDGSFTTPELAVSGWSYAIEPVGITKDNALTKSGLMEQINTTADASDFLWYSTSFTVKGDEPYLNGSQSNLLVNSLGHVLQVYVNGKIAGSAQGSASSSLISWQKAVTLVPGMNKIDLLSATVGLTNYGAFFDLVGAGITGPVKLSGPSGALDLSSAQWTYQIGLRGEDLHLYDPSEASPEWVSSNAYPINQPLIWYKTKFTAPAGDDPVAIDFTGMGKGEAWVNGQSIGRYWPTNLAPQSGCVNSCNYRGSYSSSKCLKKCGQPSQTLYHVPRSFLQPGSNDLVLFEQFGGDPSKISFVTRQTGSVCAQVSEAHPAQIDSWISSQQKMQRSGPELRLECPKEGQVISSIKFASFGTPSGTCGSYSHGECSSTQALSVVQEACIGVSSCSVPVSSNYFGDPCTGVTKSLAVEAACS

SEQ ID NO: 108040 - protein, 153 aa, Setaria italica
  Transcript Sequence Number=SeqID_42066
HFNPSAENAVSESPVDLSIVPHDPEGTNGQTTCEKVKKRGRHFDREVRAKILQGSYLTKADKWVEIKAKQDEDKYAARLHSFSGDSVKSKCSKSSSDKIEMATSLKLTGVPWKNKASRPEEHRTVVHPEVILCVEIYQKKCGSVKCQDFLCWE

SEQ ID NO: 108041 - protein, 103 aa, Setaria italica
  Transcript Sequence Number=SeqID_42067
  Gene Ontology: Mol. function=aminoacyl-tRNA ligase activity; Cellular component=cytoplasm; Biological process=tRNA aminoacylation for protein translation
  Homolog annotation: Hit_ID=Q259B6; Match level="QueryCoverage=99%, HitCoverage=35%, E-value=2e-35, Identity=71%"; Hit description =H0901F07.4 protein
EYIKSVAFPWFGNLEVVQKEGNGSNKIFSSMEELIVDYESGDLDSTDVKLALQKAINNILELVGEFFRSSTEAQALITAPKFQDQITADIRKIQMQNKEFASL

SEQ ID NO: 108042 - protein, 96 aa, Setaria italica
  Transcript Sequence Number=SeqID_42068
  Homolog annotation: Hit_ID=B6SGN7; Match level="QueryCoverage=37%, HitCoverage=11%, E-value=2e-10, Identity=80%"; Hit description =Embryonic protein DC-8
  Subcellular localization annotation: CTP_CleavageSite=59; ConfidenceScore=5.14e-01
MSRLMTAMLLGGARVAGAAKLAGSAAVKQAAVPTPACFLPPRPPQPASWSRLCLQTAPRSSQAYNNAPDDRRDIKDKYKDAAAEAKDATGDAKEHV

SEQ ID NO: 108043 - protein, 86 aa, Setaria italica
  Transcript Sequence Number=SeqID_42069
TQGTGEVPRRGQDITVFGVQIIRSTDLPSSSHVWASADPDTCCCCRNHNPVCPIFSFTCCRNHNQFCSIFTCKFLDSPGGTQKSRP

SEQ ID NO: 108044 - protein, 175 aa, Setaria italica
  Transcript Sequence Number=SeqID_42070
  Gene Ontology: Mol. function=transporter activity; Cellular component= integral to membrane; Biological process=auxin mediated signaling pathway
  Homolog annotation: Hit_ID=Q5VP70; Match level="QueryCoverage=97%, HitCoverage=27%, E-value=1e-80, Identity=88%"; Hit description =Probable auxin efflux carrier component 3a
  Pfam annotation: Domain name=Mem_trans; Domain location=1-167; Score =40.2; E_value=1.5e-09; Accession=PF03547.10; Description=Membrane transport protein
GAHQMPPASVMTRLILIMVWRKLIRNPNTYSSLIGLAWSLIAFRWHISMPAVVAKSISILSDAGLGMAMFSLGLFMALQPNLIACGWRATGISMGVRFLAGPAVMAAASLAIGLRGSLLQVAIVQAALPQGIVPFVFAKEYNVHPAILSTMVIFGMLIALPITLLYYIVLGLGPV

SEQ ID NO: 108045 - protein, 149 aa, Setaria italica
  Transcript Sequence Number=SeqID_42071
  Gene Ontology: Cellular component=integral to membrane
  Homolog annotation: Hit_ID=Q9LPL1; Match level="QueryCoverage=91%, HitCoverage=66%, E-value=9e-19, Identity=35%"; Hit description =F24J8.9 protein
  Pfam annotation: Domain name=MtN3_slv; Domain location=36-122; Score =106.8; E_value=7.2e-29; Accession=PF03083.8; Description=MtN3saliva family
EKKKFVVLMVSLILAILCVIVSFSIFTFHTEHMRKLFVGSIGIVTSMSMYSAPLVAVKQVMKTKSVEFMPFYLSLFSLLTSLMWTIYGILGRDPYLTAPNSVGCLTGILQLVVYCIYSRCKDPPKTHDDIEQVISELEVATTLRRHKWM

SEQ ID NO: 108046 - protein, 130 aa, Setaria italica
  misc_feature (105)..(105): Xaa can be any naturally occurring amino acid
  Transcript Sequence Number=SeqID_42072
  Gene Ontology: Mol. function=protein serine/threonine kinase activity; Biological process=protein amino acid phosphorylation
  Homolog annotation: Hit_ID=Q653D2; Match level="QueryCoverage=100%, HitCoverage=21%, E-value=4e-41, Identity=65%"; Hit description =Putative wall-associated kinase 4
TRKKPYLYRSPEDDSLIAQFTSLVTHGNLSDVLDPQIMEEGGKEVSEVASLATVCVKLKAEDRPTMRQVEMTLESIQESLQVKLHSVGTKISEDKQMAVTLPTMXGRSSKESSRQYSLEEEYLLSSRYPR

SEQ ID NO: 108047 - protein, 256 aa, Setaria italica
  Transcript Sequence Number=SeqID_42073
  Gene Ontology: Mol. function=methyltransferase activity; Cellular component=nucleus; Biological process=nucleobase, nucleoside, nucleotide and nucleic acid metabolic process
  Homolog annotation: Hit_ID=Q94AI4; Match level="QueryCoverage=52%, HitCoverage=17%, E-value=7e-66, Identity=84%"; Hit description =Methyltransferase-like protein 1
  Pfam annotation: Domain name=MT-A70; Domain location=20-198; Score =247.8; E_value=2.7e-71; Accession=PF05063.6; Description=MT-A70
LTKCDLKEHVLSPDFLGTKFDVILVDPPWEEYVHRAPGITDHIEYWTAEEIMNLKIEAIADTPSFIFLWVGDGVGLEQGRQCLKKWGFRRCEDVCWVKTNKKNATPGLRHDSNTLFQRSKEHCLMGIKGTVRRSTDGHIIHANIDTDIIIAEEPSDGSTKKPEDMYRIIEHFALGRRRLELFGEDHNIRPGWLTLGKGLSTSNFNKEAYIKNFADRDGKVWQGGGGRNPPPDAPHLVVTTPEIESLRPKSPQKNQQ

SEQ ID NO: 108048 - protein, 765 aa, Setaria italica
  misc_feature (544)..(544): Xaa can be any naturally occurring amino acid
  misc_feature (560)..(560): Xaa can be any naturally occurring amino acid
  misc_feature (572)..(572): Xaa can be any naturally occurring amino acid
  Transcript Sequence Number=SeqID_42074
  Gene Ontology: Mol. function=methyltransferase activity; Cellular component=nucleus; Biological process=nucleobase, nucleoside, nucleotide and nucleic acid metabolic process
  Homolog annotation: Hit_ID=Q94AI4; Match level="QueryCoverage=29%, HitCoverage=28%, E-value=7e-61, Identity=64%"; Hit description =Methyltransferase-like protein 1
  Pfam annotation: Domain name=MT-A70; Domain location=506-622; Score =26.4; E_value=8e-08; Accession=PF05063.6; Description=MT-A70
AREAQDYRDGSGERDDKHRTAKREEKDEKLRHRAEYTYGSNDNLGTKGKLPYLDDGGNAREQSMNVKEKPRDDYISHRGMERNKESEESREYMRNHQREDSKGTNDYGTTTEWSHGPERLDGGSFQGRSAYRKDSRGRYESSKGPSSYGNRYDNSDSIEIRPNRNLDFGREGSVSGRRTSMAAHQDLTAGTNDPAEEDKRNYRSEEDSKERYYDDAQNRNQNTGKGSVDSPTARAGLKGPMTSDTPVAGQSGSSSLASPIDQQGSKGSKLYRGVRGRPNGRDPQRMGGPVPMMPPPPFGPLGLPPGPMQPMGPNMSHSPSPLGPGIFMPPFPGPLVWAGARGMDVNMLAVPPNLLMPPLAAGPGFSPSVGAGPNHNIQLDQTNTGRGGPTDAPVPGFNPVATPSHEMLHDKPPGGWTPQRNSGPARKAPSRGEQNDYSQNFVDTGLRPQNFIRELELTSVVEDYPKLRELIQRKDEIVSNSASAPMYYKCDLKEHVLSPDFLGTKFDVILVDPPWEEYVHRAPGITDHIEYWTAEEIMNLKIEXIADTPSLYLLTFGFNXMVGACKSVNRHXLEGNVPSDGSTKKPEDMYRIIEHFALGRRRLELFGEDHNIRPGWLTLGKGLSTSNFNKEAYIKNFADRDGKVWQGGGGRNPPPDAPHLVVTTPEIESLRPKSPQKNQQSVPTIGSSSSTNRRPGANTSQNVVTVVGSETMMPAPWASTPMAGFGMLEGGAGPDSNDAFDTYGFSAPFGRPSADHMDFNTPRLL

SEQ ID NO: 108049 - protein, 62 aa, Setaria italica
  Transcript Sequence Number=SeqID_42075
RCGYSFHCNVFIFYLKFTSSRLFPCVQYDCLSECLCCLLQCSLDAFRNVDVYYCMLVPFSWY

SEQ ID NO: 108050 - protein, 150 aa, Setaria italica
  misc_feature (21)..(21): Xaa can be any naturally occurring amino acid
  Transcript Sequence Number=SeqID_42076
  Gene Ontology: Mol. function=DNA binding; Cellular component =ribosome; Biological process=RNA-dependent DNA replication
  Homolog annotation: Hit_ID=Q7XDX1; Match level="QueryCoverage=98%, HitCoverage=43%, E-value=2e-25, Identity=45%"; Hit description =Transposon protein, putative, Pong sub-class
INVDDDARTDKRLNWTVEEDXRLASAKLRNSKDPVDGDGQKVERYWEDVTTEYNKTTETSRKRNRNQLKIRWDRSRKPLTDFHGVWVNADRVWQSGMSDDQLTDKALEMWAGQNSGKAFHLLHMWKVVRGQQKWSAYIARLKKEKEKSTK

SEQ ID NO: 108051 - protein, 83 aa, Setaria italica
  Transcript Sequence Number=SeqID_42077
  Gene Ontology: Mol. function=zinc ion binding; Cellular component =nucleus; Biological process=regulation of transcription
  Homolog annotation: Hit_ID=Q5NBP4; Match level="QueryCoverage=95%, HitCoverage=16%, E-value=2e-22, Identity=67%"; Hit description =Ascorbate oxidase promoter-binding protein AOBP-like
SNPLKDEKQEKSLWVPKTLRIDDPDEAAKSSIWATLGIKPGDPGTFKPFQSKVESKGQKADAAQVLQANPAALSRSQSFQESS

SEQ ID NO: 108052 - protein, 98 aa, Setaria italica
  Transcript Sequence Number=SeqID_42078
SFMHRLDLFFDEDMTHLDMTIHAKDKVNSFLCILFSYFENRLLPKDIIIIRNHGEDHEVFEERHGGGEDRTSKPSWRHKLYRVRVHLGVQEQQTISSS

SEQ ID NO: 108053 - protein, 144 aa, Setaria italica
  misc_feature (127)..(127): Xaa can be any naturally occurring amino acid
  Transcript Sequence Number=SeqID_42079
  Gene Ontology: Mol. function=catalytic activity; Biological process =cellular metabolic process
  Homolog annotation: Hit_ID=B0FYX0; Match level="QueryCoverage=100%, HitCoverage=41%, E-value=2e-35, Identity=55%"; Hit description=NADPH HC toxin reductase-like protein
RSKDATEGIVGAMRTILQQCERSKTVRRVIHTGSVVAAAPLKEDGQGFKRFVDESCWTPLNLSYGYASNEVLDAYVSSKTLSEKELLRYNDSPGKAFEVVTLLCGLVGGDTLLPDVPGSIRSVVSPXTGDETWHGGLKFMQALL

SEQ ID NO: 108054 - protein, 428 aa, Setaria italica
  Transcript Sequence Number=SeqID_42080
  Gene Ontology: Mol. function=microtubule motor activity; Cellular component=microtubule associated complex; Biological process =microtubule-based movement
  Homolog annotation: Hit_ID=Q93XF7; Match level="QueryCoverage=100%, HitCoverage=39%, E-value=0.0, Identity=81%"; Hit description=Kinesin heavy chain (Fragment)
SHDKATSELKKKILASKSLYLSHMEAFQNVVLLHKASANATLEDISSLSAASCCSLDQLLACVEGEAENIFSDIQNLLTTHRSELTHFTRELRESFLISLDRTKDMSTFIIGLFNKYVEETSKLHSHSNNTHEAQMKSIEDFQMAYEEQSKSEEQKLLADISSLVSKHITRQKELVGVRLNSLGDAARGNKAFLDEHTSAMECVTKDAKRKWEIFAEQAENDCKVGSSSSAAKHCRMETMLQECACTVDSAVQQWKKSHAAVNDLSKKHVAEVEVLVRMAVENNEQHEVEIASSRTMAEEHASNSSKDITQDIDNLLDEARNSSLRVVSTVEAHLAELQQLQENHSGQAASINTHADKAFQSSYKDYEPTGVTPVRSEPSVPSKGAIESLRAMPMETLANEFRENHPYESSKEPKPSLIPRSPLATIN

SEQ ID NO: 108055 - protein, 98 aa, Setaria italica
  Transcript Sequence Number=SeqID_42081
  Gene Ontology: Mol. function=RNA-directed DNA polymerase activity; Biological process=RNA-dependent DNA replication
  Homolog annotation: Hit_ID=B9SPG6; Match level="QueryCoverage=95%, HitCoverage=13%, E-value=6e-33, Identity=64%"; Hit description=RNA binding protein, putative
  Subcellular localization annotation: CTP_CleavageSite=32; ConfidenceScore=5.22e-01
SLMYGISSSGLFVLTLSRVRVPTRQFNCFVMGCQSASPSMYVLHVKEKQHFPGWRTGFSSSIHGSLDGKRIGLCTQHVKDLYLGHISLQSVDFGSLLR

SEQ ID NO: 108056 - protein, 174 aa, Setaria italica
  misc_feature (36)..(36): Xaa can be any naturally occurring amino acid
  misc_feature (161)..(161): Xaa can be any naturally occurring amino acid
  Transcript Sequence Number=SeqID_42082
  Gene Ontology: Mol. function=RNA-directed DNA polymerase activity; Biological process=RNA-dependent DNA replication
  Homolog annotation: Hit_ID=B9SPG6; Match level="QueryCoverage=96%, HitCoverage=23%, E-value=5e-30, Identity=42%"; Hit description=RNA binding protein, putative
  Pfam annotation: Domain name=Intron_maturas2; Domain location=3-169; Score=-0.7; E_value=2.1e-05; Accession=PF01348.13; Description=Type II intron maturase
TDVVSLKLLCSLSYIQKCLHRYGLINTQRFPRHVSXLVLQDDELIVSWFAGIIHRWIRWFSEVDNYKELQLMFVECVRKSCIRTLSAKYRMYEKLTEKRFELDDHGIPRVEDFEAIIKPLESSYSLASTDEALMYGISSSGLFVLTLSRVRVPTRQFNCFXGCQSASPSMYVLH

SEQ ID NO: 108057 - protein, 210 aa, Setaria italica
  Transcript Sequence Number=SeqID_42083
  Gene Ontology: Mol. function=secondary active sulfate transmembrane transporter activity; Cellular component=integral to membrane; Biological process=sulfate transport
  Homolog annotation: Hit_ID=A7YF68; Match level="QueryCoverage=100%, HitCoverage=31%, E-value=6e-70, Identity=64%"; Hit description =Sulfate transporter
  Pfam annotation: Domain name=STAS; Domain location=80-198; Score =130.4; E_value=5.9e-36; Accession=PF01740.13; Description=STAS domain
SAVLGLIDYKAAYHIWKVDKLDFLACLGAFLGVVFSSVDYGLLIAIAISIAKILLQATRPRTALLGNLPRTTVYRNIEQYPDVTTVPGVVIVQVDSAIYFTNSNYVKERILRLLEEEEERQRQQNCPQIEFLIVELSPVVDIDTSGIHALEELCRALVKCKIQLVLANPGPAVIQKLRSAKFIELIGEDKMCLTVGDAVKRFAPKAVDGV

SEQ ID NO: 108058 - protein, 157 aa, Setaria italica
  Transcript Sequence Number=SeqID_42084
  Gene Ontology: Mol. function=voltage-gated chloride channel activity; Cellular component=integral to membrane; Biological process=chloride transport
  Homolog annotation: Hit_ID=Q2VBU9; Match level="QueryCoverage=77%, HitCoverage=14%, E-value=5e-53, Identity=83%"; Hit description =Chloride channel-like protein Osclc
SWIEASFGSAKILYEGTCCWHTHHVRNTASALNTSKHFAHDEFAKRGSGKQDRIEDIELSAEELEMFVDLHPFTNTSPYTVLETMSLAKALILFREVGLRHLLVLPKSSTRAPVVGILTRHDFMPEHVLGLHPFLFKSRWKKVRLGGSHVGAGNDML

SEQ ID NO: 108059 - protein, 127 aa, Setaria italica
  Transcript Sequence Number=SeqID_42085
  Gene Ontology: Mol. function=voltage-gated chloride channel activity; Cellular component=integral to membrane; Biological process=chloride transport
  Homolog annotation: Hit_ID=Q2VBU9; Match level="QueryCoverage=76%, HitCoverage=12%, E-value=2e-38, Identity=79%"; Hit description =Chloride channel-like protein Osclc
DYLLVLLRRKDFVSSCTASALNTSKHFAHDEFAKRGSGKQDRIEDIELSAEELEMFVDLHPFTNTSPYTVLETMSLAKALILFREVGLRHLLVLPKSSTVSGAICTSVTLLLCHFRILVCISFLCLS

SEQ ID NO: 108060 - protein, 768 aa, Setaria italica
  Transcript Sequence Number=SeqID_42086
  Gene Ontology: Mol. function=voltage-gated chloride channel activity; Cellular component=integral to membrane; Biological process=chloride transport
  Homolog annotation: Hit_ID=Q2VBU9; Match level="QueryCoverage=96%, HitCoverage=91%, E-value=0.0, Identity=82%"; Hit description =Chloride channel-like protein Osclc
  Pfam annotation: Domain name=CBS; Domain location=581-748; Score =43.2; E_value=1e-09; Accession=PF00571.20; Description=CBS domain
  Pfam annotation: Domain name=Voltage_CLC; Domain location=131-548; Score=315.7; E_value=9.2e-92; Accession=PF00654.12; Description =Voltage gated chloride channel
  Pfam module annotation: Pfam domain module=CBS::Voltage_CLC; Domain location=581-748::131-548
PAGEDGDDGADERRRRRRRLLLGSHTQSNTTSQVALVGADVCPIQSLDYELIENDVFKQDWRARGRGHILRYVALKWALCFLVGALAAAAGFVANIGVENVAGAKFVVTSNLMLEGEHGSAFAVFLASNFALTMLAAVLTVYVAPAAAGSGIPEVKAYLNGVDAPNIFSLKTLIVKVVGCIAAVSSSLNVGKAGPMVHTGACIASILGQGGSQKYHMTCKWLKYFKNDRDRRDLVTCGSAAGIAAAFRAPVGGVLFALETVSSWWRSALLWRAFFTTAMVAVVLRALIDFCKSGRCGLFGKGGLIMFDVAADYVTYQLVDLPPVITLGVFGGILGSLYNFFLDKVLRLYNLINEKGKTYKLLLAATVTVCTSCCLFGLPWVASCKPCPTNTEEACPSIGRSGNFKKFQCGMNEYNDLASLFFNTNDDTIRNLYSAGTDDEFHISSILVFFAASYFLGIFSYGLALPSGLFVPVILTGAAYGRLVGMLIGSQSTLDHGLFAVLGSAALLGGSMRMTVSVCVIILELTNNLRMLPLVMLVLLISKVVADAFNENVYDLLVRLKGFPHLEGYAEPYMRQLSVSDVVTGPLQTFSGIEKVGHIVHVLKTTGHNGFPVVDEPPFSDSPTLYGLILRDHLLVLLRRKDFVSSCTASALNTSKHFAHDEFAKRGSGKQDRIEDIELSAEELEMFVDLHPFTNTSPYTVLETMSLAKALILFREVGLRHLLVLPKSSTRAPVVGILTRHDFMPEHVLGLHPFLFKSRWKKVRLGKL

SEQ ID NO: 108061 - protein, 109 aa, Setaria italica
  misc_feature (97)..(97): Xaa can be any naturally occurring amino acid
  Transcript Sequence Number=SeqID_42087
FVPLKADDPMYGPPALLLIGFEKGETDTIQAFLKELEGEFLKVIHCTEEMTKQTLWDAMHTEQPNLEAVKIAESLPRICIFSGLTGEEMMMFINAFXTGLEPAVFAATC

SEQ ID NO: 108062 - protein, 94 aa, Setaria italica
  Transcript Sequence Number=SeqID_42088
  Gene Ontology: Mol. function=chitinase activity; Cellular component =vacuole; Biological process=cell wall catabolic process
  Homolog annotation: Hit_ID=B4G1H3; Match level="QueryCoverage=88%, HitCoverage=25%, E-value=6e-43, Identity=97%"; Hit description =Endochitinase A2
  Pfam annotation: Domain name=Glyco_hydro_19; Domain location=2-93; Score=-82.0; E_value=0.0026; Accession=PF00182.11; Description =Chitinase class I
SDVVGYLNSVRNYNYGAAGDGIKADLLHHPEYLEQNATLAFMAAMWRWMTPIKKSQPSAHEAFVGTWKPTKNDTLSKRLPGFGATMNILYGESI

SEQ ID NO: 108063 - protein, 329 aa, Setaria italica
  Transcript Sequence Number=SeqID_42089
  Gene Ontology: Mol. function=chitinase activity; Cellular component =vacuole; Biological process=cell wall catabolic process
  Homolog annotation: Hit_ID=B4G1H3; Match level="QueryCoverage=97%, HitCoverage=97%, E-value=1e-175, Identity=90%"; Hit description =Endochitinase A2
  Pfam annotation: Domain name=Glyco_hydro_19; Domain location=68-306; Score=203.5; E_value=5.5e-58; Accession=PF00182.11; Description =Chitinase class I
MKRKMRNKIILWSLAVTAVAVLVGGTIALVLTAGTWKAKIKKSQEKICNKGWECSGSKYCCNDTITDFFKVYQFENLFAKRNTPVAHAVGFWDYQAFITAAALFEPQGFCTTGGKQMQMMELCAFLGHVGAKTSCGYGVATGGPTAWGLCYNHEMSPDQTYCDKTYTQYPCVEGAEYYGRGAIPVYWNYNYGAAGDGIKADLLHHPEYLEQNATLAFMAAMWRWMTPIKKSQPSAHEAFVGTWKPTKNDTLSKRLPGFGATMNILYGESICGRGFLDAMNVIISHYQYYLDLMGVGREHSGDNRDCAEQAPFNPSSKPDDQQQQQQSGS

SEQ ID NO: 108064 - protein, 64 aa, Setaria italica
  Transcript Sequence Number=SeqID_42090
AISPHFLFISNSPFCFFYSVGFHLYPMPTCSGIIDCIDVLLDISPSLNLGVTIANHEHGTTVNR

SEQ ID NO: 108065 - protein, 82 aa, Setaria italica
  Transcript Sequence Number=SeqID_42091
  Gene Ontology: Mol. function=hydrolase activity; Cellular component =mitochondrion
  Homolog annotation: Hit_ID=B6T675; Match level="QueryCoverage=100%, HitCoverage=32%, E-value=1e-36, Identity=86%"; Hit description =Peroxisomal coenzyme A diphosphatase NUDT7
LKDENRTSEEREKMGQAFTVHYFTYTKGNQKYLIWGLTARILIHAASVVYERPPDFPEGNAHFNLPKYTKDCSSMLAGLAKH

SEQ ID NO: 108066 - protein, 203 aa, Setaria italica
  Transcript Sequence Number=SeqID_42092
  Subcellular localization annotation: CTP_CleavageSite=57; ConfidenceScore=5.13e-01
RSLVGLSGRVFRSRSSRLAHPVAPARPQPLECAVLASHLRVWRPSGQGNPVSKTRARAAGAQAGRRPQQQRAHAMCTTWLQRPAATADEATCPLLAAAAAAARALRDETWASRAGAAANRKTAPDRARDGCLSLTRSCLGARSQDGEPPNYGMMMMDDGGRAGSTVSHDKSVRLPKCPNVPVPAPCTEHVPATSRNPGHAHVP

SEQ ID NO: 108067 - protein, 437 aa, Setaria italica
  misc_feature (78)..(78): Xaa can be any naturally occurring amino acid
  misc_feature (228)..(228): Xaa can be any naturally occurring amino acid
  misc_feature (314)..(314): Xaa can be any naturally occurring amino acid
  Transcript Sequence Number=SeqID_42093
  Gene Ontology: Mol. function=RNA binding
  Homolog annotation: Hit_ID=Q84ZX0; Match level="QueryCoverage=85%, HitCoverage=93%, E-value=7e-47, Identity=31%"; Hit description=HEN4
  Pfam annotation: Domain name=KH_1; Domain location=146-213; Score =68.0; E_value=3.5e-17; Accession=PF00013.21; Description=KH domain
  Pfam annotation: Domain name=KH_1; Domain location=364-426; Score =51.6; E_value=3.1e-12; Accession=PF00013.21; Description=KH domain
  Pfam annotation: Domain name=KH_1; Domain location=62-134; Score =43.2; E_value=1.1e-09; Accession=PF00013.21; Description=KH domain
  Pfam module annotation: Pfam domain module=KH_1::KH_1::KH_1; Domain location=146-213::364-426::62-134
TSNIPMSRPFGPPVSVTGCPPGMDPHSQRNYLPPHIPDYHTRNYPSNAGAPGPRFLFEQEIVFRMIILNEMVGSIIGXGGSTIRALQSETGASIKILEPVADSEERIVSISARENSDMMHSPAQDAVVRVYSRISESSIDRNSPTPARLLVPSQHIGCLLGKGGSIITEMRKLTGASIRIFGNEQIPRCAQRNDEMVQVTGSFQSIHDALLHITGRIRDVIIPKPHPXSGGMPPYPPAGNISLHQPRQEPPPQHPHHSGSMPPYPMHSFRPDAPMGPFETGGHRPPPAHSMEHMGADRMPYSYGCEQGGPRPFXEQPSPRSWASEAPNTNSEAPRNMPDAVRSKDFRKGPVAGENQVATPTSTTTEVAIPCKYIGFVCGTNGSDIAEIKKMSGASITVHDPKPGDANSTIVIVGDPEQTKKAQSLIHAFIFCGLCQT

SEQ ID NO: 108068 - protein, 489 aa, Setaria italica
  Transcript Sequence Number=SeqID_42094
  Gene Ontology: Cellular component=nucleoplasm; Biological process =anaphase-promoting complex-dependent proteasomal ubiquitin-dependent protein catabolic process
  Homolog annotation: Hit_ID=Q9FFF9; Match level="QueryCoverage=93%, HitCoverage=26%, E-value=1e-137, Identity=54%"; Hit description =Meiotic check point regulator-like protein
  Pfam annotation: Domain name=PC_rep; Domain location=229-262; Score =13.0; E_value=0.23; Accession=PF01851.14; Description=Proteasomecyclo some repeat
  Pfam annotation: Domain name=PC_rep; Domain location=300-332; Score =4.3; E_value=3.6; Accession=PF01851.14; Description=Proteasomecycloso me repeat
  Pfam annotation: Domain name=PC_rep; Domain location=400-434; Score =26.5; E_value=0.00011; Accession=PF01851.14; Description =Proteasomecyclosome repeat
  Pfam module annotation: Pfam domain module=PC_rep::PC_rep::PC_rep; Domain location=229-262::300-332::400-434
  Subcellular localization annotation: CTP_CleavageSite=42; ConfidenceScore=5.14e-01
QQHKLWNFAQRTTALPFGRGAFTLATTYTLLTEVLVFPKLVLAGRLPAQQNATVNLDLSNRSVSEFKSWAEFHNGVAAGLRLAPFQEKMLRTWIQYNRPSEPNFTHAGLLLAFGLHEHLRVLNWPDAYYSLSQEHDITTLGLLLGLAASHRGTMDPAISKMLYFHVPSRHPSSTPELELPTLLQSAAVMGIGLLYEGSAHALTMKILLGEIGRRSGGDNVLEREGYAVAAGSALGFVALGHGSDAFGFMDTFLDRLFEYIGSKEVYHEKHLNATTADDQSGNTGQMMDGAQINVDVTAPGAIIALALIFLKAESEEIAARLSIPNTYFDLQYVRPDFVMLRIIARNLILWSRIQPTKEWIDSQIPETVKSGVSNMSEGAIDIDEFDAEALFQAYVNIVTGACIALGLKYAGSRNGDAQELLYAYAAHFLNEIKHIPVRTANILPKGLLQYVDRGTLELCLHLIVLSLSLVMAGSGNLQTFRLLRYLRGR

SEQ ID NO: 108069 - protein, 44 aa, Setaria italica
  misc_feature (28)..(28): Xaa can be any naturally occurring amino acid
  Transcript Sequence Number=SeqID_42095
LSVLRLPLVGFFNLLLLLQKSKANQRVXKLYVLLPKSYFYSSTK

SEQ ID NO: 108070 - protein, 145 aa, Setaria italica
  misc_feature (26)..(26): Xaa can be any naturally occurring amino acid
  misc_feature (70)..(70): Xaa can be any naturally occurring amino acid
  misc_feature (92)..(92): Xaa can be any naturally occurring amino acid
  misc_feature (99)..(99): Xaa can be any naturally occurring amino acid
  Transcript Sequence Number=SeqID_42096
  Homolog annotation: Hit_ID=Q6ZIP5; Match level="QueryCoverage=97%, HitCoverage=17%, E-value=9e-39, Identity=53%"; Hit description =Pentatricopeptide (PPR) repeat-containing protein-like protein
MEIKKKNPGYSWIEAGKEFRLFHAGXVPLDVREEITGFLEELVSEMRKRGYVPDTSSVMHDLDEHEKGAXNLFLHSERLAVAFGILKSPPGXSVIRIVXKNLRVCGDCHTVMKFISEISQRKIIVRDASRFHHFEGGKCSCSEFW

SEQ ID NO: 108071 - protein, 122 aa, Setaria italica
  Transcript Sequence Number=SeqID_42097
  Subcellular localization annotation: CTP_CleavageSite=33; ConfidenceScore=5.20e-01
HDMQLIGHPPRLLDATAARSYTNSFTSMTTNATAANSSSLDESKLTMQFCTDRKLHCLPGLFELCYCCENQLPDQQRCFLTPEECKANCPYCTPKCPSCTLEARKTRGISLPSYFTLHVLTE
